United States Patent Application Publication US 2018/0126003 A1 - sequence listing, part 38

SEQ ID NO: 63174 - DNA, 7880 bp, Artificial Sequence
  derived and/or modified sequence
atgggcgagaaagttagcgaggcccctgagccggtgcctagaggttgctctggacacgggtctcggacacccgcatctgctctggtcgccgcaagcagccccggtgccagttctgcagagagttcgagtggaagtgagactctgagcgaagagggagagcctgggggtttctcccgcgaacaccagccacctcctcctcctcccctaggcggtactctgggggctcgggcacccgcagcctgggcacccgcatcagtgcttctggagagaggtgtgctggctctcccaccccctctgcccggaggcgctgtaccccctgcaccaagagggagctcagcttcccaagaagagcaagatgaagagctggatcacattctcagccccccacctatgcctttccgtaagtgtagtaatccagacgtggcctctgggcctggcaagtcactgaaatacaaaagacaactctcagaagatgggcgtcagctcaggcgtggtagtctcggtggggctctgactggcaggtatctgctccccaatccagttgccggacaagcttggcctgcaagtgcagaaacgtctaatttagtaagaatgagaagtcaagcattgggtcagagtgccccatccctcactgctagtctaaaggagctgtccctgcccaggcgtgggtccttctgccgcaccagcaaccgcaaatcactcattgggaacgggcaatcacccgctttgccgcgaccccatagcccgctatccgcgcacgctggaaactccccacaggatagcccccgtaatttcagcccttctgcttccgcccactttagtttcgctcgctctctgaatagaacggacggtaggagatggagcttggctagtctgccatcctccgggtatggtactaacaccccatccagtaccgtttctagctcttgctcctcccaggagaaactccatcagctcccctaccagcctactcctgatgaactgcactttctgagtaaacacttctgtaccacggagtccatcgcaaccgaaaacaggtgtcggaatacccctatgcgccctcgctccagatcactctcccccggaagatctccagcttgctgtgatcacgagattatcatgatgaatcatgtctacaaagagagatttccaaaagcaacggcccagatggaagagcggctaaaggagatcattacctcgtacagccccgataatgtgctgcctctcgcagatggcgtgctgagctttactcatcaccagatcatcgagcttgccagggattgcttggataagtcacaccagggattgatcacaagccgatattttctggagctccagcataaactcgataaactcctccaggaagcacacgacaggtccgaatccggagagctggctttcataaagcagctggtacggaaaatcctgatcgtgatcgccaggcctgccagactgcttgaatgcctggagtttgaccctgaagagttctactacctactcgaagcagccgaaggtcacgctaaggagggccagggaatcaagacagacattccgcgatatataatatcccagcttggcctgaataaagaccccttagaagaaatggcacacctgggcaattacgactccgggacggccgaaactcctgagacagacgaatcagtgagcagttcgaacgcatcacttaaactgaggcggaaacctcgggaaagcgacttcgaaactatcaaattaatatccaacggggcatacggcgcagtctacttcgtgaggcataaagaatcgcgacagaggtttgccatgaaaaaaattaacaaacagaatctcatcctgagaaatcagatccagcaagctttcgtcgaaagggacatattaaccttcgctgagaatccgttcgtagtctccatgtactgctctttcgagactaggcgacatttatgcatggtgatggagtacgtggaaggaggtgactgcgctacacttatgaaaaatatgggccctctgccggtggatatggcccgtatgtactttgctgagacagtgctggcgctggaatacttgcacaactatggaatagtccaccgggatctgaagcccgataacttgctggttacaagcatggggcacataaagctgaccgacttcggcttgtcaaaagtagggttgatgagcatgaccactaatttgtatgagggacacattgagaaggacgccagagagtttctggataagcaggtttgcggaacaccggagtacattgccccagaagtgatactgcgacagggttatggtaaacccgtcgactggtgggcgatgggcattattctttatgaattcctcgtcggttgcgtgccgttcttcggagatacacctgaagaactctttggacaggtgatatcagacgaaatcaactggcccgagaaagacgaagcaccccctcccgatgcacaggacttaatcactctcctcctcagacagaaccctctcgaacgcttaggaaccgggggagcgtacgaggtcaagcagcaccgctttttcaggagcctggactggaacagcttgcttagacaaaaggccgagtttattccacagctggagagcgaggatgataccagctactttgatacccggagcgagaagtaccaccacatggagactgaagaagaagatgacaccaatgacgaagactttaacgtggagatcaggcagtttagctcttgttcccatcgcttttcgaaagtgttttcttcaatcgataggattacacaaaatagcgccgaggagaaggaggattctgtggataagacaaaatccaccaccttacccagcaccgagacccttagctggtcaagtgaatattcagaaatgcagcagctgagcacctccaactcctccgatacagagtcgaaccgccacaaactgagttcgggacttctgcctaaactcgctatcagtacggagggagagcaagatgaggctgcctcttgtcccggtgatccccacgaagagccgggaaaaccggctttgccgcctgaagaatgcgctcaggaggagcccgaggtgactacacccgcttctaccataagctccagcactctcagcgttgggagtttctccgagcacctggaccagatcaatggacgttcggagtgcgtggattccacagacaactcctcgaaacccagcagcgagccagcatcgcatatggcacgccagcgcttggagagtacagagaaaaagaagatttcaggaaaggttacaaagtctctgagcgcttcagctctgagtctaatgattccgggagatatgttcgccgtgtcccccctaggatcacccatgtccccacattcccttagttctgatccttcgagttcgagggattcctccccaagcagagactccagcgccgctagtgcctccccccaccagccaatcgtaatccacagctccggaaagaattatgggtttacgatcagggcaattagagtgtacgttggcgacagtgacatctataccgtccaccacattgtctggaacgtggaagaaggatcccccgcatgccaagctgggctgaaggcaggtgatctgatcacccatattaacggtgagccagtccacgggttagtccacacggaggtaattgaacttctgctgaagtccggcaacaaagtgtcaataacaacgactccatttgagaatacctccattaagactggacccgcacggaggaactcttacaagtctcgcatggtgcgcaggtcgaagaagagcaagaaaaaagaaagtctggagagaagaagatctctgtttaagaaactggctaaacaaccatctccgttgctccacactagcaggagcttcagttgtctgaataggtctctcagttcaggcgagagcctccccggatcacccactcattcactgtcacctaggagccccactcctagctatcgatccacccctgatttccctagcggtacaaattctagccaatcatcgtcaccgtcctctagcgccccaaacagccctgccggttctggtcatatccgcccttccacactgcacggtctcgctccgaaattagggggacagagatatcgcagtgggagaagaaagtcagccggtaacatcccactgagcccactggcccgaacgccttcacccaccccgcagccaactagcccccagaggtctccttcccccctgctggggcattccctaggtaacagcaagatagcccaggcatttccctccaagatgcactctcctccgaccatcgtgcgccatatcgtgcggcctaaatccgctgagccaccaaggagcccactgctgaaaagggtgcaaagcgaagagaagttgtcacctagttatggaagcgataaaaaacacctgtgctcacggaaacatagcttggaagttacacaagaggaggtgcaaagggagcaatctcagcgggaagcacccctccagtctctggacgagaatgtttgtgatgttcccccattgagtagggccagacccgttgagcaaggatgcctgaagaggccggtaagtcggaaggttggaaggcaggaatccgtggatgatctggacagggataagctcaaggcgaaagtggtagtgaaaaaggccgatggcttccccgaaaagcaggaatcgcatcaaaaaagtcatggccctgggtcagacctcgagaattttgcactcttcaagctcgaggagagggaaaaaaaggtgtacccaaaagcggtggaacgtagtagtacctttgagaacaaagcctctatgcaggaggccccaccactgggttccctgctgaaagacgcacttcataaacaggcgtcagttcgggctagcgagggagcaatgtccgatggccgagtgcctgctgagcatagacagggaggtggtgactttcgcagagccccagctcccggtactttgcaagacggcctttgccactccctggaccggggaataagtgggaagggcgaggggacagagaagtcttctcaggccaaagaactgttaagatgcgagaagctggattcgaaactcgcaaacatcgactacctgcgtaagaagatgtcccttgaagataaggaggacaatctgtgccccgtattaaaacctaaaatgacggcgggatcgcacgaatgcctcccgggaaacccagtacgcccaaccggcggacagcaggaacctccccctgcgagtgaatctagggcctttgttagtagtacacacgcagcacaaatgagtgctgtgtccttcgtaccattgaaagccctgaccggtagagtcgattctggcactgaaaagcctggccttgtcgccccagaaagccccgtgcgtaaatctccttccgagtataagctcgagggacgatccgttagctgcctcaaacccattgagggcaccttggacatcgccctgctttctggaccccaagccagcaagaccgaactgccctcacctgaatcagctcagtccccctcgccttccggtgatgtgcgagcatccgtcccacctgtgctgccctcttcatcgggaaagaagaatgacactacctctgcgagagaactttctccatcttccctaaaaatgaacaagtcttacctgctagagccttggtttctgcccccttctagaggcctccagaacagccctgctgtgtctttgccagatccagagttcaaacgggacaggaaagggcctcaccccaccgccaggtcgcccggaaccgtaatggaatcaaaccctcaacagagagaaggcagctctcctaagcaccaggatcataccaccgacccaaagctgctgacctgtctgggacagaatctgcattccccagacctggctagacccagatgccccctgccgccagaagcaagcccaagcagggaaaaacccggactgcgcgagtcttccgaaaggggaccccctacagcccgaagcgagcgctctgccgctagggcagatacatgtcgcgaaccatctatggagctgtgcttccctgagaccgccaaaacctccgataactctaagaacctcctctccgtgggccgtacccacccagatttctatactcagacacaggctatggagaaggcctgggcgccaggtgggaagactaaccacaaggatggaccaggggaagcgaggccgccacctagagacaactcctcactgcactccgccggaatcccatgcgagaaagaactgggcaaagtccgacgcggagtcgagcctaagccggaggcactcctggccaggcgttctctgcagcccccagggattgaatccgagaagtccgagaagttatccagtttcccctccctccagaaagacggcgctaaggaacctgagcgaaaagagcagcctctgcaaaggcatccttcctccataccccctccgcctctcactgcgaaggaccttagctccccggctgcgagacaacattgctcaagtccaagtcacgccagtggcagagaacccggagccaaaccgtccactgcggagccttctagttctccacaagaccccccaaaaccagttgccgcacattcggagtcctccagtcacaagccacgccctggccctgatccgggtcctccaaaaacaaagcatcctgacagaagtctgtcatctcagaagccatctgtcggcgcaaccaagggaaaggagccagccactcagtctctgggtgggagctcacgcgagggaaaaggacacagcaagagtgggcctgacgtgttcccagccactcctgggtcccagaacaaggcgtcagacggcattggccaaggagaagggggacccagtgttcctctgcatactgacagggccccactggacgctaagccccagcctacgagcggagggaggccactagaggtgctggaaaaacctgtgcacctgcctcggcctggacatccgggaccctccgaacccgctgaccagaagctgagcgctgtcggcgagaagcagacactgagtcccaagcatcctaagcctagcacagtcaaggattgccctactttgtgtaagcagaccgataaccggcagactgacaaatcccccagccagccagcagcaaatacggatcgaagggccgaaggcaaaaagtgtaccgaagccctgtatgcccctgccgagggcgataaactagaggcgggactgtcctttgtacattccgagaatcgccttaagggagccgagcgacctgccgctggagttggcaagggctttccggaggcacggggtaaggggcctggaccccagaagcccccaaccgaagccgacaagccgaatggaatgaagagatccccatccgctaccggccagtcctctttcagaagtaccgctctgccggagaaatcactgtcctgctcatcctcttttccagaaaccagggccggtgtacgggaggcgagcgctgcaagctcagacacttcatccgccaaagccgcagggggtatgttggagctgccagcaccctcaaacagggaccacagaaaagctcaacctgcaggtgagggacgaacacacatgactaagagtgactcattgcccagcttcagagtgagcaccctgcccctagagtcccaccatccggacccaaacaccatgggaggcgcttcccatcgtgaccgggcactttctgtcacggcaactgtcggcgagactaaaggtaaggaccccgctcccgctcaaccccctcccgctcgtaagcagaacgtggggcgtgatgtgacaaagccaagcccggctcctaacaccgacaggcctatttccttgagtaacgaaaaagattttgtggttcgacagcggcgagggaaagagagcctgcgaagctcaccacataagaaggcccttta

SEQ ID NO: 63175 - DNA, 7871 bp, Artificial Sequence
  derived and/or modified sequence
atgggggaaaaggtgtcggaggccccagagccagtcccacggggttgctccggccacggaagtagaaccccggcaagcgccctcgtggctgcttcttcacctggcgcatcaagtgccgagagctcatccggcagcgagactttgtccgaggagggagagcccggagggttctctagggaacatcaacctccgcctcctccaccccttgggggaactctcggggctagagcccctgctgcctgggctcccgcatccgtcctcctggagaggggcgtcttggccctcccaccgccactccccggtggcgctgtgccacccgctccacgagggtctagtgccagtcaggaggaacaggatgaggaactggaccacattctcagccccccacctatgccttttcgcaagtgttccaatccagacgtggcatccggaccaggcaagagcctgaagtacaagaggcagctcagcgaggacgggaggcagctccggaggggttccttgggaggtgctctcacaggcaggtaccttcttcctaacccagtagcaggacaggcatggcctgcctccgcagagacttctaacctcgtacgcatgagatcccaagctttggggcagtctgctccaagcctaaccgcgagtctgaaggagctgagcttgccacgcaggggctccttttgccggacctccaatcgaaagtcccttatcgggaacggtcagtcaccagccctaccccgaccccactccccgctgagtgctcatgccggtaattctccccaggacagtccacgaaacttcagtccctctgcatccgctcatttcagctttgctcgcagaactgatggccgtcggtggagcctcgcaagtctgccttcatcaggttacgggaccaacaccccatctagcactgttagcagctcctgttctagtcaggagaagttacaccagctcccttatcagcctacccctgatgagctgcacttccttagcaaacatttctgtacaaccgagagcatagccaccgagaatcgatgtcgcaacactccaatgagaccgagatcccgctcactctctcccggacgaagtccagcctgctgtgaccacgagatcatcatgatgaaccatgtgtataaggaaaggttcccaaaagcgaccgcccagatggaggagcgtttgaaggagattatcacatcgtattcacctgacaatgtgctgccattggctgatggcgtcttatcattcactcaccatcagataatcgaactcgctcgcgactgcctggacaaatcacaccaaggtctgatcacttctaggtatttcctggagctgcaacataaactggacaagctcctccaggaagcccatgaccggtccgagtctggggagttagctttcatcaagcagctggtgagaaaaattctgatagtgatcgctcggcctgccagactattggagtgcctcgagttcgaccctgaggaattctactatctactcgaagccgctgagggacacgcgaaggagggacagggtatcaagactgacatccctcgctatattatttcacagctggggctgaataaggacccactggaggaaatggctcatctggggaactacgattccggtacggctgagacaccagagacggatgagagcgtctcctctagtaatgcttcattgaaactgcgccgaaaaccgagggaatccgattttgagacaatcaagctgatctcgaacggtgcctatggtgccgtatacttcgttagacacaaggagtctcgacaacgtttcgcaatgaagaagattaataaacaaaacctaatcctgcgaaatcagattcaacaagcttttgtagaaagagacattctgactttcgctgagaacccatttgtcgtatccatgtattgctcgttcgagacacgccgacatctctgcatggtcatggaatatgtggaaggaggcgactgtgccacactgatgaagaatatgggacctctgcctgtggatatggcacggatgtattttgcggaaacagttttagccctggaatacctgcataactatgggatcgtccatagggatctaaaaccagacaacctgttggtgacgagcatgggtcacataaaactgactgattttggacttagcaaggttggactcatgagcatgaccacaaacctctacgaaggccatatcgagaaggatgccagggaattccttgataaacaagtctgtggaacccctgagtatattgcaccagaggtgatattgagacagggctatggaaaacctgtggactggtgggcaatgggcattatcctctacgagttcctagtaggttgtgtgccctttttcggcgacacccctgaagaactctttggacaggtgatttccgacgagattaattggcctgaaaaagacgaagctccccctcccgacgctcaagatttgataaccttacttctgaggcaaaatcctctggagagactcggaactggcggtgcctatgaggttaagcaacatcggttttttcggtctctggactggaattcacttttgcgtcagaaggctgagttcattccacagcttgaatccgaggacgatacgagctacttcgatacaaggtcagagaagtatcatcacatggaaactgaagaggaagatgatacgaatgatgaggacttcaacgttgaaattcgccagttcagcagctgttcacataggttctcaaaagtgttcagctcaattgataggataacccagaatagcgcggaagaaaaggaagactctgtggacaagacgaagtctactaccttgccttccactgaaacactctcttggagctcagagtacagcgaaatgcagcagctaagtacatccaattcttccgacaccgaatctaaccgtcacaaattaagcagcggactgctgccgaaactcgccatctccactgagggcgagcaagatgaggctgccagctgtcccggagatccccacgaggagcccggaaaaccagccctacccccagaagagtgtgcccaggaagagcctgaggtaaccacccccgcaagcaccatctcctcaagcaccctaagcgtgggctccttttcggagcaccttgaccagattaacgggcgttctgaatgcgtggactcaacagataacagcagtaagccttctagtgagccagcgagccatatggccagacagcggctcgagagcacggagaagaagaaaattagcggtaaggtgacaaaaagtctttctgcatcggctctcagcctgatgattccaggtgacatgttcgctgtgagccccctgggatcaccgatgtcaccccactccctgtcatccgatcctagctcatcacgggactcttcccctagccgagacagtagcgccgctagtgccagtccccaccagcctatcgtgatccattcttctgggaagaactatggctttaccatccgggcaattcgcgtgtacgtgggcgacagtgacatctataccgtgcatcatatagtatggaacgtagaggagggatctcctgcctgccaagcgggtctcaaagcaggcgatctcattactcacataaacggagaaccagtgcacggcctggtacataccgaggtgatcgagctgctgttgaaatctggaaacaaggtgtccattactaccaccccctttgagaataccagtataaaaacagggccagcccgtcgaaattcttataagtctcggatggtacgtagatctaagaagagtaaaaaaaaggagagcctggagagacgaaggagcctgtttaaaaagctggcgaaacagccttctcccttgctgcacacctctcgctccttttcgtgccttaacagaagcctgagctctggagaatccctgccgggatccccaactcacagcctatcccctcgatctcccaccccttcctacaggagtaccccggattttcccagcgggacaaattcatcacaatcttccagtcctagctcttctgcccctaactcacccgctggctctggccacattcggccaagtacattgcacggcttagcacctaaactgggaggccagaggtatcggagcggcagaagaaagtccgcaggtaacattcccctctctccattagctcgtacccccagtccaacaccacagccgacctcaccccagcggtcccctagtccgctgctgggccactcactggggaatagcaagattgcgcaggcgttcccaagtaagatgcacagtccccctacaattgtgagacatattgtgcgacctaagtcggctgagcctcccaggtcaccccttctgaaacgagtgcagtcagaagaaaagctcagtccaagctacggaagcgacaagaaacacctctgcagtcggaagcactctctggaggttacccaggaagaggtccaacgggaacaatcccagcgggaggcaccccttcagtctcttgatgaaaacgtctgtgatgttccacccctctcaagagcaagaccagtggaacagggatgtctcaagcgacccgtcagcagaaaagtaggaaggcaggaatcagtggatgatctcgaccgggataaactcaaagctaaagtcgtcgtcaaaaaggctgatgggttcccagaaaagcaggagagccaccagaaatctcatggccctggcagcgacctggaaaattttgccctattcaaacttgaggaacgagaaaaaaaggtatacccaaaagccgtggagcgttcctccacattcgaaaataaggccagcatgcaggaagctccccctctcggctcactgctcaaggacgcccttcacaaacaggccagtgtacgggcatccgagggcgcaatgtcagacggcagggtgcctgcagaacatcggcagggaggcggagactttcgcagggcccctgcccctgggaccctgcaggatgggctctgtcactcgctagaccggggaatttcggggaagggggaggggaccgaaaagtcaagccaggcaaaagaactgctgcgttgcgaaaagctggattcaaaactggcgaacattgactatttgcggaaaaagatgtcgctggaagacaaagaagataacctgtgtccagtgctgaaacctaaaatgactgccggatcccacgaatgtttaccgggaaacccagttcggccaactggcggtcagcaagagcccccacctgcatcagagagcagggccttcgtgtcatcaacccatgctgcccagatgagcgccgtgagcttcgtccccctcaaggctttaacaggcagggtcgattctggtacggaaaagccagggcttgtggcgccagaaagccccgtgcgcaagtcaccttccgagtacaagttggagggcagaagtgtctcctgccttaaaccaatcgaggggacgttagatatagcactgctgtctgggcctcaggcgtccaaaactgaattgccatcccccgagagtgcgcagtcaccatcaccgagcggcgatgtccgagcgtccgtcccacccgtcctgccttcctcatccggcaaaaaaaatgacacaacgtcagcacgcgagctaagcccctcaagcctcaagatgaacaagtcttacctgttggagccttggtttctgcctccaagcaggggcctccagaactctcctgctgtttccctgccggatcctgaattcaagagagaccgcaaaggccctcatcccacagctaggtcgccgggtacggtcatggaatcaaatccacagcagagggagggtagttcccccaaacatcaggatcacactactgatccaaagttgttaacgtgtctcgggcaaaatctacattccccggacttggcgagacctcggtgtcccctaccccctgaagcctccccgagtcgagaaaaacctggtctacgggagtcatcagaacggggtcccccaacagctcgcagtgagcggagcgcagcgagggctgatacttgtcgtgaaccctcaatggagttgtgcttcccagaaacagccaaaacatcagataattccaaaaacctgcttagcgtggggagaacgcacccagacttttatacgcaaacccaggctatggagaaggcgtgggcccctggcggaaaaaccaaccataaagatggcccaggcgaggcacggccaccgccacgtgataacagttcactccatagtgcagggatcccttgtgaaaaagagttaggaaaggttcggagaggagtggaacctaaaccagaagctctgctggcccgacgatcccttcagcctccaggtattgaaagtgaaaaaagcgagaagctttctagctttcctagcctccagaaagatggcgctaaggaaccagagaggaaggaacagccactgcaaagacaccctagcagcatcccaccgcctccacttacagctaaggacctttcgagccccgctgccaggcagcactgttcctcaccttcacacgcctcaggacgcgaacccggagctaaaccgtctacagcagagccctcctctagccctcaggaccctccaaagcccgtggctgcccactccgagtctagttcgcataagcctcgaccgggtccagacccgggtccaccgaaaacaaaacaccccgacagaagcctgagctcacagaagccgtccgtaggtgcaaccaaaggcaaagaacccgctacacaatcacttggcggatcctcccgggagggaaaaggccacagtaagagcggcccagacgtgttccccgcaacacccggatctcagaacaaggcctctgatggtattggccagggtgaggggggaccctcagttccccttcacaccgacagagcgcctctggacgctaagccccagcctactagcgggggacggccattggaggtgctggaaaagcctgtccacttgccacggcctggacaccctggtccttccgagcctgcggaccaaaaattatctgctgtgggtgagaaacagaccttatccccgaaacaccccaaaccttctacagtgaaggactgcccaacactctgtaaacagaccgacaacaggcagacggataagtcccccagtcagccagctgctaatactgatagacgagctgaaggcaaaaagtgcaccgaggctctgtatgcaccagcagaaggcgataaacttgaagcaggcctgagtttcgttcattcagaaaaccgtttgaagggagccgaacgcccagccgctggcgtgggcaagggttttccagaagcacgcggaaaaggccctgggccacagaagcctcccaccgaggccgacaaacccaatgggatgaaacggtcaccctctgccaccggacaatcatcatttcgctctactgcactcccggaaaagtcactctcttgcagctcatcatttccagagacacgcgctggcgtacgagaagctagtgcggcatcttctgacacatcgtctgcaaaagccgctggcggaatgttggagctgcctgctccttcaaacagagatcataggaaggctcagcccgcaggcgagggtaggacccatatgactaagagcgatagccttccctcgtttcgcgtttctacgctgcctctagagtcccaccacccagacccaaacaccatggggggagcctcacatcgcgatcgggctctgagcgtgactgctaccgtgggagaaaccaaaggtaaggacccagctcccgctcagcccccacctgccagaaagcagaatgttgggagggacgtgactaagcctagcccagccccaaatacagatcggcctatatccctgtctaatgaaaaagatttcgttgttaggcagaggagaggcaaagagagcctgcggagctccccacataaaaaggcactata

SEQ ID NO: 63176 - protein, 1950 aa, Artificial Sequence
  derived and/or modified sequence
MPGARRRRRGAAMEGKPRAGVALAPGPSGRRPSARCARRRRPGLLLPGLWLLLLARPASCAPDELSPEQHNLSLYSMELVLKKSTGHSAAQVALTETAPGSQHSSPLHVTAPPSATTFDTAFFNQGKQTKSTADPSIFVATYVSVTSKEVAVNDDEMDNFLPDTHWTTPRMVSPIQYITVSPPGLPREALEPMLTPSLPMVSLQDEEVTSGWQNTTRQPAAYAESASHFHTFRSAFRTSEGIVPTPGRNLVLYPTDAYSHLSSRTLPEIVASLTEGVETTLFLSSRSLMPQPLGDGITIPLPSLGEVSQPPEEVWATSADRYTDVTTVLSQSLEETISPRTYPTVTASHAALAFSRTHSPLLSTPLAFASSASPTDVSSNPFLPSDSSKTSELHSNSALPGPVDNTHILSPVSSFRPYTWCAACTVPSPQQVLATSLMEKDVGSGDGAETLCMTVLEESSISLMSSVVADFSEFEEDPQVFNTLFPSRPIVPLSSRSMEISETSVGISAEVDMSSVTTTQVPPAHGRLSVPASLDPTAGSLSVAETQVTPSSVTTAFFSVITSILLDSSFSVIANKNTPSLAVRDPSVFTPYSLVPSVESSLFSDQERSSFSEHKPRGALDFASSFFSTPPLELSGSISSPSEAPASLSLMPSDLSPFTSQSFSPLVETFTLFDSSDLQSSQLSLPSSTNLEFSQLQPSSELPLNTIMLLPSRSEVSPWSSFPSDSLEFVEASTVSLTDSEAHFTSAFIETTSYLESSLISHESAVTALVPPGSESFDILTAGIQATSPLTTVHTTPILTESSLFSTLTPPDDQISALDGHVSVLASFSKAIPTGTVLITDAYLPSGSSFVSEATPFPLPTELTVVGPSLTPTEVPLNTSTEVSTTSTGAATGGPLDSTLMGDAASQSPPESSAAPPLPSLRPVTAFTLEATVDTPTLATAKPPYVCDITVPDAYLITTVLARRAVQEYIITAIKEVLRIHFNRAVELKVYELFTDFTFLVTSGPFVYTAISVINVLINSKLVRDQTPLILSVKPSFLVPESRFQVQTVLQFVPPSVDTGFCNFTQRIEKGLMTALFEVRKHHQGTYNLTVQILNITISSSRVTPRRGPVNIIFAVKSTQGFLNGSEVSELLRNLSVVEFSFYLGYPVLQIAEPFQYPQLNLSQLLKSSWVRTVLLGVMEKQLQNEVFQAEMERKLAQLLSEVSTRRRMWRRATVAAGNSVVQVVNVSRLEGDDNPVQLIYFVEDQDGERLSAVKSSDLINKMDLQRAAIILGYRIQGVIAQPVDRVKRPSPESQSNNLWVIVGVVIPVLVVMVIVVILYWKLCRTDKLDFQPDTVANIQQRQKLQIPSVKGFDFAKQHLGQHNKDDILIIHEPAPLPGPLKDHTTPSENGDVPSPKSKIPSKNVRHRGRVSPSDADSTVSEESSERDAGDKTPGAVNDGRSHRAPQSGPPLPSSGNEQHSSASIFEHVDRISRPPEASRRVPSKIQLIAMQPIPAPPVQRPSPADRVAESNKINKEIQTALRHKSEIEHHRNKIRLRAKRRGHYEFPVVDDLSSGDTKERHRVYRRAQMQIDKILDPTASVPSVFIEPRKSSRIKRSPKPRRKHQVNGCPADAEKDRLITTDSDGTYRRPPGVHNSAYIGCPSDPDLPADVQTPSSVELGRYPALPFPASQYIPPQPSIEEARQTMHSLLDDAFALVAPSSQPASTAGVGPGVPPGLPANSTPSQEERRATQWGSFYSPAQTANNPCSRYEDYGMTPPTGPLPRPGFGPGLLQSTELVPPDPQQPQASAEAPFAARGIYSEEMPSVARPRPVGGTTGSQIQHLTQVGIASRIGAQPVEIPPSRGSQYGGPGWPSYGEDEAGRREATHMLGHQEYSSSPLFQVPRTSGREPSAPSGNLPHRGLQGPGLGYPTSSTEDLQPGHSSASLIKAIREELLRLSQKQSTVQNFHS

SEQ ID NO: 63177 - DNA, 5853 bp, Artificial Sequence
  derived and/or modified sequence
atgccgggggcacgcagacgccgccggggagcagcaatggagggcaaaccaagggcgggagtagctctggctcccggaccatccggcagacgcccctcagctagatgcgctagacgacgaaggccgggactattgctgcccggactgtggttgctcttactggcgaggccagccagctgtgctcctgacgagctgtccccagaacaacataatctgtccttgtacagtatggaactcgtacttaaaaaatcaacaggtcatagcgctgcccaggtggctctcacagaaacagcccccggttcacagcacagctcacccttacatgtgaccgcacctcctagcgctacaactttcgacaccgctttctttaatcaagggaagcagacaaaatccacggcggacccttccatctttgttgccacgtatgtaagcgttacatccaaggaagtggcagtgaatgacgatgagatggataactttttgcctgacacacactggaccacacctagaatggtgagccccattcaatacataaccgtgtccccccccggtctcccccgcgaggcacttgagccaatgctgaccccatccttgcccatggtgagtctgcaagacgaagaggtaacctcagggtggcaaaacacaacaagacagcccgctgcttacgcagagtccgcttcccacttccatacattccgctccgcttttcgtacttctgagggaatcgttccgaccccaggcagaaatctagtgctctaccccacagacgcgtattcccacctgtcgagccgtacgctcccggagatagtggcatcgctgaccgaaggagtggagacgacactgttcctgtctagccgctctctgatgcctcagccgctcggcgatggcatcactataccactccctagccttggagaggtgtctcagcctcccgaagaggtgtgggccaccagtgctgaccggtatactgatgtgacgaccgtcttgagccagtctctggaggaaacgatctcccctcgcacctatcctacagtgaccgcttcccatgctgccctggccttctcacgcacccatagccccctgttgtccacgccgttagcatttgcttctagcgcctctcccactgatgtttcgtctaacccgttcctgccctccgattcaagcaaaactagcgagctccactcaaactctgccctccccggcccggtggataacacccatatcctcagtccagtgtccagcttcaggccttacacatggtgtgctgcatgcacagtacccagtccacagcaagtattggccacaagtctgatggagaaagatgtgggctctggggatggggccgagaccctgtgcatgactgtgctggaggagagtagcatcagtctgatgtcaagcgtggttgccgatttcagcgaatttgaagaggacccgcaagtcttcaacaccttgttcccaagtaggcccatagtgcccctctctagcagatcaatggaaattagtgaaacaagcgtgggtatatcagcagaagtagacatgtccagtgtgaccacgacacaggtaccgccagcacacggccgtttaagtgtgcctgcatctctggacccaacagctggtagtcttagtgtcgcggaaactcaggtgaccccctcttctgtaacaaccgcgttttttagcgtaatcaccagtattctcctcgacagcagtttcagtgttatagccaataaaaacacaccgtcacttgccgtgcgagacccttcagtgttcacaccttacagtctcgtgccctctgtggagtcatcattatttagcgatcaggagaggtcctccttctccgagcataagcctaggggcgcccttgatttcgccagctcctttttttccacgccacccctcgagttgagcgggagcattagcagcccaagtgaagctccagctagtttatccctgatgccttcggatctgtccccttttaccagccaatcattttctccactcgtagaaacattcacattgtttgactctagcgatcttcaatctagtcaattgagcctgcctagcagtacaaatctagagttctctcagctccagccgtcttcagaactaccactgaatacaatcatgttgctacctagtagatcggaggtttctccgtggtcttcattcccttctgattccctcgagtttgtcgaagcttctaccgtttcactcactgactccgaagcccacttcacatctgcctttatcgaaaccacctcttacttagaatcaagcctcatctctcacgaaagcgcagtaaccgccctcgtaccgcccgggtctgagagcttcgatatcctcacagccggaattcaggccaccagtcccctaacaactgtccatactaccccaatcttaaccgagagctccctcttcagtacccttacacctcccgacgaccagatttcggcacttgatgggcacgtgagcgtccttgcgagtttctcaaaagccattcccacagggaccgtgcttatcactgatgcctatctaccttctggctctagcttcgtttctgaggcgaccccattccctctccccactgaactgaccgtggtgggcccgtccttaactcccacagaggtgccactcaacacctcgaccgaggtgagcacgaccagtaccggcgctgctacaggcggcccccttgattctactctgatgggagatgcagcgtcgcaatctcccccagaatcttctgccgctcctccactgccctcactgcgaccagtaactgcattcactctcgaggccaccgtggatactcctacactagccaccgcgaagccaccctatgtttgtgacattacagttcctgacgcgtacttaattaccaccgtgctcgctcgtagagctgtgcaggagtacatcataacagccataaaagaggttctccggattcactttaatagagcagtggaattgaaggtctacgagttatttaccgactttactttcctggtgactagcggcccattcgtctatacggctatatctgtaattaatgtgctgattaactcaaagttagtgagggaccagacccccctaatcctgtcggttaaaccttcttttctcgtccctgagtctaggttccaggttcagacggtcctgcagtttgttccgccgagcgtggacaccgggttctgcaactttactcaacggattgagaagggtcttatgaccgccctctttgaagtccgcaaacaccaccaagggacctataacttaacagtgcagatcttgaacatcaccattagctcctcccgagtgacaccccgccgaggtcctgttaatattatttttgctgtgaagtcaacacagggctttctcaatggttctgaggtgagtgagctgttaagaaacctgtcggtggtggaattttcattctacctggggtaccccgtcctgcagattgcagagccttttcagtatcctcaactgaatctaagtcaactgctaaagagttcctgggttagaacagtcctgttgggggtgatggaaaaacagcttcagaatgaagttttccaagccgagatggagcgcaagctggctcaactgctgtccgaggtaagtacgcggcgccgtatgtggaggcgcgctactgttgctgcaggaaattcagtggtgcaggtggtgaacgtttcaaggctggagggagacgacaatcccgtccagcttatttatttcgttgaagatcaggacggcgagcggctatctgccgtgaaatccagtgacttgattaacaaaatggacctgcagcgagctgcgatcatactaggataccggatccaaggggtgatcgcgcagccagtcgatagggttaagcgccccagtcccgagtcccaaagcaacaatttgtgggtcattgtcggagtggtgattcctgttctggtagttatggtcatcgtggtgattttgtattggaaactgtgcaggactgataagttagacttccagccagacacagtagccaacatccagcagagacagaagttgcaaattccaagtgtcaaaggcttcgacttcgctaaacaacaccttggtcagcacaacaaggacgacatactgatcatccacgagccagcccccctgccaggtcccttgaaggaccacacgaccccgagcgaaaatggggatgtaccctcacctaaaagcaaaataccaagcaagaacgtgcgacataggggacgagttagcccatcagatgccgattcaacagtgagcgaggaatcgagtgagcgagacgccggtgacaaaactcccggtgccgtaaacgatggcagaagccatcgcgccccgcaaagcggccccccactcccctcatccgggaacgagcaacattcatccgcctccatcttcgaacatgtggatagaattagtcggcctcccgaagcaagtaggagagtgccctcaaaaattcagctgattgctatgcagcctatcccagcgccgcctgtacagagaccatcccccgctgatcgggtggccgagagcaacaaaattaacaaggagatacagaccgccttgaggcataagtccgagatcgagcaccacaggaacaagattcgacttcgtgctaagcggagaggccattacgaattccctgtggtcgacgacttgtcgtcaggtgatacaaaggagaggcacagggtatataggcgtgcacagatgcagatagataaaattcttgacccgacagcgagcgttcccagtgtgttcattgagccaaggaagtcctccagaatcaagaggtcccccaagcctagacgcaaacaccaagttaatggttgccctgcagatgcagagaaggatcgtctgatcacaacggacagtgacgggacctaccgaagaccaccaggcgtacacaattctgcatatatcggatgcccctcagaccccgacctgcctgcagatgttcagactcccagcagcgtcgagctggggcgctatccagcgctacccttcccagcgtcacaatatatccctccacaacccagtatagaggaagcgcgccagaccatgcacagcctcctggacgacgcattcgctcttgtggccccttccagtcagcccgctagtaccgccggggttggacccggcgttccaccaggcctcccagcgaactccacacccagtcaagaagagaggagagcaacccaatggggcagcttttactctcctgctcaaacggcaaataatccctgctcgagatacgaagattacggcatgacgcccccaaccggcccactccctcggcctgggtttggccccgggcttcttcagtccaccgagctagtgccacctgatccccaacagccacaggcatctgcggaggcgccatttgcagcgcgaggcatctactcagaagagatgccaagtgtcgcccggcccaggccagtcgggggtacaacagggtcccagatccagcacctgactcaagtgggcattgcgtctagaatcggtgcccagcctgtggaaatccctccctcaaggggatctcagtacggcggtccaggatggccaagctacggagaggacgaggctggtaggcgagaggccactcatatgctcggccatcaggagtattcctcttcaccattatttcaagttcctcgaaccagcggacgggagcccagcgccccaagcggaaacctcccccacagagggttgcaaggtccaggcctgggctatcccaccagttccacggaggacctgcagcccggccattcttccgcctccctgattaaggcaattagagaagagctcctgcgactctcccaaaagcagagcacagtacagaatttccatagctag

SEQ ID NO: 63178 - DNA, 5853 bp, Artificial Sequence
  derived and/or modified sequence
atgcctggggccaggagaagaagaagaggagctgccatggagggcaagcccagggctggggtggccctggcccctggccccagcggccggcggcccagcgcccgctgtgccaggagaagaagacctggcctgctgctgcccggcctgtggctgctgctgctggcccggcctgccagctgtgccccagatgagctgagccctgagcagcacaacctgagcctgtacagcatggagctggtgctgaagaagagcacaggccacagcgctgcccaggtggccctgacagaaacagcccctggcagccagcacagcagccccctgcacgtgacagccccacccagcgccaccacctttgacacagccttcttcaaccagggcaagcagaccaagagcacagctgaccccagcatctttgtggccacctacgtgtctgtgaccagcaaggaggtggccgtgaatgatgatgagatggacaacttcctgcctgacacccactggaccacccccaggatggtgagccccatccagtacatcaccgtgagccccccaggcctgccccgggaggccctggagcccatgctgacccccagcctgcccatggtgtccctgcaggatgaggaggtgaccagcggctggcagaacaccacccggcagcctgctgcctatgcagagagcgccagccacttccacaccttccgcagcgccttccgcaccagcgagggcatcgtgcccaccccaggcaggaacctggtgctgtaccccacagatgcctacagccacctgagcagcaggaccctgcctgagatcgtggccagcctgacagagggcgtggagaccaccctcttcctgagcagccgcagcctgatgccccagcccctgggagatggcatcaccatccccctgcccagcctgggggaggtgtcccagcccccagaggaggtgtgggccaccagcgctgaccgctacacagatgtgaccaccgtgctgagccagagcctggaggagaccatcagccccaggacctaccccaccgtgacagccagccacgccgccctggccttcagcaggacccacagccccctgctgagcacccccctggcctttgccagcagcgccagccccacagatgtgagcagcaaccccttcctgcccagcgacagcagcaagaccagcgagctgcacagcaacagcgccctgcccggccctgtggacaacacccacatcctgagccctgtgagcagcttccggccctacacctggtgtgccgcctgcaccgtgcccagcccccagcaggtgctggccaccagcctgatggagaaggatgtgggcagcggagatggagctgagaccctgtgcatgacagtgctggaggagagcagcatcagcctgatgagctctgtggtggccgacttcagcgagtttgaggaggacccccaggtgttcaacaccctcttccccagccggcccatcgtgcccctgagcagccgctccatggagatcagcgagacctctgtgggcatctctgctgaggtggacatgagctctgtgaccaccacccaggtgcccccagcccacggccgcctgtctgtgcctgccagcctggaccccacagctggcagcctgtctgtggccgagacccaggtgacccccagctctgtgaccacagccttcttcagcgtcatcaccagcatcctgctggacagcagcttctctgtgattgccaacaagaacacccccagcctggccgtgcgggaccccagcgtcttcaccccctacagcctggtgcccagcgtggagagcagcctcttcagtgaccaggagaggagcagcttcagcgagcacaagcccaggggggccctggactttgccagcagcttcttcagcaccccacccctggagctgagcggcagcatcagcagccccagcgaggccccagccagcctgagcctgatgcccagcgacctgagccccttcaccagccagagcttcagccccctggtggagaccttcaccctgtttgacagcagtgacctgcagagcagccagctgagcctgcccagcagcaccaacctggagttcagccagctgcagcccagcagcgagctgcccctgaacaccatcatgctgctgcccagccgctctgaggtgagcccctggagcagcttccccagcgacagcctggagtttgtggaggccagcacagtgtccctgacagacagcgaggcccacttcaccagcgccttcatcgagaccaccagctacctggagagcagcctcatcagccatgagagcgctgtgacagccctggtgcccccaggcagcgagagctttgacatcctgacagctggcatccaggccaccagccccctgaccaccgtgcacaccacccccatcctgacagagagcagcctcttcagcaccctgaccccaccagatgaccagatcagcgccctggatggccacgtgtctgtgctggccagcttcagcaaggccatccccaccggcaccgtgctgatcacagatgcctacctgcccagcggcagcagctttgtgtctgaggccacccccttccccctgcccacagagctgactgtggtgggccccagcctgacccccacagaggtgcccctgaacaccagcacagaggtgtccaccaccagcactggagctgccaccggcggccccctggacagcaccctgatgggagatgctgccagccagagccccccagagagcagcgctgccccacccctgcccagcctgcggcctgtgacagccttcaccctggaggccaccgtggacacccccaccctggccacagccaagccaccctacgtgtgtgacatcaccgtgcctgatgcctacctgatcaccaccgtgctggccaggagagctgtgcaggagtacatcatcacagccatcaaggaggtgctgcgcatccacttcaacagagctgtggagctgaaggtgtatgagctgttcacagacttcaccttcctggtgaccagcggcccctttgtgtacacagccatcagcgtcatcaacgtgctgatcaacagcaagctggtgcgggaccagacccccctcatcctgtctgtgaagcccagcttcctggtgcctgagagccgcttccaggtgcagacagtgctgcagtttgtgccccccagcgtggacaccggcttctgcaacttcacccagagaattgagaagggcctgatgacagccctgtttgaggtgaggaagcaccaccagggcacctacaacctgactgtgcagatcctgaacatcaccatcagcagcagccgggtgaccccccggcggggccctgtgaacatcatctttgctgtgaagagcacccagggcttcctgaatggcagcgaggtgtctgagctgctgaggaacctgtctgtggtggagttctccttctacctgggctaccctgtgctgcagattgctgagcccttccagtacccccagctgaacctgagccagctgctgaagagctcctgggtgaggacagtgctgctgggcgtgatggagaagcagctgcagaatgaggtgttccaggccgagatggagaggaagctggcccagctgctgtctgaggtgtccaccaggaggaggatgtggaggcgggccaccgtggccgccggcaacagcgtggtgcaggtggtgaatgtgtcccggctggagggagatgacaaccctgtgcagctgatctactttgtggaggaccaggatggagagcggctgtctgctgtgaagagcagtgacctgatcaacaagatggacctgcagagagctgccatcatcctgggctaccgcatccagggcgtcatcgcccagcctgtggacagagtgaagaggcccagccctgagagccagagcaacaacctgtgggtgattgtgggcgtggtgattcctgtgctggtggtgatggtgattgtggtgatcctgtactggaagctgtgcaggacagacaagctggacttccagcctgacacagtggccaacatccagcagaggcagaagctgcagatccccagcgtgaagggctttgattttgccaagcagcacctgggccagcacaacaaggatgacatcctgatcatccacgagcccgcccccctgcccggccccctgaaggaccacaccacccccagtgaaaatggagatgtgcccagccccaagagcaagatccccagcaagaatgtgcgccaccggggccgggtgagccccagtgatgctgacagcacagtgtctgaggagagcagcgagagagatgctggggacaagaccccaggagctgtgaatgatggccgcagccaccgggccccccagagcggcccccccctgcccagcagtggaaatgagcagcacagcagcgccagcatctttgagcacgtggaccgcatcagcaggcctcctgaggccagccggcgggtgcccagcaagatccagctgattgccatgcagcccatcccagcccctcctgtgcagaggcccagccctgctgacagagtggccgagagcaacaagatcaacaaggagatccagacagccctgcggcacaagtcagaaattgagcaccacaggaacaagatccggctgcgggccaagagaagaggccactatgagttccctgtggtggatgacctgagcagcggggacaccaaggagcggcaccgggtgtaccgccgggcccagatgcagattgacaagatcctggaccccacagcctctgtgcccagcgtcttcatcgagcccaggaagagcagccgcatcaagaggagccccaagcccaggaggaagcaccaggtgaatggctgcccagcagatgctgagaaggacaggctcatcaccacagacagtgatggcacctacagaagacctcctggggtgcacaacagcgcctacatcggctgccccagcgaccctgacctgcctgcagatgtgcagacccccagctctgtggagctgggccgctacccagccctgcccttccctgccagccagtacatccccccccagcccagcattgaggaggcccggcagaccatgcacagcctgctggatgatgcctttgccctggtggcccccagcagccagcctgccagcacagctggggtgggccctggggtgcccccaggcctgcctgccaacagcacccccagccaggaggagcggcgggccacccagtggggcagcttctacagccctgcccagacagccaacaacccctgcagccgctatgaggactatggcatgaccccacccaccggccccctgccccggcccggcttcggccctggcctgctgcagagcacagagctggtgcccccagacccccagcagccccaggccagcgctgaggccccctttgctgcccggggcatctacagcgaggagatgcccagcgtggcccggcccaggcctgtgggcggcaccaccggcagccagatccagcacctgacccaggtgggcatcgccagcagaattggagcccagcctgtggagatcccccccagccggggcagccagtatggaggccctggctggcccagctatggagaagatgaagctggaagaagagaggccacccacatgctgggccaccaggagtacagcagcagccccctcttccaggtgcccaggaccagcggccgggagcccagcgcccccagcggcaacctgccccaccggggcctgcagggccctggcctgggctaccccaccagcagcacagaggacctgcagcccggccacagcagcgccagcctcatcaaggccatccgggaggagctgctgcggctgagccagaagcagagcacagtgcagaacttccacagctag

SEQ ID NO: 63179 - DNA, 5853 bp, Artificial Sequence
  derived and/or modified sequence
atgcccggcgcccggcggcggcggcggggcgccgccatggagggcaagccacgcgctggagtggctctggcccccggcccctctggccggcgacctagcgcaagatgcgcacgacgtcgacgtcctgggctgctcctaccaggactctggttgctgctgctggctcggcctgcctcctgtgctcctgacgaattgtcccctgagcagcacaatctgtcattgtacagtatggagctagtacttaagaagtcaactggtcacagcgccgcccaggtggcattgacggagaccgcgccaggaagccaacactcatccccccttcatgtgactgcaccaccatcagcaaccacattcgacactgccttcttcaaccagggaaagcaaaccaaatccactgctgaccctagtattttcgtggctacttacgtgtcagttacctcaaaggaggtagcggtgaacgatgacgagatggacaacttcctcccagacacacattggacaacgcccagaatggtctcaccgatccagtacatcacggtgtctccacctgggctgcctagggaagctctcgagcccatgctgacgccctctctcccaatggtgagtctacaggatgaggaagtgaccagcggctggcaaaacactactagacaacctgccgcttacgccgaatcagccagccacttccacaccttcagaagtgcgtttaggacctcagagggaattgtgcccacacccggtagaaatctggttctgtacccaacagacgcttactcacacttgagctctaggaccctgccggagatcgtggcctctttgacagaaggcgtggagactaccctttttctctcctccagatccttaatgccacagccacttggggacgggatcacaatccccctgcctagcctgggtgaagtgtctcagccccccgaagaggtttgggctactagcgccgatagatacacggacgtgactactgttctcagccaatccctggaagagacaatctctcctagaacctatccaactgtaacagcatctcacgcagccctcgctttctccagaactcacagcccgctcctgtctacaccactggcatttgcctcctctgcatctcccactgatgttagctcgaatccttttctgccttctgattcatcaaagacaagcgaactacactctaacagcgcactccccggtcctgttgacaatacccacattctgtccccagtgtcctcattccgcccatatacttggtgcgccgcctgtactgtgccttccccccagcaggtcctggcgacctcgctgatggagaaggacgtcggtagtggcgacggcgctgaaaccctttgcatgacagtgctagaagaaagcagtatctctttgatgagcagcgtggtggctgatttctccgagtttgaagaggacccacaggtttttaacacactttttccttcacggcctatcgttcccctctcaagtcgctccatggaaatctctgaaacgtcagtgggtatttcagccgaggtcgacatgtcatcggtcacgaccacccaggtaccccctgcccatgggcggctcagcgttcctgcatcgttggatcccacggcaggcagccttagcgtggcagaaacccaggtgacaccctcatctgtcaccacagcttttttttccgtcatcaccagtattctgctcgacagctccttctctgtgatcgctaacaagaacaccccatctctcgctgtccgagatccatccgttttcacaccttatagtttagttccgtcagtggagtccagcttgttttccgatcaggagcggtcaagtttttccgagcacaagccacgaggcgcactcgacttcgcctcttcctttttctctaccccaccgctcgagctctcaggatccatatcctccccatcagaggcacccgcttcactcagcctgatgcccagcgatctgagtccttttacaagccagagcttttcacccctggtggagaccttcacgttgttcgattcctctgacttacaatctagccaactgagtctacctagttcaaccaatcttgagttttcacagttacagcccagtagtgaattacctctaaacacaattatgctgctgccttcacggtctgaggtgtctccctggagttcttttcctagtgactctctcgagttcgtggaggcgtctacagtgtctctgaccgactccgaagctcattttaccagtgcctttatcgagactactagctatctggagtcaagcttgatctcccatgaaagcgccgtaactgccctggttcccccaggaagcgaaagttttgacattttgacagccggcatccaagcgacaagcccactcactacagtgcatactaccccgattctcaccgaaagctcgttgttctcgactctaaccccaccggacgatcagataagcgccctagacggccatgtctctgttctggcttcttttagcaaggccattcccactggaacagtccttatcactgatgcatacctgccatctgggagtagcttcgtctccgaagctacaccgtttcctctccccaccgagttgacggtagtagggccttccctcacccctactgaggtcccattaaatacatctaccgaagtgtccacgacatccaccggagccgctacaggcgggccactcgattctactctcatgggagacgccgctagccaatcccccccggaatccagcgccgccccgcccctgcctagcctcagaccagtcacagcatttacccttgaagccactgtggatactcccaccttagccaccgctaagccaccatacgtctgcgatattaccgtgcctgacgcctacctgatcaccactgttctagctaggagagccgttcaggagtatatcatcaccgccatcaaagaggtactgaggattcactttaatcgggcagtggaactaaaggtatacgaattgtttacagactttacatttctggtcacctcaggtccatttgtgtatactgcaatttcagtcatcaatgtgctcatcaattctaagctcgttcgtgaccaaacaccactgatcctgagtgtgaagccgtccttcctcgtgcctgaaagtagatttcaggttcagacagtactccagtttgtgcctccttcggtcgacactggcttttgcaatttcacccaacgaatcgaaaaaggcctgatgaccgccctctttgaggttagaaaacaccaccagggtacctataaccttaccgtacaaattcttaacataaccatctcctcaagtcgtgtgacacctcggcgcggcccagtgaacatcatatttgcagtgaagtcaactcaggggttcctgaatggcagcgaagtttcagaactgctgcgtaacctgtccgtcgtggagtttagtttctatttggggtaccctgtgttacaaatcgccgaaccctttcaataccctcaattgaacctgtctcaactcctcaagagtagttgggttagaacagtactcctgggggtgatggagaaacagttgcaaaacgaggtctttcaagccgagatggagagaaagctggcacaattactatctgaggtttctacacgccggagaatgtggcggagagctacggtcgctgccggcaattccgtcgtgcaggttgttaatgtttctcggctggaaggggacgataacccggtgcaattgatatattttgtggaagatcaggacggcgagaggcttagtgccgttaaatcttcagaccttattaataagatggacctgcagagagccgccatcattctgggttataggatccagggagtgatcgctcaacctgtggatcgcgtaaaaagaccgagccctgaaagccagtccaataatctgtgggtaattgttggcgtagtaattcccgttctagtggtgatggtgatcgtggtgatcctctactggaaactctgtcggacagataaactcgactttcagccagatactgtagccaacattcaacagcggcagaagctgcaaatcccaagtgtcaaggggttcgacttcgccaaacaacacctcggacagcacaacaaagacgacattctgattattcatgaaccagcccccctgccgggcccattgaaagaccacaccaccccatctgaaaacggcgacgtgccgtcccccaagagtaaaatccccagtaagaacgtccgacatagaggtagggtttcgcccagcgatgcggactctacagtgtcagaggaatcctccgagcgcgatgccggcgacaagactcctggggctgtaaacgatgggcgaagtcatcgggcgccacagtctgggcctcctctccccagttcgggcaatgaacaacacagctcagcctctatcttcgagcacgtagataggatcagcaggccccctgaagcgagtcgccgagtgccctccaaaatccagctaatcgccatgcagccaatcccagcgccaccggtgcagcggccgtctcctgcggatcgggtggccgagtctaacaagattaataaggagattcagacagcccttcgtcataaatcagaaattgagcaccacaggaataagattcggctgcgcgctaagcgacgcggacactatgaattccccgtggttgatgacctgtcctcaggcgatacaaaggagaggcatcgagtctaccgccgagctcaaatgcagattgataaaatactggatccaacagcgtccgtacctagcgtattcatcgaacccaggaagtcttcgagaataaagcgtagcccaaaacctcggaggaagcatcaagttaatggttgtccggccgacgcagaaaaggatcgcctgataactacggacagcgacgggacttatcgtaggcccccaggcgttcacaattccgcatacataggttgcccttcagacccagacttgcccgccgacgtccaaacaccttctagcgtggagctgggccggtatcccgcgctaccatttcccgcgagccagtatatccctcctcagccttcgatagaggaggcccgccagacaatgcacagtctgcttgatgatgctttcgccctcgtcgccccaagctctcaaccagcctctactgcaggggtgggccccggggtcccccctggattgcctgctaactcaaccccgtcacaagaagagaggagggctactcagtggggtagcttctattcccccgcccagaccgcaaataatccgtgctcaaggtatgaggattacgggatgacaccacctacgggcccgttaccccggcctggctttggcccgggcctgctccagtccactgaacttgtgccccccgatccccagcaaccccaggctagcgccgaggccccattcgccgctcgagggatatactccgaggagatgccctccgtggcaagacctcgacccgtcggaggcaccacaggtagtcagattcaacatttaactcaagtgggtattgcctcaagaataggtgcacagcctgtcgagatacccccctctagggggagccaatatggagggcccggctggccaagttacggcgaggatgaggcgggccgcagagaagcgacacatatgttaggacatcaggagtactcatcctcccccctctttcaggtaccaaggacttccggaagagaaccttctgctcccagcgggaatctgccacaccgcggccttcaggggcccggccttggctatcctactagctcgacggaggatttacagcccggtcattccagtgcctcattgattaaggccattcgcgaggagttgctcaggctctcccaaaaacaatctactgttcaaaattttcattcgtag

SEQ ID NO: 63180 - DNA, 5852 bp, Artificial Sequence
  derived and/or modified sequence
atgccgggagcccgtcgccgtcgccgtggggctgctatggaagggaagcccagagccggagtcgccctggcacccggaccctccggtaggcgcccatctgcccgatgtgcgcgacgtagacgacccggactgcttctccctggactatggctcctcttactagcaagacccgcatcttgtgcgccagatgaactatcaccagaacagcataatctatctttatatagcatggagttagtcctcaagaagtctacaggccactcagcagcccaggtcgccctgaccgagaccgcacctggaagccagcattcctcgccactgcacgttacagcccctccatccgcaaccaccttcgacacggccttcttcaaccagggtaaacagaccaagtcgaccgcggaccccagcatcttcgtcgcaacctacgtcagcgtgaccagcaaggaggtggctgtaaacgacgatgagatggacaatttcctgccggacacacactggaccaccccccgaatggtgagtcctattcaatacatcacggtcagccctcccggactccccagggaagccttagagcctatgttgaccccaagtctgcccatggttagtcttcaggacgaagaggtcactagtggttggcagaacacgactcgacagcctgccgcatatgctgaatccgcaagccattttcatacctttagatcagcttttagaacctcagaaggtattgtacctactccaggtagaaacttagtgctctaccccaccgatgcctattctcacctcagcagccgtaccctccctgagatcgtcgcaagtttgacagagggcgtggaaacaactctttttctctccagccggtctctgatgccacagccgttgggtgatggaattactatcccacttccaagtctgggcgaagtatcccagcctcccgaggaagtatgggctacctccgctgacagatacacagatgtgaccaccgtccttagccagtccctggaggagacaattagtccccgaacataccctacggtgacagcaagccacgccgctttggcattttctaggacccattcacctctcctgtcaacgcccctggcctttgcgagttccgctagtcctaccgatgtgagctcaaatccgttcctgcctagtgatagctctaagacctccgagctccactctaattctgcccttcccggacccgttgataatacccatattctgtcccccgttagtagcttccggccatatacctggtgcgccgcatgcactgtaccaagcccacagcaggttcttgccacatcacttatggagaaagacgtggggtcaggcgacggcgctgagactctgtgcatgaccgttttagaggagtcatctatttccctgatgtcatcagtggtggctgacttttccgaattcgaggaagatccccaggtgtttaacactcttttccctagcagaccaatcgttccactatcttcccgatccatggagatttctgaaacctcagttggcatcagcgccgaagttgatatgagttccgtgaccacaacacaggttcccccagcccacggtaggctctctgtgcctgctagtctggaccccacagccggaagtctgagtgtcgctgaaacccaggtgacgcccagttcagtgaccactgcctttttcagcgttatcacctcaattctcttggacagcagtttttctgtcatcgccaataaaaacaccccctccttagccgtgagagaccccagcgtatttacaccatacagtctggtgccctccgtggagtcttctcttttttccgaccaggagagaagttcattctccgaacacaaaccacggggagcactagatttcgcttcctccttcttttccactccacctttagagctgagcggatccatctcctcgccttcggaagcccctgcgtctttgtccctgatgccctcagatctctccccctttacttcacaaagtttttccccgttggtggaaaccttcacactgtttgacagtagtgatcttcagagttcccagctatcattgccaagttccactaatctggagttttcccagctgcagccctctagcgaactcccgctgaacactatcatgctgcttccttccagaagcgaagtgagcccctggtccagcttcccatctgactcacttgagtttgtggaagcctccactgttagtctgaccgattctgaggcccacttcacaagtgcgttcatcgagactactagctatctggaatcctcgctcataagtcacgagagcgccgttacagctttagtgcccccagggagtgaaagttttgatattctgactgccggtatccaggccactagtccccttaccactgtgcatacaaccccaattctgacagagagcagtctcttctccacactgacccccccagacgatcagattagcgcactggacggtcacgtctctgtgctcgccagcttcagcaaggcaatccccaccggtacggttctcatcaccgacgcgtatctgccctccggctcttcatttgtctctgaggcgacgcccttcccgctgccaaccgaactgaccgtcgtgggcccttccctcactcctaccgaggtgccgctcaacaccagtacagaagtgagtacgacaagcaccggagcggctacggggggtcccctagactctacgttgatgggcgatgcggcaagccagagtcccccagagtcgtcggcagctcctccgctgccatcactgagaccagtgactgcatttacactcgaggctacagtggataccccgacacttgccaccgccaagccgccttacgtgtgcgatatcacagtgcctgatgcatatttgattacaacggtgctcgcacgacgagcagtacaggaatatattattacggcaataaaggaagtcctcagaatccactttaatagagcagttgagctgaaggtatacgagctctttaccgatttcacatttctggtcacaagcggccctttcgtttacaccgctatcagcgttatcaatgtgctgattaactcgaagctagtgcgggaccagacccccctcatacttagcgttaaaccctcattcttagtccctgaatcgagatttcaagtccagacagttctgcagttcgtgccaccaagtgtcgacaccgggttttgcaatttcactcagcgtatcgagaaaggcctcatgaccgctctgttcgaggtgagaaagcaccaccaaggcacctacaatctgaccgtacagatcttaaatatcaccatcagtagttcacgggtgacaccacgacgcggacctgttaacataattttcgccgtcaagagtacccagggattcttgaacggatccgaggtctccgagctgttgagaaaccttagcgtggttgagttttctttctatctgggttatccagtactgcaaattgccgagccattccagtatccacagctcaacctatcgcagctcctgaagtcctcctgggtgcggaccgttcttctgggggttatggagaaacagctccagaatgaggtgtttcaggccgagatggaaagaaagcttgcacagctgctgtctgaggtgtccacacgacgtcggatgtggcgcagggcgacagtcgccgcaggaaactcggtggtgcaggtcgtcaatgtatctagactcgagggggatgacaatcctgtccagctcatttactttgttgaagatcaagatggggagagattgtctgctgtgaaaagcagcgatctcatcaacaaaatggatctgcagcgcgctgcaattattctagggtaccgtattcaaggcgtcatagcccaacccgtggaccgggtcaaacgaccttctcccgaaagtcagtcgaacaatctgtgggtcatcgtaggtgtcgtcattccagtgctggtggtaatggtaatcgtggtaatcctgtattggaaactgtgtcgcaccgacaaactggacttccaacccgacacagtcgctaacattcagcagaggcagaagttgcagatccccagcgtgaaagggtttgacttcgccaaacaacatctgggacagcataataaggatgatattctgattatccacgagcccgcaccgctgcccggaccgctgaaggatcatacaacgccaagtgagaacggggacgtgcccagccccaagagcaaaataccctcaaagaacgtgaggcatcgtggccgagtatcaccaagcgatgccgactctacggtgtctgaagaaagctccgagcgagatgccggagacaaaacacccggtgctgtcaacgacggccgatctcacagggctccacaaagtgggccaccgcttccatctagcggaaatgaacagcacagctccgcatccatattcgagcatgtagacaggatctcacggcctcctgaagcgtcccgacgggtgccatccaagatccagctaatcgcaatgcaaccaatcccggctccgccagtccagcgcccaagtcctgcggacagagtggccgagtctaataagattaacaaggaaatccaaacagccctgaggcacaagtcagaaatcgaacatcacaggaataagatcagattacgagcaaagaggcgaggccattacgaatttcccgtggtagatgatctgtcatccggggacaccaaggagagacaccgcgtttatcgcagggcccaaatgcaaattgataaaattctggatcccaccgcatcagtgccatcagtatttattgagccgcgtaagagctctcgcataaagaggtcccccaaacccaggagaaagcaccaggtgaatggatgcccagctgacgcagagaaagacagactcattactacagactctgacggaacttaccggcgtccaccaggggtgcacaattcagcttacatcggatgcccgagcgatcctgatctgcctgctgacgtgcagacgccctccagcgtggagctaggccgatacccagccctcccgttccccgcttcccagtacattccaccccagccttccattgaggaggcaagacagactatgcactcccttctggacgatgccttcgccctggtcgccccttcctcccagccagcatctacggctggcgttgggccaggcgtgcctcccggactgcctgccaacagtactcccagtcaggaggagcggcgtgccacccagtggggaagcttctacagccctgcccagactgcaaataacccctgcagtagatatgaggattatgggatgacaccacccacgggacctcttccaaggcctgggttcgggcctggtctgctgcaatccacggagctggtgccaccagacccccagcagcctcaggcctcggccgaggctcccttcgcggctagagggatctattcagaagagatgccatcagtggctagaccacgcccagtgggaggaactacagggtctcaaatccagcacttaacgcaggtcggaatcgcttcccgcataggtgcccagcctgttgagataccccctagccgaggatcgcagtatggaggccctgggtggccaagctacggagaggatgaggcgggacgtagagaggcaactcacatgctgggacaccaggaatactccagcagtcctctcttccaggtgcctcggacttctggtcgggaaccgagtgcgccttccgggaacctacctcacagagggttgcagggtcctggcctgggataccctacatcttccacagaggatttgcagcctggacactcaagtgctagccttattaaggccatcagggaagaactacttcggctgtctcagaagcagagtactgtgcagaacttccacagtta

SEQ ID NO: 63181 - DNA, 6283 bp, Artificial Sequence
  derived and/or modified sequence
gacccgagagccgctgagccgcgaggccgggccggggcgccggccgggaatgccgggggcgcggcgccgacgccgaggcgcggccatggaggggaagccccgcgccggggtcgcgctggccccggggccgagcggccgacggccttccgcccgctgcgcccgccgccgccgcccggggctgctgcttcctggcctctggctgctgctgctggcccggccggcctcgtgcgccccagatgagctctctccggaacagcacaacctttctttatactccatggagctcgtgctgaagaaaagcactgggcacagcgctgcacaagtggccttaacagaaactgctcccggctcccagcacagcagtcctctccatgtcacagccccgccgtctgccactacttttgatacagccttttttaaccaaggaaaacagaccaaaagtacagcagatcccagcatctttgtggcaacttacgtgtcagtgacgagtaaagaggtggccgtcaatgacgatgagatggataactttctgccagatactcactggaccactccacggatggtttctccaatacagtatatcacagtcagcccaccagggctgcccagggaagcattagaacctatgctcactccatcattacccatggtttctttacaagatgaagaagtgacatcgggctggcagaacacaacgcgacaaccagcggcatatgctgagtccgccagtcatttccacacctttcggtcagcttttcgcacctctgagggcatcgttccaactcctggcaggaatttggtgctttatcctactgatgcttacagtcatttatcaagcaggactctgccagagattgtggcttccctaacagagggtgtggaaaccaccctttttttaagctcccggtctttaatgccacagccgttaggcgacggcattactataccgttgccctccttgggggaggtctcacagcctccagaggaggtttgggccacaagtgcagacagatacactgatgtgaccactgtgttgagtcaaagcctagaagaaaccatctctccaagaacataccccactgtgactgcatcgcacgcagcccttgcattcagcaggacacattctccattgctttcaactcctcttgcatttgcgtcctctgcttcaccaactgatgtttcatctaacccctttctccctagcgactccagcaaaacatccgaattgcatagcaattcagccctccccggtcctgtggacaacactcatatcctgagcccggtgtcctcattcagaccatacacttggtgtgcggcctgcactgtgccttcacctcagcaagttctggccacgagcctcatggagaaagacgtgggatcaggggatggtgccgagactctgtgcatgaccgtgctggaagaaagcagcatctctctaatgagtagcgtcgtagcagacttctctgaatttgaggaagatcctcaagtatttaatacgcttttcccctccagacctatcgtcccactttcttctagatccatggaaatctcagagacgagtgttggcatttctgccgaggtggatatgagtagtgttacaaccacacaggttccccctgcccacggccgcctctctgtgccggcgtcacttgatcctactgctggctccttgtctgttgctgaaacccaagtgacgccatccagcgtgaccactgcatttttctcggtcatcaccagcattctccttgactcatctttctctgtcatagcaaacaaaaacacaccgtcgcttgccgtcagagacccgagtgtttttacgccttatagtctggttccttcagtggagtcttcacttttctctgaccaagaacgttccagtttttctgagcataaacccagaggtgctttggattttgcatccagctttttctcaacacccccgctggaactcagcggctccatctcttcgccttcggaagcacctgcgtctctgtctctgatgccgagtgacttgtcccccttcacatctcagtctttttctcccttggttgagacatttacattgtttgactctagtgatctgcagtcatctcagctgtctcttcccagttccacaaatcttgagttttcgcagctccagccaagttccgagctgcctttaaacaccatcatgttgctacctagccgttctgaggtgtcaccatggtcaagcttcccttctgattctctcgagtttgttgaagcgtctacggtttcactgacggattcagaagctcattttacctcagctttcattgaaactacctcctatcttgagtcttcactcatttcccatgaatccgcagtcactgcactggtgccccccggctctgagtcttttgacattttgactgccgggattcaagcaacatcaccattgaccactgtccacacaacgcccattttaactgagtcttctttgttctcaactctgacacctcctgacgaccaaatcagtgctctagacggtcacgtgtctgtcctggcctctttctccaaagccattcccactggtacggtgttgatcactgacgcgtacctgccatcaggatcctcgtttgtttctgaagcaacccccttccctctgcccacagagctgaccgtcgtgggcccatcactcacacccacagaggtgccactgaacacctccacggaagtgagcacaaccagcaccggtgctgccactggtggtcccctcgactccaccctgatgggtgacgccgcaagtcagagccccccagagagtagtgctgctcctcccctgccatccctgcgtcccgtgactgccttcactctcgaagcaacagtcgacacaccaacactggctactgccaagccgccatatgtttgtgatatcacagtccccgatgcctatctgatcacaactgtgctggccagaagagctgtgcaggagtacatcattacagcaatcaaagaagtactgaggattcacttcaaccgtgcagtggaactgaaggtttacgaactatttactgacttcacttttctggtaacatccggtcctttcgtttacacggcaatatccgtcataaatgtgcttataaacagtaagcttgtccgtgaccagactcctttaatcctgtctgtgaaaccttctttccttgtgccagagtccaggttccaagttcaaacagtacttcagtttgtgcctccgagtgtggatactggcttctgcaacttcacccagcgcattgagaaaggcctaatgacagctctctttgaagtgagaaaacaccaccagggaacgtataacctcacggtgcagatcttgaatatcaccatcagttcctcaagggtgactcctcggcggggcccggtgaatatcatctttgcggttaaaagcacacagggatttttgaatgggtcggaagtgagcgagctgctcagaaacttgagtgtggtggagttcagtttctatctgggatacccagtgctgcagatcgcagagcccttccagtatccacagctcaacttatctcagttgctgaagtcctcttgggtcagaacagttctcctgggcgtcatggagaagcaactccagaatgaagtgtttcaagccgagatggaacgcaagctggcccagctgctcagcgaggtttccaccagaaggcggatgtggagaagggccactgtagctgcagggaacagtgtggtgcaggtggtaaatgtgtcgaggctggagggagatgacaatccggtacagctcatctactttgtggaggatcaagatggagaaagactcagtgcagtcaagtcttcggacctgattaacaaaatggacctccagagagcagccatcatcttgggttaccgaattcaaggtgtcattgcccagcctgtcgacagggtgaagaggccgtctccggaatcccagagcaacaacttgtgggtcattgttggcgtggtcatcccagtgctggtggtgatggtgattgttgtcatcctctactggaaactatgccgcacagacaagctagactttcagcctgacactgtggccaacattcagcagcgtcagaagctgcagatccctagtgtgaagggcttcgattttgctaagcagcatctgggtcagcacaataaagacgacatattgattattcatgagccagcgccactgccaggacctctgaaggaccacaccacgccctcggaaaatggagacgtgccaagccccaagtcaaagatcccttccaagaatgttcgtcacagaggaagagtttctccctcagatgctgactctacggtcagtgaagagtccagcgagagggacgcaggagataagacgccgggagccgtcaacgatggcaggtcccacagagctccgcagagcgggccaccactgcccagttcgggaaatgagcagcactcatcagcctccatcttcgagcacgtggacaggatctcccgccccccggaggctagccggcgggtccccagtaagatccagcttatcgccatgcagccgatcccggcacctcccgtccagcgcccctccccagccgaccgagtggcggaaagcaataaaatcaacaaagagattcagaccgcgctgcggcacaagtctgagatcgagcaccatcgcaacaagatccgcctgcgcgccaagcgccgcgggcactacgagttcccggtggtagacgacctgtcctcgggcgacactaaggagcgacaccgggtgtaccgcagggcacagatgcagatcgacaagatcctggaccccacggccagcgtgccctccgtgttcatagagcccaggaagagctcacggataaaacgttctcccaagcctcgccggaaacaccaggtcaacggctgtcctgccgacgctgagaaggaccggctcatcaccacagacagcgatggcacctacaggaggccccccggcgtccacaactcagcctacatcggatgcccatcggatcctgacctcccagccgatgtgcagacaccatcctcggtggaactggggaggtatccagcccttcccttcccggcctcccagtacatcccaccccagccgtccatcgaggaggcacgccagaccatgcactccctcctggacgacgcctttgccctcgtggcccccagcagccagcctgccagcaccgcaggtgtaggccccggagtcccacccggcctgcccgcaaacagcaccccttcccaggaagagaggcgagccacccagtgggggtccttctacagcccagcccagacggccaacaatccctgcagtagatacgaagactatggaatgactcccccgacgggtccattgccaagaccaggttttggccccggtttgctgcagtctacagagctggtgccccctgaccctcagcagccacaggcctccgccgaagccccatttgctgccagagggatctactcggaggagatgccgtcggtggcccggcctcggcctgtcgggggtaccacaggctcccagatccagcacctgacacaggtggggattgccagcagaattggagctcagccagtggaaatcccgccaagcagaggcagccagtatggggggccaggctggccttcgtacggggaggacgaagcggggcgaagagaggccacacacatgctcggacatcaagagtattcttcttcaccgctatttcaggtgccaaggacttcaggcagggagccctcagctccttccgggaacctcccccaccggggactgcagggccctgggctgggttaccccaccagctccacggaagacctccagcctggccactcctcggcctctctcatcaaagcaatccgcgaggagctcctccggctctcccagaaacagagcaccgtgcagaacttccacagctgatcggcctcgcctcgcagatttgccaagtatccgcttcctgtggaagcaagaccaaaaggaaatcaactgagtgggtgtttggaagaggaaggagcaactctcgggcagcctgcccaagggagggagcaagttgcaatttagaagatgccatacgtcgtgtgacagctcatgagcctttcactgggctggcaattgtctgaacacttgggttcagttgaaatatatgtattttggccaaaagccagcagcacttcacaaaaacaaaacacaaacctaagctaacaaaatgactgcattcgtctcttttttaaaggtagagattaaactgtatagacagcatagggatgaaaggaaccaagcgtttctgtgggattgagactg

SEQ ID NO: 63182 - DNA, 5853 bp, Artificial Sequence
  derived and/or modified sequence
atgcccggcgccagaagaagaagaagaggcgccgccatggagggcaagcccagagccggcgtggccctggcccccggccccagcggcagaagacccagcgccagatgcgccagaagaagaagacccggcctgctgctgcccggcctgtggctgctgctgctggccagacccgccagctgcgcccccgacgagctgagccccgagcagcacaacctgagcctgtacagcatggagctggtgctgaagaagagcaccggccacagcgccgcccaggtggccctgaccgagaccgcccccggcagccagcacagcagccccctgcacgtgaccgccccccccagcgccaccaccttcgacaccgccttcttcaaccagggcaagcagaccaagagcaccgccgaccccagcatcttcgtggccacctacgtgagcgtgaccagcaaggaggtggccgtgaacgacgacgagatggacaacttcctgcccgacacccactggaccacccccagaatggtgagccccatccagtacatcaccgtgagcccccccggcctgcccagagaggccctggagcccatgctgacccccagcctgcccatggtgagcctgcaggacgaggaggtgaccagcggctggcagaacaccaccagacagcccgccgcctacgccgagagcgccagccacttccacaccttcagaagcgccttcagaaccagcgagggcatcgtgcccacccccggcagaaacctggtgctgtaccccaccgacgcctacagccacctgagcagcagaaccctgcccgagatcgtggccagcctgaccgagggcgtggagaccaccctgttcctgagcagcagaagcctgatgccccagcccctgggcgacggcatcaccatccccctgcccagcctgggcgaggtgagccagccccccgaggaggtgtgggccaccagcgccgacagatacaccgacgtgaccaccgtgctgagccagagcctggaggagaccatcagccccagaacctaccccaccgtgaccgccagccacgccgccctggccttcagcagaacccacagccccctgctgagcacccccctggccttcgccagcagcgccagccccaccgacgtgagcagcaaccccttcctgcccagcgacagcagcaagaccagcgagctgcacagcaacagcgccctgcccggccccgtggacaacacccacatcctgagccccgtgagcagcttcagaccctacacctggtgcgccgcctgcaccgtgcccagcccccagcaggtgctggccaccagcctgatggagaaggacgtgggcagcggcgacggcgccgagaccctgtgcatgaccgtgctggaggagagcagcatcagcctgatgagcagcgtggtggccgacttcagcgagttcgaggaggacccccaggtgttcaacaccctgttccccagcagacccatcgtgcccctgagcagcagaagcatggagatcagcgagaccagcgtgggcatcagcgccgaggtggacatgagcagcgtgaccaccacccaggtgccccccgcccacggcagactgagcgtgcccgccagcctggaccccaccgccggcagcctgagcgtggccgagacccaggtgacccccagcagcgtgaccaccgccttcttcagcgtgatcaccagcatcctgctggacagcagcttcagcgtgatcgccaacaagaacacccccagcctggccgtgagagaccccagcgtgttcaccccctacagcctggtgcccagcgtggagagcagcctgttcagcgaccaggagagaagcagcttcagcgagcacaagcccagaggcgccctggacttcgccagcagcttcttcagcaccccccccctggagctgagcggcagcatcagcagccccagcgaggcccccgccagcctgagcctgatgcccagcgacctgagccccttcaccagccagagcttcagccccctggtggagaccttcaccctgttcgacagcagcgacctgcagagcagccagctgagcctgcccagcagcaccaacctggagttcagccagctgcagcccagcagcgagctgcccctgaacaccatcatgctgctgcccagcagaagcgaggtgagcccctggagcagcttccccagcgacagcctggagttcgtggaggccagcaccgtgagcctgaccgacagcgaggcccacttcaccagcgccttcatcgagaccaccagctacctggagagcagcctgatcagccacgagagcgccgtgaccgccctggtgccccccggcagcgagagcttcgacatcctgaccgccggcatccaggccaccagccccctgaccaccgtgcacaccacccccatcctgaccgagagcagcctgttcagcaccctgaccccccccgacgaccagatcagcgccctggacggccacgtgagcgtgctggccagcttcagcaaggccatccccaccggcaccgtgctgatcaccgacgcctacctgcccagcggcagcagcttcgtgagcgaggccacccccttccccctgcccaccgagctgaccgtggtgggccccagcctgacccccaccgaggtgcccctgaacaccagcaccgaggtgagcaccaccagcaccggcgccgccaccggcggccccctggacagcaccctgatgggcgacgccgccagccagagcccccccgagagcagcgccgccccccccctgcccagcctgagacccgtgaccgccttcaccctggaggccaccgtggacacccccaccctggccaccgccaagcccccctacgtgtgcgacatcaccgtgcccgacgcctacctgatcaccaccgtgctggccagaagagccgtgcaggagtacatcatcaccgccatcaaggaggtgctgagaatccacttcaacagagccgtggagctgaaggtgtacgagctgttcaccgacttcaccttcctggtgaccagcggccccttcgtgtacaccgccatcagcgtgatcaacgtgctgatcaacagcaagctggtgagagaccagacccccctgatcctgagcgtgaagcccagcttcctggtgcccgagagcagattccaggtgcagaccgtgctgcagttcgtgccccccagcgtggacaccggcttctgcaacttcacccagagaatcgagaagggcctgatgaccgccctgttcgaggtgagaaagcaccaccagggcacctacaacctgaccgtgcagatcctgaacatcaccatcagcagcagcagagtgacccccagaagaggccccgtgaacatcatcttcgccgtgaagagcacccagggcttcctgaacggcagcgaggtgagcgagctgctgagaaacctgagcgtggtggagttcagcttctacctgggctaccccgtgctgcagatcgccgagcccttccagtacccccagctgaacctgagccagctgctgaagagcagctgggtgagaaccgtgctgctgggcgtgatggagaagcagctgcagaacgaggtgttccaggccgagatggagagaaagctggcccagctgctgagcgaggtgagcaccagaagaagaatgtggagaagagccaccgtggccgccggcaacagcgtggtgcaggtggtgaacgtgagcagactggagggcgacgacaaccccgtgcagctgatctacttcgtggaggaccaggacggcgagagactgagcgccgtgaagagcagcgacctgatcaacaagatggacctgcagagagccgccatcatcctgggctacagaatccagggcgtgatcgcccagcccgtggacagagtgaagagacccagccccgagagccagagcaacaacctgtgggtgatcgtgggcgtggtgatccccgtgctggtggtgatggtgatcgtggtgatcctgtactggaagctgtgcagaaccgacaagctggacttccagcccgacaccgtggccaacatccagcagagacagaagctgcagatccccagcgtgaagggcttcgacttcgccaagcagcacctgggccagcacaacaaggacgacatcctgatcatccacgagcccgcccccctgcccggccccctgaaggaccacaccacccccagcgagaacggcgacgtgcccagccccaagagcaagatccccagcaagaacgtgagacacagaggcagagtgagccccagcgacgccgacagcaccgtgagcgaggagagcagcgagagagacgccggcgacaagacccccggcgccgtgaacgacggcagaagccacagagccccccagagcggcccccccctgcccagcagcggcaacgagcagcacagcagcgccagcatcttcgagcacgtggacagaatcagcagaccccccgaggccagcagaagagtgcccagcaagatccagctgatcgccatgcagcccatccccgccccccccgtgcagagacccagccccgccgacagagtggccgagagcaacaagatcaacaaggagatccagaccgccctgagacacaagagcgagatcgagcaccacagaaacaagatcagactgagagccaagagaagaggccactacgagttccccgtggtggacgacctgagcagcggcgacaccaaggagagacacagagtgtacagaagagcccagatgcagatcgacaagatcctggaccccaccgccagcgtgcccagcgtgttcatcgagcccagaaagagcagcagaatcaagagaagccccaagcccagaagaaagcaccaggtgaacggctgccccgccgacgccgagaaggacagactgatcaccaccgacagcgacggcacctacagaagaccccccggcgtgcacaacagcgcctacatcggctgccccagcgaccccgacctgcccgccgacgtgcagacccccagcagcgtggagctgggcagataccccgccctgcccttccccgccagccagtacatccccccccagcccagcatcgaggaggccagacagaccatgcacagcctgctggacgacgccttcgccctggtggcccccagcagccagcccgccagcaccgccggcgtgggccccggcgtgccccccggcctgcccgccaacagcacccccagccaggaggagagaagagccacccagtggggcagcttctacagccccgcccagaccgccaacaacccctgcagcagatacgaggactacggcatgaccccccccaccggccccctgcccagacccggcttcggccccggcctgctgcagagcaccgagctggtgccccccgacccccagcagccccaggccagcgccgaggcccccttcgccgccagaggcatctacagcgaggagatgcccagcgtggccagacccagacccgtgggcggcaccaccggcagccagatccagcacctgacccaggtgggcatcgccagcagaatcggcgcccagcccgtggagatcccccccagcagaggcagccagtacggcggccccggctggcccagctacggcgaggacgaggccggcagaagagaggccacccacatgctgggccaccaggagtacagcagcagccccctgttccaggtgcccagaaccagcggcagagagcccagcgcccccagcggcaacctgccccacagaggcctgcagggccccggcctgggctaccccaccagcagcaccgaggacctgcagcccggccacagcagcgccagcctgatcaaggccatcagagaggagctgctgagactgagccagaagcagagcaccgtgcagaacttccacagctag

SEQ ID NO: 63183 - protein, 255 aa, Artificial Sequence
  derived and/or modified sequence
MTEAALVEGQVKLRDGKKWKSRWLVLRKPSPVADCLLMLVYKDKSERIKGLRERSSLTLEDICGLEPGLPYEGLVHTLAIVCLSQAIMLGFDSHEAMCAWDARIRYALGEVHRFHVTVAPGTKLESGPATLHLCNDVLVLARDIPPAVTGQWKLSDLRRYGAVPSGFIFEGGTRGWRLLPVLGRGGADQLPVRLHRPRHLPHQGPLWAAAGSTRPKSPGTLDCGGACGPGSPGNPTAGEAAEPPLTCGQAGQWRG

SEQ ID NO: 63184 - DNA, 768 bp, Artificial Sequence
  derived and/or modified sequence
atgacggaagcagccctggttgagggacaggtgaaacttagagacggaaagaagtggaagagtaggtggcttgtcctccgcaaaccatcacccgtggctgactgtctcttaatgctggtctataaggacaaatccgaacggattaaaggactgagggagaggagctcactcaccctggaagacatttgcggactggagccaggcctgccttatgagggtttagtgcacacccttgctatcgtgtgcctcagtcaagccattatgctggggttcgacagtcacgaggcgatgtgcgcctgggacgcacgaattaggtacgccctgggggaagtgcataggttccatgtcacagtggcacccggcaccaaacttgaaagtggaccggccacgcttcatctgtgtaatgacgtacttgtcctggcgcgggacatccctcccgcggtcacaggccagtggaaactgagcgaccttagacggtatggggccgtgccctcaggcttcatcttcgaaggcggtaccaggggctggcggcttctgcctgtgctgggaaggggcggggcggatcagctgccagttagactgcataggcctaggcatttgccacaccagggtcccctgtgggcggccgcaggctctacgcggcctaagtctcccggaacactcgactgtggtggtgcctgtggcccgggaagtcccggaaatcccactgccggagaggccgctgaaccccctctaacctgcggacaagctgggcagtggaggggctag

SEQ ID NO: 63185 - DNA, 768 bp, Artificial Sequence
  derived and/or modified sequence
atgacagaggccgccctggtggagggccaggtgaagctgagagatggcaagaagtggaagagccgctggctggtgctgaggaagcccagccctgtggccgactgcctgctgatgctggtgtacaaggacaagtctgagcgcatcaagggcctgcgggagaggagcagcctgaccctggaggacatctgtggcctggagcccggcctgccctatgagggcctggtgcacaccctggccatcgtgtgcctgagccaggccatcatgctgggctttgacagccatgaggccatgtgtgcctgggatgcccgcatccgctatgccctgggggaggtgcaccgcttccacgtgacagtggcccctggcaccaagctggagagcggccctgccaccctgcacctgtgcaatgatgtgctggtgctggcccgggacatccccccagctgtgacaggccagtggaagctgagtgacctgcggcgctacggggctgtgcccagcggcttcatctttgaaggaggcacccggggctggaggctgctgcctgtgctgggccggggcggcgctgaccagctgcctgtgcggctgcaccggcccaggcacctgccccaccagggccccctgtgggccgccgccggcagcacccggcccaagagccctggcaccctggactgtggcggggcctgtggccctggcagccctggcaaccccacagctggggaggccgctgagccccccctgacctgtggccaggccggccagtggaggggctag

SEQ ID NO: 63186 - DNA, 768 bp, Artificial Sequence
  derived and/or modified sequence
atgaccgaggccgccctggtggagggccaggtgaagctgcgggacggcaagaagtggaagagccggtggttagttctccggaagcccagcccagttgcagactgtctgctgatgctggtctacaaagacaaatccgaaagaatcaaaggtctgcgagagcgaagtagtcttacactggaggacatttgcggattggaaccaggcctgccttacgaaggattagtacatacattagcaatcgtgtgcctgagccaggctatcatgttgggatttgactcccacgaggcaatgtgcgcttgggacgctagaatcagatatgccctgggagaagtacaccgattccacgttacagtggcccccggcactaagctggagagtggtccggccacgctgcatctgtgtaatgatgttctcgtcctggcgagagatataccccctgccgttaccgggcagtggaagttgtccgaccttagacgttacggagctgtcccgtctggcttcattttcgaggggggaacaagggggtggaggctgttacccgtcctgggaagaggcggagccgaccagttaccagtgcgcctgcaccggcctagacacctgccccaccagggtcccctatgggccgccgcaggaagcacccggcccaagtcccccggaacgttggattgtggcggcgcctgtggtcctggatcccccggcaaccccactgccggcgaggccgcagagccgccactgacatgtggacaggcggggcagtggaggggctag

SEQ ID NO: 63187 - DNA, 768 bp, Artificial Sequence
  derived and/or modified sequence
atgaccgaagcggctttggtggagggacaggtgaagctgagagatggcaagaagtggaagtcgcggtggctcgtcttaaggaaaccttcgcccgtggcagactgcttgttgatgttggtgtacaaagataagagtgagagaataaaagggttaagggagaggtcaagtttgaccctcgaagatatttgcggcctggaaccaggactgccatatgaagggctagtgcataccttggccatagtgtgtctctctcaggcaattatgctcggatttgactcacacgaagccatgtgcgcctgggacgcgaggatacgctatgccctgggcgaagtgcataggttccacgtgactgttgcccctggcacgaagctcgagtcaggaccagcaaccctacacctgtgcaatgacgttctcgtgttggctagagacatcccccctgcagtgaccggccaatggaagctctctgatttgcggcgttatggtgccgttcccagcgggtttatctttgaggggggaactaggggctggagactcctccctgtgctggggagaggtggggctgatcagcttccagttcgcttgcataggcctagacatctgcctcatcagggaccactatgggcagctgctgggtcaacccggcctaagtctccaggtacactcgattgtggaggggcatgtggtcctggaagtccgggaaatccaactgccggagaagccgctgaaccccctctgacatgcggccaagcagggcagtggcgaggttag

SEQ ID NO: 63188 - DNA, 768 bp, Artificial Sequence
  derived and/or modified sequence
atgaccgaggccgccctggtggagggccaggtgaagctgagagacggcaagaagtggaagagcagatggctggtgctgagaaagcccagccccgtggccgactgcctgctgatgctggtgtacaaggacaagagcgagagaatcaagggcctgagagagagaagcagcctgaccctggaggacatctgcggcctggagcccggcctgccctacgagggcctggtgcacaccctggccatcgtgtgcctgagccaggccatcatgctgggcttcgacagccacgaggccatgtgcgcctgggacgccagaatcagatacgccctgggcgaggtgcacagattccacgtgaccgtggcccccggcaccaagctggagagcggccccgccaccctgcacctgtgcaacgacgtgctggtgctggccagagacatcccccccgccgtgaccggccagtggaagctgagcgacctgagaagatacggcgccgtgcccagcggcttcatcttcgagggcggcaccagaggctggagactgctgcccgtgctgggcagaggcggcgccgaccagctgcccgtgagactgcacagacccagacacctgccccaccagggccccctgtgggccgccgccggcagcaccagacccaagagccccggcaccctggactgcggcggcgcctgcggccccggcagccccggcaaccccaccgccggcgaggccgccgagccccccctgacctgcggccaggccggccagtggagaggctag

SEQ ID NO: 63189 - protein, 349 aa, Artificial Sequence
  derived and/or modified sequence
MAAPALGLVCGRCPELGLVLLLLLLSLLCGAAGSQEAGTGAGAGSLAGSCGCGTPQRPGAHGSSAAAHRYSREANAPGPVPGERQLAHSKMVPIPAGVFTMGTDDPQIKQDGEAPARRVTIDAFYMDAYEVSNTEFEKFVNSTGYLTEVAAAPWWLPVKGANWRHPEGPDSTILHRPDHPVLHVSWNDAVAYCTWAGKRLPTEAEWEYSCRGGLHNRLFPWGNKLQPKGQHYANIWQGEFPVTNTGEDGFQGTAPVDAFPPNGYGLYNIVGNAWEWTSDWWTVHHSVEETLNPKGPPSGKDRVKKGGSYMCHRSYCYRYRCAARSQNTPDSSASNLGFRCAADRLPTMD

SEQ ID NO: 63190 - DNA, 1050 bp, Artificial Sequence
  derived and/or modified sequence
atggccgcccccgccctgggcctggtgtgcggcagatgccccgagctgggcctggtgctgctgctgctgctgctgagcctgctgtgcggcgccgccggcagccaggaggccggcaccggcgccggcgccggcagcctggccggcagctgcggctgcggcaccccccagagacccggcgcccacggcagcagcgccgccgcccacagatacagcagagaggccaacgcccccggccccgtgcccggcgagagacagctggcccacagcaagatggtgcccatccccgccggcgtgttcaccatgggcaccgacgacccccagatcaagcaggacggcgaggcccccgccagaagagtgaccatcgacgccttctacatggacgcctacgaggtgagcaacaccgagttcgagaagttcgtgaacagcaccggctacctgaccgaggtggccgccgccccctggtggctgcccgtgaagggcgccaactggagacaccccgagggccccgacagcaccatcctgcacagacccgaccaccccgtgctgcacgtgagctggaacgacgccgtggcctactgcacctgggccggcaagagactgcccaccgaggccgagtgggagtacagctgcagaggcggcctgcacaacagactgttcccctggggcaacaagctgcagcccaagggccagcactacgccaacatctggcagggcgagttccccgtgaccaacaccggcgaggacggcttccagggcaccgcccccgtggacgccttcccccccaacggctacggcctgtacaacatcgtgggcaacgcctgggagtggaccagcgactggtggaccgtgcaccacagcgtggaggagaccctgaaccccaagggcccccccagcggcaaggacagagtgaagaagggcggcagctacatgtgccacagaagctactgctacagatacagatgcgccgccagaagccagaacacccccgacagcagcgccagcaacctgggcttcagatgcgccgccgacagactgcccaccatggactag

SEQ ID NO: 63191 - DNA, 1050 bp, Artificial Sequence
  derived and/or modified sequence
atggcggccccggcactgggcttagtttgtggccgctgtcccgagcttggcttggtacttctgctgctccttctttcactgctctgtggcgcagcaggctcccaggaagccgggacaggcgcaggagcaggatccctggctggcagttgcggctgcgggaccccccagaggcccggagcgcatgggagtagcgctgccgcccaccggtactcccgcgaagccaatgcacccggccccgtcccaggagaacggcagcttgctcacagcaaaatggtgccgatccctgctggggtatttacaatggggacagacgatccacaaataaaacaagatggcgaggcaccggcccggcgcgtgactattgacgccttctatatggatgcttacgaagttagtaacaccgagtttgagaaatttgtgaacagcacaggctacctcaccgaagtcgccgctgccccatggtggctgcccgtgaaaggagccaattggcgacaccctgaaggcccagactctaccattttacacaggcctgaccatccggtcctgcatgtttcctggaacgatgcagtcgcctattgtacgtgggccgggaaacgcttacctacagaggcagaatgggaatactcctgcagggggggcctccataaccgactgttcccatgggggaacaaactgcaaccaaaaggtcagcactacgctaatatctggcagggtgaatttcctgtgacgaacactggtgaggatgggtttcagggcacagcccccgtagatgcgttccccccgaacggatatgggctgtacaatattgtcggcaacgcctgggaatggacaagtgattggtggacggtacatcacagtgttgaggaaaccctgaatcctaagggacctccctctggtaaggatagggttaagaaaggcgggtcctatatgtgtcatcgttcctattgctatcgatatcgatgtgctgctcgcagccagaatacacctgattcgagcgcctccaacttaggttttagatgcgctgccgatcgtcttcctactatggattag

SEQ ID NO: 63192 - DNA, 1050 bp, Artificial Sequence
  derived and/or modified sequence
atggccgccccagccctgggcctggtgtgtggccgctgcccagagctgggcctggtgctgctgctgctgctgctgagcctgctgtgtggggccgccggcagccaggaggccggcactggagctggagctggcagcctggccggcagctgtggctgcggcaccccccagaggcctggggcccacggcagcagcgctgctgcccaccgctacagccgggaggccaatgcccctggccctgtgcctggagagcggcagctggcccacagcaagatggtgcccatcccagctggggtcttcaccatgggcacagatgacccccagatcaagcaggatggagaggccccagcccggcgggtgaccattgatgccttctacatggatgcctatgaggtgagcaacacagaatttgagaagtttgtgaacagcacaggctacctgacagaggtggccgccgccccctggtggctgcctgtgaagggggccaactggaggcaccctgagggccctgacagcaccatcctgcacaggccagaccaccctgtgctgcacgtgtcctggaatgatgctgtggcctactgcacctgggccggcaagaggctgcccacagaggccgagtgggagtacagctgccggggcggcctgcacaacagactcttcccctggggcaacaagctgcagcccaagggccagcactacgccaacatctggcagggcgagttccctgtgaccaacacaggagaagatggcttccagggcacagcccctgtggatgccttcccccccaacggctacggcctgtacaacatcgtgggcaatgcctgggagtggaccagtgactggtggacagtgcaccacagcgtggaggagaccctgaaccccaagggcccccccagcggcaaggacagagtgaagaagggcggcagctacatgtgccacaggagctactgctaccgctaccgctgtgccgcccggagccagaacaccccagacagcagcgccagcaacctgggcttccgctgtgccgctgaccggctgcccaccatggactag

SEQ ID NO: 63193 - DNA, 1050 bp, Artificial Sequence
  derived and/or modified sequence
atggccgcccccgccctgggcctggtgtgcggccggtgccccgagctggggctcgtgcttctgcttctactcctgtcactgctatgtggtgcagctggaagccaagaggccgggaccggggctggggctgggagcctggccggtagttgcggatgtggaactccccagcgccccggcgcacacgggagcagtgccgctgcccatagatactcccgtgaagccaatgcgccaggacctgtgcccggcgaaagacagctggcccattccaagatggtacctatacctgccggagtttttaccatgggaaccgatgacccacaaatcaagcaggatggcgaggcccctgcacgtcgcgtaacgattgatgcattttatatggatgcctacgaggtgtccaacacggaattcgagaagtttgtaaacagtactggatatctgaccgaagtggccgcggcgccctggtggctcccagttaagggggctaactggagacaccctgagggccctgactccactattctccatcggcccgatcatccagttctacacgtctcttggaacgacgcggtggcatattgtacctgggctgggaagaggctccccaccgaagccgagtgggaatattcatgcagagggggcctgcataataggctcttcccctgggggaacaagctgcagcccaagggtcagcactacgccaatatttggcagggcgagttcccagttacaaacaccggagaagacggattccagggtaccgcacctgtggatgcgtttccgccaaacgggtatgggctctataatattgtaggaaacgcatgggagtggactagtgattggtggaccgtccatcacagtgttgaagagacacttaatcccaagggaccgccctccggaaaagatcgggtgaagaaagggggttcatacatgtgccatcggtcttattgctaccgttaccgctgcgccgcccgatcccagaacactccagattcctccgccagtaacctaggatttcgatgtgccgctgacagactgccaactatggattag

SEQ ID NO: 63194 - DNA, 1050 bp, Artificial Sequence
  derived and/or modified sequence
atggccgctcccgcactgggactagtatgcgggaggtgccccgagttaggactcgtgttactgctgttactactgtccttgttatgcggtgccgctggatctcaggaggcagggaccggggctggcgcaggatcactagctggaagttgcggatgcggtactcctcagcgtccaggcgcacacggctcttcagcggcagcccacaggtattcccgagaagctaacgctcctgggcctgttccgggtgagagacagctggctcattccaagatggttccgatcccagcgggtgttttcaccatggggacggacgaccctcagataaaacaggacggcgaggctcccgctcgcagggtcaccattgacgcattttacatggacgcttacgaggtcagtaatactgaatttgaaaagtttgttaactcaacgggataccttacagaggtggccgctgctccctggtggctgcctgtgaagggggctaactggaggcacccagaaggcccagactctaccatcctgcaccgcccagaccaccccgtgctccatgtctcctggaacgacgccgtcgcatactgtacatgggccggaaaaaggctccccacggaagccgagtgggagtattcatgtcgaggaggattacataatagactcttcccttgggggaacaagttacagcccaaaggacaacactacgctaacatctggcagggcgaatttccggtcacaaacacaggagaagacggtttccagggcaccgcacctgtggatgcttttccacctaacggttatggcctgtataatatcgtgggaaatgcgtgggaatggaccagcgattggtggaccgtgcaccactcagttgaagagaccctgaaccccaaaggacctccttccgggaaagatcgggttaagaaaggcggaagttacatgtgccatcgatcttattgctatcgttatcgatgcgccgcaagaagtcagaacacccccgacagttcagcttctaacctgggtttccgttgtgccgcagacaggctccccacaatggactag

SEQ ID NO: 63195 - DNA, 1447 bp, Artificial Sequence
  derived and/or modified sequence
acatggcccgcgggacaacatggctgcgcccgcactagggctggtgtgtggacgttgccctgagctgggtctcgtcctcttgctgctgctgctctcgctgctgtgtggagcggcagggagccaggaggccgggaccggtgcgggcgcggggtcccttgcgggttcttgcggctgcggcacgccccagcggcctggcgcccatggcagttcggcagccgctcaccgatactcgcgggaggctaacgctccgggccccgtacccggagagcggcaactcgcgcactcaaagatggtccccatccctgctggagtatttacaatgggcacagatgatcctcagataaagcaggatggggaagcacctgcgaggagagttactattgatgccttttacatggatgcctatgaagtcagtaatactgaatttgagaagtttgtgaactcaactggctatttgacagaggttgcagctgctccctggtggttacctgtgaaaggcgctaactggagacacccagaagggcctgactctactattctgcacaggccggatcatccagttctccatgtgtcctggaatgatgcggttgcctactgcacttgggcagggaagcggctgcccacggaagctgagtgggaatacagctgtcgaggaggcctgcataatagacttttcccctggggcaacaaactgcagcccaaaggccagcattatgccaacatttggcagggcgagtttccggtgaccaacactggtgaggatggcttccaaggaactgcgcctgttgatgccttccctcccaatggttatggcttatacaacatagtggggaacgcatgggaatggacttcagactggtggactgttcatcattctgttgaagaaacgcttaacccaaaaggtcccccttctgggaaagaccgagtgaagaaaggtggatcctacatgtgccataggtcttattgttacaggtatcgctgtgctgctcggagccagaacacacctgatagctctgcttcgaatctgggattccgctgtgcagccgaccgcctgcccactatggactgacaaccaaggaaagtcttccccagtccaaggagcagtcgtgtctgacctacattgggcttttctcagaactttgaacgatcccatgcaaagaattcccaccctgaggtgggttacatacctgcccaatggccaaaggaaccgccttgtgagaccaaattgctgacctgggtcagtgcatgtgctttatggtgtggtgcatctttggagatcatcaccatattttacttttgagagtctttaaagaggaaggggagtggagggaaccctgagctaggcttcaggaggcccgcgtcctacgcaggctctgccacaggggttagaccccaggtccgacgcttgaccttcctgggcctcaagtgccctcccctatcaaatgaa

SEQ ID NO: 63196 - protein, 354 aa, Artificial Sequence
  derived and/or modified sequence
MAAPALGLVCGRCPELGLVLLLLLLSLLCGAAGSQEAGTGAGAGSLAGSCGCGTPQRPGAHGSSAAAHRYSREANAPGPVPGERQLAHSKMVPIPAGVFTMGTDDPQIKQDGEAPARRVTIDAFYMDAYEVSNTEFEKFVNSTGYLTEAEKFGDSFVFEGMLSEQVKTNIQQAVAAAPWWLPVKGANWRHPEGPDSTILHRPDHPVLHVSWNDAVAYCTWAGKRLPTEAEWEYSCRGGLHNRLFPWGNKLQPKGQHYANIWQGEFPVTNTGEDGFQGTAPVDAFPPNGYGLYNIVGNAWEWTSDWWTVHHSVEETLNPSYCYRYRCAARSQNTPDSSASNLGFRCAADRLPTMD

SEQ ID NO: 63197 - DNA, 1065 bp, Artificial Sequence
  derived and/or modified sequence
atggccgcccccgccctgggcctggtgtgcggcagatgccccgagctgggcctggtgctgctgctgctgctgctgagcctgctgtgcggcgccgccggcagccaggaggccggcaccggcgccggcgccggcagcctggccggcagctgcggctgcggcaccccccagagacccggcgcccacggcagcagcgccgccgcccacagatacagcagagaggccaacgcccccggccccgtgcccggcgagagacagctggcccacagcaagatggtgcccatccccgccggcgtgttcaccatgggcaccgacgacccccagatcaagcaggacggcgaggcccccgccagaagagtgaccatcgacgccttctacatggacgcctacgaggtgagcaacaccgagttcgagaagttcgtgaacagcaccggctacctgaccgaggccgagaagttcggcgacagcttcgtgttcgagggcatgctgagcgagcaggtgaagaccaacatccagcaggccgtggccgccgccccctggtggctgcccgtgaagggcgccaactggagacaccccgagggccccgacagcaccatcctgcacagacccgaccaccccgtgctgcacgtgagctggaacgacgccgtggcctactgcacctgggccggcaagagactgcccaccgaggccgagtgggagtacagctgcagaggcggcctgcacaacagactgttcccctggggcaacaagctgcagcccaagggccagcactacgccaacatctggcagggcgagttccccgtgaccaacaccggcgaggacggcttccagggcaccgcccccgtggacgccttcccccccaacggctacggcctgtacaacatcgtgggcaacgcctgggagtggaccagcgactggtggaccgtgcaccacagcgtggaggagaccctgaaccccagctactgctacagatacagatgcgccgccagaagccagaacacccccgacagcagcgccagcaacctgggcttcagatgcgccgccgacagactgcccaccatggactag

SEQ ID NO: 63198 - DNA, 1065 bp, Artificial Sequence
  derived and/or modified sequence
atggcagcgcccgcccttgggctggtgtgcgggcgctgcccagagctggggctggtccttctgctgctgttgctcagtctcctgtgtggagcggctggtagccaggaagcgggcacaggcgcgggagccggatcccttgccggttcctgtggatgtggaaccccacagcggccgggggcgcacgggtcctctgctgctgcccaccggtattcacgggaagcaaacgcacctggacccgtcccaggcgagcgacagctagcacactctaaaatggtgcctatccctgccggagtatttaccatgggtaccgacgatccacaaattaagcaagatggagaggcccctgcccgcagggtgacaatcgatgccttctatatggatgcttatgaggtgtctaacactgaattcgaaaaatttgttaacagcactgggtatctaacagaggctgaaaagtttggagacagctttgtgttcgaaggtatgttaagcgagcaagtgaagacgaacatccaacaggcagttgccgctgccccttggtggctgcccgtgaagggtgccaactggaggcaccctgaaggacccgactcgacaattctccaccgacccgaccatccagtcctgcatgtgagctggaacgatgccgtggcctattgcacgtgggctggtaaacgactccctacagaggccgaatgggagtatagctgccgaggtggccttcataatagattgtttccctggggcaataagctccagcctaaaggacaacactacgccaatatttggcagggcgagttcccagtcaccaatacgggggaggatggttttcagggaacggccccagtagacgcctttccccccaatggctacggattatataatattgtgggaaatgcttgggaatggacctcagactggtggaccgttcaccacagcgtggaagagacactcaacccctcttactgttataggtatcgctgcgctgcccgctctcaaaatacgcccgacagcagcgcttcaaatttggggttccgatgtgcggcagaccggctgcctaccatggactag

SEQ ID NO: 63199 - DNA, 1065 bp, Artificial Sequence
  derived and/or modified sequence
atggccgccccagccctgggcctggtgtgtggccgctgcccagagctgggcctggtgctgctgctgctgctgctgagcctgctgtgtggggccgccggcagccaggaggccggcactggagctggagctggcagcctggccggcagctgtggctgcggcaccccccagaggcctggggcccacggcagcagcgctgctgcccaccgctacagccgggaggccaatgcccctggccctgtgcctggagagcggcagctggcccacagcaagatggtgcccatcccagctggggtcttcaccatgggcacagatgacccccagatcaagcaggatggagaggccccagcccggcgggtgaccattgatgccttctacatggatgcctatgaggtgagcaacacagaatttgagaagtttgtgaacagcacaggctacctgacagaagctgagaagtttggagacagctttgtgtttgagggcatgctgtctgagcaggtgaagaccaacatccagcaggccgtggccgccgccccctggtggctgcctgtgaagggggccaactggaggcaccctgagggccctgacagcaccatcctgcacaggccagaccaccctgtgctgcacgtgtcctggaatgatgctgtggcctactgcacctgggccggcaagaggctgcccacagaagctgagtgggagtacagctgccggggcggcctgcacaacagactcttcccctggggcaacaagctgcagcccaagggccagcactacgccaacatctggcagggcgagttccctgtgaccaacacaggagaagatggcttccagggcacagcccctgtggatgccttccccccaaatggctacggcctgtacaacatcgtgggcaatgcctgggagtggaccagtgactggtggacagtgcaccacagcgtggaggagaccctgaaccccagctactgctaccgctaccgctgtgccgcccggagccagaacaccccagacagcagcgccagcaacctgggcttccgctgtgccgctgaccggctgcccaccatggactag

SEQ ID NO: 63200 - DNA, 1065 bp, Artificial Sequence
  derived and/or modified sequence
atggccgcccccgccctgggcctggtgtgcggccggtgccccgagcttggcctcgtgctgctgttattattgctcagtctgctctgcggagctgcggggtcccaggaggccggcacaggcgcgggcgctggttccctggccggctcatgcggctgcggaacaccccaaagaccaggcgcccatgggagttcagctgccgcccaccgatatagcagagaggctaacgccccagggccagttccaggagaaaggcagctcgctcattctaagatggtcccgatccctgcaggtgtgttcactatgggcactgatgacccacagatcaagcaggatggggaggctcccgctcggcgcgtcaccatcgacgcattttacatggatgcctatgaggtctccaatacagagtttgaaaagtttgtcaactctaccgggtacctgaccgaggctgagaaattcggcgactcatttgtattcgaaggtatgctttccgagcaagtgaaaactaacattcaacaggctgtggcagcggctccgtggtggttgcctgtgaaaggggctaattggcgacatcccgagggacccgacagcactattctgcatagaccggaccaccctgtgctgcatgtgtcctggaacgatgctgtcgcctactgtacctgggctggcaaaaggttgccaaccgaggctgagtgggaatacagttgcaggggggggttgcacaacagactgtttccgtgggggaataagctccagcccaagggacagcattatgctaacatatggcagggggaatttcctgtgacaaatactggcgaagatggctttcagggaactgcaccagtggacgcatttccacctaatggttacggactgtataacatcgttggcaatgcgtgggaatggacgagtgactggtggactgtgcaccactcagtggaagagaccctgaacccgtcctactgctatcgataccgatgcgctgctagaagtcaaaacaccccggacagctctgcttctaatctcggtttccgctgcgctgctgatcgtcttcccacaatggattag

SEQ ID NO: 63201 - DNA, 1065 bp, Artificial Sequence
  derived and/or modified sequence
atggctgccccagctctcggcttggtgtgcggaaggtgccctgaattggggctggtgctgctgctgctactcctgagccttctttgcggcgctgccggatctcaagaagcagggacaggcgcaggcgcaggaagcctggcgggatcctgcggctgtggcaccccccagcggccaggagcccacggatcgagcgccgctgctcaccgctacagccgggaggccaatgcgcctgggccagtccctggggagaggcagctggcacattctaaaatggtgccaatcccagcaggggtgtttacaatgggcaccgacgacccgcagattaagcaagacggagaggcccctgccagacgggttacgatcgacgctttttatatggatgcctacgaagtaagtaacaccgaattcgagaagttcgtgaatagtaccggttatctgacagaggccgaaaagtttggcgactctttcgtttttgaaggcatgctgagcgagcaagtgaaaaccaacattcagcaggcagtggctgccgcaccgtggtggctgcccgtcaaaggagctaactggagacatcccgaaggcccagatagtacaatactgcatcgcccagatcaccccgttctgcacgtctcctggaatgacgcggtcgcctactgcacctgggcaggaaaaaggctgccgaccgaggccgagtgggaatactcgtgccgtggcggtctgcataacagactctttccttgggggaacaagctgcaacccaaggggcagcattatgctaatatctggcagggtgagtttccagtgaccaacacgggagaggacgggttccagggtacagcacccgtggacgcgttccctcctaatggctacggattatacaatatcgtaggcaatgcatgggagtggacttcagattggtggactgtgcatcactcagtcgaagagactctgaatccaagctattgctatcggtaccgatgcgccgctaggtcccagaatacccctgattcttccgcatccaatctgggttttagatgcgcagccgatcggcttccgacaatggactag

SEQ ID NO: 63202 - DNA, 1128 bp, Artificial Sequence
  derived and/or modified sequence
aaccgggtcacatggcccgcgggacaacatggctgcgcccgcactagggctggtgtgtggacgttgccctgagctgggtctcgtcctcttgctgctgctgctctcgctgctgtgtggagcggcagggagccaggaggccgggaccggtgcgggcgcggggtcccttgcgggttcttgcggctgcggcacgccccagcggcctggcgcccatggcagttcggcagccgctcaccgatactcgcgggaggctaacgctccgggccccgtacccggagagcggcaactcgcgcactcaaagatggtccccatccctgctggagtatttacaatgggcacagatgatcctcagataaagcaggatggggaagcacctgcgaggagagttactattgatgccttttacatggatgcctatgaagtcagtaatactgaatttgagaagtttgtgaactcaactggctatttgacagaggctgagaagtttggcgactcctttgtctttgaaggcatgttgagtgagcaagtgaagaccaatattcaacaggcagttgcagctgctccctggtggttacctgtgaaaggcgctaactggagacacccagaagggcctgactctactattctgcacaggccggatcatccagttctccatgtgtcctggaatgatgcggttgcctactgcacttgggcagggaagcggctgcccacggaagctgagtgggaatacagctgtcgaggaggcctgcataatagacttttcccctggggcaacaaactgcagcccaaaggccagcattatgccaacatttggcagggcgagtttccggtgaccaacactggtgaggatggcttccaaggaactgcgcctgttgatgccttccctcccaatggttatggcttatacaacatagtggggaacgcatgggaatggacttcagactggtggactgttcatcattctgttgaagaaacgcttaacccatcttattgttacaggtatcgctgtgctgctcggagccagaacacacctgatagctctgcttcgaatctgggattccgctgtgcagccgaccgcctgcccactatggactgacaaccaaggaaagtcttccccagtccaaggagcag

SEQ ID NO: 63203 - protein, 21 aa, Artificial Sequence
  derived and/or modified sequence
MTTSLDTVETFGTTSYYDDVG

SEQ ID NO: 63204 - DNA, 2000 bp, Artificial Sequence
  derived and/or modified sequence
tgctgggcgaatccctttcttgtctggttcatttggaccctccaaagcccacaggctggaacggctgagtcatccaaacaaaaaaggtggcagcccatccctcccccaggagctctaccctgtctcaagtaggtgctaccctgttgctggtggctggctggaattccaagccagttgatcttatcctgtgaggtcccttggaagtggggcccacagactgacgctgctctgcttcctggattcagccctcttcctaaggagctcatggaccctggccgtcatcaggttcaacctcatattcaactgctgggccttgtcttctggccacacactctctccaaatcagcgatggtggggaactgaggagccagaggccattgtggaagaactccaagaaaacaatctccaggttatcacatctaaagcctgagcaagatttgaggctgggaagaggtggatcccagaattggaagaaggagtggtgacgcctaagctatcactggacatatcaaggacttcactaaattagcagggagaagtgaaatgacaacctcactagatacagttgagacctttggtaccacatcctactatgatgacgtgggcctgctctgtgaaaaagctgataccagagcactgatggcccagtttgtgcccccgctgtactccctggtgttcactgtgggcctcttgggcaatgtggtggtggtgatgatcctcataaaatacaggaggctccgaattatgaccaacatctacctgctcaacctggccatttcggacctgctcttcctcgtcacccttccattctggatccactatgtcagggggcataactgggtttttggccatggcatgtgtaagctcctctcagggttttatcacacaggcttgtacagcgagatctttttcataatcctgctgacaatcgacaggtacctggccattgtccatgctgtgtttgcccttcgagcccggactgtcacttttggtgtcatcaccagcatcgtcacctggggcctggcagtgctagcagctcttcctgaatttatcttctatgagactgaagagttgtttgaagagactctttgcagtgctctttacccagaggatacagtatatagctggaggcatttccacactctgagaatgaccatcttctgtctcgttctccctctgctcgttatggccatctgctacacaggaatcatcaaaacgctgctgaggtgccccagtaaaaaaaagtacaaggccatccggctcatttttgtcatcatggcggtgtttttcattttctggacaccctacaatgtggctatccttctctcttcctatcaatccatcttatttggaaatgactgtgagcggagcaagcatctggacctggtcatgctggtgacagaggtgatcgcctactcccactgctgcatgaacccggtgatctacgcctttgttggagagaggttccggaagtacctgcgccacttcttccacaggcacttgctcatgcacctgggcagatacatcccattccttcctagtgagaagctggaaagaaccagctctgtctctccatccacagcagagccggaactctctattgtgttttaggtcagatgcagaaaattgcctaaagaggaaggaccaaggagatgaagcaaacacattaagccttccacactcacctctaaaacagtccttcaaacttccagtgcaacactgaagctcttgaagacactgaaatatacacacagcagtagcagtagatgcatgtaccctaaggtcattaccacaggccaggggctgggcagcgtactcatcatcaaccctaaaaagcagagctttgcttctctctctaaaatgagttacctacattttaatgcacctgaatgttagatagttactatatgccgctacaaaaaggtaaaactttttatattttatacattaacttcagccagctattgatataaataaaacattttcacacaatacaataa

SEQ ID NO: 63205 - DNA, 1581 bp, Artificial Sequence
  derived and/or modified sequence
atatcaaggacttcactaaattagcaggtaccactggtcttcttgtgcttatccgggcaagaacttatcgaaatacaatagaagtttttacttagaagagattttcagggagaagtgaaatgacaacctcactagatacagttgagacctttggtaccacatcctactatgatgacgtgggcctgctctgtgaaaaagctgataccagagcactgatggcccagtttgtgcccccgctgtactccctggtgttcactgtgggcctcttgggcaatgtggtggtggtgatgatcctcataaaatacaggaggctccgaattatgaccaacatctacctgctcaacctggccatttcggacctgctcttcctcgtcacccttccattctggatccactatgtcagggggcataactgggtttttggccatggcatgtgtaagctcctctcagggttttatcacacaggcttgtacagcgagatctttttcataatcctgctgacaatcgacaggtacctggccattgtccatgctgtgtttgcccttcgagcccggactgtcacttttggtgtcatcaccagcatcgtcacctggggcctggcagtgctagcagctcttcctgaatttatcttctatgagactgaagagttgtttgaagagactctttgcagtgctctttacccagaggatacagtatatagctggaggcatttccacactctgagaatgaccatcttctgtctcgttctccctctgctcgttatggccatctgctacacaggaatcatcaaaacgctgctgaggtgccccagtaaaaaaaagtacaaggccatccggctcatttttgtcatcatggcggtgtttttcattttctggacaccctacaatgtggctatccttctctcttcctatcaatccatcttatttggaaatgactgtgagcggagcaagcatctggacctggtcatgctggtgacagaggtgatcgcctactcccactgctgcatgaacccggtgatctacgcctttgttggagagaggttccggaagtacctgcgccacttcttccacaggcacttgctcatgcacctgggcagatacatcccattccttcctagtgagaagctggaaagaaccagctctgtctctccatccacagcagagccggaactctctattgtgttttaggtcagatgcagaaaattgcctaaagaggaaggaccaaggagatgaagcaaacacattaagccttccacactcacctctaaaacagtccttcaaacttccagtgcaacactgaagctcttgaagacactgaaatatacacacagcagtagcagtagatgcatgtaccctaaggtcattaccacaggccaggggctgggcagcgtactcatcatcaaccctaaaaagcagagctttgcttctctctctaaaatgagttacctacattttaatgcacctgaatgttagatagttactatatgccgctacaaaaaggtaaaactttttatattttatacattaacttcagccagctattgatataaataaaacattttcacacaatacaataagttaa

SEQ ID NO: 63206 - DNA, 1201 bp, Artificial Sequence
  derived and/or modified sequence
tttttcttcttctatcacagggagaagtgaaatgacaacctcactagatacagttgagacctttggtaccacatcctactatgatgacgtgggcctgctctgtgaaaaagctgataccagagcactgatggcccagtttgtgcccccgctgtactccctggtgttcactgtgggcctcttgggcaatgtggtggtggtgatgatcctcataaaatacaggaggctccgaattatgaccaacatctacctgctcaacctggccatttcggacctgctcttcctcgtcacccttccattctggatccactatgtcagggggcataactgggtttttggccatggcatgtgtaagctcctctcagggttttatcacacaggcttgtacagcgagatctttttcataatcctgctgacaatcgacaggtacctggccattgtccatgctgtgtttgcccttcgagcccggactgtcacttttggtgtcatcaccagcatcgtcacctggggcctggcagtgctagcagctcttcctgaatttatcttctatgagactgaagagttgtttgaagagactctttgcagtgctctttacccagaggatacagtatatagctggaggcatttccacactctgagaatgaccatcttctgtctcgttctccctctgctcgttatggccatctgctacacaggaatcatcaaaacgctgctgaggtgccccagtaaaaaaaagtacaaggccatccggctcatttttgtcatcatggcggtgtttttcattttctggacaccctacaatgtggctatccttctctcttcctatcaatccatcttatttggaaatgactgtgagcggagcaagcatctggacctggtcatgctggtgacagaggtgatcgcctactcccactgctgcatgaacccggtgatctacgcctttgttggagagaggttccggaagtacctgcgccacttcttccacaggcacttgctcatgcacctgggcagatacatcccattccttcctagtgagaagctggaaagaaccagctctgtctctccatccacagcagagccggaactctctattgtgttttaggtcagatgcagaaaattgcctaaagaggaaggaccaaggagatgaagcaaacacattaagccttccacactcacctctaaaacagtccttcaaacttccagt

SEQ ID NO: 63207 - DNA, 212 bp, Artificial Sequence
  derived and/or modified sequence
ccactggtcttcttgtgcttatccgggcaagaacttatcgaaatacaatagaagtttttacttagaagagattttcagctgctgtggattggattatgccatttggaataagaatgctgttaagagcacacaagccagggagaagtgaaatgacaacctcactagatacagttgagacctttggtaccacatcctactatgatgacgtgggc

SEQ ID NO: 63208 - DNA, 1796 bp, Artificial Sequence
  derived and/or modified sequence
ctgatggtatctctgtttcaggagtggtgacgcctaagctatcactggacatatcaaggacttcactaaattagcaggtaccactggtcttcttgtgcttatccgggcaagaacttatcgaaatacaatagaagtttttacttagaagagattttcagcagatgagaagctggtaacagagaccaaaatagtttggagactaaagaatcattgcacatttcactgctgagttgtattggagaagtgaaatgacaacctcactagatacagttgagacctttggtaccacatcctactatgatgacgtgggcctgctctgtgaaaaagctgataccagagcactgatggcccagtttgtgcccccgctgtactccctggtgttcactgtgggcctcttgggcaatgtggtggtggtgatgatcctcataaaatacaggaggctccgaattatgaccaacatctacctgctcaacctggccatttcggacctgctcttcctcgtcacccttccattctggatccactatgtcagggggcataactgggtttttggccatggcatgtgtaagctcctctcagggttttatcacacaggcttgtacagcgagatctttttcataatcctgctgacaatcgacaggtacctggccattgtccatgctgtgtttgcccttcgagcccggactgtcacttttggtgtcatcaccagcatcgtcacctggggcctggcagtgctagcagctcttcctgaatttatcttctatgagactgaagagttgtttgaagagactctttgcagtgctctttacccagaggatacagtatatagctggaggcatttccacactctgagaatgaccatcttctgtctcgttctccctctgctcgttatggccatctgctacacaggaatcatcaaaacgctgctgaggtgccccagtaaaaaaaagtacaaggccatccggctcatttttgtcatcatggcggtgtttttcattttctggacaccctacaatgtggctatccttctctcttcctatcaatccatcttatttggaaatgactgtgagcggagcaagcatctggacctggtcatgctggtgacagaggtgatcgcctactcccactgctgcatgaacccggtgatctacgcctttgttggagagaggttccggaagtacctgcgccacttcttccacaggcacttgctcatgcacctgggcagatacatcccattccttcctagtgagaagctggaaagaaccagctctgtctctccatccacagcagagccggaactctctattgtgttttaggtcagatgcagaaaattgcctaaagaggaaggaccaaggagatgaagcaaacacattaagccttccacactcacctctaaaacagtccttcaaacttccagtgcaacactgaagctcttgaagacactgaaatatacacacagcagtagcagtagatgcatgtaccctaaggtcattaccacaggccaggggctgggcagcgtactcatcatcaaccctaaaaagcagagctttgcttctctctctaaaatgagttacctacattttaatgcacctgaatgttagatagttactatatgccgctacaaaaaggtaaaactttttatattttatacattaacttcagccagctattgatataaataaaacattttcacacaatacaataagttaactattttattttctaatgtgcctagttctttccctgcttaatgaaaagcttgttttttcagtgtgaataaataatcgtaagcaaca

SEQ ID NO: 63209 - protein, 680 aa, Artificial Sequence
  derived and/or modified sequence
MALSLEEFVHSLDLRTLPRVLEIQAGIYLEGSIYEMFGNECCFSTGEVIKITGLKVKKIIAEICEQIEGCESLQPFELPMNFPGLFKIVADKTPYLTMEEITRTIHIGPSRLGHPCFYHQKDIKLENLIIKQGEQIMLNSVEEIDGEIMVSCAVARNHQTHSFNLPLSQEGEFYECEDERIYTLKEIVEWKIPKNRTRTVNLTDFSNKWDSTNPFPKDFYGTLILKPVYEIQGVMKFRKDIIRILPSLDVEVKDITDSYDANWFLQLLSTEDLFEMTSKEFPIVTEVIEAPEGNHLPQSILQPGKTIVIHKKYQASRILASEIRSNFPKRHFLIPTSYKGKFKRRPREFPTAYDLEIAKSEKEPLHVVATKAFHSPHDKLSSVSVGDQFLVHQSETTEVLCEGIKKVVNVLACEKILKKSYEAALLPLYMEGGFVEVIHDKKQYPISELCKQFRLPFNVKVSVRDLSIEEDVLAATPGLQLEEDITDSYLLISDFANPTECWEIPVGRLNMTVQLVSNFSRDAEPFLVRTLVEEITEEQYYMMRRYESSASHPPPRPPKHPSVEETKLTLLTLAEERTVDLPKSPKAGVQWRDLGSLQPLPPGFKQFSASASHVAGITGTPHHVQRHHVDITKKLHPNQAGLDSKVLIGSQNDLVDEEKERSNRGATAIAETFKNEKHQK

SEQ ID NO: 63210 - DNA, 693 bp, Artificial Sequence
  derived and/or modified sequence
atggagaaacctagactctaccagaaatataagatcagccgagtttggtggcgattgcctgtgatacctgcaaccggagaggccgaggacaaccgcctaaacccagaaggcagggggtgtggggaacccagaagccgtcactgcacaccggcttggacaaccacagccaagctacacctcaaaactatcatttcactccaacccctgaacatgtatcaaatggaaccaggagtgggaagtattcgcactagcccggctttacagagtccacccgctctgacacgtggaccctcagcctgggacaccgccattcgtaaggctctttcttttggtgtggggttgggtgttttggtgcttgtgtgtctgttttatcattttgtgaccctcgcgccaatcctgcagtttgctagtcttccatgtttattagaggccggagctcagatgtcaagacaccccgtcacaacgcaagtgtgcgtgatgccagctcgcttaagcctggggagcgggatctctaggaacctgctgcggttatctgtgtgtcattttacactgttgctgccattcagaagcctaagaccctgtcccctcagttcgcgcgacatggtgctgtcatacgagctatggcttctctgtgatttttatattgctcctccagacagctctggatcaggtatttgcaagaaggctatttag

SEQ ID NO: 63211 - DNA, 2043 bp, Artificial Sequence
  derived and/or modified sequence
atggccctgagcctggaggagttcgtgcacagcctggacctgagaaccctgcccagagtgctggagatccaggccggcatctacctggagggcagcatctacgagatgttcggcaacgagtgctgcttcagcaccggcgaggtgatcaagatcaccggcctgaaggtgaagaagatcatcgccgagatctgcgagcagatcgagggctgcgagagcctgcagcccttcgagctgcccatgaacttccccggcctgttcaagatcgtggccgacaagaccccctacctgaccatggaggagatcaccagaaccatccacatcggccccagcagactgggccacccctgcttctaccaccagaaggacatcaagctggagaacctgatcatcaagcagggcgagcagatcatgctgaacagcgtggaggagatcgacggcgagatcatggtgagctgcgccgtggccagaaaccaccagacccacagcttcaacctgcccctgagccaggagggcgagttctacgagtgcgaggacgagagaatctacaccctgaaggagatcgtggagtggaagatccccaagaacagaaccagaaccgtgaacctgaccgacttcagcaacaagtgggacagcaccaaccccttccccaaggacttctacggcaccctgatcctgaagcccgtgtacgagatccagggcgtgatgaagttcagaaaggacatcatcagaatcctgcccagcctggacgtggaggtgaaggacatcaccgacagctacgacgccaactggttcctgcagctgctgagcaccgaggacctgttcgagatgaccagcaaggagttccccatcgtgaccgaggtgatcgaggcccccgagggcaaccacctgccccagagcatcctgcagcccggcaagaccatcgtgatccacaagaagtaccaggccagcagaatcctggccagcgagatcagaagcaacttccccaagagacacttcctgatccccaccagctacaagggcaagttcaagagaagacccagagagttccccaccgcctacgacctggagatcgccaagagcgagaaggagcccctgcacgtggtggccaccaaggccttccacagcccccacgacaagctgagcagcgtgagcgtgggcgaccagttcctggtgcaccagagcgagaccaccgaggtgctgtgcgagggcatcaagaaggtggtgaacgtgctggcctgcgagaagatcctgaagaagagctacgaggccgccctgctgcccctgtacatggagggcggcttcgtggaggtgatccacgacaagaagcagtaccccatcagcgagctgtgcaagcagttcagactgcccttcaacgtgaaggtgagcgtgagagacctgagcatcgaggaggacgtgctggccgccacccccggcctgcagctggaggaggacatcaccgacagctacctgctgatcagcgacttcgccaaccccaccgagtgctgggagatccccgtgggcagactgaacatgaccgtgcagctggtgagcaacttcagcagagacgccgagcccttcctggtgagaaccctggtggaggagatcaccgaggagcagtactacatgatgagaagatacgagagcagcgccagccaccccccccccagaccccccaagcaccccagcgtggaggagaccaagctgaccctgctgaccctggccgaggagagaaccgtggacctgcccaagagccccaaggccggcgtgcagtggagagacctgggcagcctgcagcccctgccccccggcttcaagcagttcagcgccagcgccagccacgtggccggcatcaccggcaccccccaccacgtgcagagacaccacgtggacatcaccaagaagctgcaccccaaccaggccggcctggacagcaaggtgctgatcggcagccagaacgacctggtggacgaggagaaggagagaagcaacagaggcgccaccgccatcgccgagaccttcaagaacgagaagcaccagaagtag

SEQ ID NO: 63212 - DNA, 2043 bp, Artificial Sequence
  derived and/or modified sequence
atggccctatctctggaagaatttgttcactcactcgacctccgaaccctcccacgcgtgctggaaattcaggcagggatctacctcgagggatccatctacgaaatgttcggaaacgaatgctgctttagtacgggcgaagttatcaaaatcacggggctcaaggtgaaaaagattattgccgaaatctgcgaacaaatagaggggtgcgaatcactacagccctttgagctgccgatgaacttcccaggcctgttcaaaatcgtggccgacaagaccccttatttgaccatggaagaaattacccgcaccattcacataggtccatctagattgggtcatccctgcttttaccaccagaaggacataaaactggaaaacttaatcattaaacagggtgaacagattatgttgaatagtgttgaggagattgatggcgaaatcatggtgtcctgcgcggtggctaggaaccaccagacccactcctttaatctccctctgtctcaggagggagaattctacgaatgtgaagacgagaggatctacaccctcaaagagattgtcgaatggaaaatccccaagaacaggaccaggacagtcaatttaaccgacttttcaaacaaatgggactccaccaaccccttccccaaggatttctacggcacactgatcttgaagccagtctacgagatccaaggagtgatgaaattccgaaaagacataatacgcatcctaccatccctggacgtcgaagtcaaggatattacagacagttacgatgccaattggtttctgcagctgctctctactgaagacctgtttgaaatgaccagcaaggagtttcccatcgtgacggaggtgattgaagcacctgagggtaatcacctgccacagtctatcttacagcccggaaagacgatcgtaatccataagaagtatcaggcaagccggatcctggcctctgagatccgctctaacttccccaagcgccattttctcattcctacatcatataagggaaaattcaagcgacgcccaagagaatttcccactgcttacgatctcgaaatcgcgaagagcgagaaggaaccgctccatgtagtggctaccaaagctttccatagcccacacgacaaactgagctctgtcagcgtaggcgaccagttccttgtccatcagagtgagactactgaagtcctctgcgaggggattaagaaggtggtgaatgtgctagcctgtgaaaaaatattaaagaagtcgtatgaagccgctctcctccctctgtacatggaggggggcttcgtggaagtgattcacgataagaaacagtatcccatcagcgagctgtgtaaacaatttcgtctacccttcaacgtgaaagtgtcggtgcgcgaccttagcattgaagaggacgtattagccgcgacccctgggttacaactggaagaagacattaccgacagttatctgctgatctccgacttcgcaaatccgaccgaatgttgggaaatcccggtaggcagactgaacatgaccgtacagttggtgtcgaatttcagcagggatgcagagccgttccttgttagaacgctagttgaggaaattaccgaagagcagtattatatgatgcgacggtatgagagcagcgctagtcatccccctccgaggcctcccaagcatccatcagtcgaggaaactaagctgacacttctcactctcgcagaagagcgcactgtggatctgcctaaaagccccaaagctggcgtccagtggagggatttgggctcactccaacccctgccccctgggtttaaacagtttagcgcttctgcttcacacgtggcggggatcaccgggacacctcatcatgtgcagcggcatcatgtggacatcacaaaaaaactgcaccccaaccaagctggtctggactcaaaagttctgatagggagccagaacgacttggtggacgaagagaaggaacgcagcaatagaggcgctaccgcaatcgcggaaaccttcaaaaatgagaagcatcagaagtag

SEQ ID NO: 63213 - DNA, 2043 bp, Artificial Sequence
  derived and/or modified sequence
atggccctgagcctggaggagtttgtgcacagcctggacctgcggaccctgccccgggtgctggagatccaggccggcatctacctggagggcagcatctatgagatgtttggaaatgaatgctgcttcagcactggagaggtgatcaagatcaccggcctgaaggtgaagaagatcatcgccgagatctgtgagcagatcgagggctgtgagagcctgcagccctttgagctgcccatgaacttccctggcctcttcaagatcgtggccgacaagaccccctacctgaccatggaggagatcaccaggaccatccacatcggccccagccggctgggccacccctgcttctaccaccagaaggacatcaagctggagaacctgatcatcaagcagggcgagcagatcatgctgaacagcgtggaggagattgatggagagatcatggtgtcctgtgctgtggccaggaaccaccagacccacagcttcaacctgcccctgagccaggagggggagttctatgaatgtgaagatgagcgcatctacaccctgaaggagatcgtggagtggaagatccccaagaacagaaccaggacagtgaacctgacagacttcagcaacaagtgggacagcaccaaccccttccccaaggacttctacggcaccctcatcctgaagcctgtgtatgagatccagggcgtgatgaagttcaggaaggacatcatccgcatcctgcccagcctggatgtggaggtgaaggacatcacagacagctatgatgccaactggttcctgcagctgctgagcacagaggacctgtttgagatgaccagcaaggagttccccatcgtgacagaggtgattgaggcccctgagggcaaccacctgccccagagcatcctgcagcccgggaagaccatcgtcatccacaagaagtaccaggccagccgcatcctggccagcgagatccgcagcaacttccccaagaggcacttcctgatccccaccagctacaagggcaagttcaagaggcggccccgggagttccccacagcctatgacctggagatcgccaagtctgagaaggagcccctgcacgtggtggccaccaaggccttccacagcccccatgacaagctgagctctgtgtctgtgggggaccagttcctggtgcaccagagcgagaccacagaggtgctgtgtgagggcatcaagaaggtggtgaatgtgctggcctgtgagaagatcctgaagaagagctatgaagctgccctgctgcccctgtacatggagggcggctttgtggaggtgattcatgacaagaagcagtaccccatcagcgagctgtgcaagcagttccggctgcccttcaacgtgaaggtgtctgtgcgggacctgagcattgaggaggatgtgctggccgccaccccaggcctgcagctggaggaggacatcacagacagctacctgctgatcagtgactttgccaaccccacagagtgctgggagatccctgtgggccgcctgaacatgacagtgcagctggtgagcaacttcagcagagatgctgagcccttcctggtgaggaccctggtggaggagatcacagaggagcagtactacatgatgagaagatatgagagcagcgccagccaccccccacccaggcctcccaagcaccccagcgtggaggagaccaagctgaccctgctgaccctggccgaggagaggacagtggacctgcccaagagccccaaggccggcgtgcagtggagggacctgggcagcctgcagcccctgcccccaggcttcaagcagttcagcgccagcgccagccacgtggccggcatcaccggcaccccccaccacgtgcagaggcaccacgtggacatcaccaagaagctgcaccccaaccaggccggcctggacagcaaggtgctgattggcagccagaatgacctggtggatgaggagaaggagaggagcaacagaggagccacagccatcgccgagaccttcaagaatgagaagcaccagaagtag

SEQ ID NO: 63214 - DNA, 2043 bp, Artificial Sequence
  derived and/or modified sequence
atggccctgagcctggaggagttcgtgcacagcctggacctgcggaccttaccacgcgtgcttgagatccaggccggcatttacctggaggggtccatttacgaaatgtttggaaatgagtgctgtttttccaccggagaagttattaagatcacgggtctgaaggtgaaaaaaatcattgccgagatctgcgagcagatcgaagggtgtgagagtcttcaaccctttgaattacctatgaattttcctggacttttcaaaatcgtggcagataaaacaccctacctgacgatggaggagatcacacgaacaattcatattggaccgtctagacttggtcacccatgtttttatcatcaaaaggatattaagctagagaacctgataattaaacagggtgaacagattatgctgaacagtgtggaggagatcgacggagagatcatggtgtcctgtgctgtcgctcgcaatcaccagacccattcatttaatctgcccttatcacaggagggtgagttctatgaatgcgaggatgagaggatttacacgcttaaggaaatcgtggaatggaaaattccgaagaacaggacccgtacagttaatttaaccgacttcagcaacaagtgggatagcacaaatcccttcccaaaggatttttatggcacactcatcctgaaacctgtctacgagatacaaggcgtcatgaagttcaggaaggacattattagaattctgccatcattggatgtggaagtgaaggacatcactgactcttatgatgccaattggtttctgcaactgctctccaccgaagatctgtttgagatgacctcaaaggaatttcccatcgtgacagaggtgatagaagctcctgaaggcaatcatctgccacaaagcattctacaacccggaaaaacgatcgtcatccataagaagtaccaggcctccagaatcctcgcctctgaaattcgtagtaactttcccaagagacacttcctaatacctacttcgtataagggaaagtttaaacggaggccgagagagtttcccacagcatatgacctggaaattgctaaaagcgaaaaggagcccttgcacgtggtggcgaccaaggcctttcattcaccgcacgataaactctctagcgtgagcgtcggtgaccaattcctcgtgcaccagagcgagactactgaggtactgtgtgaggggataaagaaggtcgtcaacgtactcgcttgtgagaagattttaaagaagagttacgaggcagcattgttgccactgtacatggaaggaggtttcgtagaagttatccatgataaaaaacaataccctattagcgagctgtgcaaacagttcaggcttccattcaatgtaaaagtgtccgtgcgtgacctgagcattgaggaggacgttctggctgcaacccctggacttcagctggaagaagacatcaccgatagctaccttctgattagcgattttgctaacccaacagagtgctgggaaatcccagtcgggcgtctgaacatgaccgtgcagttagtttctaatttttcgcgggatgctgagccatttctagtgaggactctcgttgaagagatcaccgaagaacagtattacatgatgcgcaggtacgagtcatccgcctctcacccccccccccgccccccgaagcacccatcagtcgaagaaaccaagctcaccctcctgactctcgctgaggaacggactgtggacctgcccaaatctcctaaagccggagtccagtggagggaccttggatcgctccaacctctgccccctggatttaagcaattcagcgcctcagcatctcatgtggccgggattactggaaccccccaccacgtccaacgccatcatgtggatattaccaaaaagctgcaccctaaccaggcaggcttagacagtaaggtacttataggaagtcagaatgacctggtggatgaggaaaaagagaggagtaatcgaggagccaccgcaatcgccgagacttttaagaacgaaaagcatcaaaaatag

SEQ ID NO: 63215 - DNA, 2043 bp, Artificial Sequence
  derived and/or modified sequence
atggcgttatctcttgaagagtttgtgcacagcctggacctccggactctcccacgcgtgctggagatccaggccggtatttacctggagggtagcatctacgaaatgttcgggaacgagtgctgcttctccaccggcgaagtgatcaagataaccggtctgaaggtcaagaagattatcgccgagatttgtgaacagatagagggctgtgagtccctgcagccctttgagcttcctatgaactttccagggctatttaaaatcgttgcggacaagacaccctacctaactatggaagaaatcacaagaacaattcacatcggcccttcccgtctgggacatccctgcttctaccaccaaaaggacataaagctagaaaatctgatcatcaaacagggcgagcagattatgctcaactccgttgaggaaattgatggggaaattatggtgtcatgcgctgtggcacggaatcatcaaacccattcattcaacctccctctgtcccaggaaggggagttctatgaatgcgaagatgaacgcatttacaccctgaaagagattgtggagtggaaaatccccaagaacaggacacgaacagttaacctgacagacttcagtaacaaatgggattctactaaccctttccccaaagacttttacggcactcttatcctgaagcccgtgtacgaaattcagggagttatgaaatttcggaaagatatcattcgtatacttccttccctagatgtggaagtgaaagatatcaccgacagctatgacgctaactggtttttgcagctcctctccaccgaggacctgtttgaaatgacgagtaaggaatttcctatcgtgaccgaagtaatcgaagcaccagagggcaaccacttaccccagagcatccttcaaccgggaaaaactatcgtgattcacaaaaaatatcaggcttcacggattttggcttcggaaattcggtccaactttcccaagaggcatttcctcattccaacttcgtacaagggcaagtttaagcgacggccacgcgagtttccaacagcttatgacttagagatagccaagtccgagaaagaaccattgcatgtcgtcgccactaaggctttccactcaccccacgataaactaagcagtgtgtccgtgggagaccagttccttgtgcaccagtcagaaaccactgaggttctatgtgagggaattaaaaaagtcgtcaatgtcctcgcctgtgaaaagatcctcaagaagtcgtacgaagccgctctgctgccgctctacatggaaggaggattcgtggaggtcatacacgataaaaagcagtacccaatctctgagctctgtaagcagttccgcctgcccttcaacgtcaaagtatcagtaagggacctgtccatcgaagaagacgttctcgcagcgacaccgggactgcagttagaagaagacatcaccgattcatatttattaattagtgattttgctaaccctactgaatgttgggagatacctgtgggacgactaaacatgactgtgcagttggtttccaattttagcagagatgccgagcctttcttagtccgaacattggtggaggagatcaccgaagaacagtactatatgatgagacgatacgagtctagcgcctcccacccaccccctaggccaccaaagcatccaagcgttgaggaaacaaagctcacattgttgacgcttgcagaagaaagaactgtcgacctgccaaagtccccgaaagccggtgtccaatggagggatctgggcagcttgcagcccctgcctcctggctttaagcagttttcggcctccgctagccacgtggctggaataaccggaaccccacaccatgtacaaagacatcatgtggacattactaaaaaactacaccccaaccaggcaggacttgacagcaaagtgttaatcggttcacagaatgacctagtggatgaagaaaaagagaggtcgaaccgaggagcaactgcaatcgctgaaaccttcaagaatgagaaacatcagaaatag

SEQ ID NO: 63216 - DNA, 468 bp, Artificial Sequence
  derived and/or modified sequence
aaacctcgcccagattcaggcgtgtaaaccagccggagcggcgcggcagcggcaggaccgccgtggcgcctagagtagcgacccggggggagcgcggggcgacgctggctgcagggacccggtgacagcgtgagaggttcgcagagcatggtggtgtgttcctgtagtcccagctactcgggaggctgagcaggagaatcgctggaacctggcaggcagaacttgcagtgagctgagatcgtgccactgcactccagcctaggcgacagagtgagactccgtctcaaacaacaacaacaacaaaagctcctcgatggaaccatttgatagtgacaaggattgaagtactaggttttgacaagcttgcatcatgcgtgagtataagctagtcgttcttggctcaggaggcgttggaaagtctgctttgactgtacaatttgttcaaggaatttttgtagaaaaatacga

SEQ ID NO: 63217 - DNA, 3983 bp, Artificial Sequence
  derived and/or modified sequence
agctactccaccccactctggctgtagtgtgacattcctgcctgcctgaggaagaaatggtgagcaggggctgcaattgcagacaagtgtcacccagaagccacaagtttctgtgagcaccaggtctacaaactacccaaggcatagcaatggcattatcactggaagaattcgtccactcccttgacctcaggaccctacccagggttctagaaatccaggcaggcatctatcttgaaggctctatttatgaaatgtttggaaatgaatgctgtttttcaacaggagaagtgattaaaattactggtctcaaagttaagaagatcatagctgaaatttgtgagcagattgaaggttgtgagtctctacagccatttgaactgcctatgaattttccaggtctttttaagattgtggctgataaaactccataccttactatggaagaaatcacaaggaccattcatattggaccaagtagactagggcatccttgcttctatcatcagaaggatataaaactagagaacctcatcataaagcagggtgagcaaatcatgctcaactcagttgaagagattgatggagaaataatggtgagctgtgcagtagcaaggaatcatcaaactcactcatttaatttgcctttgtcacaagaaggagaattctacgagtgtgaagatgaacgtatttacactctaaaggagattgttgaatggaagattcctaagaacagaacaagaactgtaaaccttacagatttttcaaataagtgggactcaacgaatccatttcctaaagacttttatggtaccctgattctcaagcctgtttatgaaattcaaggtgtgatgaaatttcgaaaagatataatccgcatcctccccagtctagatgtcgaagtcaaagacatcactgattcttacgatgctaactggtttcttcagctgttatcaacagaagatctttttgaaatgactagtaaagagttccccatagtgactgaagtcatagaagcacctgaaggaaaccacctgccccaaagcattttacagcctgggaaaaccattgtgatccacaaaaagtaccaggcatcaagaatcttagcttcagaaattagaagcaattttcctaaaagacacttcttgatccccactagctataaaggcaagttcaagcggcgaccgagggagttcccaacggcctatgacctagagatcgctaagagtgaaaaggagcctcttcacgtggtggccaccaaagcgtttcattcccctcatgacaagctgtcatccgtatctgttggggaccagtttctggtgcatcagtcagagacgactgaagtcctctgtgagggaataaaaaaagtggtgaatgttctggcctgtgaaaaaatcctcaaaaagtcctatgaggctgcgctgctccctttgtacatggaaggaggttttgtagaggtgattcatgataagaaacagtacccgatttctgagctctgtaaacagttccgtttgcccttcaatgtgaaggtgtctgtcagggatctttccattgaagaggacgtgttggctgccacaccaggactgcagttggaggaggacattacagactcttacctactcataagtgactttgccaaccccacggagtgctgggaaattcctgtgggccgcttgaatatgactgttcagttagttagtaatttctctagggatgcagaaccatttctagtcaggactctggtagaagagatcactgaagagcaatattacatgatgcggagatatgaaagctcagcctcacatcccccacctcgccctccgaaacacccctcagtagaggaaacaaagttaaccctgctaaccttagcagaagaaaggacggtagacctgcccaagtctcccaaggctggagtgcaatggcgtgatcttggctcgctgcaacctctgcctcccgggttcaagcaattctctgcctcagcctcccacgtagctgggattacaggcaccccccaccacgtccagcgtcatcacgtagacataaccaagaaacttcacccaaatcaagctggcctggattcaaaagtactgattggtagtcagaatgatttggtggatgaagagaaagaaaggagcaaccgtggggccacagcaatagcagaaacattcaaaaatgaaaaacatcaaaaataacaagatgtgacagaagccacttaggcagcaaacataaatgttgcagtgaaaaaagaagctagccttctagctgaaaaacgagtattccccaatggactccagaagaaacttgattcatcgctgcaaaggaaagaacaaccttaaaacttttaacagataaaacttacagaaacctatgatatagaattcatatagtctattctgttgtgtctaaatctgtaggcattgtgttgttgttctttaggacgtatttatttaacttgcacattttttcagattcttatttctactaccaacaactaagtaattgggaaataattctgtatttcagtttctgagtaaaaccagtctgaaataggataaaagccaccaaatattttcttttttttccagaatttgttttgccattttttagtgctatcatcattcctaacaagactaacttacagaaaaataattatatctgactgatttaaaatgttcaggtttcttatccaaatcccttggaactatggaaaggagtttgatttcacattcacagtgtatttacaaaatacgctgtgtcataaatatgtttgaattccaacagccaaagccattgagagtcataggagttttccataaccttctcttctatgacccaacaacaagctcatgactgaaatttcaccagatttctgagacgatgtcttaatattctatgtgctatgtaccagataattctttagatgaatgtttcttaggattgtaggaaaattatctagttaatcataatatttgatggaaagaaaaagacaataaaattgtaatataataaatttggctgacaagaaaccaaagtgattcttaattagtatacatcagaatgatgctcttatagttgtaccatctataaaaattactttaagggctctcacattttaataatttatcttattatgtattaagtatacaggaacaatattatttttcctttaacaaaatgaagagacaggctatctggttaatgttacataggaatttaatagtaatgcttgaacttcatccatagatcatactctgtacaaaatttgttagctaacatcctatctcataattattttatgttttgtggagaaatttgttgattttgtaccaaagtgtttctgaagacaataaattgtgagtcaactttagaacaaaaaaaattagagttttttcaatgtttatattctgattaagcttactttaccttacattttttctaagtaacaatgaatcctgatttctagtgtcctaaaaattgcttagtgatttgattgtggtaatatcatttcttatctacaatgtctaaagttttatgggacagtttttcttttatttattttgcctgtttgtgcagataagaacagaaacttttctaagacccacatttggttattgaaggccacagcgaatcttaacctaacagccttgacaaactgcaccataggtgtttttagactcatataatttgttatttttcaaacaatagtgaataattaatatttttgtttggaatttgagaacaattaaatttgtacttttagtaactaccattctttgattagaaaattaagagaatgcatatcttactttggttgtaaattatcaagggctttctaatagaaatcatatataacatttctaaatataagtcctttcacatactgtgtttccagttgtcttgatattgaaaagtgtaataaacttcatgctcacctattggagatttgggaaggttgaaaataaacttcctaatttttatttgta

SEQ ID NO: 63218 - protein, 195 aa, Artificial Sequence
  derived and/or modified sequence
MSLISWLRWNEAPSRLSTRSPAEMVLETLMMELTGQMREAERQQRERSNAVRKVCTGVDYSWLASTPRSTYDLSPIERLQLEDVCVKIHPSYCGPAILRFRQLLAEQEPEVQEVSQLFRSVLQEVLERMKQEEEAHKLTRQWSLRPRGSLATFKTRARISPFASDIRTISEDVERDTPPPLRSWSMPEFRAPKAD

SEQ ID NO: 63219 - DNA, 588 bp, Artificial Sequence
  derived and/or modified sequence
atgagtctgatttcctggctgcgatggaacgaggcaccgtcccgactttctacaaggtctcctgcagagatggttctagagaccctcatgatggaactgacgggccagatgcgggaagctgaacgccaacaaagagaaagatcaaacgccgtcagaaaggtgtgcaccggtgttgattattcttggctggcttctaccccgcgtagcacctacgatctgagcccaatagagcgacttcagctggaggacgtttgcgtgaaaattcatcctagttattgcggccccgctatcttaaggttcagacagctgttagctgaacaggagccagaagtgcaggaagtttcacagctcttccgtagcgtgttacaggaggtactggagagaatgaagcaggaggaagaggcccacaaactgacacgacaatggtctctgcggccgcggggtagtttggcaaccttcaaaactagggccagaatcagccccttcgcaagtgacatacggaccatcagtgaggatgtggaacgcgacacacccccacccctcaggagctggtccatgcccgagtttagagcgccaaaggccgattag

SEQ ID NO: 63220 - DNA, 588 bp, Artificial Sequence
  derived and/or modified sequence
atgagcctcatctcctggctgcgctggaatgaggcccccagccggctgagcaccaggagccctgctgagatggtgctggagaccctgatgatggagctgaccggccagatgagggaggccgagcggcagcagcgggagaggagcaatgctgtgaggaaggtgtgcaccggggtggactacagctggctggccagcacccccaggagcacctatgacctgagccccatcgagcggctgcagctggaggatgtgtgtgtgaagatccaccccagctactgcggccctgccatcctgcgcttccggcagctgctggccgagcaggagcctgaggtgcaggaggtgtcccagctgttccgctctgtgctgcaggaggtgctggagaggatgaagcaggaggaggaggcccacaagctgacccggcagtggagcctgcggccccggggcagcctggccaccttcaagacccgggcccgcatcagcccctttgccagtgacatccgcaccatcagtgaagatgtggagcgggacaccccaccacccctgcgctcctggagcatgcctgagttccgggcccccaaggctgactag

SEQ ID NO: 63221 - DNA, 588 bp, Artificial Sequence
  derived and/or modified sequence
atgagcctgatcagctggctgcggtggaacgaggcccccagccggctgagtacacgatcccccgctgaaatggtattggagactctgatgatggagttgaccggtcagatgcgcgaagctgagagacagcagagggaacggagtaacgccgtccggaaggtctgcaccggcgtagattattcctggttagcttcaaccccccgtagcacgtatgacttgtctcctattgagcgcctccaactagaggatgtttgtgtgaagatccaccctagctattgtgggcccgccattctgcggtttaggcaacttctggccgaacaggaacctgaggtgcaggaagtgtcccagctttttagatctgtgctgcaagaggtactggagaggatgaaacaggaggaagaagcacacaagcttacccggcagtggagcctacggcccaggggctctctcgcaaccttcaagacccgggcacggatttcaccattcgcctctgatattagaacaatatcggaagacgtcgagagggacacaccaccccctctgagatcatggtcaatgcccgagttccgggcgccaaaggcggattag

SEQ ID NO: 63222 - DNA, 588 bp, Artificial Sequence
  derived and/or modified sequence
atgtcactgatctcctggttgaggtggaatgaagcgccaagcaggcttagtacacggtcccctgctgagatggtgcttgaaactctgatgatggagctcaccggccaaatgagggaggcagaacggcaacagagagaacggagcaatgccgtgagaaaggtctgcactggggtcgactattcatggctggcttcgacaccgaggtccacatatgatttaagtcccatcgagcggctgcagttggaggacgtgtgcgtcaaaattcacccttcatattgcggccctgccattctgcgtttccgccaattgcttgcagagcaagagcccgaagttcaggaagtgagccagctgttccgctctgtgctccaggaggtgttggagaggatgaagcaggaagaggaggctcataaactgacaagacagtggagcctgcgtccaaggggatcccttgccaccttcaaaaccagggcccgaatctccccctttgcctccgatattaggacgatttcagaagacgtggaacgcgacacaccccctccattgagatcatggagtatgccagagttcagagcgccaaaagccgattag

SEQ ID NO: 63223 - DNA, 4266 bp, Artificial Sequence
  derived and/or modified sequence
ttcatgcccattacagtattcccatgcccctcacagggcagtgtgcatctgttttagtgctacctaatgtctgttaggtgcaagctggcccacacatggcttctaggcagaacagtctacaagtgacagcgtgaccagagagcagagacaggaaggaggcccagacatgagtgtgggatgctgcagaacagcaacaggatgcttctgctatccccaaatgttatctcaaatacctcaacgtcaatgctttctgttccatgttcctcttctccctggacagcccctccttctgaaagtcagaactgtctgctcttgagcttgccttgagggaaggaaataatttagataagcagagaggaagacaggcaagggatgtggtggggcaaaggcggagatgtatcttcacaggtccctgtcctcagcacccagaatcaccccttccctgtaggagggagctgatagaaagaggggatctccatccaggagccacccaccaggcagctggaaacatttgccaacagcaggtacacctagggctcagcagagggttgggtgagaatggtcttgcccagtttgtgccacactgagcaccggctggaggaggaagcggacagaatgccatctggacacaagtgctccctcactgcctgggcctgggtcgcctcaggcttttgtgtcagatcagccactccctctacagataatgctgctccaggcaaagaggcttaggtgggtctccagggcaaccgcagctcaggagctggcccgcctccatggttcatcagggaagctgtggctccagcctcgcgggatacatacacgcatacacacacacacacacacacacacacacacacacacacacacacctacacaccccacaaacaatagtccaggctggatctctcctcctgtctcttctcttggtaaaacttctcagagaaccaaagagaggcaaaatttgaggccagccggcagcagcagagaagctgagggagacttgaggatgtagactgccctgccctgctgtggctgctcaactttctttttttttcctgaaaatatccagacactctcttctcccagactgggaagcagaacgcaggccccctgctgtgacgctgcacctgagcagaggctgacctcagagcagggccaggggctatgtctctcatctcatggcttcggtggaacgaggccccatcccggctgtccaccaggagccctgctgagatggtgctggagacgcttatgatggagctgacggggcagatgcgagaggctgagaggcagcagcgggagcgcagcaatgcggtcagaaaggtctgcaccggtgtggactacagctggctggccagcacaccccggtccacctatgacctcagccccattgagcggttgcagctggaagatgtctgcgttaagatccacccatcctattgtgggcctgctatcctcaggttccggcagctgctggcggagcaggagcccgaggtgcaggaggtgtcccagctcttccgctcggtgctgcaggaggtcctggagaggatgaagcaggaagaggaggcccacaagctgacgcgccagtggagcctgcggccccgcggcagcctggccaccttcaagacccgcgcgcgcatctcgcccttcgccagcgacatcaggaccatctccgaggacgtggagcgggacacaccgccgccactgcggtcctggagcatgcccgaattccgggcgcccaaagccgactgaccccggccgcttccctgcccagaagcggagccttctgcagggggaatgataggccggtgaccggagcgccgggccctggaacctccccacctaggcctgacgaggagacccaagaggcggccccatcccaagacgctgctataaaatgaagcgactccctgccccatcctcttcctctggccacaaagctgagttaggtcgtagagcggcaccgccctctccctctcctgcgctagtctgcaggagcagccccttccctaactggcagattcaaggttttggaagacagaccattgccccatcctcatctcctggttctgtctaaaaggggacagttgccctgccttttggcaagacctaggttctcaccccaatttcagggatgtcccattcacccccctacccccatccccaatgagaagggacctgttggctggtatgccttcttgctagtgactggctgagctcaccactgcaggtgggtcacacacagcctcataggcaggcacagctggaagggaccagagagacatttagatccactctcttcagctagtaaatgtggaacttgaggctcagagagggacacttcttctgcctttaactgcagccagctcctcatgaacagtgagattgttcctgcatgaatagtgtctgttcctgagtttggaatcctgggctatgaagggacaggtccaaaggctacatctctacctacctgtggcctgatccatctcttaccttggcagtgggatgagaatctaagctgctctccaagaagtgtagctaggggtggaggtaggttactcattaccccacgccacaatgtcatcgcatgggctgtggccagtccctaacagcttcttccagaggctcagctccaaggacttcagatgctgccctaaagagcccaggtttctcaattccagggttccgctttctgcagctggtcacacctgctctctggctttctccagaaagtgatgcccaaacccctgactgaccttgaggcagctgagtgaaatgttctagaagagcttcctgcagcttcattgtccttcccttttctaacatggttaggccttgatgatgggcatgtggattacccaatgtgtggatcacccatggaaaatctggaaggccaggaggccttcccacacactctggggttgaagtggggtgtaagggggatgggtggggaagtgtctaccctcaactaccagcacacatgcagaaaatgcaagtggaccttaatagtagcctaaataaaatacccggaggagatataatcaacaggggggaaaagtgtgtattccctcagtggaaaaaagtttttttgaatgatttggttttgaacttcccttttgaagtttttttggattttcacttgaatctggacagagaatcataggatggtggaaaacctctgatccaacactatcaagatgaaagagttgattggcttattaatgtaattggtagaagttgagaatcacttaaaatatacatcttaaacatcttacgtattttatttgaagacataaaaagttcacttggttgccaaacttttttttttttttttgagactgagtctcactctgttacccaggctgcagtgcagtggcgtgatctcggctcaccacaacctttgcctcccgggttcaagtgattcttctgcctcagcctcctaagtagctgggactacaggcacgtgccatcaccccagctaatttttgtatttttattagagatggggtttcactatgttgcccagaatggtcttgaactcctgacctcgtgatccactcgccttggcctcccaaagtgctgggattacagacatgagccactgtgcctggctgccaaacttttgatgtgggtccaagctgtgcttttttgtgacctatatgttttgtctggtgggagttctacacttaagttttcttggtttgcactttaatcataacaataagaacaactggcgtaaaagagttttggaacaagcagaagtgacccttggtaagcagactgctcagctggtaggggcaaaagtgttgggggaggattagaaaaaggcctccacattgtgggctttccgggtgccctggatgtgggtcagcaaatgttttagaggaagtagttaacctggagggagattcaaaggaggctggataagagaatgtctatttttctccttccctatcaccttacatgtacctattctccccaaagagaaggaagaccttaggctttcaatgtggtgttctttcttaagtttaagtaactggctgccaatgaaaaccttcccttcgagccgcaggcatgtggacagaatccaccaccctccttagacactcctcagactactacaggctatccccagctggtggctctcaaattcatgagggtccagaagttgttcctctggattcaggttgttaaagggactaatgaggtctgcttccattactattattgaaacctcaataaccacaaataaaagaacaaaaagtt

SEQ ID NO: 63224 - DNA, 588 bp, Artificial Sequence
  derived and/or modified sequence
atgagcctgatcagctggctgagatggaacgaggcccccagcagactgagcaccagaagccccgccgagatggtgctggagaccctgatgatggagctgaccggccagatgagagaggccgagagacagcagagagagagaagcaacgccgtgagaaaggtgtgcaccggcgtggactacagctggctggccagcacccccagaagcacctacgacctgagccccatcgagagactgcagctggaggacgtgtgcgtgaagatccaccccagctactgcggccccgccatcctgagattcagacagctgctggccgagcaggagcccgaggtgcaggaggtgagccagctgttcagaagcgtgctgcaggaggtgctggagagaatgaagcaggaggaggaggcccacaagctgaccagacagtggagcctgagacccagaggcagcctggccaccttcaagaccagagccagaatcagccccttcgccagcgacatcagaaccatcagcgaggacgtggagagagacacccccccccccctgagaagctggagcatgcccgagttcagagcccccaaggccgactag

SEQ ID NO: 63225 - protein, 478 aa, Artificial Sequence
  derived and/or modified sequence
MLGSLGLWALLPTAVEAPPNRRTCVFFEAPGVRGSTKTLGELLDTGTELPRAIRCLYSRCCFGIWNLTQDRAQVEMQGCRDSDEPGCESLHCDPSPRAHPSPGSTLFTCSCGTDFCNANYSHLPPPGSPGTPGSQGPQAAPGESIWMALVLLGLFLLLLLLLGSIILALLQRKNYRVRGEPVPEPRPDSGRDWSVELQELPELCFSQVIREGGHAVVWAGQLQGKLVAIKAFPPRSVAQFQAERALYELPGLQHDHIVRFITASRGGPGRLLSGPLLVLELHPKGSLCHYLTQYTSDWGSSLRMALSLAQGLAFLHEERWQNGQYKPGIAHRDLSSQNVLIREDGSCAIGDLGLALVLPGLTQPPAWTPTQPQGPAAIMEAGTQRYMAPELLDKTLDLQDWGMALRRADIYSLALLLWEILSRCPDLRPAVHHPSNWPMRQNWAIPLPLMSYGPWQCRRGGVPTSHPPGAALPQTLMG

SEQ ID NO: 63226 - DNA, 1437 bp, Artificial Sequence
  derived and/or modified sequence
atgctgggatccttgggactttgggccctactcccaacggccgtcgaggcgccaccaaacaggaggacctgcgtattttttgaagctcccggagtgcggggctctactaaaacattgggggaactgctggatacaggaaccgaactgccgcgggcaattaggtgtctttactcgcggtgttgtttcgggatttggaatttgacacaggatcgcgcgcaggtggagatgcagggatgtcgtgactctgatgagccaggctgcgagtccctgcactgcgaccctagtccgcgcgcccacccctctccaggttccacactgtttacatgctcatgcggtaccgatttctgcaacgccaactatagccacctgccccccccaggcagcccaggcactcctggttcccaaggtcctcaggccgcgccaggtgaaagtatctggatggcactggtgctcctaggcctcttcctcttacttctgctgctcctggggagcatcattttggccctactgcaacgcaaaaactatcgggtgcggggtgaacctgtaccagagcctcggcccgattctgggcgggattggtcggtggagctccaggaactccctgagctctgtttttcacaggtaattcgcgaaggcggacacgccgtggtctgggcagggcagctgcaaggaaagctggtagctatcaaggcctttccgccaaggagtgtggcccagtttcaggcagaacgggcactctatgaactgcctggtcttcaacatgaccatatagtgcggttcatcaccgcatctcgcggaggacctggaaggttattgtctgggcccctgttggtgttagagctgcaccccaagggatctctttgtcactatctgacccaatacacaagtgattggggtagcagcctgagaatggccctgtccctggcacagggccttgcctttttgcatgaggaacgctggcagaacgggcagtataagcctggtattgcacatagagacctgtcctcacagaatgtgctaattagggaggatggttcttgtgccattggcgatcttggtcttgctttggtgttgccaggactcactcaacctcccgcttggacacctacccagcctcaggggccagccgcaattatggaggccggcacccagcggtacatggctcccgaattattggacaagaccctggatctccaggattggggcatggctctgaggcgagcagacatctactccctggccctgctactgtgggagattctgagccgctgccccgatctccgaccggccgtacaccacccatccaattggcccatgcgacagaactgggccatcccactccctctgatgagctacgggccttggcagtgcaggcgcggaggggttccaactagtcaccctcctggggcagcgctcccacagacactgatgggctag

SEQ ID NO: 63227 - DNA, 1437 bp, Artificial Sequence
  derived and/or modified sequence
atgctgggcagcctgggcctgtgggccctgctgcccacagctgtggaggccccacccaacagaaggacctgtgtgttctttgaggcccctggggtgcggggcagcaccaagaccctgggggagctgctggacacaggaacagagctgccccgggccatccgctgcctgtacagccgctgctgcttcggcatctggaacctgacccaggaccgggcccaggtggagatgcagggctgccgggacagtgatgagcccggctgtgagagcctgcactgtgaccccagcccccgggcccaccccagccctggcagcaccctcttcacctgcagctgtggcacagacttctgcaatgccaactacagccacctgcccccacctggcagccctggcaccccaggcagccagggcccccaggccgcccctggagagagcatctggatggccctggtgctgctgggcctcttcctgctgctgctgctgctgctgggcagcatcatcctggccctgctgcagaggaagaactacagagtgcggggggagcctgtgcctgagcccaggccagattctggccgggactggagcgtggagctgcaggagctgcctgagctgtgcttcagccaggtgatccgggagggcggccatgctgtggtgtgggccggccagctgcagggcaagctggtggccatcaaggccttccccccaagatctgtggcccagttccaggccgagcgggccctgtatgagctgcccggcctgcagcacgaccacatcgtgcgcttcatcacagccagccggggcggccctggccgcctgctgagcggccccctgctggtgctggagctgcaccccaagggcagcctgtgccactacctgacccagtacaccagtgactggggcagcagcctgaggatggccctgagcctggcccagggcctggccttcctgcacgaggagcgctggcagaatggccagtacaagccaggcatcgcccaccgggacctgagcagccagaatgtgctgatcagagaagatggcagctgtgccatcggggacctgggcctggccctggtgctgcccggcctgacccagcccccagcctggacccccacccagccccagggccctgctgccatcatggaggccggcacccagcgctacatggcccctgagctgctggacaagaccctggacctgcaggactggggcatggccctgcggcgggctgacatctacagcctggccctgctgctgtgggagatcctgagccgctgcccagacctgcggcctgctgtgcaccaccccagcaactggcccatgaggcagaactgggccatccccctgcccctgatgtcctatggcccctggcagtgccggcggggcggcgtgcccaccagccaccccccaggggccgccctgccccagaccctgatgggctag

SEQ ID NO: 63228 - DNA, 1437 bp, Artificial Sequence
  derived and/or modified sequence
atgctgggcagcctgggcctgtgggccctgctgcccaccgccgtggaggcgcctccaaataggcggacctgtgtgttctttgaggcacccggcgttcgggggagtacgaagactttaggagagttacttgacaccggcactgaactgccccgtgcaatcaggtgcctctatagtaggtgttgctttggcatttggaatcttacccaagatcgcgcccaagtggaaatgcagggttgtcgggatagtgacgaaccgggttgcgaatcccttcactgtgacccctcccccagggctcacccgtcaccgggcagcacactcttcacatgcagctgcggcacagatttctgcaacgcaaactattctcacttgcctccacccggcagcccaggaacaccgggcagtcaaggaccccaggcagctccaggtgagagcatctggatggctttggtacttttgggcctgttcctcctgcttcttctgctcttgggaagcatcattctggctctattgcagcgcaagaattatcgggtcaggggggagccagtgccagagccaagaccagattccggacgcgactggtccgtggaacttcaggaactgcccgagctgtgtttcagtcaagtcattagggaaggcggacatgccgtcgtttgggcaggacagctgcaagggaagttagtcgccatcaaagccttccccccccgttccgtggcacagttccaggctgaacgtgcactttatgagcttcctggtttgcaacatgatcatatcgtccgctttattaccgcctcccggggagggcccggcagacttttgtctggtccccttctggtgctggagctgcacccaaagggctctctatgccactacctgacacagtacacttctgactgggggtcctcattaagaatggcactgtcgcttgctcagggtctggcgtttcttcatgaagaacgatggcagaacgggcagtataaaccaggtatcgctcatagagacctgtcatcccagaatgtcctgatcagggaggacggcagctgcgccattggcgatctgggcctggctctggtgctgccaggcctgactcagccaccagcctggactccgacacagccccagggcccagctgcaattatggaggccggtacacaaaggtacatggccccagagttactcgacaagaccttggatcttcaggattgggggatggctctccgtcgggcagatatctactcgctggccttgctgctgtgggaaatcttatctcgttgccctgacctgaggcccgcagtccatcacccctccaactggcccatgcggcagaattgggcaatcccacttccattaatgtcatatggtccatggcaatgccgccgcggaggcgtgcctaccagtcatcctcctggtgccgcacttccgcagactctcatggggtag

SEQ ID NO: 63229 - DNA, 1437 bp, Artificial Sequence
  derived and/or modified sequence
atgctgggctcattaggcctgtgggcccttctgccaacagcagtggaagcaccaccgaatcggcgtacctgtgtgtttttcgaagctccaggggtccgcggaagcaccaagacattgggagagttactcgacaccggcactgaactgccccgtgccatccgctgcctgtactccaggtgttgcttcggcatatggaatctgacacaggatcgagcacaggtggagatgcaaggatgccgagactccgacgaacccggatgtgaaagcctgcactgtgaccccagtccgcgtgctcacccctcacctgggagcacactcttcacttgttcatgtgggaccgatttctgcaacgctaactactcccatctgcctccgccaggctcacctggcaccccagggtcacagggaccgcaggcggcacccggtgagtctatctggatggcccttgtgctgctgggactctttttattgctcttgttgctactggggtccataattctggctctgctgcagcggaaaaactacagagtacgtggagagcctgttccagagccacgacccgacagtgggagggattggagcgtagaactgcaggaactgcctgaactctgcttttcccaggtgatccgggaaggagggcacgccgtagtgtgggccggacagttgcagggtaagctggtcgcgattaaggccttccctcctagaagcgtggcccagtttcaagctgagcgggctttgtatgaactgcctgggttgcagcacgatcatattgtgcggttcatcacagctagtagagggggtcccggtcggctgttgagtggacccctcctagtgttagaactgcacccaaagggctctctgtgtcattaccttactcagtatacatcagattggggctcatctttacgtatggcactgtctctcgcgcagggtctcgccttcttgcatgaagagcgctggcagaatggacagtacaaacccggaattgcccaccgggatctgtcctcgcagaacgtactgatcagggaggatggctcatgtgccattggcgatctcggtctggccctggtcctgcccggattgacccagccccctgcttggaccccaacacagcctcagggccctgccgctataatggaagccggtactcagagatacatggcgcctgagctcctggataagacgctggatctgcaagattggggaatggccctcagacgggcagatatctattctctcgcattactgctctgggagattctcagccgatgtcctgacttgaggcctgcagttcaccatcctagtaattggcccatgagacagaattgggctatcccgttaccccttatgagctacggtccatggcagtgtcgaaggggtggagtgccgacttcccacccacctggcgctgccctacctcagaccctcatgggatag

SEQ ID NO: 63230 - DNA, 1787 bp, Artificial Sequence
  derived and/or modified sequence
aagatttggccaggggcagctgtgctggcttatgctcttctccttctgctgctgccatcctccagcaagatgctagggtctttggggctttgggcattacttcccacagctgtggaagcacccccaaacaggcgaacctgtgtgttctttgaggcccctggagtgcggggaagcacaaagacactgggagagctgctagatacaggcacagagctccccagagctatccgctgcctctacagccgctgctgctttgggatctggaacctgacccaagaccgggcacaggtggaaatgcaaggatgccgagacagtgatgagccaggctgtgagtccctccactgtgacccaagtccccgagcccaccccagccctggctccactctcttcacctgctcctgtggcactgacttctgcaatgccaattacagccatctgcctcctccagggagccctgggactcctggctcccagggtccccaggctgccccaggtgagtccatctggatggcactggtgctgctggggctgttcctcctcctcctgctgctgctgggcagcatcatcttggccctgctacagcgaaagaactacagagtgcgaggtgagccagtgccagagccaaggccagactcaggcagggactggagtgtggagctgcaggagctgcctgagctgtgtttctcccaggtaatccgggaaggaggtcatgcagtggtttgggccgggcagctgcaaggaaaactggttgccatcaaggccttcccaccgaggtctgtggctcagttccaagctgagagagcattgtacgaacttccaggcctacagcacgaccacattgtccgatttatcactgccagccgggggggtcctggccgcctgctctctgggcccctgctggtactggaactgcatcccaagggctccctgtgccactacttgacccagtacaccagtgactggggaagttccctgcggatggcactgtccctggcccagggcctggcatttctccatgaggagcgctggcagaatggccaatataaaccaggtattgcccaccgagatctgagcagccagaatgtgctcattcgggaagatggatcgtgtgccattggagacctgggccttgccttggtgctccctggcctcactcagccccctgcctggacccctactcaaccacaaggcccagctgccatcatggaagctggcacccagaggtacatggcaccagagctcttggacaagactctggacctacaggattggggcatggccctccgacgagctgatatttactctttggctctgctcctgtgggagatactgagccgctgcccagatttgaggcctgcagtccaccacccttccaactggcctatgaggcagaactgggcaatacccctacctctgatgagctatgggccttggcagtgcaggagaggaggcgtccctacatcccatccacctggcgctgctttgccacagaccctgatgggctgagggagctcctagaagactgttgggatgcagacccagaagcacggctgacagctgagtgtgtacagcagcgcctggctgccttggcccatcctcaagagagccacccctttccagagagctgtccacgtggctgcccacctctctgcccagaagactgtacttcaattcctgcccctaccatcctcccctgtaggcctcagcggagtgcctgccacttcagcgttcagcaaggcccttgttccaggaatcctcagcctgcctgtaccctttctcctgtgtaa

SEQ ID NO: 63231 - DNA, 1437 bp, Artificial Sequence
  derived and/or modified sequence
atgctgggcagcctgggcctgtgggccctgctgcccaccgccgtggaggccccccccaacagaagaacctgcgtgttcttcgaggcccccggcgtgagaggcagcaccaagaccctgggcgagctgctggacaccggcaccgagctgcccagagccatcagatgcctgtacagcagatgctgcttcggcatctggaacctgacccaggacagagcccaggtggagatgcagggctgcagagacagcgacgagcccggctgcgagagcctgcactgcgaccccagccccagagcccaccccagccccggcagcaccctgttcacctgcagctgcggcaccgacttctgcaacgccaactacagccacctgcccccccccggcagccccggcacccccggcagccagggcccccaggccgcccccggcgagagcatctggatggccctggtgctgctgggcctgttcctgctgctgctgctgctgctgggcagcatcatcctggccctgctgcagagaaagaactacagagtgagaggcgagcccgtgcccgagcccagacccgacagcggcagagactggagcgtggagctgcaggagctgcccgagctgtgcttcagccaggtgatcagagagggcggccacgccgtggtgtgggccggccagctgcagggcaagctggtggccatcaaggccttcccccccagaagcgtggcccagttccaggccgagagagccctgtacgagctgcccggcctgcagcacgaccacatcgtgagattcatcaccgccagcagaggcggccccggcagactgctgagcggccccctgctggtgctggagctgcaccccaagggcagcctgtgccactacctgacccagtacaccagcgactggggcagcagcctgagaatggccctgagcctggcccagggcctggccttcctgcacgaggagagatggcagaacggccagtacaagcccggcatcgcccacagagacctgagcagccagaacgtgctgatcagagaggacggcagctgcgccatcggcgacctgggcctggccctggtgctgcccggcctgacccagccccccgcctggacccccacccagccccagggccccgccgccatcatggaggccggcacccagagatacatggcccccgagctgctggacaagaccctggacctgcaggactggggcatggccctgagaagagccgacatctacagcctggccctgctgctgtgggagatcctgagcagatgccccgacctgagacccgccgtgcaccaccccagcaactggcccatgagacagaactgggccatccccctgcccctgatgagctacggcccctggcagtgcagaagaggcggcgtgcccaccagccacccccccggcgccgccctgccccagaccctgatgggctag

SEQ ID NO: 63232 - protein, 478 aa, Artificial Sequence
  derived and/or modified sequence
MLGSLGLWALLPTAVEAPPNRRTCVFFEAPGVRGSTKTLGELLDTGTELPRAIRCLYSRCCFGIWNLTQDRAQVEMQGCRDSDEPGCESLHCDPSPRAHPSPGSTLFTCSCGTDFCNANYSHLPPPGSPGTPGSQGPQAAPGESIWMALVLLGLFLLLLLLLGSIILALLQRKNYRVRGEPVPEPRPDSGRDWSVELQELPELCFSQVIREGGHAVVWAGQLQGKLVAIKAFPPRSVAQFQAERALYELPGLQHDHIVRFITASRGGPGRLLSGPLLVLELHPKGSLCHYLTQYTSDWGSSLRMALSLAQGLAFLHEERWQNGQYKPGIAHRDLSSQNVLIREDGSCAIGDLGLALVLPGLTQPPAWTPTQPQGPAAIMEDPDGLRELLEDCWDADPEARLTAECVQQRLAALAHPQESHPFPESCPRGCPPLCPEDCTSIPAPTILPCRPQRSACHFSVQQGPCSRNPQPACTLSPV

SEQ ID NO: 63233 - DNA, 1437 bp, Artificial Sequence
  derived and/or modified sequence
atgttggggagcttagggttatgggcgttgctacctacagccgtcgaagccccacctaatcggcgcacgtgtgttttttttgaagcccctggggtaagaggaagtactaaaaccctaggcgaactactggatacagggacagaactgccacgagctatccggtgtctttattcccggtgttgttttgggatttggaatctgacacaggaccgggctcaggtggaaatgcaggggtgcagggattcagacgaaccgggctgtgagagccttcactgcgacccttcacctcgcgcacatccttcccccggatccaccctgttcacatgctcttgcggtaccgatttttgtaacgccaattatagccatttgccaccgccgggctctccggggacacccggctcccaaggcccgcaagccgccccgggcgaaagcatctggatggctctggtcctgcttggattgtttctgcttctgctgctcctgttgggatctataatcctggcactgctccagcgcaaaaactacagagttcggggcgaacccgtccccgagcctcgcccagactcaggccgggattggtccgtggagctgcaggaactcccagaactgtgttttagccaggtgatcagagaaggaggccacgctgttgtctgggccgggcagctacaaggcaagctggtggcaatcaaggctttcccccccagatcagtggcccaattccaagctgaacgcgccctgtacgaactcccgggccttcaacatgatcacatcgtgagatttataaccgcctcccgaggcggccccggccggctgctgtcaggccctctgttggtgctggaattgcaccccaaaggctccctgtgtcactacctaactcagtacacctccgattggggctcctctctgaggatggcgctgagcctggctcaaggattagctttcctgcatgaggaacgctggcaaaacggccaatacaagcccggtatcgcacatagggacctttccagtcaaaacgtcttgatccgcgaggatggctcctgcgcaatcggtgacctcgggttggcactcgtcttgcccgggctcactcagcctccagcctggacccctacacaaccccagggtcccgcagccattatggaagatcctgacggcttgcgggagctattggaggattgttgggatgccgatcccgaggcaaggctcactgccgagtgcgtgcagcaaaggttggccgcccttgctcacccccaggaaagtcatccgttccccgagagctgcccccggggctgcccccctctgtgtcctgaggactgcacatcaattccagctcctacaatcctgccctgccgaccacaaagatccgcatgtcatttttccgtacagcagggaccctgctcaaggaatccccagccagcttgcacactcagtcccgtttag

SEQ ID NO: 63234 - DNA, 1437 bp, Artificial Sequence
  derived and/or modified sequence
atgctgggcagcctgggcctgtgggccctgctgcccacagctgtggaggccccacccaacagaaggacctgtgtgttctttgaggcccctggggtgcggggcagcaccaagaccctgggggagctgctggacacaggaacagagctgccccgggccatccgctgcctgtacagccgctgctgcttcggcatctggaacctgacccaggaccgggcccaggtggagatgcagggctgccgggacagtgatgagcccggctgtgagagcctgcactgtgaccccagcccccgggcccaccccagccctggcagcaccctcttcacctgcagctgtggcacagacttctgcaatgccaactacagccacctgcccccacctggcagccctggcaccccaggcagccagggcccccaggccgcccctggagagagcatctggatggccctggtgctgctgggcctcttcctgctgctgctgctgctgctgggcagcatcatcctggccctgctgcagaggaagaactacagagtgcggggggagcctgtgcctgagcccaggccagattctggccgggactggagcgtggagctgcaggagctgcctgagctgtgcttcagccaggtgatccgggagggcggccatgctgtggtgtgggccggccagctgcagggcaagctggtggccatcaaggccttccccccaagatctgtggcccagttccaggccgagcgggccctgtatgagctgcccggcctgcagcacgaccacatcgtgcgcttcatcacagccagccggggcggccctggccgcctgctgagcggccccctgctggtgctggagctgcaccccaagggcagcctgtgccactacctgacccagtacaccagtgactggggcagcagcctgaggatggccctgagcctggcccagggcctggccttcctgcacgaggagcgctggcagaatggccagtacaagccaggcatcgcccaccgggacctgagcagccagaatgtgctgatcagagaagatggcagctgtgccatcggggacctgggcctggccctggtgctgcccggcctgacccagcccccagcctggacccccacccagccccagggccctgctgccatcatggaggaccctgatggcctgcgggagctgctggaggactgctgggatgctgaccctgaggcccggctgacagcagaatgtgtgcagcagaggctggccgccctggcccacccccaggagagccaccccttccctgagagctgcccccggggctgcccccccctgtgcccagaggactgcaccagcatcccagcccccaccatcctgccctgccggccccagaggtctgcctgccacttctctgtgcagcagggcccctgcagcaggaacccccagcctgcctgcaccctgagccctgtgtag

SEQ ID NO: 63235 - DNA, 1437 bp, Artificial Sequence
  derived and/or modified sequence
atgctgggcagcctgggcctgtgggccctgctgcccaccgccgtggaggctccacccaacaggcgcacgtgtgtgttcttcgaagcacctggcgtgcgcggcagcactaagacccttggggagctgctcgacacaggtactgaacttccccgcgccatcaggtgcttgtacagcagatgttgtttcgggatctggaatcttacccaagaccgagcgcaggtcgaaatgcaaggctgtcgggattcagatgagcctgggtgtgaatccttgcattgtgacccatcccctcgcgcacatccatctcctgggagcaccctgtttacgtgttcctgtggtacagatttctgtaacgcaaactatagccatttaccacccccagggtctcctggaaccccgggttcccaaggccctcaggccgcaccaggcgagtctatttggatggcacttgtgttgctaggcctgttcctgctgctattactgctcctgggaagtattatcctggcattacttcaacgcaaaaactatcgagttcggggggagccggtccccgagccacgcccagattctggtagggactggtccgtggagctccaagaactcccagagctgtgcttcagccaggtgattagagagggcggccatgccgttgtgtgggcggggcagcttcagggaaaattagtggccattaaagcctttcccccgcgaagcgttgctcaattccaggcggagcgcgctctctacgagctgccaggactccagcacgatcacattgtccggttcataacagcatcccgcggaggccctggaaggctcctgtccgggcctctgttagtgctcgagctccaccctaaggggtcactgtgtcattacctgacacaatatacatcagactggggaagctctcttcggatggccctgtccctcgcgcagggattggcttttttgcacgaagagagatggcagaacggacagtacaagccaggcattgctcaccgggacttgtcttcccagaatgtgctcatcagagaggacggctcatgtgccatcggcgatttgggtttggcgttggtgctgcccggtcttactcaacccccggcatggaccccgacacagcctcagggaccagcggcaatcatggaagaccctgacggactacgggagctcttagaggactgctgggatgctgacccagaagcccggctgaccgccgaatgcgtgcagcaacggttagccgccctggcacacccccaggagagccacccctttcctgaatcttgtcccagagggtgcccgccgctgtgtccagaagactgtacctcaatccctgcccccactatccttccatgccgtccccaaagatccgcttgccattttagtgtgcagcaaggaccttgttcacgtaacccacagcctgcctgcacgctctcacctgtctag

SEQ ID NO: 63236 - DNA, 1437 bp, Artificial Sequence
  derived and/or modified sequence
atgctggggagtctgggactgtgggctctgcttcctaccgccgtagaagcgccaccaaatcgcagaacgtgcgtcttttttgaggctcccggtgtccggggttctaccaaaactctcggcgaactcctggatacaggcacggagctaccacgagccatccgttgtttgtattcccgctgctgtttcgggatctggaacctgacccaagatagggctcaagtagaaatgcagggttgcagggattcagatgaaccaggctgcgagtcacttcattgcgatccctcacccagggctcatccaagtcctgggagcacactgtttacctgttcatgcgggactgacttttgcaacgccaattactcccacctccctccacctggttctcccggaactcctggctcgcagggtccccaggccgctcccggagagtccatctggatggcgctggtccttctcgggttattcctgctccttcttctcctgttggggtccatcatactggcactcttgcagagaaaaaactaccgcgtacgtggagagcccgtacccgagccccgtccggattctggacgagactggtctgtggaactccaggaactgccagagttgtgctttagccaggtcatcagggaaggagggcatgcagtcgtatgggccggtcagctgcaaggaaagctcgtagcgattaaagccttccctcccagatcagttgcccagtttcaggccgagcgggcattgtacgagctacctggactgcagcatgatcacattgtccggtttataacggcttcaaggggaggccctggaaggctcttgtctgggcctcttcttgttctggagctgcacccgaagggtagcttgtgtcactacctaacccagtatacctcagattggggaagctccctgcggatggcgttatccttagcacagggattggcgtttctccacgaggaaagatggcaaaacggtcagtataagcccggtatcgcccatcgggatctgtcctcccagaacgtgctcattagagaggacggatcatgtgctatcggcgatctggggctcgcactggttctgcctgggctgacccagcctcctgcctggacccctacccaaccccagggacctgcagccataatggaggatccagatggcctgcgggagctgttagaggactgttgggacgccgacccagaagcccgactgacagccgagtgcgttcagcagaggctggccgcactcgcccatccgcaggagagtcacccattccccgaatcctgtccaagagggtgcccccctctgtgcccagaggactgcacgagtatccctgcacccacgatcttgccatgtcgccctcaaaggtctgcctgtcacttttccgtgcagcagggaccctgtagcaggaacccacagccagcttgtaccctcagcccagtctag

SEQ ID NO: 63237 - DNA, 1437 bp, Artificial Sequence
  derived and/or modified sequence
atgctagggtctttggggctttgggcattacttcccacagctgtggaagcacccccaaacaggcgaacctgtgtgttctttgaggcccctggagtgcggggaagcacaaagacactgggagagctgctagatacaggcacagagctccccagagctatccgctgcctctacagccgctgctgctttgggatctggaacctgacccaagaccgggcacaggtggaaatgcaaggatgccgagacagtgatgagccaggctgtgagtccctccactgtgacccaagtccccgagcccaccccagccctggctccactctcttcacctgctcctgtggcactgacttctgcaatgccaattacagccatctgcctcctccagggagccctgggactcctggctcccagggtccccaggctgccccaggtgagtccatctggatggcactggtgctgctggggctgttcctcctcctcctgctgctgctgggcagcatcatcttggccctgctacagcgaaagaactacagagtgcgaggtgagccagtgccagagccaaggccagactcaggcagggactggagtgtggagctgcaggagctgcctgagctgtgtttctcccaggtaatccgggaaggaggtcatgcagtggtttgggccgggcagctgcaaggaaaactggttgccatcaaggccttcccaccgaggtctgtggctcagttccaagctgagagagcattgtacgaacttccaggcctacagcacgaccacattgtccgatttatcactgccagccgggggggtcctggccgcctgctctctgggcccctgctggtactggaactgcatcccaagggctccctgtgccactacttgacccagtacaccagtgactggggaagttccctgcggatggcactgtccctggcccagggcctggcatttctccatgaggagcgctggcagaatggccaatataaaccaggtattgcccaccgagatctgagcagccagaatgtgctcattcgggaagatggatcgtgtgccattggagacctgggccttgccttggtgctccctggcctcactcagccccctgcctggacccctactcaaccacaaggcccagctgccatcatggaagaccctgatgggctgagggagctcctagaagactgttgggatgcagacccagaagcacggctgacagctgagtgtgtacagcagcgcctggctgccttggcccatcctcaagagagccacccctttccagagagctgtccacgtggctgcccacctctctgcccagaagactgtacttcaattcctgcccctaccatcctcccctgtaggcctcagcggagtgcctgccacttcagcgttcagcaaggcccttgttccaggaatcctcagcctgcctgtaccctttctcctgtgtaa

SEQ ID NO: 63238 - DNA, 1437 bp, Artificial Sequence
  derived and/or modified sequence
atgctgggcagcctgggcctgtgggccctgctgcccaccgccgtggaggccccccccaacagaagaacctgcgtgttcttcgaggcccccggcgtgagaggcagcaccaagaccctgggcgagctgctggacaccggcaccgagctgcccagagccatcagatgcctgtacagcagatgctgcttcggcatctggaacctgacccaggacagagcccaggtggagatgcagggctgcagagacagcgacgagcccggctgcgagagcctgcactgcgaccccagccccagagcccaccccagccccggcagcaccctgttcacctgcagctgcggcaccgacttctgcaacgccaactacagccacctgcccccccccggcagccccggcacccccggcagccagggcccccaggccgcccccggcgagagcatctggatggccctggtgctgctgggcctgttcctgctgctgctgctgctgctgggcagcatcatcctggccctgctgcagagaaagaactacagagtgagaggcgagcccgtgcccgagcccagacccgacagcggcagagactggagcgtggagctgcaggagctgcccgagctgtgcttcagccaggtgatcagagagggcggccacgccgtggtgtgggccggccagctgcagggcaagctggtggccatcaaggccttcccccccagaagcgtggcccagttccaggccgagagagccctgtacgagctgcccggcctgcagcacgaccacatcgtgagattcatcaccgccagcagaggcggccccggcagactgctgagcggccccctgctggtgctggagctgcaccccaagggcagcctgtgccactacctgacccagtacaccagcgactggggcagcagcctgagaatggccctgagcctggcccagggcctggccttcctgcacgaggagagatggcagaacggccagtacaagcccggcatcgcccacagagacctgagcagccagaacgtgctgatcagagaggacggcagctgcgccatcggcgacctgggcctggccctggtgctgcccggcctgacccagccccccgcctggacccccacccagccccagggccccgccgccatcatggaggaccccgacggcctgagagagctgctggaggactgctgggacgccgaccccgaggccagactgaccgccgagtgcgtgcagcagagactggccgccctggcccacccccaggagagccaccccttccccgagagctgccccagaggctgcccccccctgtgccccgaggactgcaccagcatccccgcccccaccatcctgccctgcagaccccagagaagcgcctgccacttcagcgtgcagcagggcccctgcagcagaaacccccagcccgcctgcaccctgagccccgtgtag

SEQ ID NO: 63239 - protein, 293 aa, Artificial Sequence
  derived and/or modified sequence
MYFLTPILVAILCILVVWIFKNADRSMEKKKGEPRTRAEARPWVDEDLKDSSDLHQAEEDADEWQESEENVEHIPFSHNHYPEKEMVKRSQEFYELLNKRRSVRFISNEQVPMEVIDNVIRTAGTAPSGAHTEPWTFVVVKDPDVKHKIRKIIEEEEEINYMKRMGHRWVTDLKKLRTNWIKEYLDTAPILILIFKQVHGFAANGKKKVHYYNEISVSIACGILLAALQVNNGITMRHQTARHRHLIEGPGRSSEACSKLSSQGCPECRSGDCHYHSSQLWPSTEGAPGPPRT

SEQ ID NO: 63240 - protein, 270 aa, Artificial Sequence
  derived and/or modified sequence
MYFLTPILVAILCILVVWIFKNADRSMEKKKGEPRTRAEARPWVDEDLKDSSDLHQAEEDADEWQESEENVEHIPFSHNHYPEKEMVKRSQEFYELLNKRRSVRFISNEQVPMEVIDNVIRTAGTAPSGAHTEPWTFVVVKDPDVKHKIRKIIEEEEEINYMKRMGHRWVTDLKKLRTNWIKEYLDTAPILILIFKQVHGFAANGKKKVHYYNEISVSIACGILLAALQVNNGITMRHQTARHRHLIEGPGRSSEACSKLSSQGCPGFYC

SEQ ID NO: 63241 - protein, 284 aa, Artificial Sequence
  derived and/or modified sequence
MYFLTPILVAILCILVVWIFKNADRSMEKKKGEPRTRAEARPWVDEDLKDSSDLHQAEEDADEWQESEENVEHIPFSHNHYPEKEMVKRSQEFYELLNKRRSVRFISNEQVPMEVIDNVIRTAGTAPSGAHTEPWTFVVVKDPDVKHKIRKIIEEEEEINYMKRMGHRWVTDLKKLRTNWIKEYLDTAPILILIFKQVHGFAANGKKKVHYYNEISVSIACGILLAALQVNNGITMRHQTARHRHLIEGPGRSSEACSKLSSQGCPGASAAGSLFHFAIEFAAP

SEQ ID NO: 63242 - DNA, 882 bp, Artificial Sequence
  derived and/or modified sequence
atgtacttcctgaccccaattttggtggcgatcctgtgcatcctggtggtgtggatcttcaagaatgcagataggtcaatggaaaagaaaaaaggagaacctaggacccgcgccgaggcacggccttgggtggacgaggacctgaaagatagctctgatctccatcaggccgaggaagacgccgatgagtggcaggaatctgaggagaatgtagagcacatccctttctcccacaatcattatccggagaaagagatggttaaaagatctcaagagttctatgagctgcttaacaaacgcagaagtgtgcggttcataagcaatgaacaggtacccatggaagttattgacaacgtgattcggactgccggcacagcgccctcaggcgcacacaccgaaccttggaccttcgtggtagtcaaggatccagatgtgaagcacaagattagaaagattatcgaagaagaggaggagattaattacatgaagaggatggggcaccgttgggtaaccgatcttaagaaactccgaactaattggatcaaagagtatctggatacagcacctattctgatattgatttttaaacaggtgcatggatttgcagcgaacggtaaaaagaaagtccactattacaatgagatttctgtgtctatagcttgcggcattctactggcagccctccaagtgaacaatggcatcactatgcgccaccaaaccgccagacacaggcatttaatcgaaggtcccggacgatccagtgaagcctgtagtaaactgagctcacagggttgcccagagtgccggagcggcgactgccactatcattcctcccagctgtggccctccacggagggagctccagggcctccacggacgtag

SEQ ID NO: 63243 - DNA, 813 bp, Artificial Sequence
  derived and/or modified sequence
atgtactttctgacacctattctcgtggccatcttgtgcattcttgtcgtttggatcttcaagaatgcagaccgaagtatggagaagaaaaaaggagagccaagaactagggcggaggcccgcccttgggtggacgaagacttgaaggactcctctgacctccatcaggccgaggaggatgcagacgagtggcaggagtcagaagagaacgtcgaacatattcccttcagccataaccactacccagagaaggagatggtgaaacgatctcaggaattttatgaactgctgaacaaaaggaggtccgtgcgatttatttctaacgagcaggtccctatggaagtaatcgataatgtgattaggactgccgggaccgccccctctggcgcgcacactgagccctggacgtttgtcgtggtgaaggatcctgacgtgaagcacaagatccgcaagatcattgaggaggaggaggagatcaactacatgaagcggatgggccaccggtgggtgaccgatctgaaaaagctgcgtaccaactggattaaagagtatctggacaccgcacctatactgatcttgatcttcaaacaggtccacggcttcgcggcaaacggaaagaaaaaagtccactattataacgagatcagcgtgtccatcgcttgtgggatcttactggcagccctacaagttaacaatgggatcactatgagacaccagactgcccgacataggcaccttatagaagggcccggcagatcatctgaagcctgttcaaagctgagctcgcagggttgccccgggttttattgttag

SEQ ID NO: 63244 - DNA, 855 bp, Artificial Sequence
  derived and/or modified sequence
atgtactttctaactcctatccttgtggcgatactgtgcatactcgttgtgtggatatttaagaacgcggatagaagtatggagaaaaaaaaaggagagccccgtacccgtgccgaggcccggccatgggttgacgaagatttgaaagacagtagcgacctgcaccaagctgaggaggacgccgatgaatggcaggaatctgaggaaaacgttgagcatatccccttttcacacaatcactacccagaaaaggagatggtgaaaaggagccaagaattctatgagctgctaaacaagcggcgctcggtcagatttataagtaacgagcaggtgccaatggaggtgattgacaacgttatcaggacagctgggaccgctccatcaggggcccatacggaaccttggacattcgtggtcgtcaaggatcccgatgtgaagcataagattcggaagattatagaggaggaagaggagatcaactacatgaaacgcatgggccaccgctgggtgacagacctgaagaaactccggaccaactggatcaaagaatacctcgacacagcccccatccttatcctgatctttaagcaggtgcacgggttcgcagctaacggaaaaaaaaaagttcattactacaacgaaatcagcgtctctatcgcttgcggcatcctgctggccgccttgcaagtgaacaacgggatcacgatgcgccatcagaccgccaggcaccgacatctcattgagggcccgggacggagctccgaggcttgctccaagctgtcatcacagggatgtcctggggcaagcgctgctgggagtctgttccattttgcaatcgaatttgctgccccttag

SEQ ID NO: 63245 - DNA, 7513 bp, Artificial Sequence
  derived and/or modified sequence
gaagagttctgcactttgttccttccctggcacacctgtgtctgcattccttctatctcccggcattctccactcctgtctctgtgtgtttaaaaaccggtgtgggaagtgtgcacgcctgtgacgtcagactccagaccatgtatttcctgactcccatcttggtagccattctctgcattttggttgtgtggatctttaaaaatgccgacagaagcatggagaaaaagaagggggagcctagaaccagggccgaagctcgcccctgggtggatgaagacttaaaagacagcagtgacctgcaccaagcagaagaagatgctgatgaatggcaagaatcagaagaaaatgttgaacacatccccttctctcataaccactatcctgagaaggaaatggttaagaggtctcaggaattttatgaacttctcaataagagacggtcagtcaggttcataagtaatgagcaagtcccaatggaagtcattgataatgtcatcagaacggcaggaacagccccgagtggggctcacacagagccctggaccttcgtggttgtgaaggacccagacgtgaagcacaagattcgaaagatcattgaggaggaagaggagatcaactacatgaaaaggatgggacatcgctgggtcacagacctcaagaaactgagaaccaactggattaaagagtacttggatactgcccctattttgattctcattttcaaacaagtacatggtttcgccgcaaatggcaagaaaaaagtccactactacaatgagatcagtgtttccatcgcttgtggcatcctgctagctgccctgcaggtaaataatggaatcaccatgcggcatcagactgcgaggcaccgccacctgattgagggtcctggaagaagcagcgaagcctgcagcaagctcagctcacaaggctgcccagaatgcaggtctggtgactgtcactaccactcctctcaactgtggccctcgactgagggtgctcctgggccgccccgcacatgaaaagctgctgatgctgctccccgtggggtaccccagcaaggaggccacggtgcctgacctcaagcgcaaacctctggaccagatcatggtgacagtgtaggcagggccccccaagggagtggcagggagatggcgcccctgcttttccctgagcctctcgcctgctcctcttgggtctcttggctgctctttctccaggtgtcaggtcccctcattgctcttctcaggtggccacactatgtcaagaagcctctccacactctgtggcacttccagtcccataaatcctgtttcttatccactttggaaatgcatgaacactttacaaagaacatgcccgggtttttacattttaaaagttattctagacaatcactattggcttttttcttttatttttaaaaaactcacatagaggagacaatcagaaatttaccatagtcccaagaattcagctacatgatgactcgaatttaaatttagattaatcaaatggtctcctgttctctgatttctggtggcttttagacactaatttttgagaactacttttttttttttaccaaacttcagggacactctgctagttttgaataagtaaccatcaaagttactaaaacatggccaggcgcagtggctcatgcctgtaatcccagcactttgggaggccgaggtgggcagattgcctgagctcaagagttcgagaccagcctggccaacatggtgaaaccccatctctactaaaaatacaaaaaattagctgggcatgcacttgtaattccagctactcaggaggctgaggcaagagaactgcttgaatccgggaggtagagattgcagtgagtcaagatgctgagatgccaccactgcactccagcctgggcaacagagcgagaacctgtctcaaaaaaaacaaaaacaaagttactaaaatgtcaccttcacagaacaggacagggtacccttgggtcgcacgggcctggctggcatgtaaacggtcagttgcactgcctagtggtttggtagatctgacttgtaagcagttcatagaagctgctcaatactcaagaatcttgcaagacagttattaaacattcatagcttgaaattgcccatggtgggagagtttacatcacaaccactacaaatcagcacttgctttcttcttcttaaagagagctgcttaccatacatagcacccacagtgtctcccttctcttctaccccaacccctgaaacacactgacccctattctccagatgacagcacagctgtttgggactgatagggtcacagttgccaggttgggaatgctagatgtagtcttcacccatcaccttctgtcgtcctcccaggggtgtcatatttacagaggcaaactcttacagcttggatgatttctcatcaagcaactctactcacctctttttcccctttccctgtgcgtttcttcttcttgtcctcattttccttgagaaaactctctctataaaaaatttccatagagtatgtggctgataaacaacagaaatttgtttctcacagttctggaggctggaagtccaaggtcggggtgccctcatggtcaggtgctggtgaggaccctgatctgggttgcagactgctgacttcttattgtgtcctcgtggtagaaagagggttagagcctctggcatgccttttataagggtactaatcccatcatgaggccccgtccttatgacctcatcacctcccaaaggaccccctcctaataccatcacattgggggttagggtttcaacatatgaattgcgggggacacaaacattccgtccatggcacctacttcatagggtttggcatgctgctcggtacatggttaacattcataaatggtgggggcccttactgtggtagaaaccattgtcactgcaaggcagccctgcttgggattcaggtgaacaaatgtaacgtgggtgggtgagggactccctcctcttcagagaagccctcctgtggctcaggggcagctgcagggccagatggagttggcctgcagggagtcagccttaccccatcagagaccaacttgaaagatttttttctctgtgtagttcgtgttatcaatctgatctgcagccaggttatttacttctgaagcattggagttatcgattgccattgccccatggttctcactctttgcaggcactcttcaaatttttattttaaaaattataatgcaaacatctggccatcaccttaaccaagtgacaaagtcctagcacaccattaatggtaggataactgacattaagtgttcctgctgggatgaattatgaagtattccttccaaagatgtcaatggaaactaatcgagtcttacacctaattttcagtttacagtaaatacagaggataaagaagttaatggcatggtggaataaccaaaatgtgtatcattctacaaaaaaataggcctggactatttaaggagtgagtgtcactgtgggaagaataagagggggactgtcttgtccttgctactcaaagagtggtcctgggcctgtatcatcattgggaccacctgggcgcttgttagaatcaaagactctcaggcctcacctagacatccagaatcaaaatctgcattttaacaagatgcccaggtgatctgcatgcctgttaaagtctgagctctgttgcagataaccagagacccaacaaccaaaggcaaagcgtaagccttgattggattttggtttaggaaaaatctcataggtataaaagacaactgggaatgttgaatgtggatctggtggtaggtgatattgttagtgatgtgagtgatgcctgctgaagtactgagagatgaagcatcatattgacaacttactccaggaaaaaaggtgtgtgtataggtgtgtgtttggagagtgtgagcgagaactaacatggtaaaatgttaggtggagcatatacagttctcattatactcttattttaaatttatatttgaacacagtcaaatctgaatggaaatacatttaaataagcatttctttcagtcatataagtaatttgcctaaaaatgccctctaagtccatcattaggttaagcgatttactgaaggtgcagatatcatgcttatttcattgggttgttttggaatgtcccccacttggagagtttgaggaatggaaatgagaatcggaggagaaataaggccagaggctcacattgcttgcagggaaccgactgagtaatgaagaagaggaaggaagcccttggaaggaacgtaaaatccatttcagcctgccgccccttggaatggagggtcttctagggaccagaaacaccagacacttcttctgccccaagcacaccccacactaatttctgctgcagcatcacgatcagggcaaatcagcacagccccccagccatcagtggtgtctagaaaagtaaggataattttcttccttctcactgcagccccaagctcttattaaccttcttttatgtgttcattaaatgcagtcatgtgacaactgtgttcaaagttagaaatagtggtcggggaggcttatagatcctcttgctgttctgaggccttaaaaccaaaaaaataatggaatgattgcatcactgcgaggaagtatacttaattaagaaagttgaaaatggtttgtgtcttactaataggactcacctgaagactctactttgccaagagggaatttttaactcaaagttgtgtcagccagcacggggtagagccatggtcctcatacttgctggcatccctcatctggtggtctgttaaagcacagattgctgggccgcaccctcagggtgtgtgattgtgtgattcagtattgctgggtggtgcccaaatgctccagttctaatgtattcccaggtgttgctgatgctggtgattgggtaccacattttgagaaccatggggcattggcaatcaacaaatgcaatgcttgtgacttgacgtgataaaagttcatttattgggcaggcaaagtcctctgcaggcctggaaaccctccgagacaattacttgcatggggtaacccagtaatactgtgggatgcaacttctagggcatggctgcctccttcctagaggcagcagggggagaaaacactggaagaggtcaccccaacaattccatcgtaccttggcctaggagtgacctcctcagtctcacaaccctttggctagaactagtcatgtgacctcacaggaggtggagcagtgtcgtcaatgttatcatccccctgcacctgcaaggaaggaggcccagatgtgtgtaggtgctggatgtctcttccccaaaacatataactctggatttggaaaacaaaactggatataacagaaaagaaaaggaggggagaaggaaagttgaagaaattggtgaaatcagaataggacagtgaaaggcataaagattttcttctgaaacgctaagatcggttgatatttgtctaatacagctttaaatagagtatcactttgggccaaagaaaattgatataaacatacataaagtggaactaagattgacttcttcctagacatctctgcctctgtccacaaaatggaaacttccatcaaggagtactggaggacagttcagtatttcttcttatttgctcctccctatgaaaggaagagtgacttctctgctgcatgatattgggggtaaatagttattgcacatttgctcaaaccccagcaaagtgcaccccattttaagccaaatttacaaacttacaaagatgatccaccaatagttttctctatttactttattcttgctctgtcacccaggctagaatgcagtggtgtgattatagctcactgcagcctccaacttctggactcaagtgatcctcccaccttagcttcccaggtagctgggatacaggtgcacgccaccacacccaggctagtttttctaaatattggagttcccaaagagtattcaaactgatgtgatattttaaaagacattttgtaagcatcttttaggaatatcagtaagtggaagaaaaacacatagttatcagtggatattatgccagagaggcatgagaaatataattttattttgctaggtatcagcagagtgccctcttataatttgtgtgaaatggaaacaaaggtaacatcgtgttttcaattcacacatatatacaagtaatgagaggtccagaagaaatgtggcttcagctctgctgctactgtgcctcccttctcctgccccactcagcccacaaaataggctggacactcaaaaaacgttgcgtttatctaccttttagagagggtgaatagcagagaactggaggtgggaatggtaaggaactcccagcagggtagtggagggaatgggctgacgcatctaaggctgatgccaggtctgctccctatctgggtggcctcagcaaatgacgtccagcacatccaggggcaggctcaagggagaacagcccccaaagctaagatcctgccaagctaaatacagtagttctaatgaaatgtgagaggctataatcccatttgggaaattcctaaaaagtcatgaggcaggggattggtttatgttattatcatgacctgagagtcatggctcagagccaaatgttcaggattgaattcaacagcatttaaatgtctttagagcaggatggaaatatgttagcaatgcctgcagagtgccaagtaaacgcaaaagccaatgagatcataaaggaagttgttagctaacctaggtggagtcgccaacttccttctactctaataattaaaaataaaaataatacttgggaggtaactggaataaaggttctaaaatcaaaaccctctgaagggtgaaaactgggagcctcctgttcccatagtaaccacagcactcagggcactgtctcccagcgctggagtactgtcttatgaccagagatcctaagcaacctctgctcatctgagttgtccaccatattgtgggcatgagtccttgacaatagtaaatagcacctctgttcccttattgggtaaatgattttccaactctgggaatgtgtagaattcattatggaaataatgcaataattcaaatccataatattgatactttcatgttaagtttaggactaatcttgtgtatgctccttaagtgatttgaatctttaaaaagcttatgattccaatttgaaatgtgaaattgattttacgtttgtgatttgaagttgaaaggtataagaatatttaacttagctcatgaaaagtattagactagatttactataagtttaatgtattagatttacaagagatgcttaaatatatgagaatgttttgtcttaattggttataatcttgtcatatcaatgatttgaagtgctaaaatagaaaattaaatatgataaattacacaagaagtttagaatgtttaaaagattttaataaacaaagcctataactaag

SEQ ID NO: 63246 - DNA, 1180 bp, Artificial Sequence
  derived and/or modified sequence
gaagtgtgcacgcctgtgacgtcagactccagaccatgtatttcctgactcccatcttggtagccattctctgcattttggttgtgtggatctttaaaaatgccgacagaagcatggagaaaaagaagggggagcctagaaccagggccgaagctcgcccctgggtggatgaagacttaaaagacagcagtgacctgcaccaagcagaagaagatgctgatgaatggcaagaatcagaagaaaatgttgaacacatccccttctctcataaccactatcctgagaaggaaatggttaagaggtctcaggaattttatgaacttctcaataagagacggtcagtcaggttcataagtaatgagcaagtcccaatggaagtcattgataatgtcatcagaacggcaggaacagccccgagtggggctcacacagagccctggaccttcgtggttgtgaaggacccagacgtgaagcacaagattcgaaagatcattgaggaggaagaggagatcaactacatgaaaaggatgggacatcgctgggtcacagacctcaagaaactgagaaccaactggattaaagagtacttggatactgcccctattttgattctcattttcaaacaagtacatggtttcgccgcaaatggcaagaaaaaagtccactactacaatgagatcagtgtttccatcgcttgtggcatcctgctagctgccctgcaggtaaataatggaatcaccatgcggcatcagactgcgaggcaccgccacctgattgagggtcctggaagaagcagcgaagcctgcagcaagctcagctcacaaggctgcccaggtttctactgctagagacatacaaaattcagtatggagtaaaagctatgtcttgaaaaggaccaagatataaaatgacactaaattaaggtgtaaatattttctcaaaaaagtttaagacttggccaggtgcggtggctcacgcctctaatcccagcactttgggaggccaaggcgggcggatcacgaggtcaggagatcgagaccatcctggctaacatggtgaaacccggcctttactaaaaatacaaaaaatgagccaggcgtggtggcgggcgcctgtagtcccagctactcgggaggctgaggcaggagaatggcgtgaacctgggaggcggagcttgcag

SEQ ID NO: 63247 - DNA, 2158 bp, Artificial Sequence
  derived and/or modified sequence
gaagtgtgcacgcctgtgacgtcagactccagaccatgtatttcctgactcccatcttggtagccattctctgcattttggttgtgtggatctttaaaaatgccgacagaagcatggagaaaaagaagggggagcctagaaccagggccgaagctcgcccctgggtggatgaagacttaaaagacagcagtgacctgcaccaagcagaagaagatgctgatgaatggcaagaatcagaagaaaatgttgaacacatccccttctctcataaccactatcctgagaaggaaatggttaagaggtctcaggaattttatgaacttctcaataagagacggtcagtcaggttcataagtaatgagcaagtcccaatggaagtcattgataatgtcatcagaacggcaggaacagccccgagtggggctcacacagagccctggaccttcgtggttgtgaaggacccagacgtgaagcacaagattcgaaagatcattgaggaggaagaggagatcaactacatgaaaaggatgggacatcgctgggtcacagacctcaagaaactgagaaccaactggattaaagagtacttggatactgcccctattttgattctcattttcaaacaagtacatggtttcgccgcaaatggcaagaaaaaagtccactactacaatgagatcagtgtttccatcgcttgtggcatcctgctagctgccctgcaggtaaataatggaatcaccatgcggcatcagactgcgaggcaccgccacctgattgagggtcctggaagaagcagcgaagcctgcagcaagctcagctcacaaggctgcccaggtgcctctgcagcaggcagtctttttcactttgccattgagtttgctgccccctagctttcataaggcataatcccgagagtaggttatgattagtgatggaggaaagaaaaatctccatgaagcccgcatctccagtatggtgactgggtctgataagcgcgccatgcatgtcttgtagaggcagcttccagaacttcctggtcaggtttagaggtggtgatctgattggaaaagctggagaggggcaggcggggaagtgtctggaagctactcattgcttttacttagatgtttgttatttggaggcttggaaagaggtcgatggggtaccccttggccactgagtcccctatcaacgggcatcagcatctcactgggtggggatgctctgcttccatggttggctctgtagtcataggaacttgccgtggtggttgttgtttagaatataatatacaagcctttattaatatattaaataccaagagctagtcgtagctctataattttaaagtagtgatgaatgtaatgatattttaaaatatctataacaactgtaaaatgatatgaaaataactgtggatttcattggtgataaagtcatagatattgctaacactactgtggtttgctgcctacatttataaaggaagaaactgctaaatttcagttagatgttagtgaatatgaaaactttttttttcaaattcaagttcatggacctgctaaattcaatccttggccctttgggggtctgaggattccagttaaaaaaatcctgacctataataagaccaaagtactcacatcgagagagtgaaagataaaataataatagaagtcaacttaacattaataatattaataagaggaattgtttaatatggtctgtgtatttgcaggtttctactgctagagacatacaaaattcagtatggagtaaaagctatgtcttgaaaaggaccaagatataaaatgacactaaattaaggtgtaaatattttctcaaaaaagtttaagacttggccaggtgcggtggctcacgcctctaatcccagcactttgggaggccaaggcgggcggatcacgaggtcaggagatcgagaccatcctggctaacatggtgaaacccggcctttactaaaaatacaaaaaatgagccaggcgtggtggcgggcgcctgtagtcccagctactcgggaggctgaggcaggagaatggcgtgaacctgggaggcggagcttgcagtgagcggagatcccgccactgcactccagcctgggcgacagagcgagactccgtctcaaaaaaaaaaaaaaaaa

SEQ ID NO: 63248 - DNA, 882 bp, Artificial Sequence
  derived and/or modified sequence
atgtacttcctgacccccatcctggtggccatcctgtgcatcctggtggtgtggatcttcaagaatgctgaccgctccatggagaagaagaagggggagcccaggaccagggctgaggcccggccctgggtggatgaggacctgaaggacagcagtgacctgcaccaggccgaggaggatgctgatgagtggcaggagagtgaagaaaatgtggagcacatccccttcagccacaaccactacccagagaaggagatggtgaagaggagccaggagttctatgagctgctgaacaagagaagatctgtgcgcttcatcagcaatgagcaggtgcccatggaggtgattgacaacgtcatcagaacagctggaacagcccccagcggggcccacacagagccctggacctttgtggtggtgaaggaccctgatgtgaagcacaagatcaggaagatcatcgaggaggaggaggagatcaactacatgaagaggatgggccaccgctgggtgacagacctgaagaagctgcggaccaactggatcaaggagtacctggacacagcccccatcctgatcctgatcttcaagcaggtgcacggctttgctgccaacgggaagaagaaggtgcactactacaatgagatctctgtgtccatcgcctgtggcatcctgctggccgccctgcaggtgaacaacggcatcaccatgaggcaccagacagcccggcaccgccacctgattgagggccctggccgcagcagcgaggcctgcagcaagctgagcagccagggctgcccagaatgtcgcagcggggactgccactaccacagcagccagctgtggcccagcacagagggcgcccctggcccccccaggacatag

SEQ ID NO: 63249 - DNA, 813 bp, Artificial Sequence
  derived and/or modified sequence
atgtacttcctgacccccatcctggtggccatcctgtgcatcctggtggtgtggatcttcaagaatgctgaccgctccatggagaagaagaagggggagcccaggaccagggctgaggcccggccctgggtggatgaggacctgaaggacagcagtgacctgcaccaggccgaggaggatgctgatgagtggcaggagagtgaagaaaatgtggagcacatccccttcagccacaaccactacccagagaaggagatggtgaagaggagccaggagttctatgagctgctgaacaagagaagatctgtgcgcttcatcagcaatgagcaggtgcccatggaggtgattgacaacgtcatcagaacagctggaacagcccccagcggggcccacacagagccctggacctttgtggtggtgaaggaccctgatgtgaagcacaagatcaggaagatcatcgaggaggaggaggagatcaactacatgaagaggatgggccaccgctgggtgacagacctgaagaagctgcggaccaactggatcaaggagtacctggacacagcccccatcctgatcctgatcttcaagcaggtgcacggctttgctgccaacgggaagaagaaggtgcactactacaatgagatctctgtgtccatcgcctgtggcatcctgctggccgccctgcaggtgaacaacggcatcaccatgaggcaccagacagcccggcaccgccacctgattgagggccctggccgcagcagcgaggcctgcagcaagctgagcagccagggctgccccggcttctactgctag

SEQ ID NO: 63250 - DNA, 855 bp, Artificial Sequence
  derived and/or modified sequence
atgtacttcctgacccccatcctggtggccatcctgtgcatcctggtggtgtggatcttcaagaatgctgaccgctccatggagaagaagaagggggagcccaggaccagggctgaggcccggccctgggtggatgaggacctgaaggacagcagtgacctgcaccaggccgaggaggatgctgatgagtggcaggagagtgaagaaaatgtggagcacatccccttcagccacaaccactacccagagaaggagatggtgaagaggagccaggagttctatgagctgctgaacaagagaagatctgtgcgcttcatcagcaatgagcaggtgcccatggaggtgattgacaacgtcatcagaacagctggaacagcccccagcggggcccacacagagccctggacctttgtggtggtgaaggaccctgatgtgaagcacaagatcaggaagatcatcgaggaggaggaggagatcaactacatgaagaggatgggccaccgctgggtgacagacctgaagaagctgcggaccaactggatcaaggagtacctggacacagcccccatcctgatcctgatcttcaagcaggtgcacggctttgctgccaacgggaagaagaaggtgcactactacaatgagatctctgtgtccatcgcctgtggcatcctgctggccgccctgcaggtgaacaacggcatcaccatgaggcaccagacagcccggcaccgccacctgattgagggccctggccgcagcagcgaggcctgcagcaagctgagcagccagggctgccctggggccagcgctgctggcagcctcttccactttgccattgaatttgctgccccctag

SEQ ID NO: 63251 - DNA, 882 bp, Artificial Sequence
  derived and/or modified sequence
atgtacttcctgacccccatcctggtggccatcctgtgcatcctggtggtttggatatttaaaaacgcggatcgctctatggagaagaaaaagggcgaacctcgaaccagagcggaggctcggccatgggtggatgaggaccttaaagacagctctgatctgcaccaggctgaggaagatgctgacgagtggcaggaaagcgaagaaaacgtagaacacatccccttcagccataatcactatccagaaaaagagatggtgaagagatcacaggaattctatgaactcctcaacaagcgtcgctcagtgcgcttcatcagcaacgaacaggtgcccatggaagttatagacaatgttatccgcactgccggcacggcaccgtccggcgcccacactgaaccctggacatttgttgttgttaaggaccccgatgttaagcataagatccgaaagatcatcgaggaagaggaggagattaattacatgaaaagaatgggccaccggtgggtgaccgacctgaaaaagctgcggaccaactggattaaggagtacctggatactgcgccaatcctgatccttatcttcaagcaagtgcatgggtttgccgccaatggaaaaaagaaagtgcattactataacgagatcagtgtgtctatcgcatgtggcatcctgctcgccgctctacaggttaacaatggcataacgatgaggcaccaaacagctcggcatcgccacttgatcgaagggccaggaaggtcctccgaagcctgtagcaaactgtccagccaggggtgccctgaatgtagaagcggcgattgccattatcactccagtcaactgtggcctagcacggaaggagctcccgggcctccaagaacttag

SEQ ID NO: 63252 - DNA, 813 bp, Artificial Sequence
  derived and/or modified sequence
atgtacttcctgacccccatcctggtggccatcctgtgcatcctggtggtctggatcttcaagaatgccgatagaagtatggagaaaaagaagggcgaaccaaggactagagcagaagcccgcccttgggtcgacgaggatttgaaggacagctcagacctccaccaggcagaggaggacgccgacgagtggcaggagtcagaggagaatgttgagcatatcccattttcccacaaccactatcccgaaaaggagatggttaaaagatctcaggagttttatgagcttctaaacaagcggcggtctgtaaggttcatttctaacgagcaagttcccatggaggtcatcgacaacgtgattagaactgccgggaccgctcctagcggtgcacacactgagccttggacattcgtggtggttaaggacccagacgtaaaacacaagatcaggaagatcatcgaagaagaagaggagattaattacatgaagagaatgggccacaggtgggtgacagacttaaaaaaactgcgaaccaattggatcaaagagtacctggataccgcccctatcctgatcctgatcttcaaacaggtgcacggtttcgcagccaatgggaaaaagaaagtacattattataatgagatcagtgtgtcaatcgcttgcggaatcctgttggccgccttgcaggtgaataatggaattacaatgaggcatcagactgcaaggcatcgacacctgattgaggggcccggacgctcaagcgaagcctgctctaaactgtcgtcccagggatgcccaggattctactgctag

SEQ ID NO: 63253 - DNA, 855 bp, Artificial Sequence
  derived and/or modified sequence
atgtacttcctgacccccatcctggtggccatcctgtgcatcctggtggtctggattttcaagaacgctgaccgatcaatggaaaagaagaagggtgaaccccgcacgagagccgaagcacgaccatgggttgatgaggatctgaaggacagctccgatctgcatcaagccgaggaggatgctgacgagtggcaggagtctgaggaaaatgtagagcacattcccttttcacataaccattatccagaaaaggagatggtgaaacggagtcaggagttttatgaactgttgaacaaacgaagatccgtgcgcttcatatcaaatgagcaggtgcccatggaagtgattgacaatgttatccgcaccgccgggaccgctcccagtggagcccatacagagccttggacatttgtagtggtgaaggaccctgatgtgaaacacaaaattagaaaaatcatcgaggaagaggaagaaattaattacatgaaacgcatggggcatcgatgggttaccgatctgaagaaactgcggactaactggataaaggagtatctggacacggcccccatcttgattctgatctttaagcaggtgcacgggtttgccgcgaatggtaagaagaaggtgcactactataatgaaataagcgtttcaattgcgtgtggaatcttattggcggcacttcaagtcaataacggtatcactatgcggcaccagacagcccgccacaggcacttaattgagggtcccggacgttcttcggaagcctgtagtaagttgtccagtcagggctgtccaggcgccagcgctgctggaagtctgtttcactttgcaattgaatttgcagctccttag

SEQ ID NO: 63254 - DNA, 882 bp, Artificial Sequence
  derived and/or modified sequence
atgtatttcctaacaccgatcttggtggcaattctttgtatcctggtcgtttggatattcaagaatgctgacagatccatggagaagaagaaaggagaacccagaacaagagctgaagctaggccatgggtggatgaggacctaaaagattcctctgaccttcaccaggcagaggaagatgccgatgaatggcaggagagcgaagaaaacgtggagcacattccgttttcccataaccactatccagagaaggaaatggttaaacgtagccaggagttctacgaactcctgaacaagcggagaagcgtaagattcatttctaatgagcaggtacccatggaggtgatcgacaacgtgatccgcacagcgggaactgctcccagcggcgctcacaccgaaccgtggacctttgttgtcgtgaaggatcctgatgttaagcacaaaatccgaaagattattgaggaggaggaagagatcaattacatgaagaggatgggtcacagatgggtgaccgacttaaaaaaactgagaacgaactggattaaggaatacctcgacacggctccaatcctgatcctcattttcaaacaggtgcatggattcgcagctaatgggaagaagaaagttcactattataatgagatatcggtgagtattgcatgcggcatcttgctggccgctctgcaggtgaataatggcattacaatgaggcaccagaccgctcgacacaggcatctgattgagggccctgggaggtcctccgaagcatgctctaagctctcctctcagggctgtccggaatgtagatccggtgactgccactaccattcttcacagttatggccaagtactgaaggcgctcccggaccaccaaggacctag

SEQ ID NO: 63255 - DNA, 813 bp, Artificial Sequence
  derived and/or modified sequence
atgtatttcttgacacctattctcgtagctatcctgtgcattcttgtcgtgtggattttcaagaatgctgataggtctatggaaaagaagaagggagagcctcgtacacgcgcagaggccagaccttgggtggacgaggatcttaaggacagctcagaccttcatcaggccgaggaagatgccgacgagtggcaggagtcggaggaaaatgtcgaacatatcccatttagccacaaccattacccagagaaggaaatggtgaaaaggagtcaggaattttacgagctcttaaacaaacggagaagtgtacggttcattagcaacgaacaagtgcctatggaagtgatcgacaatgtgattaggaccgcagggacggccccttctggcgctcacacggagccctggacctttgttgtagtcaaagaccccgatgtcaaacacaaaattcgtaaaattatcgaagaggaggaagaaattaattatatgaaacgcatgggtcacaggtgggtgactgacctgaaaaagctacggacaaactggatcaaagaatacctggacacagctccgatcctcatcctcatctttaagcaggtccacggctttgccgcaaatggcaagaagaaggtccactattataacgaaatctctgttagcattgcatgcgggatcttactggccgctctgcaggttaataatgggattaccatgagacaccaaaccgcccgtcaccgacacttaattgagggacccggtcggtcgtcagaagcctgttcgaaactgagctctcaaggctgccctggtttttattgttag

SEQ ID NO: 63256 - DNA, 855 bp, Artificial Sequence
  derived and/or modified sequence
atgtacttcttgacgccaattctggtggcaattctgtgtatcttagtcgtgtggatctttaagaacgctgatagatctatggagaagaagaagggggagccccgaactagagcggaggctcggccatgggtggacgaggaccttaaggacagctctgacttacaccaggccgaagaagacgctgatgagtggcaagagtctgaggaaaacgtcgagcatattcctttcagtcataaccattaccctgagaaggaaatggttaaaaggtcccaggagttctatgagctgctgaacaaaagacgctcagttagattcatttctaatgagcaggtacccatggaagtgattgacaacgtcatccggactgctggcaccgcgccttctggggctcataccgagccctggacctttgtcgtagtgaaggatccagacgtgaagcacaaaatcaggaaaatcatcgaggaagaggaggaaataaactacatgaagaggatggggcatagatgggtcacagatctgaagaaattacgcaccaattggattaaggagtatttggacactgctccaatcttgatcttgatcttcaaacaggtccatgggtttgccgcaaatggcaagaaaaaggtgcactactacaatgagatcagcgtttctattgcatgcggaattctactggctgctctacaggtgaataacggcataactatgcgccatcaaaccgccagacaccggcatttgattgaaggccctggacgatcgtcggaagcttgttctaagctgagcagtcagggttgcccaggggcaagtgccgcaggctccttattccattttgccattgaattcgccgctccatag

SEQ ID NO: 63257 - DNA, 882 bp, Artificial Sequence
  derived and/or modified sequence
atgtacttcctgacccccatcctggtggccatcctgtgcatcctggtggtgtggatcttcaagaacgccgacagaagcatggagaagaagaagggcgagcccagaaccagagccgaggccagaccctgggtggacgaggacctgaaggacagcagcgacctgcaccaggccgaggaggacgccgacgagtggcaggagagcgaggagaacgtggagcacatccccttcagccacaaccactaccccgagaaggagatggtgaagagaagccaggagttctacgagctgctgaacaagagaagaagcgtgagattcatcagcaacgagcaggtgcccatggaggtgatcgacaacgtgatcagaaccgccggcaccgcccccagcggcgcccacaccgagccctggaccttcgtggtggtgaaggaccccgacgtgaagcacaagatcagaaagatcatcgaggaggaggaggagatcaactacatgaagagaatgggccacagatgggtgaccgacctgaagaagctgagaaccaactggatcaaggagtacctggacaccgcccccatcctgatcctgatcttcaagcaggtgcacggcttcgccgccaacggcaagaagaaggtgcactactacaacgagatcagcgtgagcatcgcctgcggcatcctgctggccgccctgcaggtgaacaacggcatcaccatgagacaccagaccgccagacacagacacctgatcgagggccccggcagaagcagcgaggcctgcagcaagctgagcagccagggctgccccgagtgcagaagcggcgactgccactaccacagcagccagctgtggcccagcaccgagggcgcccccggcccccccagaacctag

SEQ ID NO: 63258 - DNA, 813 bp, Artificial Sequence
  derived and/or modified sequence
atgtacttcctgacccccatcctggtggccatcctgtgcatcctggtggtgtggatcttcaagaacgccgacagaagcatggagaagaagaagggcgagcccagaaccagagccgaggccagaccctgggtggacgaggacctgaaggacagcagcgacctgcaccaggccgaggaggacgccgacgagtggcaggagagcgaggagaacgtggagcacatccccttcagccacaaccactaccccgagaaggagatggtgaagagaagccaggagttctacgagctgctgaacaagagaagaagcgtgagattcatcagcaacgagcaggtgcccatggaggtgatcgacaacgtgatcagaaccgccggcaccgcccccagcggcgcccacaccgagccctggaccttcgtggtggtgaaggaccccgacgtgaagcacaagatcagaaagatcatcgaggaggaggaggagatcaactacatgaagagaatgggccacagatgggtgaccgacctgaagaagctgagaaccaactggatcaaggagtacctggacaccgcccccatcctgatcctgatcttcaagcaggtgcacggcttcgccgccaacggcaagaagaaggtgcactactacaacgagatcagcgtgagcatcgcctgcggcatcctgctggccgccctgcaggtgaacaacggcatcaccatgagacaccagaccgccagacacagacacctgatcgagggccccggcagaagcagcgaggcctgcagcaagctgagcagccagggctgccccggcttctactgctag

SEQ ID NO: 63259 - DNA, 855 bp, Artificial Sequence
  derived and/or modified sequence
atgtacttcctgacccccatcctggtggccatcctgtgcatcctggtggtgtggatcttcaagaacgccgacagaagcatggagaagaagaagggcgagcccagaaccagagccgaggccagaccctgggtggacgaggacctgaaggacagcagcgacctgcaccaggccgaggaggacgccgacgagtggcaggagagcgaggagaacgtggagcacatccccttcagccacaaccactaccccgagaaggagatggtgaagagaagccaggagttctacgagctgctgaacaagagaagaagcgtgagattcatcagcaacgagcaggtgcccatggaggtgatcgacaacgtgatcagaaccgccggcaccgcccccagcggcgcccacaccgagccctggaccttcgtggtggtgaaggaccccgacgtgaagcacaagatcagaaagatcatcgaggaggaggaggagatcaactacatgaagagaatgggccacagatgggtgaccgacctgaagaagctgagaaccaactggatcaaggagtacctggacaccgcccccatcctgatcctgatcttcaagcaggtgcacggcttcgccgccaacggcaagaagaaggtgcactactacaacgagatcagcgtgagcatcgcctgcggcatcctgctggccgccctgcaggtgaacaacggcatcaccatgagacaccagaccgccagacacagacacctgatcgagggccccggcagaagcagcgaggcctgcagcaagctgagcagccagggctgccccggcgccagcgccgccggcagcctgttccacttcgccatcgagttcgccgccccctag

SEQ ID NO: 63260 - protein, 247 aa, Artificial Sequence
  derived and/or modified sequence
MYFLTPILVAILCILVVWIFKNADRSMEKKKGEPRTRAEARPWVDEDLKDSSDLHQAEEDADEWQESEENVEHIPFSHNHYPEKEMVKRSQEFYELLNKRRSVRFISNEQVPMEVIDNVIRTAGTAPSGAHTEPWTFVVVKDPDVKHKIRKIIEEEEEINYMKRMGHRWVTDLKKLRTNWIKEYLDTAPILILIFKQVHGFAANGKKKVHYYNEISVSIACGILLAALQVFGKIILKELALISFLNL

SEQ ID NO: 63261 - DNA, 744 bp, Artificial Sequence
  derived and/or modified sequence
atgtattttcttactcctatcctggtggctatcttatgcatattagtggtgtggatctttaagaatgcagaccggtctatggaaaaaaagaagggggaaccacgtaccagggcggaggcccgcccttgggtagacgaagatcttaaggatagctctgacctgcaccaagcggaagaggatgctgatgagtggcaggagagcgaagaaaatgtggagcacattcctttcagtcataatcactaccccgagaaggaaatggtgaagcggtcacaggaattctatgaactcctgaacaaacgccggagcgttcgtttcattagtaacgagcaggttcctatggaagtcatcgacaatgtgataagaacagccgggaccgccccctccggcgctcacaccgagccatggacattcgtggtcgttaaggaccctgatgtgaaacacaaaattcgtaaaatcatagaggaagaggaggagatcaattatatgaagaggatgggtcacagatgggtgacagacttaaagaagcttcgaacgaattggatcaaagaatacctcgacaccgcccccattctaatcctaatcttcaagcaggtgcacggcttcgcagccaatggcaagaagaaggtccactactataacgagataagcgtgagcattgcttgtgggattctgctggctgccttgcaggtgtttgggaaaatcatcctcaaggagctggcactgattagctttctgaacctgtag

SEQ ID NO: 63262 - DNA, 882 bp, Artificial Sequence
  derived and/or modified sequence
ggcattctccactcctgtctctgtgtgtttaaaaaccggtgtgggaagtgtgcacgcctgtgacgtcagactccagaccatgtatttcctgactcccatcttggtagccattctctgcattttggttgtgtggatctttaaaaatgccgacagaagcatggagaaaaagaagggggagcctagaaccagggccgaagctcgcccctgggtggatgaagacttaaaagacagcagtgacctgcaccaagcagaagaagatgctgatgaatggcaagaatcagaagaaaatgttgaacacatccccttctctcataaccactatcctgagaaggaaatggttaagaggtctcaggaattttatgaacttctcaataagagacggtcagtcaggttcataagtaatgagcaagtcccaatggaagtcattgataatgtcatcagaacggcaggaacagccccgagtggggctcacacagagccctggaccttcgtggttgtgaaggacccagacgtgaagcacaagattcgaaagatcattgaggaggaagaggagatcaactacatgaaaaggatgggacatcgctgggtcacagacctcaagaaactgagaaccaactggattaaagagtacttggatactgcccctattttgattctcattttcaaacaagtacatggtttcgccgcaaatggcaagaaaaaagtccactactacaatgagatcagtgtttccatcgcttgtggcatcctgctagctgccctgcaggtttttggaaaaattatcctgaaggagctggcattgatttccttcctgaatctgtaagcagaatgcaggtctggtgactgtcactaccactcctctcaactgtggccctcgactga

SEQ ID NO: 63263 - DNA, 744 bp, Artificial Sequence
  derived and/or modified sequence
atgtacttcctgacccccatcctggtggccatcctgtgcatcctggtggtgtggatcttcaagaatgctgaccgctccatggagaagaagaagggggagcccaggaccagggctgaggcccggccctgggtggatgaggacctgaaggacagcagtgacctgcaccaggccgaggaggatgctgatgagtggcaggagagtgaagaaaatgtggagcacatccccttcagccacaaccactacccagagaaggagatggtgaagaggagccaggagttctatgagctgctgaacaagagaagatctgtgcgcttcatcagcaatgagcaggtgcccatggaggtgattgacaacgtcatcagaacagctggaacagcccccagcggggcccacacagagccctggacctttgtggtggtgaaggaccctgatgtgaagcacaagatcaggaagatcatcgaggaggaggaggagatcaactacatgaagaggatgggccaccgctgggtgacagacctgaagaagctgcggaccaactggatcaaggagtacctggacacagcccccatcctgatcctgatcttcaagcaggtgcacggctttgctgccaacgggaagaagaaggtgcactactacaatgagatctctgtgtccatcgcctgtggcatcctgctggccgccctgcaggtgtttgggaagatcatcctgaaggagctggccctgatctccttcctgaacctgtag

SEQ ID NO: 63264 - DNA, 744 bp, Artificial Sequence
  derived and/or modified sequence
atgtacttcctgacccccatcctggtggccatcctgtgcatcctggtcgtttggatatttaaaaacgccgatcggtctatggaaaagaaaaagggtgagccccgaactagagctgaggcgcggccatgggtggacgaagacctgaaggattccagcgacctgcaccaggccgaagaagatgctgatgaatggcaagaatccgaggaaaatgtggaacatatccctttctctcacaaccattacccagagaaggaaatggttaagcgaagccaagaattttacgagcttctgaacaagcgccggtcagtccgttttatcagtaatgagcaagtgcccatggaggtcattgataacgtgataagaactgccggcactgctccaagcggcgcccatacggaaccttggacttttgtggtggtgaaagaccccgacgttaaacacaagatcagaaaaatcattgaggaggaggaagaaattaactacatgaagaggatgggtcataggtgggttaccgacctaaaaaagttgcgaaccaactggattaaagagtacttagacactgctcccatccttattctgatttttaagcaagtccacggctttgccgcaaacggcaagaagaaagtccattattataacgagatctctgtaagcatagcttgcggcattctgctggctgccttacaggtgttcggaaagataattctcaaggagttagccctcatatcttttctcaatctttag

SEQ ID NO: 63265 - DNA, 744 bp, Artificial Sequence
  derived and/or modified sequence
atgtacttcctaacccccatcctcgttgccatcctgtgcatcctggtcgtatggatcttcaagaatgcggaccgctcaatggagaagaaaaagggggaaccacgtactcgagcggaggcacgcccttgggttgatgaggaccttaaagattcaagcgacctgcatcaggccgaagaggacgctgacgaatggcaggaaagcgaggagaacgtggagcacattcccttctcccacaatcactatccggaaaaggaaatggtgaaacgaagtcaggagttttacgaacttctaaacaaaagacggtccgttagatttatctcgaacgagcaggtgccaatggaggttattgacaacgtcatccgcaccgctggaacggccccaagtggcgctcataccgagccttggaccttcgtcgtggtgaaggatcctgacgtaaagcacaagatacgtaagatcattgaagaggaggaggagatcaactatatgaagcgcatgggccaccggtgggtgactgacttgaaaaagcttcggactaactggatcaaagaatacctggacacagcgcctattctcatcctgatcttcaagcaggtgcacggctttgctgcaaatggcaagaagaaagtgcattactataacgaaatctcagtcagcatcgcgtgcgggatcttacttgccgctctgcaggtgttcggaaagattattctcaaggaactggccctcatctctttcctcaacctctag

SEQ ID NO: 63266 - DNA, 744 bp, Artificial Sequence
  derived and/or modified sequence
atgtacttcctgacccccatcctggtggccatcctgtgcatcctggtggtgtggatcttcaagaacgccgacagaagcatggagaagaagaagggcgagcccagaaccagagccgaggccagaccctgggtggacgaggacctgaaggacagcagcgacctgcaccaggccgaggaggacgccgacgagtggcaggagagcgaggagaacgtggagcacatccccttcagccacaaccactaccccgagaaggagatggtgaagagaagccaggagttctacgagctgctgaacaagagaagaagcgtgagattcatcagcaacgagcaggtgcccatggaggtgatcgacaacgtgatcagaaccgccggcaccgcccccagcggcgcccacaccgagccctggaccttcgtggtggtgaaggaccccgacgtgaagcacaagatcagaaagatcatcgaggaggaggaggagatcaactacatgaagagaatgggccacagatgggtgaccgacctgaagaagctgagaaccaactggatcaaggagtacctggacaccgcccccatcctgatcctgatcttcaagcaggtgcacggcttcgccgccaacggcaagaagaaggtgcactactacaacgagatcagcgtgagcatcgcctgcggcatcctgctggccgccctgcaggtgttcggcaagatcatcctgaaggagctggccctgatcagcttcctgaacctgtag

SEQ ID NO: 63267 - protein, 359 aa, Artificial Sequence
  derived and/or modified sequence
MQRAVSVVARLGFRLQAFPPALCRPLSCAQEVLRRTPLYDFHLAHGGKMVAFAGWSLPVQYRDSHTDSHLHTRQHCSLFDVSHMLQTKILGSDRVKLMESLVVGDIAELRPNQDKVRELQNQGRDVGLEVLDNALLALQGPTAAQVLQAGVADDLRKLPFMTSAVMEVFGVSGCRVTRCGYTGEDGVEISVPVAGAVHLATAILKNPEVKLAGLAARDSLRLEAGLCLYGNDIDEHTTPVEGSLSWTLGKRRRAAMDFPGAKVIVPQLKGRVQRRRVGLMCEGAPMRAHSPILNMEGTKIGTVTSGCPSPSLKKNVAMGYVPCEYSRPGTMLLVEVRRKQQMAVVSKMPFVPTNYYTLK

SEQ ID NO: 63268 - DNA, 1080 bp, Artificial Sequence
  derived and/or modified sequence
atgcagcgcgccgtatccgtggtcgcccggttgggatttcgtcttcaagccttccccccagccctttgtcggccgctctcttgcgcacaggaggttttgcgccgcacccccctgtatgattttcatttggctcatgggggcaagatggtggccttcgccggttggtctttgcccgtgcagtatcgcgattcacacacagactcgcacctacatacacgccagcactgttctttgttcgatgtgagccacatgcttcagactaagatactgggctcagatcgagtgaagctgatggagtccttggtggtaggggacatcgctgaactgcgtcccaaccaagataaggtcagagaactgcagaatcagggaagagacgtgggcctcgaggtgctggacaatgcgttgctggcactgcaggggcccacagcggcgcaggtgcttcaggccggagtggccgacgatttacggaaactcccatttatgacaagcgctgttatggaagtatttggtgtttctgggtgcagggttacaaggtgcggctataccggagaggatggcgtggagatctctgtacctgtggcgggtgccgtgcatctggcgacggcaatcctgaagaaccccgaagtcaagctcgccgggctggccgcccgggactcccttagactggaggccgggctttgcctgtatggcaacgatattgacgagcacaccacccctgtcgagggaagcctgagttggactctgggcaaaagaaggcgagcagcaatggattttcccggggccaaagtgattgtgcctcagttgaagggtagggtgcaaagaaggcgagtcggcttgatgtgtgagggagctcctatgcgtgctcattctcctattctgaacatggagggcacaaaaattggaacagtgacaagtggctgcccctccccttcgctgaaaaagaacgttgccatgggttatgtcccttgtgagtactcaagaccaggcacgatgctgctggtagaggttcgtcgaaagcagcagatggcagtcgtgagtaaaatgccctttgtgccaactaactattacacactgaagtag

SEQ ID NO: 63269 - DNA, 1080 bp, Artificial Sequence
  derived and/or modified sequence
atgcagagagctgtgtctgtggtggcccggctgggcttccggctgcaggccttccccccagccctgtgccggcccctgagctgtgcccaggaggtgctgcggaggacccccctgtatgacttccacctggcccatggaggcaagatggtggcctttgctggctggagcctgcctgtgcagtacagagacagccacacagacagccacctgcacacccggcagcactgcagcctgtttgatgtgagccacatgctgcagaccaagatcctgggcagtgacagagtgaagctgatggagagcctggtggtgggggacattgctgagctgcggcccaaccaggacaaggtgcgggagctgcagaaccagggcagagatgtgggcctggaggtgctggacaatgccctgctggccctgcagggccccacagctgcccaggtgctgcaggccggcgtggctgatgacctgaggaagctgcccttcatgaccagcgctgtgatggaggtgtttggagtgtctggctgccgggtgacccgctgtggctacaccggggaggatggagtggagatctctgtgcctgtggccggggctgtgcacctggccacagccatcctgaagaaccctgaggtgaagctggccggcctggccgcccgggacagcctgcggctggaggccggcctgtgcctgtatggaaatgacattgatgagcacaccacccctgtggagggcagcctgtcctggaccctgggcaagagaagaagagctgccatggacttccctggggccaaggtgattgtgccccagctgaagggccgggtgcagaggagaagagtgggcctgatgtgtgagggcgcccccatgagggcccacagccccatcctgaacatggagggcaccaagattggcaccgtgaccagcggctgccccagccccagcctgaagaagaatgtggccatgggctacgtgccctgtgagtacagccggcccggcaccatgctgctggtggaggtgcggaggaagcagcagatggctgtggtgtccaagatgccctttgtgcccaccaactactacaccctgaagtag

SEQ ID NO: 63270 - DNA, 1080 bp, Artificial Sequence
  derived and/or modified sequence
atgcagcgggccgtgagcgtggtggcccggctgggcttccggctgcaggcctttcccccagcactctgccgacccctgtcttgtgctcaggaggttctgaggcgcactccattgtacgattttcaccttgcgcatggaggcaagatggtggctttcgctggctggagtttgcccgtccagtaccgtgactcccataccgacagccatcttcacaccagacagcactgcagtttattcgacgtgtcgcatatgctgcagaccaagattttggggtccgatagagtgaagctgatggagagtttggtggttggcgacatcgctgagctgaggccaaaccaggacaaggtaagagaactccagaatcagggaagggatgtaggtttggaggttttggataatgctctattagcgctccaggggccgaccgccgcccaggtattacaggccggggtggccgatgatcttcggaagctgcccttcatgactagcgctgtcatggaagtcttcggtgtcagtggctgtagagtcactaggtgtgggtatacaggcgaggacggcgtcgagatctcagtgccagtggcgggcgccgtgcacttggcaactgcgattctgaagaacccagaggtgaaattggctggattggcggcccgcgactctctccggctggaggcaggcctgtgcctctacgggaatgatatcgatgagcacacgacacccgtggagggcagcctgtcatggaccctcgggaaacggcggagagccgccatggattttcctggcgccaaagtgatcgtgcctcagttgaagggacgagtgcaaaggaggcgcgtggggttgatgtgtgaaggcgcaccaatgcgtgcccactctcccattctgaatatggagggaactaagataggcacagtgacatccgggtgtcctagcccctctctgaagaaaaatgtcgctatggggtacgttccttgtgaatacagtaggcctggcaccatgctgctggtagaggtgcgccgcaaacagcagatggctgtcgtttccaaaatgccgttcgtgccaactaattattacacccttaaatag

SEQ ID NO: 63271 - DNA, 1860 bp, Artificial Sequence
  derived and/or modified sequence
gcactcgttgcaggcgacgatgcagagggctgtaagtgtggtggcccgtctgggctttcgcctgcaggcattccccccggccttgtgtcgtccacttagttgcgcacaggaggtgctccgcaggacaccgctctatgacttccacctggcccacggcgggaaaatggtggcgtttgcgggttggagtctgccagtgcagtaccgggacagtcacactgactcgcacctgcacacacgccagcactgctcgctctttgacgtgtctcatatgctgcagaccaagatacttggtagtgaccgggtgaagctgatggagagtctagtggttggagacattgcagagctaagaccaaaccaggacaaggtcagggagcttcagaaccagggcagagatgtgggcctggaggtgttggataatgccctgctagctctgcaaggccccactgcagcccaggtactacaggccggcgtggcagatgacctgaggaaactgcccttcatgaccagtgctgtgatggaggtgtttggcgtgtctggctgccgcgtgacccgctgtggctacacaggagaggatggtgtggagatctcggtgccggtagcgggggcagttcacctggcaacagctattctgaaaaacccagaggtgaagctggcagggctggcagccagggacagcctgcgcctggaggcaggcctctgcctgtatgggaatgacattgatgaacacactacacctgtggagggcagcctcagttggacactggggaagcgccgccgagctgctatggacttccctggagccaaggtcattgttccccagctgaagggcagggtgcagcggaggcgtgtggggttgatgtgtgagggggcccccatgcgggcacacagtcccatcctgaacatggagggtaccaagattggtactgtgactagtggctgcccctccccctctctgaagaagaatgtggcgatgggttatgtgccctgcgagtacagtcgtccagggacaatgctgctggtagaggtgcggcggaagcagcagatggctgtagtcagcaagatgccctttgtgcccacaaactactataccctcaagtgaagctggctcagggtggggctgtcccttccaggagttttgcccctacaaggggttagtcaagaagctgaggcagaactcactgggggtgggcagttaaggtggaggctgattctaattgtctggttgaggggccacaccacctattccccccacctaactcatgccattccagcttccttcaggaccctgcttctgagtgacggaccagctcacacaatgtcttgtttcagtccatgatcccactgacctactcttgcctgctggagggtaatgagaagctttggttctgccatctctcccactctgccaggtgctggctgtggagcaaaggctcacctttgtggagaggataaaacctgcccaacctacctcaccatggtttttcacattgcaaagggtaataacatgggcagtgcggacttaggctaccccctccagtttgctttccgtaaatgcaaattgtccttactgcaagtcaggaatgattgctgactcacagtagggctgctatgcctgtgtgtaaacttggggatggctgagggaacatagactcactcttccacattcccaagttggtctagtgtgctgcccagtagcaaaccatggcagactcaccacctattctgagttccagggctgctgtagggcagggtgggcttcctcccagacttgccttaccctgggctgatctttgcccctggtatgcattaatggactccactgaatcctgaaaaaaaaattaaacttccttcttacttgcc

SEQ ID NO: 63272 - DNA, 1080 bp, Artificial Sequence
  derived and/or modified sequence
atgcagagagctgtgtcagtagtcgcccgtctgggctttagattgcaggctttccccccagccctgtgccgaccactgagttgtgctcaggaggtgttgagaaggactcccctctacgatttccaccttgctcacgggggaaagatggtagccttcgctggttggtcgctgcctgtgcaatacagggattcacataccgattctcaccttcatacacggcaacattgtagcctctttgacgtttcccacatgctccaaaccaaaattcttggctccgatcgcgtgaaactgatggaaagcttagtggtgggtgatattgccgagctcaggccaaaccaggataaggtcagggaactgcagaaccagggcagagacgtcggtctagaagttctggacaatgctttgctcgcgctgcaaggccctactgccgcacaggtgttgcaggcgggagtcgccgatgatctacgcaagcttccctttatgacctcagctgtgatggaagtctttggcgtcagcggctgtagggttacaagatgcgggtacacaggagaggacggcgtggagatttccgtccctgttgcaggcgcagtacacctcgccacggccattctgaaaaacccagaggtcaaactggcaggtctggcagcgagggacagcctgcgcttggaagctggactctgcctctacggcaacgatattgatgagcatacaactccggtggaggggtcactctcctggacactcggaaagagacgccgtgctgcgatggacttccccggagccaaagtcattgtgcctcaactcaaaggcagggtgcagcgcaggcgtgtgggcctgatgtgcgagggagccccaatgcgcgctcattcccctattctgaatatggagggaactaagataggcaccgtgacatcagggtgtccatcccctagcttaaagaagaacgttgccatggggtatgtgccctgcgaatatagcagacctgggaccatgttactggtcgaggtgcgcagaaaacagcaaatggcggtggttagcaagatgccctttgttcccaccaattactacactttgaaatag

SEQ ID NO: 63273 - DNA, 1080 bp, Artificial Sequence
  derived and/or modified sequence
atgcagagagccgtgagcgtggtggccagactgggcttcagactgcaggccttcccccccgccctgtgcagacccctgagctgcgcccaggaggtgctgagaagaacccccctgtacgacttccacctggcccacggcggcaagatggtggccttcgccggctggagcctgcccgtgcagtacagagacagccacaccgacagccacctgcacaccagacagcactgcagcctgttcgacgtgagccacatgctgcagaccaagatcctgggcagcgacagagtgaagctgatggagagcctggtggtgggcgacatcgccgagctgagacccaaccaggacaaggtgagagagctgcagaaccagggcagagacgtgggcctggaggtgctggacaacgccctgctggccctgcagggccccaccgccgcccaggtgctgcaggccggcgtggccgacgacctgagaaagctgcccttcatgaccagcgccgtgatggaggtgttcggcgtgagcggctgcagagtgaccagatgcggctacaccggcgaggacggcgtggagatcagcgtgcccgtggccggcgccgtgcacctggccaccgccatcctgaagaaccccgaggtgaagctggccggcctggccgccagagacagcctgagactggaggccggcctgtgcctgtacggcaacgacatcgacgagcacaccacccccgtggagggcagcctgagctggaccctgggcaagagaagaagagccgccatggacttccccggcgccaaggtgatcgtgccccagctgaagggcagagtgcagagaagaagagtgggcctgatgtgcgagggcgcccccatgagagcccacagccccatcctgaacatggagggcaccaagatcggcaccgtgaccagcggctgccccagccccagcctgaagaagaacgtggccatgggctacgtgccctgcgagtacagcagacccggcaccatgctgctggtggaggtgagaagaaagcagcagatggccgtggtgagcaagatgcccttcgtgcccaccaactactacaccctgaagtag

SEQ ID NO: 63274 - protein, 347 aa, Artificial Sequence
  derived and/or modified sequence
MQRAVSVVARLGFRLQAFPPALCRPLSCAQTKILGSDRVKLMESLVVGDIAELRPNQGTLSLFTNEAGGILDDLIVTNTSEGHLYVVSNAGCWEKDLALMQDKVRELQNQGRDVGLEVLDNALLALQGPTAAQVLQAGVADDLRKLPFMTSAVMEVFGVSGCRVTRCGYTGEDGVEISVPVAGAVHLATAILKNPEVKLAGLAARDSLRLEAGLCLYGNDIDEHTTPVEGSLSWTLGKRRRAAMDFPGAKVIVPQLKGRVQRRRVGLMCEGAPMRAHSPILNMEGTKIGTVTSGCPSPSLKKNVAMGYVPCEYSRPGTMLLVEVRRKQQMAVVSKMPFVPTNYYTLK

SEQ ID NO: 63275 - protein, 306 aa, Artificial Sequence
  derived and/or modified sequence
MESLVVGDIAELRPNQGTLSLFTNEAGGILDDLIVTNTSEGHLYVVSNAGCWEKDLALMQDKVRELQNQGRDVGLEVLDNALLALQGPTAAQVLQAGVADDLRKLPFMTSAVMEVFGVSGCRVTRCGYTGEDGVEISVPVAGAVHLATAILKNPEVKLAGLAARDSLRLEAGLCLYGNDIDEHTTPVEGSLSWTLGKRRRAAMDFPGAKVIVPQLKGRVQRRRVGLMCEGAPMRAHSPILNMEGTKIGTVTSGCPSPSLKKNVAMGYVPCEYSRPGTMLLVEVRRKQQMAVVSKMPFVPTNYYTLK

SEQ ID NO: 63276 - DNA, 1044 bp, Artificial Sequence
  derived and/or modified sequence
atgcagagagcagtcagcgtcgtggcccgattgggctttcgcctacaggcatttccgccagccctttgtcgtcctctgtcatgcgctcagactaaaattctgggcagcgatcgagtcaagctgatggagagcctggtggtcggggacatcgcagagttgagacccaatcagggtacactcagcctgttcaccaatgaggcgggaggcattttagatgacctgatagtgaccaacacatccgaaggacacctttatgtggtctccaatgccggctgttgggaaaaggatctggccttaatgcaagacaaggttcgagagctccagaatcagggaagagacgttggacttgaagtgctggacaacgctcttttagccctccaaggccctaccgctgcccaggtgcttcaggctggggtcgcagacgacttgcgcaaactccctttcatgacatcggccgtgatggaggtcttcggggtcagtggatgtcgagtgacgagatgtggatacaccggtgaggacggtgtggagatctcagtgcccgtagctggggcggtccacctggccaccgctattctgaagaaccccgaggtgaaactggcgggtctggccgcccgagactccctacggctcgaagcaggcctatgcctgtacggcaacgatattgacgagcacacaactccagtcgagggaagcctgtcctggactttaggcaagcgcagacgggctgctatggactttccaggcgccaaagtgatcgtacctcaattgaagggtcgtgtacagaggcggagggtgggcttgatgtgcgagggtgccccaatgagagcccactcgccgatattaaacatggagggtactaagattggcacagtgacatccggctgcccaagcccatcattgaagaaaaacgtagccatgggatacgttccatgcgaatacagccggcccggaacgatgttgttggtggaagtccgacgaaagcaacagatggctgttgtgtccaagatgccttttgtaccaacaaattactatacattaaaatag

SEQ ID NO: 63277 - DNA, 921 bp, Artificial Sequence
  derived and/or modified sequence
atggagtccttggtggttggggacatcgccgagctgcgtccaaatcagggcactttgtctctctttacgaacgaagctggaggcatcctggacgacttaattgtgacgaacactagcgaaggccatctgtacgttgtcagtaatgcagggtgctgggagaaggacctcgccctgatgcaagacaaggtccgcgagcttcagaaccaaggccgcgacgtggggttagaagtactggacaatgcactcttggcgctgcagggacccaccgccgcacaggtgctacaagccggggtggccgacgacctgcgtaaactgccctttatgacctccgccgtaatggaagtgtttggcgtctctggctgtcgggtcacacggtgcgggtatactggtgaggatggagtggagatctcagtgcccgtggctggcgcagtccacctggcgactgcaatcctgaagaaccctgaggttaagttagcagggctggcggcccgagatagtctcagactcgaagccggtctttgtctttacggcaatgacatcgacgaacataccacaccagtcgagggctccctctcatggaccttgggcaaaagacgcagagctgctatggattttcctggagccaaagtgattgttccccagttgaaggggcgcgtgcagaggcgaagggtggggctaatgtgcgaaggagctcctatgcgagcacatagccccatcttgaatatggagggaacaaagatcggcactgtgacatccgggtgtccctccccctcccttaaaaagaacgtggccatgggctacgtcccctgcgaatactctcgacccggtaccatgctgttggttgaggtaagaaggaagcagcagatggccgtggttagtaagatgccattcgtcccaactaactactataccctcaagtag

SEQ ID NO: 63278 - DNA, 1044 bp, Artificial Sequence
  derived and/or modified sequence
atgcagagagctgtgtctgtggtggcccggctgggcttccggctgcaggccttccccccagccctgtgccggcccctgagctgtgcccagaccaagatcctgggcagtgacagagtgaagctgatggagagcctggtggtgggggacattgctgagctgcggcccaaccagggcaccctgagcctcttcaccaatgaagctgggggcatcctggatgacctgattgtgaccaacaccagcgagggccacctgtatgtggtgtccaatgccggctgctgggagaaggacctggccctgatgcaggacaaggtgcgggagctgcagaaccagggcagagatgtgggcctggaggtgctggacaatgccctgctggccctgcagggccccacagctgcccaggtgctgcaggccggcgtggctgatgacctgaggaagctgcccttcatgaccagcgctgtgatggaggtgtttggagtgtctggctgccgggtgacccgctgtggctacaccggggaggatggagtggagatctctgtgcctgtggccggggctgtgcacctggccacagccatcctgaagaaccctgaggtgaagctggccggcctggccgcccgggacagcctgcggctggaggccggcctgtgcctgtatggaaatgacattgatgagcacaccacccctgtggagggcagcctgtcctggaccctgggcaagagaagaagagctgccatggacttccctggggccaaggtgattgtgccccagctgaagggccgggtgcagaggagaagagtgggcctgatgtgtgagggcgcccccatgagggcccacagccccatcctgaacatggagggcaccaagattggcaccgtgaccagcggctgccccagccccagcctgaagaagaatgtggccatgggctacgtgccctgtgagtacagccggcccggcaccatgctgctggtggaggtgcggaggaagcagcagatggctgtggtgtccaagatgccctttgtgcccaccaactactacaccctgaagtag

SEQ ID NO: 63279 - DNA, 921 bp, Artificial Sequence
  derived and/or modified sequence
atggagagcctggtggtgggggacattgctgagctgcggcccaaccagggcaccctgagcctcttcaccaatgaggccggcggcatcctggatgacctgattgtgaccaacaccagcgagggccacctgtatgtggtgtccaatgccggctgctgggagaaggacctggccctgatgcaggacaaggtgcgggagctgcagaaccagggcagagatgtgggcctggaggtgctggacaatgccctgctggccctgcagggccccacagctgcccaggtgctgcaggccggcgtggctgatgacctgaggaagctgcccttcatgaccagcgctgtgatggaggtgtttggagtgtctggctgccgggtgacccgctgtggctacacaggagaagatggagtggagatctctgtgcctgtggccggggctgtgcacctggccacagccatcctgaagaaccctgaggtgaagctggccggcctggccgcccgggacagcctgcggctggaggccggcctgtgcctgtatggaaatgacattgatgagcacaccacccctgtggagggcagcctgtcctggaccctgggcaagagaagaagagctgccatggacttccctggggccaaggtgattgtgccccagctgaagggccgggtgcagaggcggcgggtgggcctgatgtgtgagggcgcccccatgagggcccacagccccatcctgaacatggagggcaccaagattggaacagtgaccagcggctgccccagccccagcctgaagaagaatgtggccatgggctacgtgccctgtgagtacagcaggcctggcaccatgctgctggtggaggtgcggaggaagcagcagatggctgtggtgtccaagatgccctttgtgcccaccaactactacaccctgaagtag

SEQ ID NO: 63280 - DNA, 1044 bp, Artificial Sequence
  derived and/or modified sequence
atgcagcgggccgtgagcgtggtggcccggctgggcttccggctgcaggctttccccccggctttatgccggccactaagttgtgctcagacaaaaatattagggagcgaccgggtgaagttgatggaatcactcgttgtgggtgacatagctgagctgcgccccaaccagggcaccctgagtctttttacaaatgaagccggaggtattctggacgaccttatcgtgaccaacacgtcagaggggcatctgtatgtcgtaagtaatgccggctgctgggagaaggacctggcccttatgcaggataaggtccgagaactgcagaatcagggaagggacgtgggcttggaagtgctggacaacgctctccttgcgctgcagggccctactgccgcccaagtgctccaggctggagtggccgatgacctccggaaactacccttcatgacatccgcagtaatggaggtcttcggtgtgtctgggtgtcgcgtgacacggtgcggatataccggtgaagatggcgtcgagatcagtgtgcccgtggctggggctgtgcacctcgcaacagctatcttgaagaatcctgaagtgaagctggctgggttggcggctagagacagcctgcggctggaggcaggcctttgcctctatggaaatgatattgacgagcacaccactccggttgagggctccttaagctggaccctgggcaagaggaggcgagcagctatggactttccaggcgccaaagttatcgttccccaactcaaagggcgcgttcagcgcagaagggtaggactcatgtgtgaaggcgcacctatgcgcgcccacagtccaatcctcaatatggaaggaacaaaaatagggacagtaacaagtggttgtccatccccttcactcaaaaagaacgtggctatgggatacgtgccctgtgagtactccaggcctggcaccatgctgcttgtcgaggttaggaggaaacagcaaatggccgtagtgtctaaaatgcccttcgtcccaaccaactactacaccctgaagtag

SEQ ID NO: 63281 - DNA, 921 bp, Artificial Sequence
  derived and/or modified sequence
atggagagcctggtggtgggcgacatcgccgagctgcggcccaaccagggtacactctcactgttcacgaatgaggcaggcggcatcctggacgatctgattgtcacaaataccagtgaaggccacctttacgtcgtgtccaacgcagggtgctgggagaaggatctggccttgatgcaggacaaagtgcgggagctacaaaatcaggggcgagatgttggactggaagtgctggataatgcattgcttgccctccagggacctacagcagcccaggtcctccaggcgggcgtcgccgacgacttacgtaaactcccgttcatgacaagcgcagtcatggaggtcttcggcgttagtggctgtagagtgacgcgttgcggctatacgggtgaggatggcgttgaaatcagcgtccctgtcgccggcgctgtacaccttgccacagcaatactcaaaaacccagaggtcaagcttgcaggcttggcagctcgcgattcactgagactggaggccggcctctgtctctacggcaatgatatagacgagcacaccacaccagtggagggctccctttcttggacactcggaaaaaggcgcagagccgccatggattttcctggcgctaaggttattgttcctcagctcaaaggccgggtgcagaggcggcgcgtggggctcatgtgtgagggcgctccgatgagggcacactccccaatcctgaacatggaaggcactaaaatcgggaccgtgacaagcgggtgtccctctccttccctcaagaagaacgtggccatgggatacgtgccttgtgagtattccaggccaggaacaatgctcctggtggaggttcgacgaaaacagcagatggcagtagtctcaaagatgccctttgtacctacgaactactacaccctaaaatag

SEQ ID NO: 63282 - DNA, 2033 bp, Artificial Sequence
  derived and/or modified sequence
gagctgccctgaagagtcagccgaaagagctggaggcttcttccctgtggttgcgggttcctgcattctctgctctaaatcccagcctgcccttggggctgcccacgcccccttcagatcctttgctccggagagagacctgtccgagcagaggcctggactacatctcccggcgtgcctggcagtgtggtggcctctgtgcgccgtctgcactcgttgcaggcgacgatgcagagggctgtaagtgtggtggcccgtctgggctttcgcctgcaggcattccccccggccttgtgtcgtccacttagttgcgcacagaccaagatacttggtagtgaccgggtgaagctgatggagagtctagtggttggagacattgcagagctaagaccaaaccaggggacactgtcgctgtttaccaacgaggctggaggcatcttagatgacttgattgtaaccaatacttctgagggccacctgtatgtggtgtccaacgctggctgctgggagaaagatttggccctcatgcaggacaaggtcagggagcttcagaaccagggcagagatgtgggcctggaggtgttggataatgccctgctagctctgcaaggccccactgcagcccaggtactacaggccggcgtggcagatgacctgaggaaactgcccttcatgaccagtgctgtgatggaggtgtttggcgtgtctggctgccgcgtgacccgctgtggctacacaggagaggatggtgtggagatctcggtgccggtagcgggggcagttcacctggcaacagctattctgaaaaacccagaggtgaagctggcagggctggcagccagggacagcctgcgcctggaggcaggcctctgcctgtatgggaatgacattgatgaacacactacacctgtggagggcagcctcagttggacactggggaagcgccgccgagctgctatggacttccctggagccaaggtcattgttccccagctgaagggcagggtgcagcggaggcgtgtggggttgatgtgtgagggggcccccatgcgggcacacagtcccatcctgaacatggagggtaccaagattggtactgtgactagtggctgcccctccccctctctgaagaagaatgtggcgatgggttatgtgccctgcgagtacagtcgtccagggacaatgctgctggtagaggtgcggcggaagcagcagatggctgtagtcagcaagatgccctttgtgcccacaaactactataccctcaagtgaagctggctcagggtggggctgtcccttccaggagttttgcccctacaaggggttagtcaagaagctgaggcagaactcactgggggtgggcagttaaggtggaggctgattctaattgtctggttgaggggccacaccacctattccccccacctaactcatgccattccagcttccttcaggaccctgcttctgagtgacggaccagctcacacaatgtcttgtttcagtccatgatcccactgacctactcttgcctgctggagggtaatgagaagctttggttctgccatctctcccactctgccaggtgctggctgtggagcaaaggctcacctttgtggagaggataaaacctgcccaacctacctcaccatggtttttcacattgcaaagggtaataacatgggcagtgcggacttaggctaccccctccagtttgctttccgtaaatgcaaattgtccttactgcaagtcaggaatgattgctgactcacagtagggctgctatgcctgtgtgtaaacttggggatggctgagggaacatagactcactcttccacattcccaagttggtctagtgtgctgcccagtagcaaaccatggcagactcaccacctattctgagttccagggctgctgtagggcagggtgggcttcctcccagacttgccttaccctgggctgatctttgcccctggtatgcattaatggactccactgaatcctgaaaaaaaaattaaacttccttcttacttgcc

SEQ ID NO: 63283 - DNA, 1044 bp, Artificial Sequence
  derived and/or modified sequence
atgcagcgagcagtttcagtcgttgccagattgggattcagactgcaggccttcccgccagctctatgcagaccactctcttgcgcccaaacaaagatactaggctctgacagggtaaaacttatggaatcgttagtggtgggcgacatcgccgagctgcggcctaaccagggcacattgtcgttatttaccaatgaagcaggaggcatcctcgacgatctgatcgttaccaatacaagtgagggtcacctgtacgtcgtgtcgaacgccggatgttgggagaaagatcttgccctgatgcaagataaggtgagggagctccagaatcaaggtcgagacgtgggccttgaagtgcttgataatgctttgctggcccttcaggggcctactgccgctcaggtgctgcaggccggagtggccgacgatctgcgcaaactcccctttatgactagcgcagtgatggaggtgttcggcgtgtctgggtgcagagtgactagatgcggatacactggggaagatggagtggaaatatccgttcccgtagccggtgcagtgcatctggccacggctatcctgaagaaccccgaagtgaagctggccggattggccgcaagagactccctccgcctcgaagctggcctgtgtctttacggcaatgatatcgacgagcacactactcctgtggagggatcgctgagctggaccctcggaaagcgcaggcgagccgctatggactttccaggcgctaaggttatagtacctcaactgaagggccgagtccagcggaggagggttggcctaatgtgcgaaggcgctccgatgagagcccacagcccaatcctgaacatggagggtactaagataggcactgttaccagcggctgtccctcaccctccctcaaaaagaacgtcgcaatggggtatgttccctgcgaatattccagaccagggaccatgcttttagtggaggtaaggcggaaacagcaaatggcggtcgttagtaagatgcccttcgttccaacaaactattataccctgaaatag

SEQ ID NO: 63284 - DNA, 921 bp, Artificial Sequence
  derived and/or modified sequence
atggaaagcctagtggtcggcgatatcgccgagctgagacccaaccagggaactctgtcattgttcactaatgaggctggaggaatcctcgacgatttgatcgtgacaaatacgtccgaggggcatctgtacgttgtcagcaatgctgggtgctgggaaaaggatctggctctcatgcaagacaaagtgcgggaacttcagaaccaggggagagacgtgggattggaagtgctggataacgctctcctagcattgcaggggcctaccgctgcccaagtccttcaggccggagtagctgacgatttgcggaagctccccttcatgacaagcgccgtcatggaggtgttcggtgtgagcggctgcagagtcacgaggtgcggttatacgggcgaagacggagtggagatctccgtgccagtggcgggagcagtccacctggctaccgcaatactgaaaaatcccgaagtcaagctcgcgggtctcgccgctagggactccttgcgcctggaggcaggactgtgtttgtacggtaatgatattgacgaacatactacccccgtagagggcagtttgtcctggactctgggaaagcggaggagggccgctatggactttccgggagccaaggtgatagtccctcagttgaagggccgagttcagagacgccgagttggactcatgtgtgagggcgctcctatgagggcccacagtccaattctaaatatggagggaacaaagatcgggactgtgaccagcggctgtcctagtccttcgctcaaaaaaaatgttgctatggggtacgtaccatgtgagtactccaggcccggaacaatgttgctggttgaggtgcgaagaaaacagcagatggccgttgtcagtaagatgccctttgtcccaaccaattattatacgttaaagtag

SEQ ID NO: 63285 - DNA, 1044 bp, Artificial Sequence
  derived and/or modified sequence
atgcagagagccgtgagcgtggtggccagactgggcttcagactgcaggccttcccccccgccctgtgcagacccctgagctgcgcccagaccaagatcctgggcagcgacagagtgaagctgatggagagcctggtggtgggcgacatcgccgagctgagacccaaccagggcaccctgagcctgttcaccaacgaggccggcggcatcctggacgacctgatcgtgaccaacaccagcgagggccacctgtacgtggtgagcaacgccggctgctgggagaaggacctggccctgatgcaggacaaggtgagagagctgcagaaccagggcagagacgtgggcctggaggtgctggacaacgccctgctggccctgcagggccccaccgccgcccaggtgctgcaggccggcgtggccgacgacctgagaaagctgcccttcatgaccagcgccgtgatggaggtgttcggcgtgagcggctgcagagtgaccagatgcggctacaccggcgaggacggcgtggagatcagcgtgcccgtggccggcgccgtgcacctggccaccgccatcctgaagaaccccgaggtgaagctggccggcctggccgccagagacagcctgagactggaggccggcctgtgcctgtacggcaacgacatcgacgagcacaccacccccgtggagggcagcctgagctggaccctgggcaagagaagaagagccgccatggacttccccggcgccaaggtgatcgtgccccagctgaagggcagagtgcagagaagaagagtgggcctgatgtgcgagggcgcccccatgagagcccacagccccatcctgaacatggagggcaccaagatcggcaccgtgaccagcggctgccccagccccagcctgaagaagaacgtggccatgggctacgtgccctgcgagtacagcagacccggcaccatgctgctggtggaggtgagaagaaagcagcagatggccgtggtgagcaagatgcccttcgtgcccaccaactactacaccctgaagtag

SEQ ID NO: 63286 - DNA, 921 bp, Artificial Sequence
  derived and/or modified sequence
atggagagcctggtggtgggcgacatcgccgagctgagacccaaccagggcaccctgagcctgttcaccaacgaggccggcggcatcctggacgacctgatcgtgaccaacaccagcgagggccacctgtacgtggtgagcaacgccggctgctgggagaaggacctggccctgatgcaggacaaggtgagagagctgcagaaccagggcagagacgtgggcctggaggtgctggacaacgccctgctggccctgcagggccccaccgccgcccaggtgctgcaggccggcgtggccgacgacctgagaaagctgcccttcatgaccagcgccgtgatggaggtgttcggcgtgagcggctgcagagtgaccagatgcggctacaccggcgaggacggcgtggagatcagcgtgcccgtggccggcgccgtgcacctggccaccgccatcctgaagaaccccgaggtgaagctggccggcctggccgccagagacagcctgagactggaggccggcctgtgcctgtacggcaacgacatcgacgagcacaccacccccgtggagggcagcctgagctggaccctgggcaagagaagaagagccgccatggacttccccggcgccaaggtgatcgtgccccagctgaagggcagagtgcagagaagaagagtgggcctgatgtgcgagggcgcccccatgagagcccacagccccatcctgaacatggagggcaccaagatcggcaccgtgaccagcggctgccccagccccagcctgaagaagaacgtggccatgggctacgtgccctgcgagtacagcagacccggcaccatgctgctggtggaggtgagaagaaagcagcagatggccgtggtgagcaagatgcccttcgtgcccaccaactactacaccctgaagtag

SEQ ID NO: 63287 - protein, 386 aa, Artificial Sequence
  derived and/or modified sequence
MQRAVSVVARLGFRLQAFPPALCRPLSCAQEVLRRTPLYDFHLAHGGKMVAFAGWSLPVQYRDSHTDSHLHTRQHCSLFDVSHMLQTKILGSDRVKLMESLVVGDIAELRPNQGTLSLFTNEAGGILDDLIVTNTSEGHLYVVSNAGCWEKDLALMQDKVRELQNQGRDVGLEVLDNALLALQGPTAAQVLQAGVADDLRKLPFMTSAVMEVFGVSGCRVTRCGYTGEDGVEISVPVAGAVHLATAILKNPEVKLAGLAARDSLRLEAGLCLYGNDIDEHTTPVEGSLSWTLGKRRRAAMDFPGAKVIVPQLKGRVQRRRVGLMCEGAPMRAHSPILNMEGTKIGTVTSGCPSPSLKKNVAMGYVPCEYSRPGTMLLVELPSGPCF

SEQ ID NO: 63288 - protein, 384 aa, Artificial Sequence
  derived and/or modified sequence
  misc_feature (1)..(1): Xaa can be any naturally occurring amino acid
XAVSVVARLGFRLQAFPPALCRPLSCAQEVLRRTPLYDFHLAHGGKMVAFAGWSLPVQYRDSHTDSHLHTRQHCSLFDVSHMLQTKILGSDRVKLMESLVVGDIAELRPNQGTLSLFTNEAGGILDDLIVTNTSEGHLYVVSNAGCWEKDLALMQDKVRELQNQGRDVGLEVLDNALLALQGPTAAQVLQAGVADDLRKLPFMTSAVMEVFGVSGCRVTRCGYTGEDGVEISVPVAGAVHLATAILKNPEVKLAGLAARDSLRLEAGLCLYGNDIDEHTTPVEGSLSWTLGKRRRAAMDFPGAKVIVPQLKGRVQRRRVGLMCEGAPMRAHSPILNMEGTKIGTVTSGCPSPSLKKNVAMGYVPCEYSRPGTMLLVELPSGPCF

SEQ ID NO: 63289 - DNA, 1161 bp, Artificial Sequence
  derived and/or modified sequence
atgcagcgggcggtgagcgtggtggctagactgggtttcagacttcaggctttccctcccgccctgtgtaggccattgtcgtgtgcacaagaagtactgagaagaactccactatatgactttcatctggcccatggaggcaagatggtagccttcgcaggctggagcttgcccgtgcaataccgagactcccatactgattctcatctgcacacaaggcaacactgtagcctgtttgatgtaagtcatatgttgcagaccaaaatcttgggatccgaccgggtgaaactcatggaaagtctcgtggtaggggatatagctgagctgaggcccaaccagggtaccttatcgctcttcaccaacgaagcggggggaatattagatgacttgatcgtgactaacacttccgagggccacctttacgtcgtctcaaacgccggttgttgggaaaaagatctggcgttaatgcaagataaggtgcgcgaactgcagaaccaaggaagagacgtgggtctggaagtccttgataacgctttgctggctttacagggccctaccgccgcccaggttcttcaggctggagtggctgatgacctaagaaaactgccatttatgacttcagccgtgatggaagtattcggggtttcgggttgccgcgtgaccaggtgtggatataccggcgaggatggcgttgaaatcagcgtgccagttgctggcgccgttcatctagccactgccatcctgaaaaaccccgaagtgaaactggccggcttagcagcaagggatagcctgaggcttgaagctggcctctgtctgtacggaaacgatatagacgagcataccactcccgtcgagggctccctgagttggacacttggcaagcgtaggcgggccgcaatggacttccctggcgctaaagtcattgtgcctcaacttaagggacgggtgcaaagacgaagagtcgggttgatgtgtgagggagcaccaatgagagcacacagccctatcctgaatatggagggcaccaagatcgggacagttaccagcggatgcccttctcctagcctgaagaagaatgtggccatgggctacgtgccttgcgaatatagccgccctggcacgatgctgttagttgagctgccctcaggcccttgcttttag

SEQ ID NO: 63290 - DNA, 1155 bp, Artificial Sequence
  derived and/or modified sequence
tgagcggtgtctgtagtagcacgcctgggctttcggctgcaagcgttcccaccagccctgtgtaggcctctgtcctgtgctcaggaggtgctccgaagaaccccactttatgatttccatctggctcatggggggaagatggtggcttttgcagggtggtccctgcccgtgcaatatagggacagccacaccgatagccacctacacacccggcagcactgcagtttatttgatgtgtcacacatgctacagaccaaaatcttaggttccgaccgggtgaagttaatggaatccctggtagtgggagacatagcagagctcaggcccaaccaagggacattgtctctctttaccaatgaagccggtggcatcctggacgacctgatagtgactaacacttccgagggacatttatacgtggtaagcaacgctggatgttgggaaaaagacctggcgctgatgcaggataaagtgcgtgagctccagaatcaggggagggatgttggcctggaagttcttgacaacgcgctgttagcactgcagggaccaacggcggcgcaggtgcttcaggccggtgtggcagacgatctgcggaaattacccttcatgacctcggccgtaatggaggtgtttggggttagcggctgcagggtgacccggtgcgggtacaccggggaggacggtgtggaaatatcagtccccgtcgcaggggctgtgcacctggccacagccatcctgaagaacccagaggttaagttggctggcctggctgccagagattctttgcgtctagaggccggcttatgtctgtacggaaacgacattgatgagcatactacccctgtggaaggtagcttaagttggacgttggggaagagacgaagagccgccatggacttccctggtgccaaggttatagttccgcagttgaagggtcgggtccagcgacgacgggttggactgatgtgtgagggggcgccaatgagagctcactctccaatcctaaatatggaaggaacaaaaattggaaccgttaccagcggatgtcctagcccaagcttgaaaaaaaacgtggccatgggatatgttccctgcgaatacagtagaccaggtacaatgctactcgtcgaactgccttcgggcccatgcttttag

SEQ ID NO: 63291 - DNA, 1161 bp, Artificial Sequence
  derived and/or modified sequence
atgcagagagctgtgtctgtggtggcccggctgggcttccggctgcaggccttccccccagccctgtgccggcccctgagctgtgcccaggaggtgctgcggaggacccccctgtatgacttccacctggcccatggaggcaagatggtggcctttgctggctggagcctgcctgtgcagtacagagacagccacacagacagccacctgcacacccggcagcactgcagcctgtttgatgtgagccacatgctgcagaccaagatcctgggcagtgacagagtgaagctgatggagagcctggtggtgggggacattgctgagctgcggcccaaccagggcaccctgagcctcttcaccaatgaagctgggggcatcctggatgacctgattgtgaccaacaccagcgagggccacctgtatgtggtgtccaatgccggctgctgggagaaggacctggccctgatgcaggacaaggtgcgggagctgcagaaccagggcagagatgtgggcctggaggtgctggacaatgccctgctggccctgcagggccccacagctgcccaggtgctgcaggccggcgtggctgatgacctgaggaagctgcccttcatgaccagcgctgtgatggaggtgtttggagtgtctggctgccgggtgacccgctgtggctacaccggggaggatggagtggagatctctgtgcctgtggccggggctgtgcacctggccacagccatcctgaagaaccctgaggtgaagctggccggcctggccgcccgggacagcctgcggctggaggccggcctgtgcctgtatggaaatgacattgatgagcacaccacccctgtggagggcagcctgtcctggaccctgggcaagagaagaagagctgccatggacttccctggggccaaggtgattgtgccccagctgaagggccgggtgcagaggagaagagtgggcctgatgtgtgagggcgcccccatgagggcccacagccccatcctgaacatggagggcaccaagattggcaccgtgaccagcggctgccccagccccagcctgaagaagaatgtggccatgggctacgtgccctgtgagtacagccggcccggcaccatgctgctggtggagctgcccagcggcccctgcttctag

SEQ ID NO: 63292 - DNA, 1155 bp, Artificial Sequence
  derived and/or modified sequence
tgagctgtgtctgtggtggcccggctgggcttccggctgcaggccttccccccagccctgtgccggcccctgagctgtgcccaggaggtgctgcggaggacccccctgtatgacttccacctggcccatggaggcaagatggtggcctttgctggctggagcctgcctgtgcagtacagagacagccacacagacagccacctgcacacccggcagcactgcagcctgtttgatgtgagccacatgctgcagaccaagatcctgggcagtgacagagtgaagctgatggagagcctggtggtgggggacattgctgagctgcggcccaaccagggcaccctgagcctcttcaccaatgaagctgggggcatcctggatgacctgattgtgaccaacaccagcgagggccacctgtatgtggtgtccaatgccggctgctgggagaaggacctggccctgatgcaggacaaggtgcgggagctgcagaaccagggcagagatgtgggcctggaggtgctggacaatgccctgctggccctgcagggccccacagctgcccaggtgctgcaggccggcgtggctgatgacctgaggaagctgcccttcatgaccagcgctgtgatggaggtgtttggagtgtctggctgccgggtgacccgctgtggctacaccggggaggatggagtggagatctctgtgcctgtggccggggctgtgcacctggccacagccatcctgaagaaccctgaggtgaagctggccggcctggccgcccgggacagcctgcggctggaggccggcctgtgcctgtatggaaatgacattgatgagcacaccacccctgtggagggcagcctgtcctggaccctgggcaagagaagaagagctgccatggacttccctggggccaaggtgattgtgccccagctgaagggccgggtgcagaggagaagagtgggcctgatgtgtgagggcgcccccatgagggcccacagccccatcctgaacatggagggcaccaagattggcaccgtgaccagcggctgccccagccccagcctgaagaagaatgtggccatgggctacgtgccctgtgagtacagccggcccggcaccatgctgctggtggagctgcccagcggcccctgcttctag

SEQ ID NO: 63293 - DNA, 1161 bp, Artificial Sequence
  derived and/or modified sequence
atgcagcgggccgtgagcgtggtggcccggctgggcttccggctgcaggcattcccacctgccctctgccggccgctttcctgcgcacaggaagtgctcaggaggacgcctctgtacgattttcatctggcccacggcgggaaaatggtggcattcgcaggctggagtctgccagttcaatacagggacagccacaccgatagccatctacatacacgccagcactgttctctcttcgatgtctctcatatgttgcaaacaaagatcctgggtagcgacagggtcaaactgatggagagccttgttgttggcgacatcgccgagctgcggcctaaccaggggacactgtcactttttacaaacgaggctggcgggatcctggatgacttgattgtgacaaacactagtgaaggacatctgtatgtggtctccaatgctgggtgctgggaaaaggatctcgcactgatgcaagacaaagtaagagaacttcagaaccaggggagagatgtaggcctggaggtgctggacaatgccctcctggctctccaaggtcctaccgccgcccaggtacttcaagctggcgttgcggacgatcttcgcaaactgcccttcatgactagcgctgtgatggaggttttcggggtgagcggctgcagagtaacccgttgtggatataccggcgaggatggcgtggagattagtgtccccgtggccggagctgtgcacctcgccacagcaatcctgaagaaccctgaggttaaactagccggactcgccgcacgtgatagtctccgcctggaagccggcctgtgcttatacggcaacgatatcgatgaacatacaaccccagtggaggggtctctaagttggacactcgggaagagacgtagagctgccatggattttccaggcgccaaagttatcgtgccacagctgaaagggcgggtgcaacgacggcgggtgggccttatgtgtgagggagcccccatgagggctcacagtccgattttgaatatggagggcacaaaaataggtaccgttacctctggctgtcccagtccttctttaaagaagaatgttgctatgggctatgtgccctgtgaatactcccgccccggaactatgctcctagtggaactgccatcaggtccatgcttttag

SEQ ID NO: 63294 - DNA, 1155 bp, Artificial Sequence
  derived and/or modified sequence
tgagccgtgagcgtggtggcccggctgggcttccggctgcaggccttccctcctgcactgtgtcgacctttgagctgcgcccaggaggttttgaggaggactcctctctatgacttccacctcgcacacggtggaaagatggtggctttcgcaggctggtctttgcccgtgcagtatcgagacagccacaccgatagccatctgcatacacggcagcattgcagcttgttcgacgtgagtcacatgttacagactaaaatcctaggttccgatagggttaagctaatggagtccttggtcgtgggcgatatcgccgaactacggcccaaccagggaaccctgtccctattcaccaatgaggcggggggaatcctagacgatctcatcgtgaccaacacatccgagggccacctatacgtggtctcaaacgccggatgctgggaaaaagacttagccctcatgcaagacaaagtgcgcgagctgcagaatcaggggcgggatgtcggcctcgaagtgctggataatgcccttttagccttgcagggtccgaccgccgcccaagtgctccaggccggcgtcgctgatgacttaagaaagctgccgtttatgacaagcgccgtcatggaagtctttggggtgagtggctgcagggtaacaaggtgcggctatactggagaggacggtgttgaaatatcggtgcctgtggctggcgccgttcacttggccaccgctattctgaaaaatccagaggtgaaactggctgggctagccgctagagacagcctgagactggaagctggcttatgtctttacggcaacgacatagacgagcacacaacgccggtcgaaggatccctctcctggacattgggcaagcggcgaagagctgccatggactttcctggtgccaaagtgatagttccgcagttgaaggggcgagtccagcgacgacgggtaggcttgatgtgtgaaggcgcacccatgcgcgcccacagccctatccttaacatggaaggcacaaagataggtactgtgaccagcggttgcccctcaccaagcctaaagaaaaatgtggctatgggttacgtgccttgtgagtactctagacccggaacaatgctcctcgtggagttgccatccggtccatgtttctag

SEQ ID NO: 63295 - DNA, 1955 bp, Artificial Sequence
  derived and/or modified sequence
gagctgccctgaagagtcagccgaaagagctggaggcttcttccctgtggttgcgggttcctgcattctctgctctaaatcccagcctgcccttggggctgcccacgcccccttcagatcctttgctccggagagagacctgtccgagcagaggcctggactacatctcccggcgtgcctggcagtgtggtggcctctgtgcgccgtctgcactcgttgcaggcgacgatgcagagggctgtaagtgtggtggcccgtctgggctttcgcctgcaggcattccccccggccttgtgtcgtccacttagttgcgcacaggaggtgctccgcaggacaccgctctatgacttccacctggcccacggcgggaaaatggtggcgtttgcgggttggagtctgccagtgcagtaccgggacagtcacactgactcgcacctgcacacacgccagcactgctcgctctttgacgtgtctcatatgctgcagaccaagatacttggtagtgaccgggtgaagctgatggagagtctagtggttggagacattgcagagctaagaccaaaccaggggacactgtcgctgtttaccaacgaggctggaggcatcttagatgacttgattgtaaccaatacttctgagggccacctgtatgtggtgtccaacgctggctgctgggagaaagatttggccctcatgcaggacaaggtcagggagcttcagaaccagggcagagatgtgggcctggaggtgttggataatgccctgctagctctgcaaggccccactgcagcccaggtactacaggccggcgtggcagatgacctgaggaaactgcccttcatgaccagtgctgtgatggaggtgtttggcgtgtctggctgccgcgtgacccgctgtggctacacaggagaggatggtgtggagatctcggtgccggtagcgggggcagttcacctggcaacagctattctgaaaaacccagaggtgaagctggcagggctggcagccagggacagcctgcgcctggaggcaggcctctgcctgtatgggaatgacattgatgaacacactacacctgtggagggcagcctcagttggacactggggaagcgccgccgagctgctatggacttccctggagccaaggtcattgttccccagctgaagggcagggtgcagcggaggcgtgtggggttgatgtgtgagggggcccccatgcgggcacacagtcccatcctgaacatggagggtaccaagattggtactgtgactagtggctgcccctccccctctctgaagaagaatgtggcgatgggttatgtgccctgcgagtacagtcgtccagggacaatgctgctggtagagcttccttcaggaccctgcttctgagtgacggaccagctcacacaatgtcttgtttcagtccatgatcccactgacctactcttgcctgctggagggtaatgagaagctttggttctgccatctctcccactctgccaggtgctggctgtggagcaaaggctcacctttgtggagaggataaaacctgcccaacctacctcaccatggtttttcacattgcaaagggtaataacatgggcagtgcggacttaggctaccccctccagtttgctttccgtaaatgcaaattgtccttactgcaagtcaggaatgattgctgactcacagtagggctgctatgcctgtgtgtaaacttggggatggctgagggaacatagactcactcttccacattcccaagttggtctagtgtgctgcccagtagcaaaccatggcagactcaccacctattctgagttccagggctgctgtagggcagggtgggcttcctcccagacttgccttaccctgggctgatctttgcccctggtatgcattaatggactccactgaatcctgaaaaaaaaattaaacttccttcttacttgcca

SEQ ID NO: 63296 - DNA, 1719 bp, Artificial Sequence
  derived and/or modified sequence
ggctgtaagtgtggtggcccgtctgggctttcgcctgcaggcattccccccggccttgtgtcgtccacttagttgcgcacaggaggtgctccgcaggacaccgctctatgacttccacctggcccacggcgggaaaatggtggcgtttgcgggttggagtctgccagtgcagtaccgggacagtcacactgactcgcacctgcacacacgccagcactgctcgctctttgacgtgtctcatatgctgcagaccaagatacttggtagtgaccgggtgaagctgatggagagtctagtggttggagacattgcagagctaagaccaaaccaggggacactgtcgctgtttaccaacgaggctggaggcatcttagatgacttgattgtaaccaatacttctgagggccacctgtatgtggtgtccaacgctggctgctgggagaaagatttggccctcatgcaggacaaggtcagggagcttcagaaccagggcagagatgtgggcctggaggtgttggataatgccctgctagctctgcaaggccccactgcagcccaggtactacaggccggcgtggcagatgacctgaggaaactgcccttcatgaccagtgctgtgatggaggtgtttggcgtgtctggctgccgcgtgacccgctgtggctacacaggagaggatggtgtggagatctcggtgccggtagcgggggcagttcacctggcaacagctattctgaaaaacccagaggtgaagctggcagggctggcagccagggacagcctgcgcctggaggcaggcctctgcctgtatgggaatgacattgatgaacacactacacctgtggagggcagcctcagttggacactggggaagcgccgccgagctgctatggacttccctggagccaaggtcattgttccccagctgaagggcagggtgcagcggaggcgtgtggggttgatgtgtgagggggcccccatgcgggcacacagtcccatcctgaacatggagggtaccaagattggtactgtgactagtggctgcccctccccctctctgaagaagaatgtggcgatgggttatgtgccctgcgagtacagtcgtccagggacaatgctgctggtagagcttccttcaggaccctgcttctgagtgacggaccagctcacacaatgtcttgtttcagtccatgatcccactgacctactcttgcctgctggagggtaatgagaagctttggttctgccatctctcccactctgccaggtgctggctgtggagcaaaggctcacctttgtggagaggataaaacctgcccaacctacctcaccatggtttttcacattgcaaagggtaataacatgggcagtgcggacttaggctaccccctccagtttgctttccgtaaatgcaaattgtccttactgcaagtcaggaatgattgctgactcacagtagggctgctatgcctgtgtgtaaacttggggatggctgagggaacatagactcactcttccacattcccaagttggtctagtgtgctgcccagtagcaaaccatggcagactcaccacctattctgagttccagggctgctgtagggcagggtgggcttcctcccagacttgccttaccctgggctgatctttgcccctggtatgcattaatggactccactgaatcctgaaaaaaaaattaaacttccttcttacttgcca

SEQ ID NO: 63297 - DNA, 1161 bp, Artificial Sequence
  derived and/or modified sequence
atgcagagggccgtttcagtggtggcccgactcggctttagactgcaagctttcccacccgctctgtgccgccctctgtcgtgcgctcaggaggtgctgcgacgcacacccctctacgacttccacttggctcatgggggaaagatggtggcctttgccggatggtccttgcctgtgcagtatagggattcccacactgactcccaccttcacacccgccaacactgctctttattcgatgttagccacatgctgcagaccaagattcttgggtcagatagggtgaaactgatggagtcactggtggtcggcgatattgccgaattacggcctaatcaggggaccctctcactcttcacaaatgaagcaggaggcattctggacgatcttatcgtgaccaataccagcgaaggccatctttatgttgtcagcaacgccggttgctgggaaaaggacttggcacttatgcaagacaaagtaagagaactgcagaatcaaggtcgggacgtggggcttgaagtgttggacaacgccttgctggccctccaaggacctactgccgcacaggtgttacaggctggcgttgctgacgaccttaggaagctgcctttcatgactagcgccgtgatggaagttttcggagtgtcaggatgcagagtcacgcggtgcggttacaccggcgaggacggagtcgagatcagtgtgcctgtggctggcgcagtgcacttagccacggccatccttaagaatccggaagttaagctagcgggtctcgcggcaagggacagtttgcgactcgaagctggtctgtgcttgtatggaaatgatattgacgagcacaccacgccggtggagggatcgctgtcctggactctgggtaagagacgtcgagctgccatggatttccctggagccaaggtgattgtgccccagcttaaggggagggtgcaaagaaggagggttggcttgatgtgtgaaggagcaccaatgagagctcattcgcctatcctcaatatggaaggtaccaagattggaactgtcaccagcgggtgcccttcgccttctttgaaaaagaatgtggctatgggatatgtcccctgtgaatactcaagacctggcactatgctgctggttgagttgccaagtggtccctgtttctag

SEQ ID NO: 63298 - DNA, 1155 bp, Artificial Sequence
  derived and/or modified sequence
taggccgtgtctgtagtggccagactgggcttccgtctccaggccttccctcccgctctttgtaggcctctgagttgcgcccaggaggttctccggaggactcctttatacgactttcatttggcccacggtggtaagatggtggcctttgctggctggtctctccctgtgcagtacagggattctcatacagacagtcacctacacacacgtcaacactgctccctttttgatgtttctcatatgttgcagaccaagatattgggttccgaccgtgttaagctaatggagtccctcgtggtgggggacatcgccgaactacgcccaaaccaggggacccttagcttgttcacaaacgaagccggaggtattctagacgatctcatcgtgacaaatacttctgagggccatctatacgttgtgtctaacgcgggttgctgggagaaagaccttgccctaatgcaggacaaagtcagggagttgcaaaatcaggggagagatgtgggcctggaggtgctggataacgctctcctggctcttcaaggccctacagctgctcaggtgctgcaggccggagtggcagacgacctgagaaaactgcctttcatgacatcagctgtgatggaagtgttcggtgtgagcgggtgccgggttactaggtgcggctatacaggtgaggacggagtggagatttccgtgcctgtggccggtgccgtgcacctcgcaacagccatcttgaagaatccagaagtaaagctggctgggcttgccgctcgcgacagcttgcggcttgaagctggactgtgtctgtacggaaatgatatcgatgagcatactaccccagtggaaggaagtctttcctggaccttgggcaagcggagacgcgcagccatggacttccctggcgcaaaagtgatagtcccacagctcaagggcagagtacagaggaggagggtgggtctgatgtgcgagggagccccaatgcgagcccactcccctattctgaacatggaaggcaccaagattggcaccgttacgtccggatgccctagcccctcattaaagaagaacgtagccatggggtacgtgccctgcgagtatagtcggccaggcacgatgctccttgtcgagttgccgagtggaccatgtttctag

SEQ ID NO: 63299 - DNA, 1161 bp, Artificial Sequence
  derived and/or modified sequence
atgcagagagccgtgagcgtggtggccagactgggcttcagactgcaggccttcccccccgccctgtgcagacccctgagctgcgcccaggaggtgctgagaagaacccccctgtacgacttccacctggcccacggcggcaagatggtggccttcgccggctggagcctgcccgtgcagtacagagacagccacaccgacagccacctgcacaccagacagcactgcagcctgttcgacgtgagccacatgctgcagaccaagatcctgggcagcgacagagtgaagctgatggagagcctggtggtgggcgacatcgccgagctgagacccaaccagggcaccctgagcctgttcaccaacgaggccggcggcatcctggacgacctgatcgtgaccaacaccagcgagggccacctgtacgtggtgagcaacgccggctgctgggagaaggacctggccctgatgcaggacaaggtgagagagctgcagaaccagggcagagacgtgggcctggaggtgctggacaacgccctgctggccctgcagggccccaccgccgcccaggtgctgcaggccggcgtggccgacgacctgagaaagctgcccttcatgaccagcgccgtgatggaggtgttcggcgtgagcggctgcagagtgaccagatgcggctacaccggcgaggacggcgtggagatcagcgtgcccgtggccggcgccgtgcacctggccaccgccatcctgaagaaccccgaggtgaagctggccggcctggccgccagagacagcctgagactggaggccggcctgtgcctgtacggcaacgacatcgacgagcacaccacccccgtggagggcagcctgagctggaccctgggcaagagaagaagagccgccatggacttccccggcgccaaggtgatcgtgccccagctgaagggcagagtgcagagaagaagagtgggcctgatgtgcgagggcgcccccatgagagcccacagccccatcctgaacatggagggcaccaagatcggcaccgtgaccagcggctgccccagccccagcctgaagaagaacgtggccatgggctacgtgccctgcgagtacagcagacccggcaccatgctgctggtggagctgcccagcggcccctgcttctag

SEQ ID NO: 63300 - DNA, 1155 bp, Artificial Sequence
  derived and/or modified sequence
tgagccgtgagcgtggtggccagactgggcttcagactgcaggccttcccccccgccctgtgcagacccctgagctgcgcccaggaggtgctgagaagaacccccctgtacgacttccacctggcccacggcggcaagatggtggccttcgccggctggagcctgcccgtgcagtacagagacagccacaccgacagccacctgcacaccagacagcactgcagcctgttcgacgtgagccacatgctgcagaccaagatcctgggcagcgacagagtgaagctgatggagagcctggtggtgggcgacatcgccgagctgagacccaaccagggcaccctgagcctgttcaccaacgaggccggcggcatcctggacgacctgatcgtgaccaacaccagcgagggccacctgtacgtggtgagcaacgccggctgctgggagaaggacctggccctgatgcaggacaaggtgagagagctgcagaaccagggcagagacgtgggcctggaggtgctggacaacgccctgctggccctgcagggccccaccgccgcccaggtgctgcaggccggcgtggccgacgacctgagaaagctgcccttcatgaccagcgccgtgatggaggtgttcggcgtgagcggctgcagagtgaccagatgcggctacaccggcgaggacggcgtggagatcagcgtgcccgtggccggcgccgtgcacctggccaccgccatcctgaagaaccccgaggtgaagctggccggcctggccgccagagacagcctgagactggaggccggcctgtgcctgtacggcaacgacatcgacgagcacaccacccccgtggagggcagcctgagctggaccctgggcaagagaagaagagccgccatggacttccccggcgccaaggtgatcgtgccccagctgaagggcagagtgcagagaagaagagtgggcctgatgtgcgagggcgcccccatgagagcccacagccccatcctgaacatggagggcaccaagatcggcaccgtgaccagcggctgccccagccccagcctgaagaagaacgtggccatgggctacgtgccctgcgagtacagcagacccggcaccatgctgctggtggagctgcccagcggcccctgcttctag

SEQ ID NO: 63301 - protein, 12 aa, Artificial Sequence
  derived and/or modified sequence
VLYPNDNFFEGK

SEQ ID NO: 63302 - protein, 754 aa, Artificial Sequence
  derived and/or modified sequence
MSRPLSDQEKRKQISVRGLAGVENVTELKKNFNRHLHFTLVKDRNVATPRDYYFALAHTVRDHLVGRWIRTQQHYYEKDPKKISGGWQMEEADDWLRYGNPWEKARPEFTLPVHFYGHVEHTSQGAKWVDTQVVLAMPYDTPVPGYRNNVVNTMRLWSAKAPNDFNLKDFNVGGYIQAVLDRNLAENISRVLYPNDNFFEGKELRLKQEYFVVAATLQDIIRRFKSSKFGCRDPVRTNFDAFPDKVAIQLNDTHPSLAIPELMRILVDLERMDWDKAWDVTVRTCAYTNHTVLPEALERWPVHLLETLLPRHLQIIYEINQRFLNRVAAAFPGDVDRLRRMSLVEEGAVKRINMAHLCIAGSHAVNGVARIHSEILKKTIFKDFYELEPHKFQNKTNGITPRRWLVLCNPGLAEVIAERIGEDFISDLDQLRKLLSFVDDEAFIRDVAKVKQENKLKFAAYLEREYKVHINPNSLFDIQVKRIHEYKRQLLNCLHVITLYNRIKREPNKFFVPRTVMIGGKAAPGYHMAKMIIRLVTAIGDVVNHDPAVGDRLRVIFLENYRVSLAEKVIPAADLSEQISTAGTEASGTGNMKFMLNGALTIGTMDGANVEMAEEAGEENFFIFGMRVEDVDKLDQRGYNAQEYYDRIPELRQVIEQLSSGFFSPKQPDLFKDIVNMLMHHDRFKVFADYEDYIKCQEKVSALYKNPREWTRMVIRNIATSGKFSSDRTIAQYAREIWGVEPSRQRLPAPDEAI

SEQ ID NO: 63303 - DNA, 2265 bp, Artificial Sequence
  derived and/or modified sequence
atgtcaaggcctttaagcgatcaggagaagcgtaagcagattagcgtacgggggctggctggggtggagaacgtgactgaattgaaaaaaaacttcaatagacacctccactttacactggtcaaagaccgcaatgtggctactcctcgggactactattttgcacttgcccacacggttcgcgatcacctggtcgggaggtggatccggacccagcaacattactatgagaaagatcccaagaaaatatccggcggttggcaaatggaggaggcagacgattggttgagatacgggaacccttgggagaaggctagaccggagttcacccttccggtacacttctacggccatgtagaacataccagccagggagccaaatgggtcgacactcaagttgtgctggcgatgccttacgacacaccagtgcccgggtaccgcaataacgtggtcaatacaatgagactctggtccgctaaagccccaaatgacttcaatctgaaggattttaatgtgggaggctatatacaagctgtgctggataggaaccttgccgagaacattagtagagtgctgtaccccaacgataatttctttgaaggtaaagagctccgcctgaagcaagaatatttcgttgttgccgccacgttgcaagatattatcaggaggtttaagtcaagtaagttcgggtgtcgtgatccagtgcggactaatttcgacgcattccctgataaagttgctattcagctcaatgatacacatccttcactagcaatccctgagctgatgcgaatcttagttgatttggagagaatggattgggataaggcctgggacgtcacagtcaggacctgtgcatacaccaaccatactgttctccccgaagccttggagaggtggcccgttcatctgctcgaaaccctactgccccgccacctacagattatttacgaaatcaatcagcgctttcttaatcgggtggccgcagccttcccgggcgacgtggaccgccttcgaaggatgtcactggtggaagagggggcggtcaagagaatcaatatggctcatttgtgcatagctggctctcatgctgttaacggggtagcgcgaatacattcggagattttgaaaaaaaccatctttaaagatttttatgaactggaaccccacaaattccagaacaaaacgaacggtattactccaagacggtggttagtgctgtgtaatccaggcctggccgaggtgatcgcggagcgaattggcgaggattttattagtgatttagaccagttgagaaaattactcagcttcgtcgatgacgaggcattcattcgagatgtggcgaaagtgaagcaggagaacaagttgaagttcgccgcttatcttgagagggaatacaaggtccacatcaatccaaactctttattcgatatccaggtcaagcgcatccacgaatacaaacggcagctgctgaactgtttgcatgtgatcactctctacaacaggattaaacgtgaaccgaacaagttcttcgtgccccgcactgtaatgataggaggcaaggctgcgccaggataccatatggcaaaaatgatcatccgcttggtcaccgccataggcgacgttgtgaatcatgaccctgcagtgggtgaccggctccgcgtgattttcctggagaattaccgcgtgagtctggctgaaaaggtcataccggccgctgatctgtccgaacaaatcagtacagccggaaccgaggcctcagggaccggcaacatgaaatttatgctgaacggcgctctgaccatagggactatggacggggccaacgtggaaatggccgaggaggccggggaagaaaactttttcatctttgggatgagagtagaagacgtggataaactggatcagcgcggttacaatgcccaagagtactacgatcgaatcccagagttgcgccaggtcatcgagcagctgagttccggatttttcagtcccaaacagccggatctttttaaggacatagtcaacatgctcatgcatcatgaccgattcaaagtgttcgccgattacgaggattatataaaatgtcaggagaaggtctcagcactgtacaagaatcccagggagtggacccgtatggtgattagaaatatagccacgtctggaaaattttcaagcgaccgtacaattgcacaatacgcccgcgaaatctggggtgtagagccttcacgacagcgtttgcccgcacctgacgaggcaatttag

SEQ ID NO: 63304 - DNA, 2265 bp, Artificial Sequence
  derived and/or modified sequence
atgagccggcccctgagtgaccaggagaagaggaagcagatctctgtgcggggcctggccggcgtggagaatgtgacagagctgaagaagaacttcaacagacacctgcacttcaccctggtgaaggacagaaatgtggccaccccccgggactactactttgccctggcccacacagtgcgggaccacctggtgggccgctggatccgcacccagcagcactactatgagaaggaccccaagaagatcagcggcggctggcagatggaggaggctgatgactggctgcgctatggcaacccctgggagaaggcccggcctgagttcaccctgcctgtgcacttctacggccacgtggagcacaccagccagggcgccaagtgggtggacacccaggtggtgctggccatgccctatgacacccctgtgcccggctacagaaataatgtggtgaacaccatgaggctgtggagcgccaaggccccaaatgacttcaacctgaaggacttcaacgtgggcggctacatccaggccgtgctggacaggaacctggccgagaacatcagccgggtgctgtacccaaatgacaacttctttgagggcaaggagctgcggctgaagcaggagtactttgtggtggccgccaccctgcaggacatcatccgccgcttcaagagcagcaagtttggctgccgggaccctgtgaggaccaactttgatgccttcccagacaaggtggccatccagctgaatgacacccaccccagcctggccatccctgagctgatgaggatcctggtggacctggagaggatggactgggacaaggcctgggatgtgacagtgaggacctgtgcctacaccaaccacacagtgctgcctgaggccctggagcgctggcctgtgcacctgctggagaccctgctgcccaggcacctgcagatcatctatgagatcaaccagcgcttcctgaacagagtggccgccgccttccctggagatgtggaccggctgcggaggatgagcctggtggaggagggcgctgtgaagaggatcaacatggcccacctgtgcatcgccggcagccatgctgtgaatggagtggcccgcatccacagcgagatcctgaagaagaccatcttcaaggacttctatgagctggagccccacaagttccagaacaagaccaacggcatcaccccccggcgctggctggtgctgtgcaaccctggcctggccgaggtgattgctgagcgcatcggggaggacttcatcagtgacctggaccagctgaggaagctgctgagctttgtggatgatgaggccttcatcagagatgtggccaaggtgaagcaggagaacaagctgaagtttgctgcctacctggagcgggagtacaaggtgcacatcaaccccaacagcctgtttgacatccaggtgaagaggatccacgagtacaagaggcagctgctgaactgcctgcacgtgatcaccctgtacaaccgcatcaagcgggagcccaacaagttctttgtgcccaggacagtgatgattggaggcaaggccgcccctggctaccacatggccaagatgatcatccggctggtgacagccatcggagatgtggtgaaccacgaccctgctgtgggggaccggctgcgggtcatcttcctggagaactacagagtgtccctggccgagaaggtgatcccagctgctgacctgtctgagcagatcagcacagctggaacagaggccagcggcactggaaacatgaagttcatgctgaatggagccctgaccatcggcaccatggatggagccaacgtggagatggccgaggaggccggggaggagaacttcttcatcttcggcatgagggtggaggatgtggacaagctggaccagaggggctacaatgcccaggagtactatgaccgcatccctgagctgcggcaggtgattgagcagctgagcagcggcttcttcagccccaagcagcctgacctcttcaaggacatcgtgaacatgctgatgcaccacgaccgcttcaaggtgtttgctgactatgaggactacatcaagtgccaggagaaggtgtctgccctgtacaagaacccccgggagtggaccaggatggtgatccggaacatcgccaccagcggcaagttcagcagtgacaggaccatcgcccagtatgcccgggagatctggggcgtggagcccagccggcagaggctgcctgccccagatgaggccatctag

SEQ ID NO: 63305 - DNA, 2265 bp, Artificial Sequence
  derived and/or modified sequence
atgagccggcccctgagcgaccaggagaagcggaagcagatcagcgtgagaggcctggccggtgtcgagaacgtcacagagttaaaaaaaaattttaaccggcatctgcactttaccctggttaaggaccgtaatgtcgccacacctcgtgactattatttcgctctggctcacacagttagagaccatctggtgggacgctggattagaacccagcagcattactatgaaaaggatcccaaaaaaatctcaggcgggtggcaaatggaggaggccgacgattggctccgctatggcaacccctgggagaaggcccgcccggaattcaccctgcctgtgcatttttacgggcatgtcgaacatacaagccaaggagcgaagtgggttgacactcaagtagtgctcgccatgccatatgatacaccggtccccggctaccggaacaatgtagtcaataccatgcggctctggtccgccaaagcaccgaacgatttcaacctaaaggattttaatgtcggaggctatattcaggctgtcttggacaggaatctcgctgaaaacatctcaagggttctttaccccaacgacaatttcttcgagggtaaggaacttcgcctgaaacaagaatatttcgtggtagcagctacacttcaggatattattaggcgattcaaatcgtcaaagtttggctgccgcgacccggtccgcactaattttgacgcattcccagacaaagtggctattcaactcaacgatacccacccatccttagctataccagagcttatgcggattctggtggatctggagaggatggattgggacaaggcttgggatgtgaccgtgcgaacttgcgcctacactaatcacaccgttctgcctgaggcactggaaaggtggcccgtgcacctgctcgagacattgcttccacggcatctgcagataatatatgagatcaaccagcgcttcctaaaccgggtggcggccgcctttccaggagacgttgatcgcttgagaagaatgtccttagtggaggagggagccgtgaagaggatcaatatggcacatctatgcattgccggctcacacgccgtcaacggagtggcacgaatccactccgagattctgaaaaagaccatattcaaagacttctacgagctggagccccataaatttcagaacaaaactaacggtatcactccccggcgttggctcgtcctttgcaaccctggtctggccgaggtgattgctgaacggatcggcgaagattttatttcagacctcgatcaattaagaaaattgctctcatttgtggacgatgaggccttcatccgcgacgtagcgaaggttaagcaagagaacaagctgaaatttgccgcctacctggaaagggaatacaaggtgcacattaaccctaactctctctttgacattcaggtcaagcggatccatgagtataaacggcagcttctgaactgtctccatgtaatcacactctacaacaggatcaagcgcgaacccaacaagttcttcgtgccccgaaccgttatgatagggggtaaggccgctcccgggtaccacatggcaaaaatgatcataaggctggtgaccgctatcggtgatgtggtcaatcatgacccagccgtgggcgatcggctgagggtcatttttttagagaattaccgggtgtccctggctgagaaggtgatccccgcggccgacttaagtgagcagatttcaacagcagggacagaggcctcaggcaccggtaacatgaagttcatgctcaatggggccttaactattggtacgatggatggtgctaacgtggagatggccgaggaggcaggagaggagaactttttcatcttcggcatgcgggtcgaggacgtggataagctggatcaacgtgggtataacgctcaggaatactacgatcgcatacccgaactccgccaggtgatcgagcagctcagctctgggttcttcagtcctaagcagcctgacttgtttaaagatattgtcaatatgctcatgcatcacgatagatttaaggtcttcgctgattacgaagattacatcaagtgccaagaaaaagtttctgcattatacaagaaccctcgagaatggactcgcatggtgatcaggaacattgctacctccggcaaatttagcagtgaccgaaccatcgcacagtacgctcgagaaatttggggcgtcgagccttctcgacagagacttcccgctcccgacgaggcaatctag

SEQ ID NO: 63306 - DNA, 2611 bp, Artificial Sequence
  derived and/or modified sequence
actccttggctggaggcagtgctgaggccgccgtcccctctaccatcagtccagtccggcccgccctcctgcagccatgtcccggcccctgtcagaccaagagaaaagaaagcaaatcagtgtgcgtggcctggccggcgtggagaacgtgactgagctgaaaaagaacttcaaccggcacctgcatttcacactcgtaaaggaccgcaatgtggccaccccacgagactactactttgctctggcccataccgtgcgcgaccacctcgtggggcgctggatccgcacgcagcagcactactatgagaaggaccccaagaagatctccgggggctggcagatggaggaggccgatgactggcttcgctacggcaacccctgggagaaggcccggcccgagttcacgctacctgtgcacttctacggccatgtggagcacaccagccagggtgccaagtgggtggacacacaggtggtactggccatgccctacgatacgcccgtgcctggctatcgcaacaatgttgtcaacaccatgcgcctctggtctgccaaggctcccaatgacttcaacctcaaggacttcaatgtcggtggctacatccaggctgtgttggaccgaaacctggcggagaacatctctcgtgtcctgtaccccaatgataatttcttcgaagggaaggagctgcggctgaagcaggagtatttcgtggtggctgccaccctccaggacatcatccgtcgcttcaagtcttccaagttcggctgccgtgatcccgtgcgcacgaacttcgatgccttcccagataaggtggccatccagctcaatgacacccacccctccctggccatccccgagctgatgaggatcctggtggacctggaacggatggactgggacaaggcgtgggatgtgacagtgaggacctgtgcctacaccaaccacacggtgctgcccgaggccctggagcgctggccggtgcacctcttggagacgctgctgccgcggcacctccagatcatctacgagatcaaccagcgcttcctcaaccgggtggcggccgcattcccaggggacgtagaccggctgcggcgcatgtcgctggtggaggagggcgcagtgaagcgcatcaacatggcacacctgtgcatcgcggggtcgcacgccgtcaacggcgtggcgcgcatccactccgagatcctcaagaagaccatcttcaaagacttctatgagctggagcctcataagttccagaataagaccaacggcatcacccctcggcgctggctggttctgtgtaaccccgggctggcagaggtcattgctgagcgcatcggggaggacttcatctctgacctggaccagctgcgcaaactgctctcctttgtggatgatgaagctttcattcgggatgtggccaaagtgaagcaggaaaacaagttgaagtttgctgcctacctagagagggaatacaaagtccacatcaaccccaactcactcttcgacatccaggtgaagcggattcacgaatataaacgacagctcctcaactgcctccatgtcatcaccctgtacaaccgcatcaagagggagcccaataagttttttgtgcctcggactgtgatgattggagggaaggctgcacctgggtaccacatggccaagatgatcatcagactcgtcacagccatcggggatgtggtcaaccatgacccggcagtgggtgaccgcctccgtgtcatcttcctggagaactaccgagtctcactggccgagaaagtgatcccagctgcagacctctctgagcagatctccactgcgggcactgaagcctcaggcaccggcaacatgaagttcatgctcaacggggctctgaccattggcaccatggacggggccaatgtggagatggcagaagaggcgggagaggaaaacttcttcatctttggcatgcgggtggaggatgtggataagcttgaccaaagagggtacaatgcccaggagtactacgatcgcattcctgagcttcggcaggtcattgagcagctgagcagtggcttcttctcccccaaacagcccgacctgttcaaggacattgtcaatatgctcatgcaccatgaccggtttaaagtcttcgcagattatgaagactacattaaatgccaggagaaagtcagcgccttgtacaagaacccaagagagtggacgcggatggtgatccggaacatagccacctctggcaagttctccagtgaccgcaccattgcccagtatgcccgggagatctggggtgtggagccttcccgccagcgcctgccagccccggatgaggccatctgagcctccagaccagaccccaaaccagcccttgagtctgtcacactctcttgggccagccccagcacctcatgcagagggtggggtactggagttagatctctaagcccctcctggaaccctcattttccccactctcaatgtcccagtgtccagcgtgactaaggacacgggcccccttccgtcctcgggctcccggtcccctcctatttatggggtctgaccaactgcacccactccctaataaattcattctccttgggagcctcctta

SEQ ID NO: 63307 - DNA, 2265 bp, Artificial Sequence
  derived and/or modified sequence
atgtccaggcctctttctgaccaggagaagcgaaaacagattagcgttaggggcttggccggagtggaaaatgtcactgagctgaaaaaaaattttaataggcatcttcactttactctcgtgaaggaccgtaatgtggccactcctagagactattacttcgcgttggcccatacagtgagggaccacctggtgggcagatggattcgaacacaacagcactactacgaaaaggatccgaaaaagatttccggcggatggcagatggaggaggcagacgattggctacgctacgggaacccctgggagaaggccaggcctgagttcaccctgcctgtacatttttacggacacgtggagcataccagccagggcgctaagtgggtcgacacccaagttgtcctggctatgccctacgatactccagtgcctggatacaggaacaatgttgtgaacaccatgcggctttggtctgcgaaggcccctaacgatttcaatctgaaagactttaatgtcggcggatatatacaggccgtgttggatcgcaacctggcagagaatatctcaagggttctctatccaaatgataacttcttcgaaggcaaagagttacgacttaagcaggagtattttgtggtggccgcaacactacaggacattatccggagatttaagtcttctaagtttggatgccgggaccccgtgcggacgaactttgacgctttccccgataaagtcgcaattcaactcaatgatactcacccctccctggcgattccggaactgatgcgcattctggtggacttagagaggatggactgggataaagcatgggacgtgacagtgcgaacatgtgcttatactaaccatacagtgttacctgaggcccttgagagatggccagttcacctcctagaaaccctgctgcctagacacctccagataatctacgagattaaccaacggttcctcaaccgggtggccgctgcctttcccggagatgtggaccgcctgcgcagaatgtcacttgtcgaggaaggcgcagtgaagcgcattaatatggcgcatttgtgcattgcaggctcccacgccgtcaacggtgtggccagaattcacagcgaaatcctcaaaaagacaattttcaaagacttctatgagttggagccccataagttccagaacaaaacgaatggaattacacctaggcggtggcttgtgctctgcaatcccggactggccgaggtgatcgctgaaaggatcggggaagattttattagcgatctcgaccagctgaggaaactcctctcatttgtggatgatgaggcattcatccgtgatgtggctaaagtgaaacaggaaaataaactaaaattcgctgcttacctggaacgcgagtacaaagtgcacatcaacccaaattcgctgttcgacatccaggtgaagcgcattcacgaatacaaacgccaactgttaaattgtcttcacgtgataaccctatacaaccgaattaaacgagagcccaataaattcttcgtgccaaggactgtcatgataggaggcaaggccgctcccggataccacatggctaaaatgattatacgtctggtcaccgctatcggcgacgtagttaaccatgacccggctgtgggagaccggctgcgggttatcttcctggagaattaccgtgtgagcctcgccgaaaaggtgatccccgcagcggacttatctgagcagatttctaccgcaggtacagaggctagcggaactgggaatatgaagttcatgctcaatggagctctcacaatcggaactatggacggagcaaatgttgaaatggcagaagaagcgggtgaagaaaacttttttatcttcggcatgagggtagaagatgttgataaattggaccagcggggatacaatgcccaggagtactacgaccgcatccccgagctgcgacaggttatcgagcagcttagttccgggtttttctccccaaagcagcctgacttgttcaaagacattgtcaacatgctgatgcatcacgatcgctttaaggtgtttgccgactatgaggactacatcaaatgtcaggaaaaggtgtcagcactgtataaaaacccacgggagtggacccgcatggtgatccggaatatcgccacttcgggaaagttctcctctgatagaaccatcgcacagtacgcccgagaaatctggggagtggagccttcacgccagaggctgccggcacctgacgaggccatttag

SEQ ID NO: 63308 - DNA, 2265 bp, Artificial Sequence
  derived and/or modified sequence
atgagcagacccctgagcgaccaggagaagagaaagcagatcagcgtgagaggcctggccggcgtggagaacgtgaccgagctgaagaagaacttcaacagacacctgcacttcaccctggtgaaggacagaaacgtggccacccccagagactactacttcgccctggcccacaccgtgagagaccacctggtgggcagatggatcagaacccagcagcactactacgagaaggaccccaagaagatcagcggcggctggcagatggaggaggccgacgactggctgagatacggcaacccctgggagaaggccagacccgagttcaccctgcccgtgcacttctacggccacgtggagcacaccagccagggcgccaagtgggtggacacccaggtggtgctggccatgccctacgacacccccgtgcccggctacagaaacaacgtggtgaacaccatgagactgtggagcgccaaggcccccaacgacttcaacctgaaggacttcaacgtgggcggctacatccaggccgtgctggacagaaacctggccgagaacatcagcagagtgctgtaccccaacgacaacttcttcgagggcaaggagctgagactgaagcaggagtacttcgtggtggccgccaccctgcaggacatcatcagaagattcaagagcagcaagttcggctgcagagaccccgtgagaaccaacttcgacgccttccccgacaaggtggccatccagctgaacgacacccaccccagcctggccatccccgagctgatgagaatcctggtggacctggagagaatggactgggacaaggcctgggacgtgaccgtgagaacctgcgcctacaccaaccacaccgtgctgcccgaggccctggagagatggcccgtgcacctgctggagaccctgctgcccagacacctgcagatcatctacgagatcaaccagagattcctgaacagagtggccgccgccttccccggcgacgtggacagactgagaagaatgagcctggtggaggagggcgccgtgaagagaatcaacatggcccacctgtgcatcgccggcagccacgccgtgaacggcgtggccagaatccacagcgagatcctgaagaagaccatcttcaaggacttctacgagctggagccccacaagttccagaacaagaccaacggcatcacccccagaagatggctggtgctgtgcaaccccggcctggccgaggtgatcgccgagagaatcggcgaggacttcatcagcgacctggaccagctgagaaagctgctgagcttcgtggacgacgaggccttcatcagagacgtggccaaggtgaagcaggagaacaagctgaagttcgccgcctacctggagagagagtacaaggtgcacatcaaccccaacagcctgttcgacatccaggtgaagagaatccacgagtacaagagacagctgctgaactgcctgcacgtgatcaccctgtacaacagaatcaagagagagcccaacaagttcttcgtgcccagaaccgtgatgatcggcggcaaggccgcccccggctaccacatggccaagatgatcatcagactggtgaccgccatcggcgacgtggtgaaccacgaccccgccgtgggcgacagactgagagtgatcttcctggagaactacagagtgagcctggccgagaaggtgatccccgccgccgacctgagcgagcagatcagcaccgccggcaccgaggccagcggcaccggcaacatgaagttcatgctgaacggcgccctgaccatcggcaccatggacggcgccaacgtggagatggccgaggaggccggcgaggagaacttcttcatcttcggcatgagagtggaggacgtggacaagctggaccagagaggctacaacgcccaggagtactacgacagaatccccgagctgagacaggtgatcgagcagctgagcagcggcttcttcagccccaagcagcccgacctgttcaaggacatcgtgaacatgctgatgcaccacgacagattcaaggtgttcgccgactacgaggactacatcaagtgccaggagaaggtgagcgccctgtacaagaaccccagagagtggaccagaatggtgatcagaaacatcgccaccagcggcaagttcagcagcgacagaaccatcgcccagtacgccagagagatctggggcgtggagcccagcagacagagactgcccgcccccgacgaggccatctag

SEQ ID NO: 63309 - DNA, 1335 bp, Artificial Sequence
  derived and/or modified sequence
atgcccagaagcggcgcccccaaggagagacccgccgagcccctgacccccccccccagctacggccaccagccccagaccggcagcggcgagagcagcggcgccagcggcgacaaggaccacctgtacagcaccgtgtgcaagcccagaagccccaagcccgccgcccccgccgccccccccttcagcagcagcagcggcgtgctgggcaccggcctgtgcgagctggacagactgctgcaggagctgaacgccacccagttcaacatcaccgacgagatcatgagccagttccccagcagcaaggtggccagcggcgagcagaaggaggaccagagcgaggacaagaagagacccagcctgcccagcagccccagccccggcctgcccaaggccagcgccaccagcgccaccctggagctggacagactgatggccagcctgagcgacttcagagtgcagaaccacctgcccgccagcggccccacccagccccccgtggtgagcagcaccaacgagggcagccccagcccccccgagcccaccggcaagggcagcctggacaccatgctgggcctgctgcagagcgacctgagcagaagaggcgtgcccacccaggccaagggcctgtgcggcagctgcaacaagcccatcgccggccaggtggtgaccgccctgggcagagcctggcaccccgagcacttcgtgtgcggcggctgcagcaccgccctgggcggcagcagcttcttcgagaaggacggcgcccccttctgccccgagtgctacttcgagagattcagccccagatgcggcttctgcaaccagcccatcagacacaagatggtgaccgccctgggcacccactggcaccccgagcacttctgctgcgtgagctgcggcgagcccttcggcgacgagggcttccacgagagagagggcagaccctactgcagaagagacttcctgcagctgttcgcccccagatgccagggctgccagggccccatcctggacaactacatcagcgccctgagcgccctgtggcaccccgactgcttcgtgtgcagagagtgcttcgcccccttcagcggcggcagcttcttcgagcacgagggcagacccctgtgcgagaaccacttccacgccagaagaggcagcctgtgcgccacctgcggcctgcccgtgaccggcagatgcgtgagcgccctgggcagaagattccaccccgaccacttcacctgcaccttctgcctgagacccctgaccaagggcagcttccaggagagagccggcaagccctactgccagccctgcttcctgaagctgttcggctag

SEQ ID NO: 63310 - DNA, 1335 bp, Artificial Sequence
  derived and/or modified sequence
atgcccagaagcggagcccccaaggagcgtccagccgagcccctcaccccacccccttcgtacgggcaccagccacagacaggaagtggagaaagttctggtgcatccggcgataaagaccacctctacagcaccgtgtgcaagccgagaagtccaaaacctgccgctccagcagcccctcccttctcaagctctagtggcgtcctgggtacgggattatgtgagcttgatcgccttttacaggaattaaatgccactcaattcaacattaccgatgagattatgtctcagttcccaagttccaaggtagccagtggggaacagaaagaggatcagtccgaggataaaaagcggccctccctgccatcttccccttctcctggactccccaaggccagcgccacatccgctactttggaactggatcggcttatggctagcctatctgactttcgggtccagaaccacctcccggcctccggtccaacccaaccacccgtggtgtcctcaacgaacgaaggctctccgagtccccctgagcctactggtaagggtagcctggacacaatgttaggactcctgcagagcgatctgagcaggcgtggggtcccgacacaggcaaaaggtctgtgcggctcctgtaacaagcctatagccggacaggttgtaacagcactgggtcgggcttggcaccctgagcactttgtatgtggaggatgttctactgcgctgggggggtcttccttttttgaaaaagatggtgctccattctgcccggagtgttatttcgagcgattctccccccgctgtgggttttgtaaccaacccatcagacataagatggtcaccgcacttggcacccattggcacccagagcacttttgttgtgtctcctgcggcgagccctttggtgacgaagggttccatgagcgcgaagggagaccctactgtcgaagagatttcttacagctcttcgcaccccgctgccagggctgccaggggcccatcctggataattacattagcgccttatccgccctctggcatcccgattgtttcgtgtgcagagagtgttttgctcccttcagcggcgggtccttctttgagcatgagggccgcccgctttgcgagaaccattttcatgcacgacgcggctcattgtgcgcgacctgcggtttacccgtcaccggacgctgcgtctccgctctggggcgtcgcttccaccccgaccactttacttgcaccttctgtctacggcctctaaccaagggctcctttcaagagcgagcaggcaagccctattgtcagccatgtttcctcaaactttttggctag

SEQ ID NO: 63311 - DNA, 1335 bp, Artificial Sequence
  derived and/or modified sequence
atgcccagatcgggcgctccaaaggaacggcccgctgaaccacttactcctcccccctcttatggccaccagcctcagaccggaagtggggagtcaagtggggcctcgggtgataaggatcacctctactctacagtgtgcaagccccggtcgcccaaacccgcagcaccagcagcgccaccctttagttccagtagcggcgtgctgggcactggcctctgcgagctagaccgcctgttacaggagttaaacgcgacacaattcaacatcacagatgagatcatgagtcagttcccatcttctaaagtcgcctccggagagcagaaagaggaccagagtgaggacaagaagcggccttctctgccctcatccccttctcccggcctcccaaaggcctctgcaacctctgccacccttgaactggaccgactgatggccagtctgagtgattttagagtgcaaaaccatctgcccgcctcaggcccaacccagccccccgtggtgtcaagcaccaatgaaggatctccatctcccccagagcccaccggaaaaggatctctggatacaatgctgggtctgctgcagtctgatctcagtagaagaggggtgcctactcaggctaagggtctctgcggaagctgtaacaagccaatcgcaggtcaggtggtgacggcccttggcagggcctggcatcccgagcattttgtctgcggaggatgttccaccgcactgggcgggagctctttcttcgaaaaggatggagccccattttgccccgagtgctactttgaaagattttcccctagatgcgggttttgtaaccagccaatccgacacaaaatggtcactgcattaggcacccattggcatcctgaacacttctgctgcgtgtcatgtggggagccttttggggacgaaggcttccacgagcgggaaggacgaccgtactgcagacgtgattttttgcaattgtttgcaccgagatgccagggctgccaaggtcccatccttgacaactacatcagtgcactttcagctttatggcacccagattgctttgtgtgtcgcgagtgctttgcaccattttccggtggttctttcttcgaacatgagggccggcccctctgtgaaaaccactttcacgcgagacggggctctctgtgcgccacatgtggcctgccagtaaccgggcggtgtgtgtcagccctgggtcggcgatttcaccccgaccacttcacttgcaccttctgcttgcgacccttgaccaaagggtccttccaggagagagcaggcaagccatactgtcagccctgttttctgaaactctttggatag

SEQ ID NO: 63312 - DNA, 1335 bp, Artificial Sequence
  derived and/or modified sequence
atgcccaggtctggggcccccaaggagaggcctgctgagcccctgaccccaccacccagctatggccaccagccccagacaggcagcggggagagcagcggggccagcggggacaaggaccacctgtacagcacagtgtgcaagcccaggagccccaagccagctgccccagctgccccacccttcagcagcagcagcggcgtgctgggcaccggcctgtgtgagctggaccggctgctgcaggagctgaatgccacccagttcaacatcacagatgagatcatgagccagttccccagcagcaaggtggccagcggggagcagaaggaggaccagagcgaggacaagaagaggcccagcctgcccagcagccccagccctggcctgcccaaggccagcgccaccagcgccaccctggagctggaccggctgatggccagcctgagtgacttccgggtgcagaaccacctgcctgccagcggccccacccagccccctgtggtgagcagcaccaatgaaggcagccccagccccccagagcccaccgggaagggcagcctggacaccatgctgggcctgctgcagagcgacctgagccggcggggcgtgcccacccaggccaagggcctgtgtggcagctgcaacaagcccatcgccggccaggtggtgacagccctgggccgggcctggcaccctgagcactttgtgtgtggcggctgcagcacagccctgggcggcagcagcttctttgagaaggatggagcccccttctgcccagagtgctactttgagcgcttcagcccccgctgtggcttctgcaaccagcccatccgccacaagatggtgacagccctgggcacccactggcaccctgagcacttctgctgcgtgtcctgtggggagccctttggagatgagggcttccacgagcgggagggccggccctactgccggcgggacttcctgcagctgtttgccccccgctgccagggctgccagggccccatcctggacaactacatcagcgccctgagcgccctgtggcacccagactgctttgtgtgcagagaatgttttgcccccttcagcggcggcagcttctttgagcacgagggccggcccctgtgtgagaaccacttccacgcccggcggggcagcctgtgtgccacctgtggcctgcctgtgacaggccgctgtgtgtctgccctgggccgccgcttccacccagaccacttcacctgcaccttctgcctgcggcccctgaccaagggcagcttccaggagcgggccggcaagccctactgccagccctgcttcctgaagctgtttggatag

SEQ ID NO: 63313 - DNA, 1335 bp, Artificial Sequence
  derived and/or modified sequence
atgccccggagcggcgcccccaaggagcggcccgccgagcccctgacaccacccccctcttatggccatcagccccagacaggtagtggggagagctcgggggcttcaggcgacaaggaccacttgtacagtacagtctgcaagcctcgttcaccgaagccagctgctccagcagcccctcctttttcttcctcgtcgggagtcctgggcaccgggctctgtgagctggacaggctcctccaggaactgaatgccacgcagtttaacatcaccgacgaaatcatgagccagttccctagttctaaggttgccagcggcgaacagaaggaggaccaatctgaagataaaaagagacccagcctcccttcttctccctctccaggcttgccgaaagcctctgctacctctgcaaccttagagctcgacaggctgatggccagcctctccgatttcagagtgcagaaccatctgcccgccagcggacctacccagccaccagtggtgtcgagcactaacgaaggcagcccatcacctccggaacccaccggtaaaggttcactcgacaccatgctgggactactccaatccgatttgagtcggcgcggtgtacccactcaggccaaaggcctatgcggaagctgcaacaagcctatcgcggggcaggtagtgaccgccctgggcagggcttggcacccggagcatttcgtttgcggcggctgctccaccgctttaggggggagctctttcttcgaaaaggatggcgccccattctgtccagaatgctactttgagcgatttagtccccgatgtggcttttgtaaccagcctattcgccacaagatggtgaccgccctcggaacacattggcaccctgagcatttttgttgtgtgtcctgtggtgagccatttggagatgagggtttccatgaaagagaggggaggccctactgccgccgggatttcctgcagctgttcgcgccaagatgtcagggatgccaaggaccaattctcgataattacatttcagcactctctgcgttatggcaccctgattgtttcgtctgccgtgagtgttttgcacctttctccgggggaagcttttttgagcatgaaggccgcccgctctgcgaaaatcatttccatgctcgacgtgggtcactctgtgctacctgtgggttgccggtcaccggccgctgcgtcagcgcattgggaaggaggttccacccagaccacttcacgtgcaccttttgtctacgtcctctaactaaaggtagcttccaggaacgcgcaggcaagccctactgccagccttgtttcctgaagctttttgggtag

SEQ ID NO: 63314 - DNA, 1335 bp, Artificial Sequence
  derived and/or modified sequence
atgccccggagcggcgcccccaaggagcggcccgccgagcccctgacaccacccccgagttatggacaccaaccacaaacaggatcaggagagtcaagcggggctagcggcgacaaggatcacctgtactcaaccgtgtgtaagcctcgtagtcccaaacctgcggccccagccgcccccccatttagttcgagttctggcgtcctcgggaccgggctctgcgaacttgaccgactgctgcaagagctcaatgcaacacagttcaatattacagatgaaatcatgagtcagtttccctctagcaaagtcgcctctggggaacagaaagaggatcaaagcgaagataaaaagcgaccctctctgccatcatctcccagtccaggcctgccaaaggcttccgctacatctgccaccttagaacttgacaggctgatggcaagtctttctgattttagagtgcagaaccacctgcccgccagtggacctacccagccccccgtcgtgagcagtacgaacgagggaagcccctctccacccgagcctaccgggaaagggtcactagatactatgctcggcctgctacagagtgacctgtcacgacgcggggtgcccacacaggccaaggggttgtgcggatcgtgtaacaagccgatcgcagggcaggtggtaactgccttggggagagcctggcatccagaacattttgtgtgcggcgggtgcagcactgcacttggaggctctagcttttttgaaaaggacggcgcacccttctgtcctgaatgttattttgaacgctttagtccaaggtgcggcttttgtaaccagcccattagacacaagatggttacagctcttggaacacattggcatcctgaacacttctgctgcgtgagttgcggagagcctttcggggacgagggcttccatgaaagagaggggagaccctactgtaggagggatttcctgcaactgttcgcacccagatgccaggggtgtcagggaccaatcctggacaactatatctctgctctatccgcattgtggcatccagactgttttgtttgcagagagtgttttgccccattttccgggggaagcttttttgagcacgagggcagacctctttgcgaaaatcattttcatgcacgaaggggaagcctctgcgcaacctgcgggctccccgtgactggtcgatgcgtgtccgcactggggcgacgttttcacccggaccacttcacctgtactttctgcctccgtccattaacgaaaggttcgtttcaggagagagcaggcaaaccctactgccaaccatgcttccttaaactgtttggatag

SEQ ID NO: 63315 - DNA, 1335 bp, Artificial Sequence
  derived and/or modified sequence
atgcccaggagcggcgctcctaaggagaggcccgctgagcctcttacacccccaccatcctatggacatcagcctcagacgggaagcggggaatccagcggcgcaagtggagacaaggatcatctttacagcacagtctgtaaaccgagatctcctaagcccgctgccccagccgctccaccgttttcctcctccagcggcgtcctgggaaccggcctgtgcgagctcgacaggctgttacaggaattgaacgccactcagttcaacatcaccgacgaaatcatgagccagtttccgagcagcaaggtggcatccggcgagcagaaggaggaccagagcgaagataagaagcggccttcgctcccctccagcccctcacctggactcccaaaggccagcgccacctctgctaccctggaactggaccggctgatggccagcttatccgacttcagggttcagaatcacctcccagcatccggaccaactcagcctcccgtcgtaagcagcaccaacgaagggagcccctctccacctgaacccacaggtaaggggtccttagatacaatgctgggcttgctgcaaagtgacctgtcccggagaggagtcccaactcaagcgaagggcctgtgcggatcttgcaacaagcccattgccggacaggttgttactgctctcggcagagcctggcaccccgagcactttgtgtgtggtggatgcagcaccgcactggggggtagtagttttttcgaaaaagacggggctcctttttgcccagaatgctatttcgagcggttttcccccaggtgcggattctgtaaccagcccatcagacataagatggtgactgctctaggaactcactggcatcccgagcacttctgttgtgtgtcttgtggtgaacctttcggggacgagggtttccatgaaagggaaggcaggccttattgtcgcagggactttttgcagctctttgcgcctaggtgccagggatgccagggaccaattctggataactacatcagcgcactgtctgccctgtggcatccagattgcttcgtatgtagagaatgctttgcccctttttctggcggatcgttctttgaacacgagggcagaccgttatgcgaaaaccatttccatgccaggcgcggaagtctgtgtgccacttgtggccttcctgtgacaggcagatgtgtttcagcccttggtcgcagattccaccccgatcacttcacgtgcacgttctgtctgcggccactgactaagggatctttccaggaaagggccggaaaaccttactgccagccgtgttttctgaagctgttcggctag

SEQ ID NO: 63316 - DNA, 1335 bp, Artificial Sequence
  derived and/or modified sequence
atgccaagatctggggctcctaaagagcgacccgcagagcccctgactcctcctccgagttacggacatcaaccacagactggttccggcgagagttccggtgccagcggagataaggaccatctctatagtacggtgtgcaaacccaggtctccaaaacctgccgctccagctgcaccccctttttcctcatcttcaggcgtcctcggaactggcctgtgcgaactcgatagactgctccaggaattgaacgctacccagttcaacatcactgatgaaatcatgagtcagtttccatccagcaaggtcgcctcaggcgaacagaaagaggaccagtccgaggacaaaaagcggccaagcttaccatcctctccctcacctgggctgcctaaagcttccgccactagtgccacgctagagctggacagactgatggcaagtttgtcagactttcgtgtgcaaaatcaccttcccgcttcggggccaactcagcccccagtggtgagcagcaccaacgagggcagcccaagcccacctgagcccactggcaaagggtcactggatactatgttgggcttactgcagagcgacctgtccaggcggggagtccctacacaggctaagggcttgtgtggaagctgtaacaaacctatcgcaggccaggtggttacagcactgggcagagcttggcaccctgaacattttgtttgtggtggctgctctacagctttgggcggaagcagcttttttgagaaagatggagcccctttctgtccagagtgttatttcgaacggttctcgcctcggtgtggtttctgtaatcaacctatcagacataaaatggtgaccgccttggggacacactggcaccctgaacacttctgctgcgttagctgcggcgaacccttcggagacgagggtttccatgagagggagggacgcccatactgccgtcgcgacttcttacagctgtttgctcccaggtgccagggttgccaggggcctatacttgacaactacatcagtgcattgagcgcactctggcatccagactgttttgtttgccgggagtgttttgctcccttttcaggaggttctttttttgaacatgagggcagaccgctgtgtgaaaaccatttccatgcaaggagggggagcctgtgcgccacatgtggcctaccagtaacagggcgatgcgttagtgcccttggtaggagattccaccccgaccactttacctgcactttctgtctgcgtcccctgaccaagggctccttccaagagcgggctggaaagccatactgccagccgtgttttctcaaactgtttggctag

SEQ ID NO: 63317 - DNA, 1335 bp, Artificial Sequence
  derived and/or modified sequence
atgccacggtccggggctcccaaagaacggccagccgaaccactgacacccccaccctcttatggccatcagcctcagactgggtcaggcgaatcctcaggtgcttctggagacaaagatcacctttactcgacagtgtgcaagccccgttctcctaaaccagctgcccctgctgctcccccgttctcttcctcgtcaggagtcctgggtaccggcctttgcgagctcgataggctgctgcaggaactcaatgcaactcagttcaatataactgatgagataatgagccaattcccctccagtaaggtggcctcaggcgagcagaaggaggaccagtccgaggacaaaaaacgccccagcttacctagcagtcccagccctggcttgccgaaggcaagcgccacatccgccaccctggagttagaccgcttgatggctagcttgagcgatttccgcgtccagaatcacttgccagcttccggcccaactcaaccaccagtagtgagctccactaacgaagggagtccaagcccccctgagcccaccggaaaagggagccttgataccatgcttggtctcctgcagagcgatctgtctcggcgtggggttccaacacaggctaaaggtttgtgcggctcctgcaataagcctattgcgggccaggtcgtaacagcgttggggcgagcgtggcatcccgagcactttgtgtgtggaggctgttcaacagcactagggggctcatccttcttcgaaaaggacggcgctccgttctgtccagagtgctacttcgaacgtttcagtccgaggtgtggattctgcaatcaacccataaggcacaaaatggtgactgctctcgggacccactggcacccagaacatttctgctgcgtgagctgtggtgagcctttcggtgacgagggatttcatgagcgcgagggaaggccgtactgccgaagagattttcttcagctattcgcacctaggtgccaaggttgtcaagggcccatactagacaactacatatctgcactaagcgccctatggcatcctgactgttttgtctgcagggagtgctttgcacctttttcaggcgggtcctttttcgagcacgaagggcgccctttatgtgagaatcattttcatgccaggagaggctcactgtgtgctacctgtggcttgccagtaaccggtcgttgtgtgtcagcgttgggccggcgcttccaccccgaccactttacttgcacattttgtttaagaccacttacaaagggatcctttcaagagcgcgccgggaagccatattgtcagccctgcttccttaagctcttcggatag

SEQ ID NO: 63318 - DNA, 1335 bp, Artificial Sequence
  derived and/or modified sequence
atgccaaggtccggggccccaaaagagagacccgcagagcctctcacaccccctcccagttacggacatcagccccagacgggatcgggcgagtcttccggcgcttcaggagacaaggatcacctttactcaaccgtgtgcaagccacgctcaccaaaaccagcagccccagccgcaccaccctttagttcctccagcggcgtgctcggcacgggcttgtgcgaacttgaccgcctgctgcaggagctcaacgcaacccagttcaacatcaccgacgagatcatgtcgcaattcccgtccagcaaggtcgccagcggcgaacaaaaagaggaccaatccgaagataagaagcgaccatctcttcctagtagtccatcaccgggcctgcccaaagcctcagccacctctgcgaccctggaactggaccggcttatggcgtcactttcagacttcagagtacaaaaccatctgcctgcgtctgggccaacgcagccccctgtcgtgagcagcaccaacgaggggagccctagtcccccggaacccaccggtaagggcagcctggacaccatgcttggactcttacagagcgacttgtcaagacgcggcgttccaacacaggctaaaggattgtgtggaagttgtaacaaaccaatcgccggacaggtcgtcacagctcttgggcgtgcatggcaccccgaacatttcgtgtgcggcggatgctcaactgccctaggcggtagctccttcttcgaaaaggatggcgcgcccttttgcccggaatgttacttcgagcgcttctccccaaggtgcggattttgtaaccagcccatccgtcacaaaatggtgacagcactaggcacacactggcaccccgagcatttttgctgcgtttcgtgtggggagccttttggggatgagggattccatgaacgcgagggaaggccgtactgccgaagagattttctccagttatttgctccgcggtgccaaggttgtcagggtccaattctagataattatatatccgctttgtccgctctttggcaccctgattgttttgtgtgtagagaatgttttgcacctttctctggcggctccttcttcgagcacgagggccgcccattatgcgagaatcactttcacgctaggcgcgggagcctctgtgcaacatgtggattaccagtcactggtagatgcgtgagcgcactgggaaggaggtttcatccagaccatttcacttgcaccttctgtttgaggcctctcacaaaaggcagcttccaagaaagggccgggaagccatactgtcaaccctgtttccttaagctgttcggctag

SEQ ID NO: 63319 - DNA, 1335 bp, Artificial Sequence
  derived and/or modified sequence
atgccgagatccggcgcgcccaaagaacgacctgctgaaccactgacaccacccccatcctacggtcatcaaccccaaaccgggtccggagagtccagcggtgcgagcggcgataaagatcacctgtatagtactgtgtgtaagcccagatcccctaaacctgcagcgcccgccgcgccccccttctcctctagtagcggggtactgggtactgggctgtgtgaactggaccgactgctacaggaactaaatgctacacaattcaacattacagacgaaattatgtcccagtttccaagtagtaaagtggcgtcaggtgagcaaaaagaggaccagtccgaagacaaaaagcggcctagcttaccatctagtcccagtccaggcctgcctaaagcgtccgccacatcagcgacactcgagcttgaccgcctaatggcgtcactgtcagattttagagtccagaatcacctccctgcttcgggccccactcagcctcccgtcgtgtcatccaccaatgagggtagcccatccccaccggaacccaccggaaagggatcactcgatacgatgctcgggttactgcagagcgatttaagccgtcgcggcgtgcccacccaggcaaagggcttgtgtggatcatgcaataagccgattgcgggtcaggttgtgactgcactagggcgcgcttggcatccagagcattttgtttgtggaggttgttcaacagcactgggaggttccagcttcttcgaaaaagatggcgcacctttttgtcccgaatgttacttcgagagattctcacctcggtgcggattctgcaaccaacctattaggcataagatggtgaccgccctggggacgcattggcatcctgagcatttctgttgcgtctcttgtggtgaaccattcggggatgaagggtttcacgaacgtgagggccgtccatattgtcgacgagacttcctgcaactttttgccccacgctgccagggatgtcaagggcctatcctagataactatatctccgctttgtctgctttatggcaccccgactgtttcgtgtgccgcgaatgtttcgcccccttctctggcgggagcttctttgaacacgaaggtagaccactttgcgagaaccattttcacgcacgacgcggatctctgtgcgctacgtgcgggctgcctgtgacgggcaggtgtgtgagcgcgctcggccgtcgattccaccctgaccattttacatgtacattctgcctccggcccctgaccaaggggagctttcaagaaagagccggaaaaccatattgtcagccatgtttcctaaaactgttcggatag

SEQ ID NO: 63320 - DNA, 1335 bp, Artificial Sequence
  derived and/or modified sequence
atgcctcgttccggcgcacccaaggagagacccgcagaacccctcacaccacccccttcttacggtcatcaaccacagacaggaagcggagaatccagcggtgcttcaggcgataaagaccatctttacagtaccgtctgtaaaccgcggtcacccaaacccgccgcccctgccgccccacccttctcttcttctagcggagtgttaggcacgggactctgcgaactcgaccggctgttgcaagagctgaatgctacccagtttaacatcacagatgagattatgagccagttcccatcgtccaaagttgcatccggagaacagaaagaggatcagagcgaagataaaaagcggccgtccttgcccagctccccttcccctggattacccaaggcaagcgctacatccgcaacactggaactagaccggttgatggccagcctgagtgattttagagtccagaatcacctgcctgcttccggaccaacccagccccccgtagtaagcagcacaaacgagggcagcccatcaccgcctgaaccgaccggcaagggatccctggacacaatgttaggcttgttgcagagtgacctctcgcgaagaggcgttccaactcaggccaaaggtctctgtggttcctgtaacaagcctatcgcgggtcaagtcgtcactgctttgggacgtgcatggcatcctgaacactttgtgtgtggcggttgttctaccgccttaggcggttcttcttttttcgagaaggatggggctccgttttgtccggaatgctattttgaaagattcagcccacgctgtggcttttgcaatcaacctataaggcacaagatggtgaccgctctcggcacccactggcatcctgagcatttctgctgtgtgtcatgtggcgagccttttggggatgagggattccatgaacgcgagggaaggccgtactgccgaagagattttctccagttatttgctccgcggtgccaaggttgtcagggtccaattctagataattatatatccgctttgtccgctctttggcaccctgattgttttgtgtgtagagaatgttttgcacctttctctggcggctccttcttcgagcacgagggccgcccattatgcgagaatcactttcacgctaggcgcgggagcctctgtgcaacatgtggattaccagtcactggtagatgcgtgtccgctctaggacggcgcttccatcccgaccattttacatgcacattttgcctcagaccccttaccaaaggctccttccaggagcgcgcgggcaagccctactgtcaaccatgcttcttgaaactcttcggctag

SEQ ID NO: 63321 - RNA, 1335 nt, Artificial Sequence
  derived and/or modified sequence
augccacgguccggggcucccaaagaacggccagccgaaccacugacacccccacccucuuauggccaucagccucagacugggucaggcgaauccucaggugcuucuggagacaaagaucaccuuuacucgacagugugcaagccccguucuccuaaaccagcugccccugcugcucccccguucucuuccucgucaggaguccuggguaccggccuuugcgagcucgauaggcugcugcaggaacucaaugcaacucaguucaauauaacugaugagauaaugagccaauuccccuccaguaagguggccucaggcgagcagaaggaggaccaguccgaggacaaaaaacgccccagcuuaccuagcagucccagcccuggcuugccgaaggcaagcgccacauccgccacccuggaguuagaccgcuugauggcuagcuugagcgauuuccgcguccagaaucacuugccagcuuccggcccaacucaaccaccaguagugagcuccacuaacgaagggaguccaagccccccugagcccaccggaaaagggagccuugauaccaugcuuggucuccugcagagcgaucugucucggcgugggguuccaacacaggcuaaagguuugugcggcuccugcaauaagccuauugcgggccaggucguaacagcguuggggcgagcguggcaucccgagcacuuuguguguggaggcuguucaacagcacuagggggcucauccuucuucgaaaaggacggcgcuccguucuguccagagugcuacuucgaacguuucaguccgagguguggauucugcaaucaacccauaaggcacaaaauggugacugcucucgggacccacuggcacccagaacauuucugcugcgugagcuguggugagccuuucggugacgagggauuucaugagcgcgagggaaggccguacugccgaagagauuuucuucagcuauucgcaccuaggugccaagguugucaagggcccauacuagacaacuacauaucugcacuaagcgcccuauggcauccugacuguuuugucugcagggagugcuuugcaccuuuuucaggcggguccuuuuucgagcacgaagggcgcccuuuaugugagaaucauuuucaugccaggagaggcucacugugugcuaccuguggcuugccaguaaccggucguugugugucagcguugggccggcgcuuccaccccgaccacuuuacuugcacauuuuguuuaagaccacuuacaaagggauccuuucaagagcgcgccgggaagccauauugucagcccugcuuccuuaagcucuucggauag

SEQ ID NO: 63322 - RNA, 1335 nt, Artificial Sequence
  derived and/or modified sequence
augccaagguccggggccccaaaagagagacccgcagagccucucacacccccucccaguuacggacaucagccccagacgggaucgggcgagucuuccggcgcuucaggagacaaggaucaccuuuacucaaccgugugcaagccacgcucaccaaaaccagcagccccagccgcaccacccuuuaguuccuccagcggcgugcucggcacgggcuugugcgaacuugaccgccugcugcaggagcucaacgcaacccaguucaacaucaccgacgagaucaugucgcaauucccguccagcaaggucgccagcggcgaacaaaaagaggaccaauccgaagauaagaagcgaccaucucuuccuaguaguccaucaccgggccugcccaaagccucagccaccucugcgacccuggaacuggaccggcuuauggcgucacuuucagacuucagaguacaaaaccaucugccugcgucugggccaacgcagcccccugucgugagcagcaccaacgaggggagcccuagucccccggaacccaccgguaagggcagccuggacaccaugcuuggacucuuacagagcgacuugucaagacgcggcguuccaacacaggcuaaaggauuguguggaaguuguaacaaaccaaucgccggacaggucgucacagcucuugggcgugcauggcaccccgaacauuucgugugcggcggaugcucaacugcccuaggcgguagcuccuucuucgaaaaggauggcgcgcccuuuugcccggaauguuacuucgagcgcuucuccccaaggugcggauuuuguaaccagcccauccgucacaaaauggugacagcacuaggcacacacuggcaccccgagcauuuuugcugcguuucguguggggagccuuuuggggaugagggauuccaugaacgcgagggaaggccguacugccgaagagauuuucuccaguuauuugcuccgcggugccaagguugucaggguccaauucuagauaauuauauauccgcuuuguccgcucuuuggcacccugauuguuuuguguguagagaauguuuugcaccuuucucuggcggcuccuucuucgagcacgagggccgcccauuaugcgagaaucacuuucacgcuaggcgcgggagccucugugcaacauguggauuaccagucacugguagaugcgugagcgcacugggaaggagguuucauccagaccauuucacuugcaccuucuguuugaggccucucacaaaaggcagcuuccaagaaagggccgggaagccauacugucaacccuguuuccuuaagcuguucggcuag

SEQ ID NO: 63323 - RNA, 1335 nt, Artificial Sequence
  derived and/or modified sequence
augccgagauccggcgcgcccaaagaacgaccugcugaaccacugacaccacccccauccuacggucaucaaccccaaaccggguccggagaguccagcggugcgagcggcgauaaagaucaccuguauaguacuguguguaagcccagauccccuaaaccugcagcgcccgccgcgccccccuucuccucuaguagcgggguacuggguacugggcugugugaacuggaccgacugcuacaggaacuaaaugcuacacaauucaacauuacagacgaaauuaugucccaguuuccaaguaguaaaguggcgucaggugagcaaaaagaggaccaguccgaagacaaaaagcggccuagcuuaccaucuagucccaguccaggccugccuaaagcguccgccacaucagcgacacucgagcuugaccgccuaauggcgucacugucagauuuuagaguccagaaucaccucccugcuucgggccccacucagccucccgucgugucauccaccaaugaggguagcccauccccaccggaacccaccggaaagggaucacucgauacgaugcucggguuacugcagagcgauuuaagccgucgcggcgugcccacccaggcaaagggcuuguguggaucaugcaauaagccgauugcgggucagguugugacugcacuagggcgcgcuuggcauccagagcauuuuguuuguggagguuguucaacagcacugggagguuccagcuucuucgaaaaagauggcgcaccuuuuugucccgaauguuacuucgagagauucucaccucggugcggauucugcaaccaaccuauuaggcauaagauggugaccgcccuggggacgcauuggcauccugagcauuucuguugcgucucuuguggugaaccauucggggaugaaggguuucacgaacgugagggccguccauauugucgacgagacuuccugcaacuuuuugccccacgcugccagggaugucaagggccuauccuagauaacuauaucuccgcuuugucugcuuuauggcaccccgacuguuucgugugccgcgaauguuucgcccccuucucuggcgggagcuucuuugaacacgaagguagaccacuuugcgagaaccauuuucacgcacgacgcggaucucugugcgcuacgugcgggcugccugugacgggcaggugugugagcgcgcucggccgucgauuccacccugaccauuuuacauguacauucugccuccggccccugaccaaggggagcuuucaagaaagagccggaaaaccauauugucagccauguuuccuaaaacuguucggauag

SEQ ID NO: 63324 - RNA, 1335 nt, Artificial Sequence
  derived and/or modified sequence
augccucguuccggcgcacccaaggagagacccgcagaaccccucacaccacccccuucuuacggucaucaaccacagacaggaagcggagaauccagcggugcuucaggcgauaaagaccaucuuuacaguaccgucuguaaaccgcggucacccaaacccgccgccccugccgccccacccuucucuucuucuagcggaguguuaggcacgggacucugcgaacucgaccggcuguugcaagagcugaaugcuacccaguuuaacaucacagaugagauuaugagccaguucccaucguccaaaguugcauccggagaacagaaagaggaucagagcgaagauaaaaagcggccguccuugcccagcuccccuuccccuggauuacccaaggcaagcgcuacauccgcaacacuggaacuagaccgguugauggccagccugagugauuuuagaguccagaaucaccugccugcuuccggaccaacccagccccccguaguaagcagcacaaacgagggcagcccaucaccgccugaaccgaccggcaagggaucccuggacacaauguuaggcuuguugcagagugaccucucgcgaagaggcguuccaacucaggccaaaggucucugugguuccuguaacaagccuaucgcgggucaagucgucacugcuuugggacgugcauggcauccugaacacuuuguguguggcgguuguucuaccgccuuaggcgguucuucuuuuuucgagaaggauggggcuccguuuuguccggaaugcuauuuugaaagauucagcccacgcuguggcuuuugcaaucaaccuauaaggcacaagauggugaccgcucucggcacccacuggcauccugagcauuucugcugugugucauguggcgagccuuuuggggaugagggauuccaugaacgcgagggaaggccguacugccgaagagauuuucuccaguuauuugcuccgcggugccaagguugucaggguccaauucuagauaauuauauauccgcuuuguccgcucuuuggcacccugauuguuuuguguguagagaauguuuugcaccuuucucuggcggcuccuucuucgagcacgagggccgcccauuaugcgagaaucacuuucacgcuaggcgcgggagccucugugcaacauguggauuaccagucacugguagaugcguguccgcucuaggacggcgcuuccaucccgaccauuuuacaugcacauuuugccucagaccccuuaccaaaggcuccuuccaggagcgcgcgggcaagcccuacugucaaccaugcuucuugaaacucuucggcuag

SEQ ID NO: 63325 - protein, 208 aa, Artificial Sequence
  derived and/or modified sequence
MQKVLSNGQTEEVRSGSRLIFGTLYPAYYSYKAVKSKDIKEYVKWMMYWIIFALFTTAETFTDIFLCWFPFYYELKIAFVAWLLSPYTKGSSLLYRKFVHPTLSSKEKEIDDCLVQAKDRSYDALVHFGKRGLNVAATAAVMAASKGQGALSERLRSFSMQDLTTIRGDGAPAPSGPPPPGSGRASGKHGQPKMSRSASESASSSGTA

SEQ ID NO: 63326 - DNA, 627 bp, Artificial Sequence
  derived and/or modified sequence
atgcaaaaagtgctgtctaacgggcagacagaggaagtacgatccggaagtaggctaatttttgggaccctgtacccggcatactactcatacaaggcagtgaaatccaaggacatcaaagagtatgtgaagtggatgatgtattggattatctttgccttgttcaccaccgcagagaccttcacagatatattcttgtgctggtttccattctattatgaactaaaaatcgcctttgtcgcctggctgcttagtccttacaccaaaggctcaagcttgttatacaggaagttcgttcaccccactctgtccagtaaggaaaaggaaatcgacgactgcctggtgcaggccaaggatagatcctatgatgcgttagtccatttcggaaaacgggggctgaatgtagccgccacagccgccgtgatggctgctagcaaggggcagggggccctttctgaacggctgcgtagctttagcatgcaggatctcaccactatacggggcgatggagcacctgcaccttcagggccgccgccgcccggctctggaagagccagtggaaagcatgggcagcctaagatgagtcgatcagccagtgaaagcgcctcaagcagcggaactgcttag

SEQ ID NO: 63327 - DNA, 627 bp, Artificial Sequence
  derived and/or modified sequence
atgcagaaggtgctgagcaatggccagacagaggaggtgcgcagcggcagccgcctcatcttcggcaccctgtacccagcctactacagctacaaggctgtgaagagcaaggacatcaaggagtatgtgaagtggatgatgtactggatcatctttgccctcttcaccacagctgagaccttcacagacatcttcctgtgctggttccccttctactatgagctgaagatcgcctttgtggcctggctgctgagcccctacaccaagggcagcagcctgctgtacaggaagtttgtgcaccccaccctgagcagcaaggagaaggagattgatgactgcctggtgcaggccaaggacaggagctatgatgccctggtgcactttgggaagaggggcctgaatgtggccgccacagctgctgtgatggccgccagcaagggccagggcgccctgtctgagcggctgcgctccttctccatgcaggacctgaccaccatcagaggagatggagccccagcccccagcggccccccacctcctggcagcggccgggccagcggcaagcacggccagcccaagatgagccgcagcgccagcgagagcgccagcagcagcggcacagcctag

SEQ ID NO: 63328 - DNA, 627 bp, Artificial Sequence
  derived and/or modified sequence
atgcagaaggtgctgagcaacggccagaccgaggaggtgcggagcggtagccggctcattttcggaaccctgtatccagcatattactcctacaaggcagtgaagtccaaggacattaaagaatatgtaaaatggatgatgtattggattattttcgctctgttcacaactgctgagaccttcactgatatttttctctgctggttccctttttattatgagctgaagatcgcttttgtagcctggctcctgtcaccgtacacaaaggggtcaagtttgctgtatagaaagttcgtgcacccgactctcagtagcaaagagaaagagattgatgactgtctcgtccaggccaaggatcgctcctacgacgcactagtccatttcggcaagcgtgggctcaatgtggccgctacagccgccgtcatggccgcaagcaaaggacagggcgctctgtccgagaggttgaggagcttttcaatgcaggacttaactaccattcggggtgacggagcccccgcaccctcggggcctcctccccctgggtcaggtcgggcctcaggcaaacatggacaacccaaaatgtcaagatctgcaagcgagagtgcatcctccagcggaaccgcgtag

SEQ ID NO: 63329 - DNA, 627 bp, Artificial Sequence
  derived and/or modified sequence
atgcagaaggtactgtctaatggccagactgaagaggtgagaagcgggtcccgcctcatctttggcacactgtaccctgcgtattattcatataaagctgtcaaatcaaaggacatcaaagagtatgtgaaatggatgatgtactggatcatattcgccctgttcaccaccgctgaaacattcactgatatcttcctttgttggtttccgttctactatgaactgaagatcgcattcgtcgcgtggttgctgtccccctacaccaaaggatcttcccttctttatcggaaattcgtccacccaacgctgagtagcaaggagaaggagatcgatgattgtctggtccaggcaaaggaccgctcttacgatgctctggttcactttggcaagcgaggattgaacgtggctgccactgccgcagttatggctgcttcaaaggggcagggcgcactgagtgagcggcttcggtcctttagcatgcaggatttgaccactattcgcggagacggagctcctgcaccttccgggcctccaccacccggatccgggagggcctctgggaagcacgggcagccaaagatgtcgcggagcgcttcagagtctgcttcaagctccggcacggcctag

SEQ ID NO: 63330 - DNA, 3735 bp, Artificial Sequence
  derived and/or modified sequence
gtttcttatgcagaaagtgctgagcaacggacagactgaagaggttaggtctggatccaggcttatatttggcaccctttaccctgcgtattattcctacaaggctgtgaaatcaaaggacattaaggaatatgtcaaatggatgatgtactggattatatttgcacttttcaccacagcagagacattcacagacatcttcctttgttggtttccattctattatgaactaaaaatagcatttgtagcctggctgctgtctccctacacaaaaggctccagcctcctgtacaggaagtttgtacatcccacgctatcttcaaaagaaaaggaaatcgatgattgtctggtccaagcaaaagaccgaagttacgatgcccttgtgcacttcgggaagcggggcttgaacgtggccgccacagcggctgtgatggctgcttccaagggacagggtgccttatcggagagactgcggagcttcagcatgcaggacctcaccaccatcaggggagacggcgcccctgctccctcgggccccccaccaccggggtctgggcgggccagcggcaaacacggccagcctaagatgtccaggagtgcttctgagagcgctagcagctcaggcaccgcctagaatccttcgatctcgcttcaggaagaaaagtacctcatcctcggccaccgaaaccacgtgagtgagatgagccaacagcaccggatccacagaatgtttcttctctgccttaaagagctattcactaataacatagaaatccgcaagctgggtgtgctttgagtgtgcagcctcacaaacatggccttttctctctccccttccacttttaaggatttatttttttcccccttttctttattttgctggggagaggctaaagggaaaggtagtaggggcgggggtggtgacctttaagtcttctgaggttggtaattttccacaattggattgtcattatagacagcagtgtgttttttagaaagataagagaatcacccctatgctgctgagatgtacatttgtaatttatctgttgcatacttagtttttagtcctgtaaatgcaaacacagcattttttacaactttctttgttcttggtacttatactttgaactatgatgtacatatttatggcttttggcttttaatataatggacttgcaagggctgccagaggttctgatatgtaagaaaactgcaaaaacaaatatagacaaatattttgattctagagaacgtctcagatgtgcttataaagcttccaaatacaactccagtaagacatccctttccctgcaggagtgtggtctatattctttagatagttgtttagtcaaaagaccagacaagttacaaactaagagaaacaatatttcacaacacagtaaagtgtgatgagaggtcaggggaacatcccagtaaaagagaagagtcacaggaagctcatctcctccctggattctggattaggagcttctgaatcttttccagggataggcaggtagctcactcttggtgcaatttcttgaggatgggaacatgtagagctgctggaaggagtaattctgtgcttgacaaaggacgatttctcctttatcgtgaccagtgctgccgatttcctgacagaggagcttacactctgagcaccttgttttagcgaactctagcaaaacttgtttagcttagcaaaaacaaacacacaaaaaactgagaactctgctgtttcagatatgccataacatacatctgaaacacatgtgtaacaatcaaaatggtgggctctagaatggttttggagctcgagatcttcatgggttagacttgctggtcagacccaggagcacctgtggctcacaccttctgttcccctcctggcctgtgcagaatgtaaacagcagactcatactcaatgggcactacaggccttatcagacgttttatacaagcctggattgcttagtaggggaataaggcattctctgagggggctttccacttagattgagaattttatttgaaaagaatctggtttaaatggcattgtggtccgaggtagctgctctccccactgagagctgagccgaaatataagaataatatatttgtgcttcgagttggtgtttctttcagtgtaatgcatgcagtggtcacaacccagttactcataatatttggattgtatttgttcgtagatatgcccagaagactagagaattagtgttatataccatatagaacttactgtcagtcaactataaacaggcccaattaaaaactgttccattactacgcaaacacatattagaggcctttgctgatgacacattagctggatcttagccaccccagaaagggtttgatttgaagctgattgttgccagatatgcatattggaatcccatctacccatagttcctctgaaggtgattttgtaatttgcaaaagggtataggaaaatatacctaaaagcgaatttgtggctgagaggataaacagaagctgtttgctcatgttctgtgccccacacccaccaatacctaaatctgttaaggaagacagaaaatgttttctttgtgctcattgagtagttccagacagaagaagaatatactctttaaaatgtatttacctgttagttggaagtacccagaattatcagaaacgaatgcaaaaaaaaaaaaaaaaaaaaaaagcttacacagcttcttagcaatttttttttttttgccgaaacaataaattgcctttagcagcagtttaaaatcctatcgtgaacaacctatattttcgccattttacaatggagagttgtgacaagtacaggttatcaagtttgcacttaactatgccaaaaaaagtttgaagcgctctattctcagacatgctgtattattacttctcattcaagattgaaaaatataaaggtatccaaactctgtcttaatgtaaatgtaactatttttccttcaagtgttgactagggagtcggtttctctcttaaagacactcactgtacaactgaaagcagctgtcatatttctggcaaaatgtgtttacgtatctgacaagttgtacatttgtgtatgaactgacataaaatgtgaaagcctgtaagtgtacatgtagtggtgtggtgttctgtctagaggatacaactgaatgtttttaatttgctgacttacagacacaggctgtttacaaaatgctagctggaaagtctgtaatgttcatgtcataacttttagttaattgccattgagcacctgttctgaggaggtgagatgtggacttgtgcttataaactggagagtttagtcataatccctcctggctttgtgtgaatagcttgctcactttgctggcctttgaaatgtgttctccgtgataagctatccatgtgtttgtgataagagtgcttgtcaaccatgaccatctttgagccttcctagtcctccacctggcacagtatttgaaatggcaaaggatgtgcttcatcctctaacagtgtacactcccagagctgatattctggattttgactgtgcacatttcctctagttcatgtctgtagtccctatagaatgatctgtaataaaatagtatactggactgtgcatcaaagggatgtaaaattacagtattccaaaggttgaagttctgctgttttgttataatgcctgatacacatcttgaataaagtcttaacatttttctttt

SEQ ID NO: 63331 - DNA, 627 bp, Artificial Sequence
  derived and/or modified sequence
atgcagaaggtgctgagcaacggccagaccgaggaggtgagaagcggcagcagactgatcttcggcaccctgtaccccgcctactacagctacaaggccgtgaagagcaaggacatcaaggagtacgtgaagtggatgatgtactggatcatcttcgccctgttcaccaccgccgagaccttcaccgacatcttcctgtgctggttccccttctactacgagctgaagatcgccttcgtggcctggctgctgagcccctacaccaagggcagcagcctgctgtacagaaagttcgtgcaccccaccctgagcagcaaggagaaggagatcgacgactgcctggtgcaggccaaggacagaagctacgacgccctggtgcacttcggcaagagaggcctgaacgtggccgccaccgccgccgtgatggccgccagcaagggccagggcgccctgagcgagagactgagaagcttcagcatgcaggacctgaccaccatcagaggcgacggcgcccccgcccccagcggcccccccccccccggcagcggcagagccagcggcaagcacggccagcccaagatgagcagaagcgccagcgagagcgccagcagcagcggcaccgcctag

SEQ ID NO: 63332 - protein, 174 aa, Artificial Sequence
  derived and/or modified sequence
MDHLQAGGVKWMMYWIIFALFTTAETFTDIFLCWFPFYYELKIAFVAWLLSPYTKGSSLLYRKFVHPTLSSKEKEIDDCLVQAKDRSYDALVHFGKRGLNVAATAAVMAASKGQGALSERLRSFSMQDLTTIRGDGAPAPSGPPPPGSGRASGKHGQPKMSRSASESASSSGTA

SEQ ID NO: 63333 - protein, 180 aa, Artificial Sequence
  derived and/or modified sequence
MSLHPCRLNNLPNQVKWMMYWIIFALFTTAETFTDIFLCWFPFYYELKIAFVAWLLSPYTKGSSLLYRKFVHPTLSSKEKEIDDCLVQAKDRSYDALVHFGKRGLNVAATAAVMAASKGQGALSERLRSFSMQDLTTIRGDGAPAPSGPPPPGSGRASGKHGQPKMSRSASESASSSGTA

SEQ ID NO: 63334 - DNA, 525 bp, Artificial Sequence
  derived and/or modified sequence
atggaccacttacaagcgggcggggttaaatggatgatgtattggataatttttgccctgtttaccacagctgaaacttttaccgatatctttctatgttggttcccattctattatgagctgaagattgccttcgtagcatggctgctgagtccgtatacaaagggcagctcattgctgtatcggaaattcgttcaccctaccttatcttcgaaagagaaggaaatagacgactgcctcgttcaggctaaagatcgtagctacgacgccctggtccatttcggtaagagggggttaaatgttgccgctaccgcagctgttatggcagcatccaagggccagggggctttgagcgaacgtctgcggagcttctctatgcaggacctgaccactatccggggtgacggtgctcccgcacccagcggacctcctcctccaggaagcggccgcgcctctggaaaacatggccaaccgaaaatgagccggtcggcctcagagtccgcctcttcatccggaaccgcatag

SEQ ID NO: 63335 - DNA, 543 bp, Artificial Sequence
  derived and/or modified sequence
atgagtctgcatccttgccggctgaataacctgccaaaccaggtgaaatggatgatgtactggatcatttttgccctgttcaccacagcggagacgttcacagacatttttttatgttggttccctttctattacgagctgaagatagcttttgtggcgtggctcttatctccgtatactaaaggctcatcattactgtacagaaaatttgttcaccctaccttgagctccaaggaaaaagagattgatgactgtctggtgcaggctaaggaccggtcctacgacgctctggtgcacttcggcaagagaggcctgaatgtggcggcgaccgctgcagtgatggcggcctccaaaggccagggagccctgtccgagagactgaggagcttctccatgcaggacctcaccaccatccgcggtgacggcgcacccgccccttccgggccgccgcctcccggcagcgggcgcgcatccgggaagcatggccagcccaagatgtctcggagtgcctccgaaagcgcctcctcttcaggaacagcctag

SEQ ID NO: 63336 - DNA, 525 bp, Artificial Sequence
  derived and/or modified sequence
atggaccacctgcaggccggcggcgtgaagtggatgatgtactggatcatctttgccctcttcaccacagctgagaccttcacagacatcttcctgtgctggttccccttctactatgagctgaagatcgcctttgtggcctggctgctgagcccctacaccaagggcagcagcctgctgtacaggaagtttgtgcaccccaccctgagcagcaaggagaaggagattgatgactgcctggtgcaggccaaggacaggagctatgatgccctggtgcactttgggaagaggggcctgaatgtggccgccacagctgctgtgatggccgccagcaagggccagggcgccctgtctgagcggctgcgctccttctccatgcaggacctgaccaccatcagaggagatggagccccagcccccagcggccccccacctcctggcagcggccgggccagcggcaagcacggccagcccaagatgagccgcagcgccagcgagagcgccagcagcagcggcacagcctag

SEQ ID NO: 63337 - DNA, 543 bp, Artificial Sequence
  derived and/or modified sequence
atgagcctgcacccctgccgcctgaacaacctgcccaaccaggtgaagtggatgatgtactggatcatctttgccctcttcaccacagctgagaccttcacagacatcttcctgtgctggttccccttctactatgagctgaagatcgcctttgtggcctggctgctgagcccctacaccaagggcagcagcctgctgtacaggaagtttgtgcaccccaccctgagcagcaaggagaaggagattgatgactgcctggtgcaggccaaggacaggagctatgatgccctggtgcactttgggaagaggggcctgaatgtggccgccacagctgctgtgatggccgccagcaagggccagggcgccctgtctgagcggctgcgctccttctccatgcaggacctgaccaccatcagaggagatggagccccagcccccagcggccccccacctcctggcagcggccgggccagcggcaagcacggccagcccaagatgagccgcagcgccagcgagagcgccagcagcagcggcacagcctag

SEQ ID NO: 63338 - DNA, 525 bp, Artificial Sequence
  derived and/or modified sequence
atggaccacctgcaggccggcggcgtgaagtggatgatgtactggataatctttgccctgttcaccactgctgaaaccttcactgatatctttttgtgctggtttccattctactatgaattgaaaattgccttcgtcgcttggctgctttccccatatacaaaagggtcttccctgctttatcgtaagttcgtgcatccgactttgtcctctaaagaaaaggagattgacgactgtttggtgcaagctaaagatagaagctacgacgcgctcgtgcactttggcaaacgcggactcaatgtagctgccactgctgcggtgatggctgcgagtaagggccagggagccctcagcgagaggctgcggtcctttagcatgcaggatctgaccaccattaggggtgatggtgccccagcaccttcgggccctcctcccccaggctctggtcgcgcatcgggtaaacatggacagccaaagatgagccggagcgcctctgagtcagcttctagcagtggcactgcctag

SEQ ID NO: 63339 - DNA, 543 bp, Artificial Sequence
  derived and/or modified sequence
atgagcctgcacccctgccggctgaacaacctgcccaaccaggtgaagtggatgatgtattggatcatttttgcgctctttacaactgctgaaactttcacagatatatttctgtgctggtttccgttctactatgaactgaaaattgcatttgtggcttggctgctgtctccgtatacaaaggggtcttcactcttataccgtaagttcgtgcatccaacgctttccagcaaagagaaggaaatcgacgattgcttggtccaggccaaggaccgaagttacgatgcccttgtccactttggcaaacgcggtctcaatgttgcagctaccgcagcggtgatggctgccagcaagggtcagggcgctctctctgagagactgcggtccttttccatgcaagacctcaccacgattagaggtgatggcgcacctgctccaagcgggccccccccccccggctcaggccgggcatccgggaagcatggacagcccaagatgagtcgatcagccagtgagtctgcaagttcttcaggcaccgcgtag

SEQ ID NO: 63340 - DNA, 525 bp, Artificial Sequence
  derived and/or modified sequence
atggatcacctgcaggctggcggagttaagtggatgatgtactggattattttcgcactgtttaccaccgccgaaacattcaccgacatcttcttgtgctggttcccgttttattacgagctgaaaattgcattcgtggcttggctgctgtcaccttacacgaagggatccagtttgctctacaggaagtttgtacaccctactttgagtagtaaggaaaaggagatcgacgactgcctggtccaggctaaagatcgtagttacgatgctttggtccatttcgggaagcgcggtctgaatgttgcggctaccgccgctgtcatggccgcaagcaaggggcagggcgctctgtccgaacgactccggtcattcagcatgcaagatctcaccaccatcaggggcgatggcgctcctgcccctagcggcccaccaccgcctggcagtggaagagcaagtggaaagcatggtcagccgaagatgagtcggagcgcctctgaatcggcttcatccagcggaacggcttag

SEQ ID NO: 63341 - DNA, 543 bp, Artificial Sequence
  derived and/or modified sequence
atgtcactgcatccttgtcgactcaataatctaccaaatcaagtaaaatggatgatgtactggattatcttcgcactgttcactaccgcagagactttcacggacatcttcttgtgctggtttcccttctactacgagctgaagattgcattcgtggcttggctgctgtctccttacacaaagggaagttccctgctgtaccggaagttcgtccatccaaccctgtcatccaaggaaaaagaaattgatgattgcctggttcaggccaaagataggagctacgatgctctggtacacttcggtaagagagggctcaatgttgctgctactgcggcagtgatggccgcttctaaggggcagggagctttatcagagcgtttacgctccttttctatgcaggatttaacaacgattagaggcgatggtgcccctgccccaagtggcccaccccctcctggcagcggaagggcatcggggaagcacggccaacccaaaatgtctcgcagtgcttccgagtcagcatcctctagcggaactgcgtag

SEQ ID NO: 63342 - DNA, 3778 bp, Artificial Sequence
  derived and/or modified sequence
aacgccgggcagggcggcgggcgcgctcagtctggcggcggctgccgtgagctgactgacgttccgggaacgccgcagcagcccgcgccgcccgcagcctagccgagccgcgccgcccgggcctcgcccgcccgcctgcccgccatggtgtcatggatcatctccaggctggtggtgtcaaatggatgatgtactggattatatttgcacttttcaccacagcagagacattcacagacatcttcctttgttggtttccattctattatgaactaaaaatagcatttgtagcctggctgctgtctccctacacaaaaggctccagcctcctgtacaggaagtttgtacatcccacgctatcttcaaaagaaaaggaaatcgatgattgtctggtccaagcaaaagaccgaagttacgatgcccttgtgcacttcgggaagcggggcttgaacgtggccgccacagcggctgtgatggctgcttccaagggacagggtgccttatcggagagactgcggagcttcagcatgcaggacctcaccaccatcaggggagacggcgcccctgctccctcgggccccccaccaccggggtctgggcgggccagcggcaaacacggccagcctaagatgtccaggagtgcttctgagagcgctagcagctcaggcaccgcctagaatccttcgatctcgcttcaggaagaaaagtacctcatcctcggccaccgaaaccacgtgagtgagatgagccaacagcaccggatccacagaatgtttcttctctgccttaaagagctattcactaataacatagaaatccgcaagctgggtgtgctttgagtgtgcagcctcacaaacatggccttttctctctccccttccacttttaaggatttatttttttcccccttttctttattttgctggggagaggctaaagggaaaggtagtaggggcgggggtggtgacctttaagtcttctgaggttggtaattttccacaattggattgtcattatagacagcagtgtgttttttagaaagataagagaatcacccctatgctgctgagatgtacatttgtaatttatctgttgcatacttagtttttagtcctgtaaatgcaaacacagcattttttacaactttctttgttcttggtacttatactttgaactatgatgtacatatttatggcttttggcttttaatataatggacttgcaagggctgccagaggttctgatatgtaagaaaactgcaaaaacaaatatagacaaatattttgattctagagaacgtctcagatgtgcttataaagcttccaaatacaactccagtaagacatccctttccctgcaggagtgtggtctatattctttagatagttgtttagtcaaaagaccagacaagttacaaactaagagaaacaatatttcacaacacagtaaagtgtgatgagaggtcaggggaacatcccagtaaaagagaagagtcacaggaagctcatctcctccctggattctggattaggagcttctgaatcttttccagggataggcaggtagctcactcttggtgcaatttcttgaggatgggaacatgtagagctgctggaaggagtaattctgtgcttgacaaaggacgatttctcctttatcgtgaccagtgctgccgatttcctgacagaggagcttacactctgagcaccttgttttagcgaactctagcaaaacttgtttagcttagcaaaaacaaacacacaaaaaactgagaactctgctgtttcagatatgccataacatacatctgaaacacatgtgtaacaatcaaaatggtgggctctagaatggttttggagctcgagatcttcatgggttagacttgctggtcagacccaggagcacctgtggctcacaccttctgttcccctcctggcctgtgcagaatgtaaacagcagactcatactcaatgggcactacaggccttatcagacgttttatacaagcctggattgcttagtaggggaataaggcattctctgagggggctttccacttagattgagaattttatttgaaaagaatctggtttaaatggcattgtggtccgaggtagctgctctccccactgagagctgagccgaaatataagaataatatatttgtgcttcgagttggtgtttctttcagtgtaatgcatgcagtggtcacaacccagttactcataatatttggattgtatttgttcgtagatatgcccagaagactagagaattagtgttatataccatatagaacttactgtcagtcaactataaacaggcccaattaaaaactgttccattactacgcaaacacatattagaggcctttgctgatgacacattagctggatcttagccaccccagaaagggtttgatttgaagctgattgttgccagatatgcatattggaatcccatctacccatagttcctctgaaggtgattttgtaatttgcaaaagggtataggaaaatatacctaaaagcgaatttgtggctgagaggataaacagaagctgtttgctcatgttctgtgccccacacccaccaatacctaaatctgttaaggaagacagaaaatgttttctttgtgctcattgagtagttccagacagaagaagaatatactctttaaaatgtatttacctgttagttggaagtacccagaattatcagaaacgaatgcaaaaaaaaaaaaaaaaaaaaaaagcttacacagcttcttagcaatttttttttttttgccgaaacaataaattgcctttagcagcagtttaaaatcctatcgtgaacaacctatattttcgccattttacaatggagagttgtgacaagtacaggttatcaagtttgcacttaactatgccaaaaaaagtttgaagcgctctattctcagacatgctgtattattacttctcattcaagattgaaaaatataaaggtatccaaactctgtcttaatgtaaatgtaactatttttccttcaagtgttgactagggagtcggtttctctcttaaagacactcactgtacaactgaaagcagctgtcatatttctggcaaaatgtgtttacgtatctgacaagttgtacatttgtgtatgaactgacataaaatgtgaaagcctgtaagtgtacatgtagtggtgtggtgttctgtctagaggatacaactgaatgtttttaatttgctgacttacagacacaggctgtttacaaaatgctagctggaaagtctgtaatgttcatgtcataacttttagttaattgccattgagcacctgttctgaggaggtgagatgtggacttgtgcttataaactggagagtttagtcataatccctcctggctttgtgtgaatagcttgctcactttgctggcctttgaaatgtgttctccgtgataagctatccatgtgtttgtgataagagtgcttgtcaaccatgaccatctttgagccttcctagtcctccacctggcacagtatttgaaatggcaaaggatgtgcttcatcctctaacagtgtacactcccagagctgatattctggattttgactgtgcacatttcctctagttcatgtctgtagtccctatagaatgatctgtaataaaatagtatactggactgtgcatcaaagggatgtaaaattacagtattccaaaggttgaagttctgctgttttgttataatgcctgatacacatcttgaataaagtcttaacatttttctttt

SEQ ID NO: 63343 - DNA, 991 bp, Artificial Sequence
  derived and/or modified sequence
agtctggcggcggctgccgtgagctgactgacgttccgggaacgccgcagcagcccgcgccgcccgcagcctagccgagccgcgccgcccgggcctcgcccgcccgcctgcccgccatggtgtcatggatcatctccaggctggtggtgcttatatttggcaccctttaccctgcgtattattcctacaaggctgtgaaatcaaaggacattaaggaatattcctttcgactaatgcgcccattttgttcaagagagaaacctgcgagtttccttaacacacccacacccacgccccacccagttggtgaccatgtcccttcatccctgtcgcctgaataatcttccaaaccaggtcaaatggatgatgtactggattatatttgcacttttcaccacagcagagacattcacagacatcttcctttgttggtttccattctattatgaactaaaaatagcatttgtagcctggctgctgtctccctacacaaaaggctccagcctcctgtacaggaagtttgtacatcccacgctatcttcaaaagaaaaggaaatcgatgattgtctggtccaagcaaaagaccgaagttacgatgcccttgtgcacttcgggaagcggggcttgaacgtggccgccacagcggctgtgatggctgcttccaagggacagggtgccttatcggagagactgcggagcttcagcatgcaggacctcaccaccatcaggggagacggcgcccctgctccctcgggccccccaccaccggggtctgggcgggccagcggcaaacacggccagcctaagatgtccaggagtgcttctgagagcgctagcagctcaggcaccgcctagaatccttcgatctcgcttcaggaagaaaagtacctcatcctcggccaccgaaaccacgtgagtgagatgagccaacagcaccggatccacagaatgtttcttctctgccttaaagagctattcactaataacatag

SEQ ID NO: 63344 - DNA, 525 bp, Artificial Sequence
  derived and/or modified sequence
atggaccacctgcaggccggcggcgtgaagtggatgatgtactggatcatcttcgccctgttcaccaccgccgagaccttcaccgacatcttcctgtgctggttccccttctactacgagctgaagatcgccttcgtggcctggctgctgagcccctacaccaagggcagcagcctgctgtacagaaagttcgtgcaccccaccctgagcagcaaggagaaggagatcgacgactgcctggtgcaggccaaggacagaagctacgacgccctggtgcacttcggcaagagaggcctgaacgtggccgccaccgccgccgtgatggccgccagcaagggccagggcgccctgagcgagagactgagaagcttcagcatgcaggacctgaccaccatcagaggcgacggcgcccccgcccccagcggcccccccccccccggcagcggcagagccagcggcaagcacggccagcccaagatgagcagaagcgccagcgagagcgccagcagcagcggcaccgcctag

SEQ ID NO: 63345 - DNA, 543 bp, Artificial Sequence
  derived and/or modified sequence
atgagcctgcacccctgcagactgaacaacctgcccaaccaggtgaagtggatgatgtactggatcatcttcgccctgttcaccaccgccgagaccttcaccgacatcttcctgtgctggttccccttctactacgagctgaagatcgccttcgtggcctggctgctgagcccctacaccaagggcagcagcctgctgtacagaaagttcgtgcaccccaccctgagcagcaaggagaaggagatcgacgactgcctggtgcaggccaaggacagaagctacgacgccctggtgcacttcggcaagagaggcctgaacgtggccgccaccgccgccgtgatggccgccagcaagggccagggcgccctgagcgagagactgagaagcttcagcatgcaggacctgaccaccatcagaggcgacggcgcccccgcccccagcggcccccccccccccggcagcggcagagccagcggcaagcacggccagcccaagatgagcagaagcgccagcgagagcgccagcagcagcggcaccgcctag

SEQ ID NO: 63346 - protein, 143 aa, Artificial Sequence
  derived and/or modified sequence
MVSWIISRLVVLIFGTLYPAYYSYKAVKSKDIKEYVKWMMYWIIFALFTTAETFTDIFLCWDRVPYRRDCGASACRTSPPSGETAPLLPRAPHHRGLGGPAANTASLRCPGVLLRALAAQAPPRILRSRFRKKSTSSSATETT

SEQ ID NO: 63347 - DNA, 432 bp, Artificial Sequence
  derived and/or modified sequence
atggtaagttggatcattagtcgcctcgtggtcctgatttttggaaccctatatccagcttattattcctataaggccgttaaaagcaaagatattaaggagtatgtcaagtggatgatgtactggatcatttttgctctgtttacgactgcagagactttcacagatattttcctctgttgggacagggtgccatatcgacgcgattgcggcgcatctgcctgccggacctcccccccttcaggcgagacggctccactcttacctagggctccccatcaccgtggcttgggcggccccgccgccaacaccgccagcttgaggtgtccaggggtcctcctgcgcgctcttgcagcccaggcacccccgaggatactaaggagccgattccggaagaaatccaccagtagctctgcaacggagactacttag

SEQ ID NO: 63348 - DNA, 432 bp, Artificial Sequence
  derived and/or modified sequence
atggtgtcctggatcatcagccggctggtggtgctgatcttcggcaccctgtacccagcctactacagctacaaggctgtgaagagcaaggacatcaaggagtatgtgaagtggatgatgtactggatcatctttgccctcttcaccacagctgagaccttcacagacatcttcctgtgctgggacagagtgccctacagaagagactgtggggccagcgcctgcaggaccagccccccatctggagaaacagcccccctgctgccccgggccccccaccaccggggcctgggcggccctgctgccaacacagccagcctgcgctgccctggggtgctgctgcgggccctggccgcccaggccccaccccgcatcctgcggagccgcttcaggaagaagagcaccagcagcagcgccacagagaccacctag

SEQ ID NO: 63349 - DNA, 432 bp, Artificial Sequence
  derived and/or modified sequence
atggtgagctggatcatcagccggctggtggtgctgatcttcggcactctctatcctgcctattacagctacaaagcagtgaagtcaaaggacatcaaagagtacgtgaaatggatgatgtactggataatttttgctctctttacgaccgcagagaccttcacagacatttttctgtgctgggatcgtgtgccctatagacgtgactgcggtgcctctgcttgccggactagtcccccatcgggcgagaccgcccctctgctgccccgggccccacatcatagagggcttggcggccctgccgcaaacaccgcgtccctacgatgtccgggtgttctgctccgcgctcttgctgcccaggctcctcccaggattttgagaagccgcttcagaaagaagtcgacatcttcatccgcaacagagacgacttag

SEQ ID NO: 63350 - DNA, 432 bp, Artificial Sequence
  derived and/or modified sequence
atggtgtcttggattatttcccggttggtcgtgctgatcttcgggaccctgtaccccgcttattattcctataaggctgtcaagagcaaggatatcaaggagtatgtgaaatggatgatgtattggatcatcttcgcactctttaccacagcagagacgtttactgacatttttctgtgctgggatcgggtgccctaccggcgagactgcggagcctcggcatgtagaacaagccctcctagcggcgaaaccgcccctctgctaccccgagcaccgcatcatcgagggctcggaggacccgcagcaaacactgcaagcctacgatgtcccggtgttttgctgagggctctggccgctcaagcgccaccgagaattctccgctctcgttttcgcaagaagtcaacttcatccagcgctactgaaaccacgtag

SEQ ID NO: 63351 - DNA, 3616 bp, Artificial Sequence
  derived and/or modified sequence
aacgccgggcagggcggcgggcgcgctcagtctggcggcggctgccgtgagctgactgacgttccgggaacgccgcagcagcccgcgccgcccgcagcctagccgagccgcgccgcccgggcctcgcccgcccgcctgcccgccatggtgtcatggatcatctccaggctggtggtgcttatatttggcaccctttaccctgcgtattattcctacaaggctgtgaaatcaaaggacattaaggaatatgtcaaatggatgatgtactggattatatttgcacttttcaccacagcagagacattcacagacatcttcctttgttgggacagggtgccttatcggagagactgcggagcttcagcatgcaggacctcaccaccatcaggggagacggcgcccctgctccctcgggccccccaccaccggggtctgggcgggccagcggcaaacacggccagcctaagatgtccaggagtgcttctgagagcgctagcagctcaggcaccgcctagaatccttcgatctcgcttcaggaagaaaagtacctcatcctcggccaccgaaaccacgtgagtgagatgagccaacagcaccggatccacagaatgtttcttctctgccttaaagagctattcactaataacatagaaatccgcaagctgggtgtgctttgagtgtgcagcctcacaaacatggccttttctctctccccttccacttttaaggatttatttttttcccccttttctttattttgctggggagaggctaaagggaaaggtagtaggggcgggggtggtgacctttaagtcttctgaggttggtaattttccacaattggattgtcattatagacagcagtgtgttttttagaaagataagagaatcacccctatgctgctgagatgtacatttgtaatttatctgttgcatacttagtttttagtcctgtaaatgcaaacacagcattttttacaactttctttgttcttggtacttatactttgaactatgatgtacatatttatggcttttggcttttaatataatggacttgcaagggctgccagaggttctgatatgtaagaaaactgcaaaaacaaatatagacaaatattttgattctagagaacgtctcagatgtgcttataaagcttccaaatacaactccagtaagacatccctttccctgcaggagtgtggtctatattctttagatagttgtttagtcaaaagaccagacaagttacaaactaagagaaacaatatttcacaacacagtaaagtgtgatgagaggtcaggggaacatcccagtaaaagagaagagtcacaggaagctcatctcctccctggattctggattaggagcttctgaatcttttccagggataggcaggtagctcactcttggtgcaatttcttgaggatgggaacatgtagagctgctggaaggagtaattctgtgcttgacaaaggacgatttctcctttatcgtgaccagtgctgccgatttcctgacagaggagcttacactctgagcaccttgttttagcgaactctagcaaaacttgtttagcttagcaaaaacaaacacacaaaaaactgagaactctgctgtttcagatatgccataacatacatctgaaacacatgtgtaacaatcaaaatggtgggctctagaatggttttggagctcgagatcttcatgggttagacttgctggtcagacccaggagcacctgtggctcacaccttctgttcccctcctggcctgtgcagaatgtaaacagcagactcatactcaatgggcactacaggccttatcagacgttttatacaagcctggattgcttagtaggggaataaggcattctctgagggggctttccacttagattgagaattttatttgaaaagaatctggtttaaatggcattgtggtccgaggtagctgctctccccactgagagctgagccgaaatataagaataatatatttgtgcttcgagttggtgtttctttcagtgtaatgcatgcagtggtcacaacccagttactcataatatttggattgtatttgttcgtagatatgcccagaagactagagaattagtgttatataccatatagaacttactgtcagtcaactataaacaggcccaattaaaaactgttccattactacgcaaacacatattagaggcctttgctgatgacacattagctggatcttagccaccccagaaagggtttgatttgaagctgattgttgccagatatgcatattggaatcccatctacccatagttcctctgaaggtgattttgtaatttgcaaaagggtataggaaaatatacctaaaagcgaatttgtggctgagaggataaacagaagctgtttgctcatgttctgtgccccacacccaccaatacctaaatctgttaaggaagacagaaaatgttttctttgtgctcattgagtagttccagacagaagaagaatatactctttaaaatgtatttacctgttagttggaagtacccagaattatcagaaacgaatgcaaaaaaaaaaaaaaaaaaaaaaagcttacacagcttcttagcaatttttttttttttgccgaaacaataaattgcctttagcagcagtttaaaatcctatcgtgaacaacctatattttcgccattttacaatggagagttgtgacaagtacaggttatcaagtttgcacttaactatgccaaaaaaagtttgaagcgctctattctcagacatgctgtattattacttctcattcaagattgaaaaatataaaggtatccaaactctgtcttaatgtaaatgtaactatttttccttcaagtgttgactagggagtcggtttctctcttaaagacactcactgtacaactgaaagcagctgtcatatttctggcaaaatgtgtttacgtatctgacaagttgtacatttgtgtatgaactgacataaaatgtgaaagcctgtaagtgtacatgtagtggtgtggtgttctgtctagaggatacaactgaatgtttttaatttgctgacttacagacacaggctgtttacaaaatgctagctggaaagtctgtaatgttcatgtcataacttttagttaattgccattgagcacctgttctgaggaggtgagatgtggacttgtgcttataaactggagagtttagtcataatccctcctggctttgtgtgaatagcttgctcactttgctggcctttgaaatgtgttctccgtgataagctatccatgtgtttgtgataagagtgcttgtcaaccatgaccatctttgagccttcctagtcctccacctggcacagtatttgaaatggcaaaggatgtgcttcatcctctaacagtgtacactcccagagctgatattctggattttgactgtgcacatttcctctagttcatgtctgtagtccctatagaatgatctgtaataaaatagtatactggactgtgcatcaaagggatgtaaaattacagtattccaaaggttgaagttctgctgttttgttataatgcctgatacacatcttgaataaagtcttaacatttttctttt

SEQ ID NO: 63352 - DNA, 432 bp, Artificial Sequence
  derived and/or modified sequence
atggtgagctggatcatcagcagactggtggtgctgatcttcggcaccctgtaccccgcctactacagctacaaggccgtgaagagcaaggacatcaaggagtacgtgaagtggatgatgtactggatcatcttcgccctgttcaccaccgccgagaccttcaccgacatcttcctgtgctgggacagagtgccctacagaagagactgcggcgccagcgcctgcagaaccagcccccccagcggcgagaccgcccccctgctgcccagagccccccaccacagaggcctgggcggccccgccgccaacaccgccagcctgagatgccccggcgtgctgctgagagccctggccgcccaggccccccccagaatcctgagaagcagattcagaaagaagagcaccagcagcagcgccaccgagaccacctag

SEQ ID NO: 63353 - protein, 508 aa, Artificial Sequence
  derived and/or modified sequence
MQFSGEKISGQRDLQKSKMRFTFTSRCLALFLLLNHPTPILPAFSNQTYPTIEPKPFLYVVGRKKMMDAQYKCYDRMQQLPAYQGEGPYCNRTWDGWLCWDDTPAGVLSYQFCPDYFPDFDPSEKVTKYCDEKGVWFKHPENNRTWSNYTMCNAFTPEKLKNAYVLYYLAIVGHSLSIFTLVISLGIFVFFRKLTTIFPLNWKYRKALSLGCQRVTLHKNMFLTYILNSMIIIIHLVEVVPNGELVRRDPVSCKILHFFHQYMMACNYFWMLCEGIYLHTLIVVAVFTEKQRLRWYYLLGWGFPLVPTTIHAITRAVYFNDNCWLSVETHLLYIIHGPVMAALVVNFFFLLNIVRVLVTKMRETHEAESHMYLKAVKATMILVPLLGIQFVVFPWRPSNKMLGKIYDYVMHSLIHFQGFFVATIYCFCNNEVQTTVKRQWAQFKIQWNQRWGRRPSNRSARAAAAAAEAGDIPIYICHQELRNEPANNQGEESAEIIPLNIIEQESSA

SEQ ID NO: 63354 - protein, 490 aa, Artificial Sequence
  derived and/or modified sequence
MRFTFTSRCLALFLLLNHPTPILPAFSNQTYPTIEPKPFLYVVGRKKMMDAQYKCYDRMQQLPAYQGEGPYCNRTWDGWLCWDDTPAGVLSYQFCPDYFPDFDPSEKVTKYCDEKGVWFKHPENNRTWSNYTMCNAFTPEKLKNAYVLYYLAIVGHSLSIFTLVISLGIFVFFRKLTTIFPLNWKYRKALSLGCQRVTLHKNMFLTYILNSMIIIIHLVEVVPNGELVRRDPVSCKILHFFHQYMMACNYFWMLCEGIYLHTLIVVAVFTEKQRLRWYYLLGWGFPLVPTTIHAITRAVYFNDNCWLSVETHLLYIIHGPVMAALVVNFFFLLNIVRVLVTKMRETHEAESHMYLKAVKATMILVPLLGIQFVVFPWRPSNKMLGKIYDYVMHSLIHFQGFFVATIYCFCNNEVQTTVKRQWAQFKIQWNQRWGRRPSNRSARAAAAAAEAGDIPIYICHQELRNEPANNQGEESAEIIPLNIIEQESSA

SEQ ID NO: 63355 - protein, 290 aa, Artificial Sequence
  derived and/or modified sequence
MRFTFTSRCLALFLLLNHPTPILPAFSNQTYPTIEPKPFLYVVGRKKMMDAQYKCYDRMQQLPAYQGEGPYCNRTWDGWLCWDDTPAGVLSYQFCPDYFPDFDPSEKVTKYCDEKGVWFKHPENNRTWSNYTMCNAFTPEKLKNAYVLYYLAIVGHSLSIFTLVISLGIFVFFRKLTTIFPLNWKYRKALSLGCQRVTLHKNMFLTYILNSMIIIIHLVEVVPNGELVRRDPVSCKILHFFHQYMMACNYFWMLCEGIYLHTLIVVAVFTEKQRLRWYYLLGWAPAFHRD

SEQ ID NO: 63356 - protein, 162 aa, Artificial Sequence
  derived and/or modified sequence
MRFTFTSRCLALFLLLNHPTPILPAFSNQTYPTIEPKPFLYVVGRKKMMDAQYKCYDRMQQLPAYQGEGPYCNRTWDGWLCWDDTPAGVLSYQFCPDYFPDFDPSEKVTKYCDEKGVWFKHPENNRTWSNYTMCNAFTPEKLKNAYVLYYLAIVGHSCQFSP

SEQ ID NO: 63357 - DNA, 1527 bp, Artificial Sequence
  derived and/or modified sequence
atgcagttcagcggtgaaaagatatccggtcagcgcgacctccagaagagtaagatgcgctttacctttacgtctagatgccttgccctatttctcctgctcaaccaccccacccccatactcccagcattctccaaccagacatatcctacgatcgaacccaagccattcctgtacgtggttgggcgaaagaaaatgatggatgcgcaatacaaatgctatgataggatgcagcagctgccagcttaccagggcgaagggccctactgtaaccgaacatgggacgggtggctgtgctgggacgacacacccgcaggagtgctatcttaccaattttgtcctgattacttcccagactttgacccgtcagagaaagtgacaaaatactgcgatgagaagggagtgtggttcaaacaccccgaaaataaccgtacctggtctaactatacaatgtgcaatgcttttacacccgagaaacttaagaacgcttacgtcctctattatctagctattgtaggccacagcttgagcattttcactttggtgatcagcctggggatattcgtgttcttcagaaagctgacgacaatctttcccctgaactggaaatatcgtaaggccctgagtctcgggtgtcaaagggtaaccctgcacaagaatatgttcttaacatatattttgaactccatgattatcatcatccatctcgtcgaggtagttcctaacggggagctggtgcgccgagatcccgtgagttgcaagatactgcacttcttccaccaatacatgatggcctgtaattatttttggatgctatgcgaagggatttatctccacacacttatcgtagtggctgtgtttacagaaaagcagcggttgagatggtattatctgctgggctggggctttcccctggtacccaccaccatccatgcaatcaccagagccgtctatttcaacgacaattgctggctatctgtggagacccacctgctatatataatccatggccccgtgatggcagccctggtggtaaactttttcttcctcttgaacattgtgagggtgcttgttacaaaaatgagagaaacacacgaagctgaatcgcacatgtacctgaaagctgtgaaggctactatgatcctggtccctctgctgggaatacagttcgttgtgttcccatggagaccctctaacaagatgctgggaaagatttacgattatgttatgcacagcctcatccactttcagggctttttcgtcgccaccatctactgcttctgtaacaatgaggtccagaccacagttaagcgtcagtgggcgcagtttaaaattcaatggaaccagagatggggacgcaggccttctaataggagtgcccgagccgcagcggctgccgctgaggcaggcgacatacccatttacatttgtcatcaagagcttaggaacgagcccgccaataatcaaggtgaggaaagtgctgagatcatacctctgaacattatcgagcaggaaagctccgcctag

SEQ ID NO: 63358 - DNA, 1473 bp, Artificial Sequence
  derived and/or modified sequence
atgcggtttaccttcacctcacgctgcctggccttatttttgcttctgaatcacccaacacctatcttaccagccttttccaaccagacatatccaaccatagagcccaagccattcctgtacgtggtcggccgcaaaaagatgatggacgcccagtacaaatgttatgataggatgcagcagctcccagcatatcagggcgagggtccttattgcaaccggacttgggatggctggctgtgctgggacgataccccggctggtgtcctgtcttaccagttttgcccagattacttccccgacttcgacccttctgaaaaggtcacgaagtactgcgatgagaaaggcgtttggttcaagcaccctgagaacaataggacatggtctaactacaccatgtgtaacgcctttactcctgagaagctcaaaaatgcctatgtattatattatttggcaatcgtggggcactcgctgagcattttcaccttggtcatctctctggggatctttgttttttttagaaagcttactactatctttccgctgaactggaaatatcgcaaggcgctgtcacttggttgtcagagggtgactcttcataaaaatatgtttctgacgtacatcctaaactcaatgatcataattatacatttggttgaggttgtgcccaacggggaactagtacggcgcgatcctgtgagctgcaagatattgcatttctttcaccagtacatgatggcctgcaattacttctggatgctgtgcgagggcatctatttacatactcttatagtagttgctgtgtttacagagaagcagagacttcgctggtactatctgcttggctggggcttcccacttgttcctacgaccatacatgctattaccagagcggtgtattttaatgataattgttggctctcagtcgaaacccatctgctttatattatacacggaccagtgatggcagccctggtagttaacttctttttccttctgaacatcgttagggttctggtcacaaaaatgcgtgagactcatgaggctgagagccacatgtatctcaaggcggtcaaagccacaatgattctggtgccactgctgggcatccagttcgtggtctttccttggcggccatccaacaaaatgctgggaaaaatttacgactacgtaatgcattcattgatacacttccaaggattctttgtggctacaatatattgtttttgcaacaacgaagttcaaaccaccgtcaagcgccagtgggctcagttcaaaattcagtggaaccagcgttggggtaggaggccctctaatcgatccgctcgagctgccgctgcagcagccgaagctggtgatatcccaatctacatctgccaccaggagctgaggaatgagccagcaaacaaccaaggagaggagtccgccgaaatcatcccgcttaatattatcgagcaggaaagctccgcttag

SEQ ID NO: 63359 - DNA, 1473 bp, Artificial Sequence
  derived and/or modified sequence
atgcgctttacttttacaagtcggtgtctcgcgctctttctcttactaaatcatccgacccctatcctgcctgcatttagcaaccaaacttaccccactatcgagccaaagccctttctgtacgttgtaggacggaagaagatgatggacgcccagtacaagtgctatgatcggatgcaacagctacctgcatatcagggcgaaggaccgtattgcaacagaacttgggatgggtggctctgttgggatgatactcctgcgggtgtactctcttatcagttctgccctgattacttccctgattttgatccctccgagaaagtcactaaatactgcgacgaaaaaggtgtctggttcaaacatcctgagaataatagaacgtggtccaattacacaatgtgtaatgcctttacacccgagaagttgaagaacgcctacgtgctttattacctagccatagtaggccatagcctgtcaatcttcacgctggttatcagcttagggatctttgtcttcttcagaaagctgacgacgatttttcccctgaactggaaataccgtaaagccctgtcactcgggtgccagagagtcacattgcataaaaatatgttcttaacctatattctgaatagtatgatcatcataattcatttagtggaagtagtgcctaacggagaactggtgagacgcgatcctgtgagctgcaagatcttgcattttttccatcaatatatgatggcttgtaactacttttggatgctgtgtgaaggaatctaccttcatactctcatcgtcgtagctgtgtttactgagaagcagaggcttcgctggtactacctcctgggttggggttttccgctcgtccccacaaccattcacgcaataaccagggccgtgtactttaacgataactgctggctcagcgtcgagacacacctgttatacattattcacggcccagtgatggccgcactggtcgtcaacttcttcttcctcctgaatattgttcgtgtgctggtgacaaaaatgagagagactcacgaagccgaaagccatatgtacttaaaggcggtgaaagccactatgatcctggtgcccctcctggggatccagttcgtggtatttccatggcggccatccaacaagatgcttggaaagatttatgactacgtgatgcactcccttattcactttcagggcttcttcgtggctaccatctattgtttttgtaacaatgaagtccagaccacagttaagagacagtgggctcagtttaagattcaatggaatcagcggtggggcagaaggccatctaatagatcagcgcgggctgcggctgccgcagccgaagccggcgacatccctatttatatttgccaccaggagctgcgtaacgaacctgcaaataaccagggcgaggagtctgccgagatcatccccctgaatatcatagagcaggagtcttcagcttag

SEQ ID NO: 63360 - DNA, 873 bp, Artificial Sequence
  derived and/or modified sequence
atgcgctttaccttcacaagtcggtgcctggccctttttctactcctgaaccatccaactccaatcctgcctgcattcagtaatcagacatatcccaccattgaaccaaagccattcctgtacgtggtaggcaggaaaaaaatgatggacgcccagtataagtgctacgacaggatgcagcagctgccggcctaccagggagaaggcccatactgtaacagaacctgggatggctggttatgttgggatgatacaccagcaggagttctgtcctatcagttctgtccagattactttccggatttcgatccttccgagaaagtcactaaatattgtgatgaaaagggtgtgtggtttaaacacccggagaacaaccgtacatggtcaaactataccatgtgcaacgcattcacacccgagaagctgaaaaatgcatacgtgctgtattacctagctattgttggacactctctgtcgatctttacactggtcatttctctcggaatttttgtgttctttagaaagttgacaacaattttcccccttaattggaaatacagaaaagccctgtcgcttggttgtcaacgcgtgactctgcacaaaaacatgttcctgacatacattttgaattccatgataattatcatacatttggtcgaggtcgtcccgaacggtgagctagtccgccgggacccagtgagctgtaaaatcctgcacttcttccatcagtacatgatggcgtgcaattacttttggatgctatgcgaaggaatctacctgcacactctcatcgtcgtggccgtgttcactgaaaaacaacggctgcgctggtactacctcttgggttgggcccctgcttttcaccgcgattag

SEQ ID NO: 63361 - DNA, 1527 bp, Artificial Sequence
  derived and/or modified sequence
atgcagttcagcggggagaagatcagcggccagagggacctgcagaagagcaagatgaggttcaccttcaccagccgctgcctggccctcttcctgctgctgaaccaccccacccccatcctgcctgccttcagcaaccagacctaccccaccatcgagcccaagcccttcctgtatgtggtgggcaggaagaagatgatggatgcccagtacaagtgctatgacaggatgcagcagctgcctgcctaccagggcgagggcccctactgcaacagaacctgggatggctggctgtgctgggatgacaccccagctggggtgctgagctaccagttctgcccagactacttcccagactttgaccccagcgagaaggtgaccaagtactgtgatgagaagggcgtgtggttcaagcaccctgagaacaacagaacctggagcaactacaccatgtgcaatgccttcaccccagagaagctgaagaatgcctacgtgctgtactacctggccatcgtgggccacagcctgagcatcttcaccctggtgatcagcctgggcatctttgtgttcttcaggaagctgaccaccatcttccccctgaactggaagtacaggaaggccctgagcctgggctgccagagggtgaccctgcacaagaacatgttcctgacctacatcctgaacagcatgatcatcatcatccacctggtggaggtggtgcccaacggggagctggtgagaagagatcctgtgtcctgcaagatcctgcacttcttccaccagtacatgatggcctgcaactacttctggatgctgtgtgagggcatctacctgcacaccctcatcgtggtggccgtgttcacagagaagcagaggctgcgctggtactacctgctgggctggggcttccccctggtgcccaccaccatccacgccatcaccagggctgtgtacttcaatgacaactgctggctgtctgtggagacccacctgctgtacatcatccacggccctgtgatggccgccctggtggtgaacttcttcttcctgctgaacatcgtgcgggtgctggtgaccaagatgagggagacccatgaagctgagagccacatgtacctgaaggctgtgaaggccaccatgatcctggtgcccctgctgggcatccagtttgtggtgttcccctggaggcccagcaacaagatgctgggcaagatctatgactatgtgatgcacagcctcatccacttccagggcttctttgtggccaccatctactgcttctgcaacaatgaggtgcagaccaccgtgaagaggcagtgggcccagttcaagatccagtggaaccagcgctggggcagaagacccagcaacagaagtgcccgggctgctgctgctgctgctgaggccggggacatccccatctacatctgccaccaggagctgagaaatgaaccagccaacaaccagggcgaggagagcgctgagatcatccccctgaacatcatcgagcaggagagcagcgcctag

SEQ ID NO: 63362 - DNA, 1473 bp, Artificial Sequence
  derived and/or modified sequence
atgaggttcaccttcaccagccgctgcctggccctcttcctgctgctgaaccaccccacccccatcctgcctgccttcagcaaccagacctaccccaccatcgagcccaagcccttcctgtatgtggtgggcaggaagaagatgatggatgcccagtacaagtgctatgacaggatgcagcagctgcctgcctaccagggcgagggcccctactgcaacagaacctgggatggctggctgtgctgggatgacaccccagctggggtgctgagctaccagttctgcccagactacttcccagactttgaccccagcgagaaggtgaccaagtactgtgatgagaagggcgtgtggttcaagcaccctgagaacaacagaacctggagcaactacaccatgtgcaatgccttcaccccagagaagctgaagaatgcctacgtgctgtactacctggccatcgtgggccacagcctgagcatcttcaccctggtgatcagcctgggcatctttgtgttcttcaggaagctgaccaccatcttccccctgaactggaagtacaggaaggccctgagcctgggctgccagagggtgaccctgcacaagaacatgttcctgacctacatcctgaacagcatgatcatcatcatccacctggtggaggtggtgcccaacggggagctggtgagaagagatcctgtgtcctgcaagatcctgcacttcttccaccagtacatgatggcctgcaactacttctggatgctgtgtgagggcatctacctgcacaccctcatcgtggtggccgtgttcacagagaagcagaggctgcgctggtactacctgctgggctggggcttccccctggtgcccaccaccatccacgccatcaccagggctgtgtacttcaatgacaactgctggctgtctgtggagacccacctgctgtacatcatccacggccctgtgatggccgccctggtggtgaacttcttcttcctgctgaacatcgtgcgggtgctggtgaccaagatgagggagacccatgaagctgagagccacatgtacctgaaggctgtgaaggccaccatgatcctggtgcccctgctgggcatccagtttgtggtgttcccctggaggcccagcaacaagatgctgggcaagatctatgactatgtgatgcacagcctcatccacttccagggcttctttgtggccaccatctactgcttctgcaacaatgaggtgcagaccaccgtgaagaggcagtgggcccagttcaagatccagtggaaccagcgctggggcagaagacccagcaacagaagtgcccgggctgctgctgctgctgctgaggccggggacatccccatctacatctgccaccaggagctgagaaatgaaccagccaacaaccagggcgaggagagcgctgagatcatccccctgaacatcatcgagcaggagagcagcgcctag

SEQ ID NO: 63363 - DNA, 873 bp, Artificial Sequence
  derived and/or modified sequence
atgaggttcaccttcaccagccgctgcctggccctcttcctgctgctgaaccaccccacccccatcctgcctgccttcagcaaccagacctaccccaccatcgagcccaagcccttcctgtatgtggtgggcaggaagaagatgatggatgcccagtacaagtgctatgacaggatgcagcagctgcctgcctaccagggcgagggcccctactgcaacagaacctgggatggctggctgtgctgggatgacaccccagctggggtgctgagctaccagttctgcccagactacttcccagactttgaccccagcgagaaggtgaccaagtactgtgatgagaagggcgtgtggttcaagcaccctgagaacaacagaacctggagcaactacaccatgtgcaatgccttcaccccagagaagctgaagaatgcctacgtgctgtactacctggccatcgtgggccacagcctgagcatcttcaccctggtgatcagcctgggcatctttgtgttcttcaggaagctgaccaccatcttccccctgaactggaagtacaggaaggccctgagcctgggctgccagagggtgaccctgcacaagaacatgttcctgacctacatcctgaacagcatgatcatcatcatccacctggtggaggtggtgcccaacggggagctggtgagaagagatcctgtgtcctgcaagatcctgcacttcttccaccagtacatgatggcctgcaactacttctggatgctgtgtgagggcatctacctgcacaccctcatcgtggtggccgtgttcacagagaagcagaggctgcgctggtactacctgctgggctgggccccagccttccaccgggactag

SEQ ID NO: 63364 - DNA, 1527 bp, Artificial Sequence
  derived and/or modified sequence
atgcagttcagcggcgagaagatcagcggccagcgggacctgcagaagtcaaagatgcggttcactttcacctctagatgcctcgcactgttcctcctcctgaaccatccgactccaatactccccgccttctccaaccagacataccctacaattgagcctaaacctttcttatatgtggttggaaggaaaaagatgatggacgcccagtacaaatgttatgatcgcatgcagcagctgcctgcgtaccagggagagggtccctactgtaacaggacatgggacggctggctgtgctgggatgacacccccgctggagtgctgagctaccaattctgccccgattactttcctgacttcgatccatccgaaaaggtgactaaatactgtgatgaaaagggtgtttggtttaaacacccagaaaataaccgcacatggagtaattacacgatgtgcaacgccttcacacccgagaagttaaagaatgcttatgtactgtactatttggccattgtaggacactcactgtctatctttacccttgtcatttctttgggaatcttcgtcttcttccgcaagttgactacgatttttccgctgaactggaagtacagaaaggctctgtcgctgggctgtcagcgagtgaccctgcataagaacatgttcctgacttacatcttgaattccatgattattattatccatctcgtagaagtggtccccaatggcgagctggttcgcagagatccggtctcttgtaaaatcctacacttctttcatcagtatatgatggcgtgcaattacttttggatgctgtgtgaaggaatatacttgcatacgttgatagtcgtggccgtattcactgagaaacagcgacttcgctggtactatctcctgggctggggcttccccctagtgccaactactattcacgctattaccagagctgtatattttaatgataattgctggttatctgtcgagacccacctgctgtacattattcacgggccagtcatggctgctctggtggtcaacttcttttttttgctgaatatcgtgagggtactcgtaaccaagatgcgcgaaacccacgaggcagagagccatatgtatctcaaagcggtcaaggcgacaatgatattagtgccccttctaggcattcagttcgtcgtgttcccttggcgtccatctaacaagatgttgggcaaaatatatgattatgtgatgcactccctgatccactttcaggggttctttgtcgccacaatttactgtttctgtaataacgaggtccagactaccgtgaagaggcagtgggcccaatttaaaattcagtggaaccagcgctggggcaggcggccatccaacaggtcagccagagctgctgctgccgcagccgaagccggcgatataccgatctatatttgccatcaggaactgcggaatgaacccgctaataatcaaggcgaggagtcagcggagattatcccccttaacattatcgagcaggagagctcagcatag

SEQ ID NO: 63365 - DNA, 1473 bp, Artificial Sequence
  derived and/or modified sequence
atgcggttcaccttcaccagccggtgcctggccctgttcctgctgctgaaccaccctactcctatcctccctgcatttagtaaccagacgtatcctacaattgagcccaaacctttcctgtatgttgttgggaggaaaaagatgatggacgcacagtataaatgttacgaccgcatgcaacagcttccagcgtatcagggtgagggtccatactgcaacaggacatgggacggatggctctgctgggatgatacccctgctggcgttctgtcttaccagttttgccctgactattttcctgattttgatccaagtgaaaaagtaactaagtattgcgatgagaaaggggtgtggtttaagcatccagaaaataatcgaacatggtcgaattatacgatgtgcaacgcgtttacacctgaaaagctgaaaaacgcttacgtgctctattacctcgccatcgtagggcacagtctgtcaatttttactctcgtgatcagcctggggatattcgtattcttccggaagctcaccacaatctttcctctgaactggaaatatcgcaaggccctatcccttgggtgccaacgcgttacccttcataagaacatgttcttgacgtacattctgaactcaatgatcattattatccaccttgtagaggttgtacctaacggggaattagtgaggagagatcccgtctcttgcaaaatcttacattttttccatcagtacatgatggcatgtaactatttctggatgttgtgcgaaggaatatacctccatactctcatagtggtcgctgtgtttaccgagaagcaacggctgcggtggtattacctgctcggctggggtttcccactggtgcctaccaccatacacgccattactcgcgcggtctactttaatgacaactgttggttgagtgttgaaacccacctactgtatataattcatggccccgtcatggctgccctggttgttaattttttttttcttctaaatatcgtgcgagtgctggtgactaagatgcgggagacccacgaggccgaaagtcatatgtatctgaaagccgttaaggcgacaatgatcttggtgcccttactgggaatccaattcgtggttttcccctggaggcccagcaataaaatgcttggcaagatctacgattacgtgatgcatagtctcatccactttcagggatttttcgtggctacgatatactgcttctgtaataatgaggtgcagacaacagtgaagcgccagtgggcccagttcaaaatccagtggaatcaacgatggggacgcaggccaagtaacagatctgcacgggctgctgcagccgccgccgaggctggagacatccccatttatatttgtcaccaggagctgcgtaacgaaccggcaaacaatcagggggaagaaagcgctgaaatcattccgcttaatattattgagcaggagagtagcgcatag

SEQ ID NO: 63366 - DNA, 1473 bp, Artificial Sequence
  derived and/or modified sequence
atgcggttcaccttcaccagccggtgcctggccctgttcctgctgttgaaccacccgacacctatcttgcctgccttctctaatcagacttaccccacaatcgagccaaagccattcctttacgtagtaggtcgcaagaaaatgatggacgctcagtataagtgctacgacaggatgcagcagctgcccgcttaccagggggaagggccgtactgcaaccgtacatgggacgggtggctatgttgggacgacacacccgcgggtgtgcttagttatcaattttgtcccgactactttccggactttgatccctccgagaaggttaccaagtattgcgacgagaaaggcgtctggttcaagcaccctgaaaacaacaggacctggtcaaattacacaatgtgcaacgccttcacgccagaaaaactcaagaatgcatatgtcctgtactacctggccatcgttggacattctctaagtatattcactttggtgatttctctgggaattttcgtgttttttcgaaagcttacaacgattttcccgttgaactggaaatatcggaaagccctgagcttggggtgtcagcgggttaccttgcacaaaaatatgtttttaacatatatcctgaactccatgattataatcatacacttggtggaggtggtacccaatggtgaactggtacgcagagaccccgtctcctgcaagatcctacacttcttccatcagtacatgatggcatgcaattatttctggatgctgtgtgagggaatctacttgcataccctgattgtggtggctgtctttactgaaaaacagagactccggtggtactacctcttgggatggggcttcccattggtacctacaacaatacacgcgatcacccgtgcagtctactttaacgataattgctggctcagcgtggagacccacctgctctatataatacacggcccagtgatggctgcgttagtcgtcaactttttctttttgctcaacattgtcagggtgctggtgaccaaaatgagggagacccatgaggctgagtcccacatgtatctcaaagccgtcaaggccacaatgattctggtgccactgctgggaatacaatttgtggtgtttccttggcgtccttccaacaagatgctgggtaaaatctacgactatgttatgcacagcctgatccactttcaaggattcttcgtggccacaatctactgtttttgtaacaacgaagtccaaacaaccgtcaaacgccagtgggcccagttcaagatccaatggaaccagcgctggggccggcggccctccaatcgcagcgcacgcgccgcagcagccgccgcagaagcaggcgacatacccatatatatatgccatcaggagctccgaaacgaaccagctaacaaccagggcgaagaatctgccgaaataataccactgaacattatcgaacaggaaagctcagcttag

SEQ ID NO: 63367 - DNA, 873 bp, Artificial Sequence
  derived and/or modified sequence
atgcggttcaccttcaccagccggtgcctggccctgttcctgctgctaaaccatccaacacccattctccctgcctttagcaatcagacctatcctacaatcgaacctaaaccctttctatacgttgttggcagaaaaaagatgatggacgctcaatataagtgttacgatcgtatgcaacagttgccagcctatcagggcgagggaccgtactgtaaccgtacctgggacggctggctttgttgggacgacaccccggccggagttctgagttatcaattttgtcccgattattttcccgatttcgacccaagcgagaaggtgacgaagtactgcgatgagaagggtgtctggttcaaacatcccgaaaacaatcgcacatggtccaactacactatgtgtaatgcatttacacccgagaagctaaagaatgcctatgtgctgtattaccttgcaatcgtggggcattctctgtctatctttaccctggtgatttctctcggaatcttcgtcttctttaggaagctgacaactatcttccctttgaattggaagtaccgtaaggccctatccctcgggtgtcagagagttacactgcataaaaacatgttcctgacatacattctcaattcaatgatcatcatcatccacttggtcgaggtcgttccaaatggcgagctggtgaggcgggacccagtctcttgcaagatcctgcatttcttccatcagtacatgatggcctgtaactacttctggatgctatgtgaaggaatatacttgcatacgctgattgttgtggccgtcttcactgaaaagcagcgtctgcgctggtactatctcctcgggtgggctcctgccttccatagggattag

SEQ ID NO: 63368 - DNA, 1527 bp, Artificial Sequence
  derived and/or modified sequence
atgcaattctcaggcgaaaagattagcggccagcgcgacctccagaagagtaagatgcgatttacatttacttctaggtgtttggctctgtttctgttattgaaccaccctacccctatactgccggcattctccaaccaaacctaccctactattgaacctaagccattcctgtatgttgtggggcgtaaaaagatgatggatgcgcagtacaaatgctacgaccggatgcagcagcttcctgcctatcagggcgagggcccttattgtaacagaacctgggacggatggttgtgttgggatgatacaccagctggagtcctgagttaccagttttgtccggactactttcccgattttgacccttctgagaaagtcaccaaatactgcgatgagaagggcgtatggttcaaacatccagagaacaatcgaacgtggagcaattataccatgtgcaatgctttcacccctgagaagctgaagaatgcgtacgttctgtactacctggcaattgtcgggcactctctgtctattttcaccctggtgataagccttggaatcttcgtctttttccgcaagctcaccacaatcttcccgctgaactggaagtatcggaaggcacttagccttgggtgccagagagttactctacataagaatatgttcctgacctatattctgaactctatgatcattataatccacttggtggaggtcgtgccgaatggtgaactcgttcgcagagatccagtgtcctgcaaaatcctccattttttccatcagtatatgatggcttgtaattacttttggatgttgtgcgagggcatttacttacacacattaattgtggtggccgtgttcacggaaaaacagcggctgcgatggtactaccttctcggttggggcttcccgctggttcccactacgattcatgctatcacgcgggctgtatatttcaacgataactgctggctctctgtggagactcatctgctctatatcattcatggaccagtcatggctgcactggtcgttaacttcttttttctgctgaatatagtacgcgtgttagtaaccaaaatgcgagaaacacacgaggcggagtcgcacatgtacttgaaggctgtcaaggccactatgatcctcgtccccctgctgggcattcaatttgtcgtgttcccttggcgcccttctaataagatgttgggtaaaatctatgattacgtgatgcactccctgattcattttcagggcttttttgtggcgaccatttattgtttctgcaataatgaagtgcagactacggtgaagagacagtgggcacagttcaaaatacagtggaatcagcgttgggggaggaggccaagtaataggagtgcacgagctgctgccgcagctgctgaggccggagatattcccatctacatctgccatcaggagctcaggaacgagccagccaacaaccagggagaggagtccgcagagatcattcctctgaacataattgaacaggagtccagcgcatag

SEQ ID NO: 63369 - DNA, 1473 bp, Artificial Sequence
  derived and/or modified sequence
atgaggttcacattcacctcccgctgcttagctctcttcctcttgcttaaccacccaacccctatactcccagctttctctaatcagacatatcctacgatcgagcctaagccgtttctttacgtcgtggggaggaagaaaatgatggacgcccaatataagtgctacgaccgaatgcagcagcttcccgcttaccagggagaaggcccttactgtaatcgaacttgggacgggtggctgtgctgggatgatactccagccggtgttctatcttaccaattttgccctgattatttccccgattttgatccatccgagaaagtaaccaaatattgcgatgaaaaaggagtgtggttcaagcacccggaaaataacaggacctggtctaattacaccatgtgcaacgccttcacgccagagaaacttaaaaatgcatacgtattgtactacctggccatcgtggggcattccctgtcaatctttaccctcgtcattagcctaggaatctttgtgttcttccgcaagctaaccaccattttccctttgaattggaaataccgcaaagctttaagcttggggtgccaacgcgtaaccttacacaagaatatgttcctcacttacatcctcaacagcatgattatcattatccacctggtggaggtggtgcccaatggggagctggtgcggagggatcctgtttcttgcaaaatactccacttcttccatcagtatatgatggcatgcaattacttctggatgctgtgcgagggtatttacctacacacactcatagtggttgccgtcttcacggagaagcagcgattgcgatggtactacctgctgggctggggctttcccttggtccctaccaccatccacgccatcactcgggctgtctactttaatgacaactgttggctgtccgtggaaacgcacttattgtacataatccatgggccagtaatggcagctttagtggtgaattttttttttctcctgaatatagtcagggtgttggtcactaaaatgagggaaacccatgaggcagaaagccacatgtacctcaaagccgtgaaggcgactatgatcttggtgcccctgctgggaatacaatttgtcgtcttcccctggcggccttccaataagatgctcggtaagatctacgactacgtcatgcacagtcttattcacttccaaggcttttttgttgcaactatatactgcttttgcaacaacgaagtgcagacgaccgtgaagcggcagtgggcacagttcaagatccagtggaatcagaggtggggcaggcggccatcgaaccgatcagctagagctgcagcggctgcagcagaggcaggcgatattcctatttatatctgtcatcaggagctgagaaatgaacctgccaataaccaaggcgaagagagcgccgagatcataccgctcaacataattgagcaggaaagttccgcctag

SEQ ID NO: 63370 - DNA, 1473 bp, Artificial Sequence
  derived and/or modified sequence
atgaggtttacgtttactagcaggtgcctcgcccttttcttgctgctcaaccacccaactcctattctccctgccttcagcaatcaaacctatccaaccattgagcccaagccctttttgtacgttgtgggcaggaagaaaatgatggacgcccagtataaatgctacgaccgaatgcagcagctgcccgcatatcaaggggagggtccatactgtaacaggacttgggacgggtggttgtgctgggacgacacccctgcaggagtgctctcctaccagttctgtcctgactactttcctgactttgaccctagcgaaaaagtgaccaagtactgtgatgagaagggtgtgtggttcaagcaccccgagaacaacaggacttggtcaaattacactatgtgcaacgcctttacccccgagaagctgaagaatgcctatgtgctctactacttagcaatagttggtcattctctgtcaatcttcacactggtgatttccctggggatttttgtattttttcggaagctgacgaccatctttccgttgaactggaaatatcggaaagcgttaagcctggggtgccagcgcgtaacactgcataaaaatatgttcctcacctatattctgaatagtatgattattatcattcatctggtagaggtcgtgcccaatggggaattagtccggagagatcccgtgtcttgcaagatcttgcacttttttcatcagtacatgatggcttgcaattatttttggatgctgtgcgaagggatctatctgcataccctcatagtcgtggcagtgtttactgaaaaacagaggctgcggtggtactatctgttgggatggggcttccctctggtccccaccactattcacgctataacccgagcggtgtatttcaatgacaattgttggctgtctgtggaaacccatttactatacattattcacgggcctgttatggctgcactcgtcgtgaatttcttcttcctgcttaatatagtgcgggtgctcgtgacaaagatgcgggagactcacgaggcagaaagccacatgtacctgaaagcagtgaaagctactatgatcctggtgcctcttttggggatacaattcgtcgtctttccttggcggccatcaaacaagatgcttggcaaaatctacgactatgttatgcactccctgatccattttcagggtttctttgtcgcgaccatatactgtttctgtaacaacgaggtgcaaaccaccgtcaagaggcagtgggctcagttcaaaattcaatggaatcagaggtgggggcgacgcccttctaatagatcagctagagcggctgctgccgcagcggaggctggggacataccaatctacatttgccatcaagagcttcgcaacgagccagcgaataaccagggagaggagtctgcagaaatcattcccctgaatataattgagcaagagagcagcgcatag

SEQ ID NO: 63371 - DNA, 873 bp, Artificial Sequence
  derived and/or modified sequence
atgcgctttacctttacctcacggtgtctggctttatttctactgctaaaccaccctaccccaatcttgcctgcattcagtaatcaaacgtacccaactattgagcctaagcctttcctctatgtcgtcggtagaaaaaaaatgatggacgcccagtacaaatgttatgatcgaatgcagcagctgcccgcataccagggggaaggcccttactgtaaccgcacgtgggacggatggctgtgttgggacgataccccggcaggggtactgagctaccagttctgccctgattacttccccgacttcgatccaagtgagaaggtcacgaaatactgtgatgaaaagggggtatggttcaaacaccctgagaacaatagaacttggtccaattacactatgtgtaatgcgttcacgcccgaaaagttgaagaatgcgtatgtgctgtactatctcgcaatcgtgggacatagcctgtcaattttcacattggtgatttcactgggcatattcgtgtttttccgaaagttgacaaccattttccctttgaactggaagtacaggaaagccctgtcactgggctgccagcgggtgacactccacaagaacatgtttctgacctatatactcaattctatgatcatcattattcatctggtcgaggtggtgccaaacggcgagctggtgaggcgagatccagtctcctgcaagatcctgcattttttccatcaatacatgatggcttgcaactacttctggatgctctgcgaaggtatctatctgcatactttaattgttgtcgctgtgttcacagagaagcaaagactccgatggtattatctcctcggatgggctccggctttccatagggattag

SEQ ID NO: 63372 - DNA, 3696 bp, Artificial Sequence
  derived and/or modified sequence
agcttcacagctgggagagcgcaggaaggcgccgggaaggaaagccagcccaccagcgtctgggtgggctgcgccgcgcggctggcggaccttcccgggttggagaagtgcgcacgtccgcacctcaccctgcggctgacatctcctgcccaggagatgggcgctgaagcttgagcgcctgagtccctggagccacacctgcgaacaccctttgcttctattgagctgtgcccagccgcccagtgacagaattccagaataaatgattcccactgatccacccacttttgccaccccaggatgcaattttctggagagaagattagtggacaaagagatcttcaaaaatcaaaaatgaggttcacatttacaagccggtgcttggcactgtttcttcttctaaatcacccaaccccaattcttcctgccttttcaaatcaaacctatccaacaatagagcccaagccatttctttacgtcgtaggacgaaagaagatgatggatgcacagtacaaatgctatgaccgaatgcagcagttacccgcataccaaggagaaggtccatattgcaatcgcacctgggatggatggctgtgctgggatgacacaccggctggagtattgtcctatcagttctgcccagattattttccggattttgatccatcagaaaaggttacaaaatactgtgatgaaaaaggtgtttggtttaaacatcctgaaaacaatcgaacctggtccaactatactatgtgcaatgctttcactcctgagaaactgaagaatgcatatgttctgtactatttggctattgtgggtcattctttgtcaattttcaccctagtgatttccctggggattttcgtgtttttcagaaaattgacaactatttttcctttgaattggaaatataggaaggcattgagccttggctgccaaagggtaaccctgcacaagaacatgtttcttacttacattctgaattctatgattatcatcatccacctggttgaagtagtacccaatggagagctcgtgcgaagggacccggtgagctgcaagattttgcattttttccaccagtacatgatggcctgcaactatttctggatgctctgtgaagggatctatcttcatacactcattgtcgtggctgtgtttactgagaagcaacgcttgcggtggtattatctcttgggctgggggttcccgctggtgccaaccactatccatgctattaccagggccgtgtacttcaatgacaactgctggctgagtgtggaaacccatttgctttacataatccatggacctgtcatggcggcacttgtggtcaatttcttctttttgctcaacattgtccgggtgcttgtgaccaaaatgagggaaacccatgaggcggaatcccacatgtacctgaaggctgtgaaggccaccatgatccttgtgcccctgctgggaatccagtttgtcgtctttccctggagaccttccaacaagatgcttgggaagatatatgattacgtgatgcactctctgattcatttccagggcttctttgttgcgaccatctactgcttctgcaacaatgaggtccaaaccaccgtgaagcgccaatgggcccaattcaaaattcagtggaaccagcgttgggggaggcgcccctccaaccgctctgctcgcgctgcagccgctgctgcggaggctggcgacatcccaatttacatctgccatcaggagctgaggaatgaaccagccaacaaccaaggcgaggagagtgctgagatcatccctttgaatatcatagagcaagagtcatctgcttgaatgtgaagcaaacacagcatcgtgatcactgagccatcatttcctgggagaaagaccatgcatttaaagtattctccatcctcccaggaaccgaacatatcatttgtgaagaattattcagtgaatttgtccattgtaaatctgaagaaagttattcttggtactgttgctttgggagacagtctaggaatggagtctcccactgcaacttgtgaactccatcattcatccaggactgagatgcaaatgtcacagtaatgcaagcaaagtatcaaagaaaaacaatgaaattgacctagttcagatacagggtgctccttgtcaatactgagccatttatacctttgaaatattaaaatcactgtcaatatttttatttttaactctggattttgaattagattatttctgtatttggctatggatctgatttttaatttttttaaatttcagtcaattctgatgttactgagatgttttaccatccttacaatgtaaaccacatgaactacgtgacctctgcaagacaaagcggctttctaatagagagattagtaaatatgtgaagaaaaagacctgcatttggcaggaagatgtatgctttgaatgcaaaagaaatttagagtcaatttgctgaaaacattacatgctcagcttggttttggacaagcctgtccattgggcaggacctagctgttgtaaagaattggtcttaatgttgaatgtattttggttgctgatgtttataaactgagaggtcacaaagaatctatcactaaaaatttttacaaaactgccaaaaatataattcttagtggaagacaatactccctttaaagagagtttgccactcccctaaactccaggatttataaagcaaattactccaaggtttataaagcagattacctcttgcccttgggtgctatctagcagtaaaagataaatttgttgaatattggtaattaaaagactccacataagtccattaactgctttccacccagcttcaaagcttaaaaagagctcaggcttttccaggaagatccaggagggctaattagaaatcaacttgtggttgaccgcttgtttcttgttattaccaaaacaggaggggaaaaaattaactgctccaaatttaaccataaatcaattcatgtttaacgtttctcattaaaatccagtattatattatcatatctctctttacttcccagtataagatttttgaaaatcctgaataaaccagtatcgttactggcacctgaaattaatttgtgaatttgcaacagtaatcagagttaccattatttaatttgtatgctaaatgaggaggtacattgaaaccctccaaatctccagtctcatctatgtcatattttgccactgcctttcagaagtgatttagttgtggaaagataataaattgatttgttatggttacatatttagcgcacccagagaaaattaattatatttctacagagaaaatgaatttgggatactaaagtagtttaagtctcctttactgaatgtaagggggggatcgaaaagaaggtatttttccaatcacagtgttatgtagtattgttctatttttgtttacaaacatggaaaacagagtatttctggcagctgtggtacaaatgtgataatatattgctaaaatattttagatgttattatgctaatatagtaggggttgaagaaaacaaaatagcttattatagaattgcacatagttctgcccaaattatgtgaaatgcttatgcttgtgtatatgtataaattaatacagagtacgttaaaagcaaaaagatgtatatttgcatatttttctaaagaaatatattattcatcttttcattc

SEQ ID NO: 63373 - DNA, 3625 bp, Artificial Sequence
  derived and/or modified sequence
agcttcacagctgggagagcgcaggaaggcgccgggaaggaaagccagcccaccagcgtctgggtgggctgcgccgcgcggctggcggaccttcccgggttggagaagtgcgcacgtccgcacctcaccctgcggctgacatctcctgcccaggagatgggcgctgaagcttgagcgcctgagtccctggagccacacctgcgaacaccctttgcttctattgagctgtgcccagccgcccagtgacagaattccaggacaaagagatcttcaaaaatcaaaaatgaggttcacatttacaagccggtgcttggcactgtttcttcttctaaatcacccaaccccaattcttcctgccttttcaaatcaaacctatccaacaatagagcccaagccatttctttacgtcgtaggacgaaagaagatgatggatgcacagtacaaatgctatgaccgaatgcagcagttacccgcataccaaggagaaggtccatattgcaatcgcacctgggatggatggctgtgctgggatgacacaccggctggagtattgtcctatcagttctgcccagattattttccggattttgatccatcagaaaaggttacaaaatactgtgatgaaaaaggtgtttggtttaaacatcctgaaaacaatcgaacctggtccaactatactatgtgcaatgctttcactcctgagaaactgaagaatgcatatgttctgtactatttggctattgtgggtcattctttgtcaattttcaccctagtgatttccctggggattttcgtgtttttcagaaaattgacaactatttttcctttgaattggaaatataggaaggcattgagccttggctgccaaagggtaaccctgcacaagaacatgtttcttacttacattctgaattctatgattatcatcatccacctggttgaagtagtacccaatggagagctcgtgcgaagggacccggtgagctgcaagattttgcattttttccaccagtacatgatggcctgcaactatttctggatgctctgtgaagggatctatcttcatacactcattgtcgtggctgtgtttactgagaagcaacgcttgcggtggtattatctcttgggctgggggttcccgctggtgccaaccactatccatgctattaccagggccgtgtacttcaatgacaactgctggctgagtgtggaaacccatttgctttacataatccatggacctgtcatggcggcacttgtggtcaatttcttctttttgctcaacattgtccgggtgcttgtgaccaaaatgagggaaacccatgaggcggaatcccacatgtacctgaaggctgtgaaggccaccatgatccttgtgcccctgctgggaatccagtttgtcgtctttccctggagaccttccaacaagatgcttgggaagatatatgattacgtgatgcactctctgattcatttccagggcttctttgttgcgaccatctactgcttctgcaacaatgaggtccaaaccaccgtgaagcgccaatgggcccaattcaaaattcagtggaaccagcgttgggggaggcgcccctccaaccgctctgctcgcgctgcagccgctgctgcggaggctggcgacatcccaatttacatctgccatcaggagctgaggaatgaaccagccaacaaccaaggcgaggagagtgctgagatcatccctttgaatatcatagagcaagagtcatctgcttgaatgtgaagcaaacacagcatcgtgatcactgagccatcatttcctgggagaaagaccatgcatttaaagtattctccatcctcccaggaaccgaacatatcatttgtgaagaattattcagtgaatttgtccattgtaaatctgaagaaagttattcttggtactgttgctttgggagacagtctaggaatggagtctcccactgcaacttgtgaactccatcattcatccaggactgagatgcaaatgtcacagtaatgcaagcaaagtatcaaagaaaaacaatgaaattgacctagttcagatacagggtgctccttgtcaatactgagccatttatacctttgaaatattaaaatcactgtcaatatttttatttttaactctggattttgaattagattatttctgtatttggctatggatctgatttttaatttttttaaatttcagtcaattctgatgttactgagatgttttaccatccttacaatgtaaaccacatgaactacgtgacctctgcaagacaaagcggctttctaatagagagattagtaaatatgtgaagaaaaagacctgcatttggcaggaagatgtatgctttgaatgcaaaagaaatttagagtcaatttgctgaaaacattacatgctcagcttggttttggacaagcctgtccattgggcaggacctagctgttgtaaagaattggtcttaatgttgaatgtattttggttgctgatgtttataaactgagaggtcacaaagaatctatcactaaaaatttttacaaaactgccaaaaatataattcttagtggaagacaatactccctttaaagagagtttgccactcccctaaactccaggatttataaagcaaattactccaaggtttataaagcagattacctcttgcccttgggtgctatctagcagtaaaagataaatttgttgaatattggtaattaaaagactccacataagtccattaactgctttccacccagcttcaaagcttaaaaagagctcaggcttttccaggaagatccaggagggctaattagaaatcaacttgtggttgaccgcttgtttcttgttattaccaaaacaggaggggaaaaaattaactgctccaaatttaaccataaatcaattcatgtttaacgtttctcattaaaatccagtattatattatcatatctctctttacttcccagtataagatttttgaaaatcctgaataaaccagtatcgttactggcacctgaaattaatttgtgaatttgcaacagtaatcagagttaccattatttaatttgtatgctaaatgaggaggtacattgaaaccctccaaatctccagtctcatctatgtcatattttgccactgcctttcagaagtgatttagttgtggaaagataataaattgatttgttatggttacatatttagcgcacccagagaaaattaattatatttctacagagaaaatgaatttgggatactaaagtagtttaagtctcctttactgaatgtaagggggggatcgaaaagaaggtatttttccaatcacagtgttatgtagtattgttctatttttgtttacaaacatggaaaacagagtatttctggcagctgtggtacaaatgtgataatatattgctaaaatattttagatgttattatgctaatatagtaggggttgaagaaaacaaaatagcttattatagaattgcacatagttctgcccaaattatgtgaaatgcttatgcttgtgtatatgtataaattaatacagagtacgttaaaagcaaaaagatgtatatttgcatatttttctaaagaaatatattattcatcttttcattc

SEQ ID NO: 63374 - DNA, 1774 bp, Artificial Sequence
  derived and/or modified sequence
agttataagagacaggaataccagtgagaagtatgagagagtgggtgggagataatgtttagaatctcttttgctgcccgcaatttatgaaaatggcttgaaaatatttatggtcaaagaccgaaatatttcttcaaagaagattagctttgctccattaaaagtaatgagtagaaatattaaaaaaaaaaaaagttttaagtacctgagtatcttgccagcaactgaccaccactgctaaaagtgaggagagacacagctttcatcattgggactgcagtttatttcaggacaaagagatcttcaaaaatcaaaaatgaggttcacatttacaagccggtgcttggcactgtttcttcttctaaatcacccaaccccaattcttcctgccttttcaaatcaaacctatccaacaatagagcccaagccatttctttacgtcgtaggacgaaagaagatgatggatgcacagtacaaatgctatgaccgaatgcagcagttacccgcataccaaggagaaggtccatattgcaatcgcacctgggatggatggctgtgctgggatgacacaccggctggagtattgtcctatcagttctgcccagattattttccggattttgatccatcagaaaaggttacaaaatactgtgatgaaaaaggtgtttggtttaaacatcctgaaaacaatcgaacctggtccaactatactatgtgcaatgctttcactcctgagaaactgaagaatgcatatgttctgtactatttggctattgtgggtcattctttgtcaattttcaccctagtgatttccctggggattttcgtgtttttcaggagccttggctgccaaagggtaaccctgcacaagaacatgtttcttacttacattctgaattctatgattatcatcatccacctggttgaagtagtacccaatggagagctcgtgcgaagggacccggtgagctgcaagattttgcattttttccaccagtacatgatggcctgcaactatttctggatgctctgtgaagggatctatcttcatacactcattgtcgtggctgtgtttactgagaagcaacgcttgcggtggtattatctcttgggctgggggttcccgctggtgccaaccactatccatgctattaccagggccgtgtacttcaatgacaactgctggctgagtgtggaaacccatttgctttacataatccatggacctgtcatggcggcacttgtggtcaatttcttctttttgctcaacattgtccgggtgcttgtgaccaaaatgagggaaacccatgaggcggaatcccacatgtacctgaaggctgtgaaggccaccatgatccttgtgcccctgctgggaatccagtttgtcgtctttccctggagaccttccaacaagatgcttgggaagatatatgattacgtgatgcactctctgattcatttccagggcttctttgttgcgaccatctactgcttctgcaacaatgaggtccaaaccaccgtgaagcgccaatgggcccaattcaaaattcagtggaaccagcgttgggggaggcgcccctccaaccgctctgctcgcgctgcagccgctgctgcggaggctggcgacatcccaatttacatctgccatcaggagctgaggaatgaaccagccaacaaccaaggcgaggagagtgctgagatcatccctttgaatatcatagagcaagagtcatctgcttgaatgtgaagcaaacacagcatcgtgatcactgag

SEQ ID NO: 63375 - DNA, 3626 bp, Artificial Sequence
  derived and/or modified sequence
gggctgcgccgcgcggctggcggaccttcccgggttggagaagtgcgcacgtccgcacctcaccctgcggctgacatctcctgcccaggagatgggcgctgaagcttgagcgcctgagtccctggagccacacctgcgaacaccctttgcttctattgagctgtgcccagccgcccagtgacagaattccagaataaatgattcccactgatccacccacttttgccaccccaggatgcaattttctggagagaagattagtggacaaagagatcttcaaaaatcaaaaatgaggttcacatttacaagccggtgcttggcactgtttcttcttctaaatcacccaaccccaattcttcctgccttttcaaatcaaacctatccaacaatagagcccaagccatttctttacgtcgtaggacgaaagaagatgatggatgcacagtacaaatgctatgaccgaatgcagcagttacccgcataccaaggagaaggtccatattgcaatcgcacctgggatggatggctgtgctgggatgacacaccggctggagtattgtcctatcagttctgcccagattattttccggattttgatccatcagaaaaggttacaaaatactgtgatgaaaaaggtgtttggtttaaacatcctgaaaacaatcgaacctggtccaactatactatgtgcaatgctttcactcctgagaaactgaagaatgcatatgttctgtactatttggctattgtgggtcattctttgtcaattttcaccctagtgatttccctggggattttcgtgtttttcagaaaattgacaactatttttcctttgaattggaaatataggaaggcattgagccttggctgccaaagggtaaccctgcacaagaacatgtttcttacttacattctgaattctatgattatcatcatccacctggttgaagtagtacccaatggagagctcgtgcgaagggacccggtgagctgcaagattttgcattttttccaccagtacatgatggcctgcaactatttctggatgctctgtgaagggatctatcttcatacactcattgtcgtggctgtgtttactgagaagcaacgcttgcggtggtattatctcttgggctgggggttcccgctggtgccaaccactatccatgctattaccagggccgtgtacttcaatgacaactgctggctgagtgtggaaacccatttgctttacataatccatggacctgtcatggcggcacttgtggtcaatttcttctttttgctcaacattgtccgggtgcttgtgaccaaaatgagggaaacccatgaggcggaatcccacatgtacctgaaggctgtgaaggccaccatgatccttgtgcccctgctgggaatccagtttgtcgtctttccctggagaccttccaacaagatgcttgggaagatatatgattacgtgatgcactctctgattcatttccagggcttctttgttgcgaccatctactgcttctgcaacaatgaggtccaaaccaccgtgaagcgccaatgggcccaattcaaaattcagtggaaccagcgttgggggaggcgcccctccaaccgctctgctcgcgctgcagccgctgctgcggaggctggcgacatcccaatttacatctgccatcaggagctgaggaatgaaccagccaacaaccaaggcgaggagagtgctgagatcatccctttgaatatcatagagcaagagtcatctgcttgaatgtgaagcaaacacagcatcgtgatcactgagccatcatttcctgggagaaagaccatgcatttaaagtattctccatcctcccaggaaccgaacatatcatttgtgaagaattattcagtgaatttgtccattgtaaatctgaagaaagttattcttggtactgttgctttgggagacagtctaggaatggagtctcccactgcaacttgtgaactccatcattcatccaggactgagatgcaaatgtcacagtaatgcaagcaaagtatcaaagaaaaacaatgaaattgacctagttcagatacagggtgctccttgtcaatactgagccatttatacctttgaaatattaaaatcactgtcaatatttttatttttaactctggattttgaattagattatttctgtatttggctatggatctgatttttaatttttttaaatttcagtcaattctgatgttactgagatgttttaccatccttacaatgtaaaccacatgaactacgtgacctctgcaagacaaagcggctttctaatagagagattagtaaatatgtgaagaaaaagacctgcatttggcaggaagatgtatgctttgaatgcaaaagaaatttagagtcaatttgctgaaaacattacatgctcagcttggttttggacaagcctgtccattgggcaggacctagctgttgtaaagaattggtcttaatgttgaatgtattttggttgctgatgtttataaactgagaggtcacaaagaatctatcactaaaaatttttacaaaactgccaaaaatataattcttagtggaagacaatactccctttaaagagagtttgccactcccctaaactccaggatttataaagcaaattactccaaggtttataaagcagattacctcttgcccttgggtgctatctagcagtaaaagataaatttgttgaatattggtaattaaaagactccacataagtccattaactgctttccacccagcttcaaagcttaaaaagagctcaggcttttccaggaagatccaggagggctaattagaaatcaacttgtggttgaccgcttgtttcttgttattaccaaaacaggaggggaaaaaattaactgctccaaatttaaccataaatcaattcatgtttaacgtttctcattaaaatccagtattatattatcatatctctctttacttcccagtataagatttttgaaaatcctgaataaaccagtatcgttactggcacctgaaattaatttgtgaatttgcaacagtaatcagagttaccattatttaatttgtatgctaaatgaggaggtacattgaaaccctccaaatctccagtctcatctatgtcatattttgccactgcctttcagaagtgatttagttgtggaaagataataaattgatttgttatggttacatatttagcgcacccagagaaaattaattatatttctacagagaaaatgaatttgggatactaaagtagtttaagtctcctttactgaatgtaagggggggatcgaaaagaaggtatttttccaatcacagtgttatgtagtattgttctatttttgtttacaaacatggaaaacagagtatttctggcagctgtggtacaaatgtgataatatattgctaaaatattttagatgttattatgctaatatagtaggggttgaagaaaacaaaatagcttattatagaattgcacatagttctgcccaaattatgtgaaatgcttatgcttgtgtatatgtataaattaatacagagtacgttaaaagcaaaaagatgtatatttgcatatttttctaaagaaatatattattcatctttt

SEQ ID NO: 63376 - DNA, 1523 bp, Artificial Sequence
  derived and/or modified sequence
atgaggttcacatttacaagccggtgcttggcactgtttcttcttctaaatcacccaaccccaattcttcctgccttttcaaatcaaacctatccaacaatagagcccaagccatttctttacgtcgtaggacgaaagaagatgatggatgcacagtacaaatgctatgaccgaatgcagcagttacccgcataccaaggagaaggtccatattgcaatcgcacctgggatggatggctgtgctgggatgacacaccggctggagtattgtcctatcagttctgcccagattattttccggattttgatccatcagaaaaggttacaaaatactgtgatgaaaaaggtgtttggtttaaacatcctgaaaacaatcgaacctggtccaactatactatgtgcaatgctttcactcctgagaaactgaagaatgcatatgttctgtactatttggctattgtgggtcattctttgtcaattttcaccctagtgatttccctggggattttcgtgtttttcagaaaattgacaactatttttcctttgaattggaaatataggaaggcattgagccttggctgccaaagggtaaccctgcacaagaacatgtttcttacttacattctgaattctatgattatcatcatccacctggttgaagtagtacccaatggagagctcgtgcgaagggacccggtgagctgcaagattttgcattttttccaccagtacatgatggcctgcaactatttctggatgctctgtgaagggatctatcttcatacactcattgtcgtggctgtgtttactgagaagcaacgcttgcggtggtattatctcttgggctgggccccagccttccacagagactaatctttcctttccctggccttctcatccggttcccgctggtgccaaccactatccatgctattaccagggccgtgtacttcaatgacaactgctggctgagtgtggaaacccatttgctttacataatccatggacctgtcatggcggcacttgtggtcaatttcttctttttgctcaacattgtccgggtgcttgtgaccaaaatgagggaaacccatgaggcggaatcccacatgtacctgaaggctgtgaaggccaccatgatccttgtgcccctgctgggaatccagtttgtcgtctttccctggagaccttccaacaagatgcttgggaagatatatgattacgtgatgcactctctgattcatttccagggcttctttgttgcgaccatctactgcttctgcaacaatgaggtccaaaccaccgtgaagcgccaatgggcccaattcaaaattcagtggaaccagcgttgggggaggcgcccctccaaccgctctgctcgcgctgcagccgctgctgcggaggctggcgacatcccaatttacatctgccatcaggagctgaggaatgaaccagccaacaaccaaggcgaggagagtgctgagatcatccctttgaatatcatagagcaagagtcatctgcttga

SEQ ID NO: 63377 - DNA, 1741 bp, Artificial Sequence
  derived and/or modified sequence
agcttcacagctgggagagcgcaggaaggcgccgggaaggaaagccagcccaccagcgtctgggtgggctgcgccgcgcggctggcggaccttcccgggttggagaagtgcgcacgtccgcacctcaccctgcggctgacatctcctgcccaggagatgggcgctgaagcttgagcgcctgagtccctggagccacacctgcgaacaccctttgcttctattgagctgtgcccagccgcccagtgacagaattccaggacaaagagatcttcaaaaatcaaaaatgaggttcacatttacaagccggtgcttggcactgtttcttcttctaaatcacccaaccccaattcttcctgccttttcaaatcaaacctatccaacaatagagcccaagccatttctttacgtcgtaggacgaaagaagatgatggatgcacagtacaaatgctatgaccgaatgcagcagttacccgcataccaaggagaaggtccatattgcaatcgcacctgggatggatggctgtgctgggatgacacaccggctggagtattgtcctatcagttctgcccagattattttccggattttgatccatcagaaaaggttacaaaatactgtgatgaaaaaggtgtttggtttaaacatcctgaaaacaatcgaacctggtccaactatactatgtgcaatgctttcactcctgagaaactgaagaatgcatatgttctgtactatttggctattgtgggtcattctttgtcaattttcaccctagtgatttccctggggattttcgtgtttttcaggagccttggctgccaaagggtaaccctgcacaagaacatgtttcttacttacattctgaattctatgattatcatcatccacctggttgaagtagtacccaatggagagctcgtgcgaagggacccggtgagctgcaagattttgcattttttccaccagtacatgatggcctgcaactatttctggatgctctgtgaagggatctatcttcatacactcattgtcgtggctgtgtttactgagaagcaacgcttgcggtggtattatctcttgggctgggggttcccgctggtgccaaccactatccatgctattaccagggccgtgtacttcaatgacaactgctggctgagtgtggaaacccatttgctttacataatccatggacctgtcatggcggcacttgtggtcaatttcttctttttgctcaacattgtccgggtgcttgtgaccaaaatgagggaaacccatgaggcggaatcccacatgtacctgaaggctgtgaaggccaccatgatccttgtgcccctgctgggaatccagtttgtcgtctttccctggagaccttccaacaagatgcttgggaagatatatgattacgtgatgcactctctgattcatttccagggcttctttgttgcgaccatctactgcttctgcaacaatgaggtccaaaccaccgtgaagcgccaatgggcccaattcaaaattcagtggaaccagcgttgggggaggcgcccctccaaccgctctgctcgcgctgcagccgctgctgcggaggctggcgacatcccaatttacatctgccatcaggagctgaggaatgaaccagccaacaaccaaggcgaggagagtgctgagatcatccctttgaatatcatagagcaagagtcatctgcttgaatgtgaagcaaacacagcatcgtgatcactgag

SEQ ID NO: 63378 - DNA, 1502 bp, Artificial Sequence
  derived and/or modified sequence
ttctaggacaaagagatcttcaaaaatcaaaaatgaggttcacatttacaagccggtgcttggcactgtttcttcttctaaatcacccaaccccaattcttcctgccttttcaaatcaaacctatccaacaatagagcccaagccatttctttacgtcgtaggacgaaagaagatgatggatgcacagtacaaatgctatgaccgaatgcagcagttacccgcataccaaggagaaggtccatattgcaatcgcacctgggatggatggctgtgctgggatgacacaccggctggagtattgtcctatcagttctgcccagattattttccggattttgatccatcagaaaaggttacaaaatactgtgatgaaaaaggtgtttggtttaaacatcctgaaaacaatcgaacctggtccaactatactatgtgcaatgctttcactcctgagaaactgaagaatgcatatgttctgtactatttggctattgtgggtcattcttgtcaattttcaccctagtgatttccctggggattttcgtgtttttcaggagccttggctgccaaagggtaaccctgcacaagaacatgtttcttacttacattctgaattctatgattatcatcatccacctggttgaagtagtacccaatggagagctcgtgcgaagggacccggtgagctgcaagattttgcattttttccaccagtacatgatggcctgcaactatttctggatgctctgtgaagggatctatcttcatacactcattgtcgtggctgtgtttactgagaagcaacgcttgcggtggtattatctcttgggctgggggttcccgctggtgccaaccactatccatgctattaccagggccgtgtacttcaatgacaactgctggctgagtgtggaaacccatttgctttacataatccatggacctgtcatggcggcacttgtggtcaatttcttctttttgctcaacattgtccgggtgcttgtgaccaaaatgagggaaacccatgaggcggaatcccacatgtacctgaaggctgtgaaggccaccatgatccttgtgcccctgctgggaatccagtttgtcgtctttccctggagaccttccaacaagatgcttgggaagatatatgattacgtgatgcactctctgattcatttccagggcttctttgttgcgaccatctactgcttctgcaacaatgaggtccaaaccaccgtgaagcgccaatgggcccaattcaaaattcagtggaaccagcgttgggggaggcgcccctccaaccgctctgctcgcgctgcagccgctgctgcggaggctggcgacatcccaatttacatctgccatcaggagctgaggaatgaaccagccaacaaccaaggcgaggagagtgctgagatcatccctttgaatatcatagagcaagagtcatctgcttgaatgtgaagcaaacacagcatcgtgatcactgagccatcatttcctg

SEQ ID NO: 63379 - DNA, 1527 bp, Artificial Sequence
  derived and/or modified sequence
atgcagttcagcggcgagaagatcagcggccagagagacctgcagaagagcaagatgagattcaccttcaccagcagatgcctggccctgttcctgctgctgaaccaccccacccccatcctgcccgccttcagcaaccagacctaccccaccatcgagcccaagcccttcctgtacgtggtgggcagaaagaagatgatggacgcccagtacaagtgctacgacagaatgcagcagctgcccgcctaccagggcgagggcccctactgcaacagaacctgggacggctggctgtgctgggacgacacccccgccggcgtgctgagctaccagttctgccccgactacttccccgacttcgaccccagcgagaaggtgaccaagtactgcgacgagaagggcgtgtggttcaagcaccccgagaacaacagaacctggagcaactacaccatgtgcaacgccttcacccccgagaagctgaagaacgcctacgtgctgtactacctggccatcgtgggccacagcctgagcatcttcaccctggtgatcagcctgggcatcttcgtgttcttcagaaagctgaccaccatcttccccctgaactggaagtacagaaaggccctgagcctgggctgccagagagtgaccctgcacaagaacatgttcctgacctacatcctgaacagcatgatcatcatcatccacctggtggaggtggtgcccaacggcgagctggtgagaagagaccccgtgagctgcaagatcctgcacttcttccaccagtacatgatggcctgcaactacttctggatgctgtgcgagggcatctacctgcacaccctgatcgtggtggccgtgttcaccgagaagcagagactgagatggtactacctgctgggctggggcttccccctggtgcccaccaccatccacgccatcaccagagccgtgtacttcaacgacaactgctggctgagcgtggagacccacctgctgtacatcatccacggccccgtgatggccgccctggtggtgaacttcttcttcctgctgaacatcgtgagagtgctggtgaccaagatgagagagacccacgaggccgagagccacatgtacctgaaggccgtgaaggccaccatgatcctggtgcccctgctgggcatccagttcgtggtgttcccctggagacccagcaacaagatgctgggcaagatctacgactacgtgatgcacagcctgatccacttccagggcttcttcgtggccaccatctactgcttctgcaacaacgaggtgcagaccaccgtgaagagacagtgggcccagttcaagatccagtggaaccagagatggggcagaagacccagcaacagaagcgccagagccgccgccgccgccgccgaggccggcgacatccccatctacatctgccaccaggagctgagaaacgagcccgccaacaaccagggcgaggagagcgccgagatcatccccctgaacatcatcgagcaggagagcagcgcctag

SEQ ID NO: 63380 - DNA, 1473 bp, Artificial Sequence
  derived and/or modified sequence
atgagattcaccttcaccagcagatgcctggccctgttcctgctgctgaaccaccccacccccatcctgcccgccttcagcaaccagacctaccccaccatcgagcccaagcccttcctgtacgtggtgggcagaaagaagatgatggacgcccagtacaagtgctacgacagaatgcagcagctgcccgcctaccagggcgagggcccctactgcaacagaacctgggacggctggctgtgctgggacgacacccccgccggcgtgctgagctaccagttctgccccgactacttccccgacttcgaccccagcgagaaggtgaccaagtactgcgacgagaagggcgtgtggttcaagcaccccgagaacaacagaacctggagcaactacaccatgtgcaacgccttcacccccgagaagctgaagaacgcctacgtgctgtactacctggccatcgtgggccacagcctgagcatcttcaccctggtgatcagcctgggcatcttcgtgttcttcagaaagctgaccaccatcttccccctgaactggaagtacagaaaggccctgagcctgggctgccagagagtgaccctgcacaagaacatgttcctgacctacatcctgaacagcatgatcatcatcatccacctggtggaggtggtgcccaacggcgagctggtgagaagagaccccgtgagctgcaagatcctgcacttcttccaccagtacatgatggcctgcaactacttctggatgctgtgcgagggcatctacctgcacaccctgatcgtggtggccgtgttcaccgagaagcagagactgagatggtactacctgctgggctggggcttccccctggtgcccaccaccatccacgccatcaccagagccgtgtacttcaacgacaactgctggctgagcgtggagacccacctgctgtacatcatccacggccccgtgatggccgccctggtggtgaacttcttcttcctgctgaacatcgtgagagtgctggtgaccaagatgagagagacccacgaggccgagagccacatgtacctgaaggccgtgaaggccaccatgatcctggtgcccctgctgggcatccagttcgtggtgttcccctggagacccagcaacaagatgctgggcaagatctacgactacgtgatgcacagcctgatccacttccagggcttcttcgtggccaccatctactgcttctgcaacaacgaggtgcagaccaccgtgaagagacagtgggcccagttcaagatccagtggaaccagagatggggcagaagacccagcaacagaagcgccagagccgccgccgccgccgccgaggccggcgacatccccatctacatctgccaccaggagctgagaaacgagcccgccaacaaccagggcgaggagagcgccgagatcatccccctgaacatcatcgagcaggagagcagcgcctag

SEQ ID NO: 63381 - DNA, 873 bp, Artificial Sequence
  derived and/or modified sequence
atgagattcaccttcaccagcagatgcctggccctgttcctgctgctgaaccaccccacccccatcctgcccgccttcagcaaccagacctaccccaccatcgagcccaagcccttcctgtacgtggtgggcagaaagaagatgatggacgcccagtacaagtgctacgacagaatgcagcagctgcccgcctaccagggcgagggcccctactgcaacagaacctgggacggctggctgtgctgggacgacacccccgccggcgtgctgagctaccagttctgccccgactacttccccgacttcgaccccagcgagaaggtgaccaagtactgcgacgagaagggcgtgtggttcaagcaccccgagaacaacagaacctggagcaactacaccatgtgcaacgccttcacccccgagaagctgaagaacgcctacgtgctgtactacctggccatcgtgggccacagcctgagcatcttcaccctggtgatcagcctgggcatcttcgtgttcttcagaaagctgaccaccatcttccccctgaactggaagtacagaaaggccctgagcctgggctgccagagagtgaccctgcacaagaacatgttcctgacctacatcctgaacagcatgatcatcatcatccacctggtggaggtggtgcccaacggcgagctggtgagaagagaccccgtgagctgcaagatcctgcacttcttccaccagtacatgatggcctgcaactacttctggatgctgtgcgagggcatctacctgcacaccctgatcgtggtggccgtgttcaccgagaagcagagactgagatggtactacctgctgggctgggcccccgccttccacagagactag

SEQ ID NO: 63382 - protein, 474 aa, Artificial Sequence
  derived and/or modified sequence
MRFTFTSRCLALFLLLNHPTPILPAFSNQTYPTIEPKPFLYVVGRKKMMDAQYKCYDRMQQLPAYQGEGPYCNRTWDGWLCWDDTPAGVLSYQFCPDYFPDFDPSEKVTKYCDEKGVWFKHPENNRTWSNYTMCNAFTPEKLKNAYVLYYLAIVGHSLSIFTLVISLGIFVFFRSLGCQRVTLHKNMFLTYILNSMIIIIHLVEVVPNGELVRRDPVSCKILHFFHQYMMACNYFWMLCEGIYLHTLIVVAVFTEKQRLRWYYLLGWGFPLVPTTIHAITRAVYFNDNCWLSVETHLLYIIHGPVMAALVVNFFFLLNIVRVLVTKMRETHEAESHMYLKAVKATMILVPLLGIQFVVFPWRPSNKMLGKIYDYVMHSLIHFQGFFVATIYCFCNNEVQTTVKRQWAQFKIQWNQRWGRRPSNRSARAAAAAAEAGDIPIYICHQELRNEPANNQGEESAEIIPLNIIEQESSA

SEQ ID NO: 63383 - protein, 274 aa, Artificial Sequence
  derived and/or modified sequence
MRFTFTSRCLALFLLLNHPTPILPAFSNQTYPTIEPKPFLYVVGRKKMMDAQYKCYDRMQQLPAYQGEGPYCNRTWDGWLCWDDTPAGVLSYQFCPDYFPDFDPSEKVTKYCDEKGVWFKHPENNRTWSNYTMCNAFTPEKLKNAYVLYYLAIVGHSLSIFTLVISLGIFVFFRSLGCQRVTLHKNMFLTYILNSMIIIIHLVEVVPNGELVRRDPVSCKILHFFHQYMMACNYFWMLCEGIYLHTLIVVAVFTEKQRLRWYYLLGWAPAFHRD

SEQ ID NO: 63384 - DNA, 1425 bp, Artificial Sequence
  derived and/or modified sequence
atgcggtttacttttacttccagatgtctagccctgtttctgctattgaaccaccctacaccaatcctgcccgcattttcaaatcagacctaccccaccatagaacctaagccattcctgtacgtagtaggtaggaagaagatgatggatgcccagtataaatgctacgaccggatgcagcagctccccgcctaccagggagagggcccttattgtaacagaacctgggacgggtggctgtgctgggatgatacaccagctggggtgctttcttaccagttctgcccggattactttcctgacttcgatcccagtgagaaggtgacaaaatactgtgatgagaagggtgtgtggttcaagcatccagaaaacaaccgtacgtggtctaattacactatgtgcaacgccttcacaccagagaaactcaagaatgcatacgtgctgtactatctggccattgtgggacatagtctctccatctttacactcgtgatatcactggggattttcgtgtttttcagatccctgggctgccagcgcgttactctgcataaaaacatgtttctaacttatattctgaatagcatgatcatcattatacatctggttgaagtcgtgcccaatggagagctggtgcggcgcgatcccgtatcctgcaagatattacactttttccatcagtacatgatggcctgcaactatttttggatgctatgtgaggggatttatctgcataccctgatcgtggtagcggtgttcaccgaaaaacagagacttcggtggtactacctgcttgggtgggggttcccattggttcctaccactatacatgcaatcactcgcgctgtttattttaatgacaactgctggctgtcggtggagactcacctgctatacataattcacggacctgttatggccgcccttgttgtgaatttttttttccttttaaacatagtgcgtgtcctcgtgaccaaaatgcgcgagacccacgaggccgaatcccacatgtacttaaaggccgtgaaggccactatgatcctggtgccacttctgggtatccaattcgtggtctttccgtggaggccctctaataaaatgctgggcaaaatctacgactatgtaatgcatagcctaattcacttccaagggttctttgttgctactatctactgcttttgtaacaacgaggttcaaaccaccgtgaaaaggcagtgggcccagtttaagattcagtggaatcaacggtggggaagaagaccctccaatcgcagcgctcgcgcagcggctgcagccgccgaggccggcgatattccaatctacatttgtcatcaggagctaagaaatgaaccagcaaacaatcaaggcgaggagtccgcggagatcatcccactgaatataatcgaacaggaaagcagcgcttag

SEQ ID NO: 63385 - DNA, 825 bp, Artificial Sequence
  derived and/or modified sequence
atgcgttttacctttacgtcgagatgtttagccctcttcctgctgctcaatcatcctacacccatcctgccagcctttagtaaccagacctaccccactattgaaccaaagccttttctctacgtggtggggcgcaaaaaaatgatggatgcacagtataagtgctacgatagaatgcagcagttgccggcataccagggcgaaggtccctattgtaaccggacctgggacgggtggctgtgttgggacgacacccccgctggcgtccttagctatcagttctgtcccgactactttccagactttgaccctagcgagaaggtgacaaagtactgtgatgagaaaggggtttggttcaagcacccagaaaacaatcgtacttggtctaactatacaatgtgcaacgcgtttacaccagaaaagctaaagaacgcctacgtcctctactacctggcaatcgtggggcactctctgagcattttcaccctggttatctcactcggaatcttcgtgttctttagatcactggggtgccagcgagttacactgcacaagaatatgtttctgacctatatccttaattccatgattatcatcatccatctcgttgaagtagtgcctaacggagaactggtccgacgcgatccagtgtcctgcaagatcttgcacttcttccatcaatacatgatggcctgtaattatttctggatgctatgcgaaggaatatatctacacacgcttatcgtcgtggccgttttcactgagaaacagcgactgaggtggtactacttgctgggttgggcccctgcattccatagggactag

SEQ ID NO: 63386 - DNA, 1425 bp, Artificial Sequence
  derived and/or modified sequence
atgcggttcacatttaccagtagatgcttggcactgtttctgttgttgaaccaccctactcccattctgcctgcctttagtaaccagacttatcccaccatcgagcccaaaccctttttatacgtggtcgggagaaagaagatgatggatgcccagtataaatgctacgataggatgcagcagctgccagcttaccagggcgaggggccctattgcaaccggacctgggatgggtggctttgttgggacgacacacctgccggcgtactcagctatcagttctgtcccgattatttcccagatttcgatccttctgaaaaggttactaagtactgtgatgagaagggcgtgtggttcaaacaccccgagaataatcgtacttggagtaactataccatgtgcaatgctttcacgcccgagaagctgaagaacgcttacgtgttgtactatttagcaatcgtgggtcattctctgagtattttcacccttgtgatttctttgggcattttcgtgttcttccgaagcctgggatgtcagagggtgaccctgcataaaaatatgttcctgacatacattctgaacagcatgatcataattatccatctggtcgaggtggtcccaaacggtgaacttgtacggcgcgaccccgtgagctgcaagatcctgcatttcttccatcagtatatgatggcctgcaattatttctggatgctgtgcgagggaatttatctgcacacattgattgtcgtggccgtgtttaccgaaaaacagcggctacggtggtattacctgcttggctgggggttccccctggttcctactacaatccacgcgattacgcgggcggtttattttaatgataactgctggctatccgtagagacccatctattatatataatccacggtcctgtcatggctgctctggtcgtgaactttttctttctcctgaacatcgtcagagtcctggttacaaagatgagagagactcatgaggccgaatcccatatgtatctgaaagctgttaaagccacaatgattcttgtgcccctgctgggcattcagtttgttgttttcccatggagaccgtccaataagatgttggggaagatttacgattatgtaatgcatagtctgatccactttcaaggcttcttcgtcgcgaccatctactgtttttgtaacaatgaagttcaaacgaccgtgaagcggcagtgggctcagttcaagattcaatggaaccaacggtggggcagaaggccctccaataggtccgcccgcgcggcagccgccgctgccgaagctggcgacatccccatatatatctgtcatcaggagctgagaaacgaaccagctaataaccagggggaagaatctgccgagattattccgctgaacatcattgagcaagaatcgagtgcttag

SEQ ID NO: 63387 - DNA, 489 bp, Artificial Sequence
  derived and/or modified sequence
atgagattcacgttcacttcccggtgcttagctctttttttactcctgaatcacccaacccccatcctccctgccttcagtaatcagacctatccaacaatcgagcctaaaccgttcctctacgtggtgggtagaaaaaaaatgatggacgcacagtacaagtgctacgaccgcatgcagcaattaccggcataccagggagaaggaccatattgcaaccgcacgtgggacggctggttgtgctgggatgacacgcccgcaggagttttatcatatcagttctgccccgactactttcccgatttcgatccaagcgagaaagtcactaagtactgcgacgaaaaaggcgtgtggttcaaacaccccgaaaataataggacgtggtccaattatactatgtgcaacgccttcacccccgaaaaactgaagaacgcctacgtcctctactatctggcgattgtcggacactcctgtcagttcagcccttag

SEQ ID NO: 63388 - DNA, 1425 bp, Artificial Sequence
  derived and/or modified sequence
atgaggttcaccttcaccagccgctgcctggccctcttcctgctgctgaaccaccccacccccatcctgcctgccttcagcaaccagacctaccccaccatcgagcccaagcccttcctgtatgtggtgggcaggaagaagatgatggatgcccagtacaagtgctatgacaggatgcagcagctgcctgcctaccagggcgagggcccctactgcaacagaacctgggatggctggctgtgctgggatgacaccccagctggggtgctgagctaccagttctgcccagactacttcccagactttgaccccagcgagaaggtgaccaagtactgtgatgagaagggcgtgtggttcaagcaccctgagaacaacagaacctggagcaactacaccatgtgcaatgccttcaccccagagaagctgaagaatgcctacgtgctgtactacctggccatcgtgggccacagcctgagcatcttcaccctggtgatcagcctgggcatctttgtgttcttccgcagcctgggctgccagagggtgaccctgcacaagaacatgttcctgacctacatcctgaacagcatgatcatcatcatccacctggtggaggtggtgcccaacggggagctggtgagaagagatcctgtgtcctgcaagatcctgcacttcttccaccagtacatgatggcctgcaactacttctggatgctgtgtgagggcatctacctgcacaccctcatcgtggtggccgtgttcacagagaagcagaggctgcgctggtactacctgctgggctggggcttccccctggtgcccaccaccatccacgccatcaccagggctgtgtacttcaatgacaactgctggctgtctgtggagacccacctgctgtacatcatccacggccctgtgatggccgccctggtggtgaacttcttcttcctgctgaacatcgtgcgggtgctggtgaccaagatgagggagacccatgaagctgagagccacatgtacctgaaggctgtgaaggccaccatgatcctggtgcccctgctgggcatccagtttgtggtgttcccctggaggcccagcaacaagatgctgggcaagatctatgactatgtgatgcacagcctcatccacttccagggcttctttgtggccaccatctactgcttctgcaacaatgaggtgcagaccaccgtgaagaggcagtgggcccagttcaagatccagtggaaccagcgctggggcagaagacccagcaacagaagtgcccgggctgctgctgctgctgctgaggccggggacatccccatctacatctgccaccaggagctgagaaatgaaccagccaacaaccagggcgaggagagcgctgagatcatccccctgaacatcatcgagcaggagagcagcgcctag

SEQ ID NO: 63389 - DNA, 825 bp, Artificial Sequence
  derived and/or modified sequence
atgaggttcaccttcaccagccgctgcctggccctcttcctgctgctgaaccaccccacccccatcctgcctgccttcagcaaccagacctaccccaccatcgagcccaagcccttcctgtatgtggtgggcaggaagaagatgatggatgcccagtacaagtgctatgacaggatgcagcagctgcctgcctaccagggcgagggcccctactgcaacagaacctgggatggctggctgtgctgggatgacaccccagctggggtgctgagctaccagttctgcccagactacttcccagactttgaccccagcgagaaggtgaccaagtactgtgatgagaagggcgtgtggttcaagcaccctgagaacaacagaacctggagcaactacaccatgtgcaatgccttcaccccagagaagctgaagaatgcctacgtgctgtactacctggccatcgtgggccacagcctgagcatcttcaccctggtgatcagcctgggcatctttgtgttcttccgcagcctgggctgccagagggtgaccctgcacaagaacatgttcctgacctacatcctgaacagcatgatcatcatcatccacctggtggaggtggtgcccaacggggagctggtgagaagagatcctgtgtcctgcaagatcctgcacttcttccaccagtacatgatggcctgcaactacttctggatgctgtgtgagggcatctacctgcacaccctcatcgtggtggccgtgttcacagagaagcagaggctgcgctggtactacctgctgggctgggccccagccttccaccgggactag

SEQ ID NO: 63390 - DNA, 489 bp, Artificial Sequence
  derived and/or modified sequence
atgaggttcaccttcaccagccgctgcctggccctcttcctgctgctgaaccaccccacccccatcctgcctgccttcagcaaccagacctaccccaccatcgagcccaagcccttcctgtatgtggtgggcaggaagaagatgatggatgcccagtacaagtgctatgacaggatgcagcagctgcctgcctaccagggcgagggcccctactgcaacagaacctgggatggctggctgtgctgggatgacaccccagctggggtgctgagctaccagttctgcccagactacttcccagactttgaccccagcgagaaggtgaccaagtactgtgatgagaagggcgtgtggttcaagcaccctgagaacaacagaacctggagcaactacaccatgtgcaatgccttcaccccagagaagctgaagaatgcctacgtgctgtactacctggccatcgtgggccacagctgccagttcagcccctag

SEQ ID NO: 63391 - DNA, 1425 bp, Artificial Sequence
  derived and/or modified sequence
atgcggttcaccttcaccagccggtgcctggccctgttcctgctgcttaaccatccaacacctattctgccagctttcagtaaccagacctatcccacaatcgaacccaaaccgttcctatacgtcgttggcaggaagaaaatgatggatgcccaatacaagtgctacgatcggatgcagcagttgccggcatatcagggcgaggggccctactgtaatagaacttgggacggctggctatgctgggacgatacccccgcaggcgtgctgtcatatcagttttgtccagattacttccctgatttcgacccttctgaaaaggtcaccaaatattgtgatgagaagggggtctggttcaaacatccagaaaataaccgcacctggtccaattacactatgtgtaatgcgtttacccctgagaagctgaagaatgcctatgtactgtattatctcgcgatcgtgggccactctttgagtatattcactctcgtcatcagtctgggcatttttgtcttcttccgctccctaggttgtcagagggtaaccctacacaagaacatgtttctgacatacattctgaattcaatgattattataattcatttagtcgaggttgttcccaatggcgagctggtccgcagagacccagtgagttgtaagattctgcacttcttccatcaatacatgatggcctgcaattatttctggatgctgtgcgaaggcatctatttgcatacgttgatcgtggtggctgtattcacggagaagcagcggcttcggtggtactatctcctcggatgggggttccccctggtaccaacaaccatccacgcaatcacacgggctgtgtatttcaacgacaattgctggctgtctgtagagacccacctgctgtacatcattcatggaccggtgatggccgcccttgtggtgaacttcttcttcctgcttaacatcgtgagggtattagtgaccaagatgagggaaactcacgaggccgagagtcatatgtatctgaaagcggtcaaggcaaccatgattctggtgccattgctggggattcagtttgttgtgttcccctggcgtccatccaacaagatgctaggaaagatctacgattatgtgatgcacagcctcattcactttcaaggtttttttgtagctacaatctattgcttttgtaacaatgaggttcagacaaccgtgaagcgccagtgggcacaattcaagatacagtggaatcagcgatggggaaggagaccatccaaccgcagcgcaagagctgcagccgcagcagctgaggccggcgatatccccatctacatttgccatcaggagcttagaaacgagccagcaaacaaccaaggggaagagagcgccgaaatcatcccactgaacattattgagcaagagtcttccgcatag

SEQ ID NO: 63392 - DNA, 825 bp, Artificial Sequence
  derived and/or modified sequence
atgcggttcaccttcaccagccggtgcctggccctgttcctgctgctgaatcacccgacccccattctccccgctttttctaatcagacgtatcccaccatcgaacctaagccttttctctatgtggtcgggcgtaaaaaaatgatggatgcccagtacaagtgctacgatcgaatgcagcagctccctgcctatcaaggggagggcccgtactgcaaccggacgtgggacggatggctttgctgggatgatacgcccgccggtgtgctgtcctaccaattctgtcctgactattttcccgacttcgatccctccgagaaggtgacaaagtactgcgatgagaaaggcgtgtggtttaaacaccccgagaataatagaacatggtcaaactacacaatgtgtaatgccttcacccccgagaaactcaaaaatgcctatgttctctactatctcgccattgtaggacacagcctgtcaattttcacgctggttatcagccttggcattttcgtcttcttcagaagtctaggatgccagcgcgtgacactgcacaagaatatgttcctgacttacattctgaatagtatgatcataatcattcatctcgtggaagttgtgcctaatggcgagctcgttaggagagaccctgtgtcttgcaagatactgcacttttttcaccagtatatgatggcttgtaattatttttggatgctctgtgaagggatctacctgcacaccctgatcgtggtggccgtctttaccgagaagcagcggctaaggtggtattaccttttgggatgggccccagccttccaccgggactag

SEQ ID NO: 63393 - DNA, 1425 bp, Artificial Sequence
  derived and/or modified sequence
atgcggttcaccttcaccagccggtgcctggccctgttcctgctgctaaatcaccctacccctattctgcccgccttctccaatcagacatatcccactatagagcccaagccgtttctctacgtggtaggccgaaagaagatgatggacgctcagtataagtgctatgaccgtatgcaacagttacctgcataccagggcgaaggtccatactgcaaccgcacctgggatggttggctgtgctgggatgacacccctgccggagtgctcagctatcagttctgtcccgactattttccagatttcgatccgtctgagaaagtaacaaaatactgtgatgagaagggcgtctggtttaagcacccagaaaataatcgcacctggagtaactatacaatgtgcaacgcgttcacacctgaaaaactgaaaaacgcttatgtcctctattacttagcaattgtcggccactccctgagcatttttacactagtgataagtctggggatcttcgtcttcttccgcagcctgggttgccaaagggtgactctgcacaagaacatgttcctcacctacatcctgaactcgatgatcatcataatacacttggtggaggtggtaccaaatggagagttagtgcgacgtgatcctgtgagctgtaagatcctgcacttcttccaccagtatatgatggcttgcaattacttctggatgttgtgtgagggcatctatctgcatactcttatcgttgttgctgtttttacggaaaaacagaggctgcgttggtactacctgctgggctggggcttccctttggtacctacaaccatccatgcaatcacccgcgcggtttattttaatgacaattgctggctatccgtcgaaacgcatctgctctatattatccatgggccagtgatggcggctttggtcgttaatttcttctttcttctgaatatagttcgggtcctggttacaaagatgagggagacgcatgaagccgagagccatatgtatctcaaggctgtgaaggccacaatgatacttgtgccgctcctgggaattcaatttgtagtctttccctggcgcccatcaaataagatgctcggaaaaatctacgattatgttatgcactcactaatacatttccaaggtttttttgttgccactatatactgcttttgtaacaatgaagttcagacgacggtcaaacggcagtgggcccagttcaaaatacagtggaaccagaggtggggcaggcgtcctagcaatagaagcgcccgcgccgctgctgcagccgccgaagcgggtgatatcccaatctatatctgccaccaggaactgaggaacgagccggccaataatcaaggtgaagagtctgccgagatcatccctttaaacatcatcgaacaggaatctagcgcttag

SEQ ID NO: 63394 - DNA, 489 bp, Artificial Sequence
  derived and/or modified sequence
atgcggttcaccttcaccagccggtgcctggccctgttcctgctgctgaatcacccaactcccatcctcccagccttctctaatcagacgtatccaacaatagaaccaaaaccctttctttacgtcgtcgggcgaaagaagatgatggatgctcagtataaatgttatgataggatgcagcaactgcccgcttatcaaggtgagggaccatattgcaacagaacttgggatggatggctgtgctgggacgatacaccagccggcgttttgagctatcagttttgccctgattattttccagatttcgatcccagcgaaaaggttacgaaatactgcgacgagaaaggcgtgtggttcaaacaccctgaaaacaatagaacatggtccaattataccatgtgcaatgcctttactcctgagaagttaaagaacgcctacgtgctatattatctggcgattgtgggccattcttgccagtttagcccatag

SEQ ID NO: 63395 - DNA, 1425 bp, Artificial Sequence
  derived and/or modified sequence
atgcgcttcaccttcactagccgttgcctcgccctgttcctccttctgaatcacccaacccctatactgccagccttcagcaatcagacataccctactatagagcctaagccattcctgtacgtcgtgggcagaaaaaagatgatggatgcgcagtataagtgttatgaccgtatgcagcagctgcctgcctatcagggcgagggcccttactgcaaccggacttgggatggttggttgtgttgggacgacacaccagccggtgtcctcagttaccagttctgcccagattacttcccggactttgatcccagtgagaaagtcacaaagtattgtgacgagaaaggtgtttggttcaagcatcccgaaaataataggacgtggtctaactataccatgtgcaacgcctttacccccgaaaaactcaagaatgcgtacgttctgtattatttagccattgtcggccactccctgagtatatttaccctggtcatttccctcgggatttttgtcttcttcaggtcacttggctgccagcgtgttacgctgcataaaaacatgtttctgacgtacatcctcaactctatgattatcataattcatctggttgaggttgtgcctaacggcgagctggtgagacgtgatccagtgtcatgtaagattctgcattttttccaccagtacatgatggcgtgtaactacttttggatgctctgcgagggcatctacctacacactctgatcgtcgttgccgtgttcaccgagaaacagaggctgcgttggtattatttacttggatggggtttcccattagtacccaccacaatccatgcaatcactcgcgcagtttattttaatgataattgttggctgtcagtagagactcatctgctctacatcatccacggacccgtgatggctgccctcgttgtgaacttcttcttccttttaaacatcgtgcgagtccttgtgacgaagatgcgcgagacacatgaagccgaatcacatatgtatctcaaggccgttaaagccacaatgatcctggtgccacttttgggcattcagtttgtagtatttccctggaggccgagcaataaaatgcttggaaaaatatacgactacgtgatgcattctctgattcatttccagggattttttgttgccacgatttactgtttctgtaataacgaagtacagacgacggtcaaaaggcagtgggctcagtttaaaatccaatggaatcaacgttggggacgccgaccctccaatagatccgcacgcgcagccgctgccgctgcagaggccggagatattcccatatacatctgtcatcaggagctcagaaatgaacccgctaataaccagggcgaagaaagcgccgagattatcccactgaatattatcgagcaagaatcttctgcatag

SEQ ID NO: 63396 - DNA, 825 bp, Artificial Sequence
  derived and/or modified sequence
atgcggttcacgtttacttcccggtgtctagcccttttcctccttttaaaccaccctaccccaatattgcccgcattttctaaccagacttacccgacgattgagccaaaacccttcctctacgtagtgggcagaaagaagatgatggacgcccaatacaaatgctacgatagaatgcaacagctgcccgcatatcagggcgaaggaccctactgtaacaggacctgggatggctggttatgttgggatgatacccccgcaggcgttctgtcctaccagttctgtcccgattacttccccgatttcgacccgagcgagaaagttacaaaatactgcgatgaaaagggggtgtggttcaagcacccagagaataaccgaacttggtcgaattatactatgtgcaacgctttcacaccagagaaactgaagaatgcttacgtgctgtactaccttgcaatcgttggtcattctctgagtatttttactctggtgatttcactgggcattttcgtgttctttaggtcactagggtgtcaacgcgtgacgctgcacaagaacatgttcctgacatacatccttaacagcatgatcattattatccatttagtagaagtggttccaaatggagagctcgttagacgtgaccctgtttcatgcaaaattctccatttttttcaccagtacatgatggcatgtaattacttctggatgctgtgcgaggggatctatttgcatacactgatcgttgtggcagtcttcaccgaaaagcaacgtcttcgatggtactatttgctgggctgggctcctgccttccacagggattag

SEQ ID NO: 63397 - DNA, 1425 bp, Artificial Sequence
  derived and/or modified sequence
atgagatttactttcacatcacggtgcctcgccctgtttctgctacttaaccatccgacaccaattctgccagcgtttagtaaccagacctaccccactattgagcccaagccttttttgtacgtggtggggcgaaaaaagatgatggatgcccagtacaagtgttatgacaggatgcagcagctgcccgcatatcaaggagagggcccatactgcaatagaacctgggacggctggctctgctgggacgatacaccagcaggcgtgttgtcctaccaattttgccctgattactttcccgatttcgacccttcagagaaggttactaaatactgtgacgagaagggggtttggtttaagcatcctgaaaacaacagaacttggtcgaattacacaatgtgtaacgcatttaccccggaaaaactgaaaaatgcgtacgtgctctattatcttgctattgtcggccactccctgagtattttcaccctggtcatctcactaggcatcttcgtcttcttcaggagtctaggctgccagagggtgaccctgcacaaaaatatgtttttgacgtacatcttgaattccatgattataatcatacacctggttgaggtcgtccccaatggcgagctcgtcagacgggatcctgtgtcatgtaaaattctgcatttctttcaccagtatatgatggcatgtaattacttctggatgctgtgtgaaggcatttacttacataccctaattgtggtggccgtttttactgaaaaacagcgcttgagatggtactacttgctagggtggggcttcccactggtaccaacaaccattcatgccattactcgtgccgtttactttaacgacaactgctggctgagcgtcgagacccacctcctttacatcatccacggacccgtgatggccgcactggtcgttaacttctttttcctgctgaacatcgtgagagtcctcgtaacaaagatgagagagacgcatgaagctgagtcccacatgtacctgaaggccgtgaaagctaccatgatcctggtccccttgctcggcattcagttcgtcgtgtttccctggcgtcctagcaataagatgctcgggaagatttatgactacgttatgcactcacttatccatttccagggattcttcgtggctaccatttattgcttctgcaacaatgaggtccaaaccaccgtcaaacgtcaatgggcccaatttaagattcaatggaaccagcggtggggccgaagaccgtcaaaccgctcagcacgggctgccgcagccgcagcggaagctggcgacatccctatttatatctgtcatcaggagctgcgaaatgagccagccaacaatcagggggaagaatctgctgaaattatccccctgaatattatagagcaggaaagcagcgcttag

SEQ ID NO: 63398 - DNA, 489 bp, Artificial Sequence
  derived and/or modified sequence
atgagatttacctttacttctcgctgccttgccctcttcctactgcttaaccaccccacacctattcttccagcgttctcaaatcagacatatccgaccattgagcccaaaccctttctgtatgtggtaggacgcaagaaaatgatggacgcacagtacaagtgctatgataggatgcagcagctgcctgcctatcagggggaggggccttactgcaatcgcacttgggacggatggctgtgttgggatgacacccctgcgggagttctgtcttatcagttctgtcccgattattttccagactttgatccgtccgagaaagtcacaaagtattgtgacgaaaagggcgtgtggttcaaacaccctgagaacaataggacctggtctaattacacaatgtgcaatgcttttactcccgagaagctcaaaaatgcctacgtgctgtattatcttgccatcgtcggccactcttgtcaattttcaccatag

SEQ ID NO: 63399 - DNA, 1475 bp, Artificial Sequence
  derived and/or modified sequence
atgaggttcacatttacaagccggtgcttggcactgtttcttcttctaaatcacccaaccccaattcttcctgccttttcaaatcaaacctatccaacaatagagcccaagccatttctttacgtcgtaggacgaaagaagatgatggatgcacagtacaaatgctatgaccgaatgcagcagttacccgcataccaaggagaaggtccatattgcaatcgcacctgggatggatggctgtgctgggatgacacaccggctggagtattgtcctatcagttctgcccagattattttccggattttgatccatcagaaaaggttacaaaatactgtgatgaaaaaggtgtttggtttaaacatcctgaaaacaatcgaacctggtccaactatactatgtgcaatgctttcactcctgagaaactgaagaatgcatatgttctgtactatttggctattgtgggtcattctttgtcaattttcaccctagtgatttccctggggattttcgtgtttttcaggagccttggctgccaaagggtaaccctgcacaagaacatgtttcttacttacattctgaattctatgattatcatcatccacctggttgaagtagtacccaatggagagctcgtgcgaagggacccggtgagctgcaagattttgcattttttccaccagtacatgatggcctgcaactatttctggatgctctgtgaagggatctatcttcatacactcattgtcgtggctgtgtttactgagaagcaacgcttgcggtggtattatctcttgggctgggccccagccttccacagagactaatctttcctttccctggccttctcatccggttcccgctggtgccaaccactatccatgctattaccagggccgtgtacttcaatgacaactgctggctgagtgtggaaacccatttgctttacataatccatggacctgtcatggcggcacttgtggtcaatttcttctttttgctcaacattgtccgggtgcttgtgaccaaaatgagggaaacccatgaggcggaatcccacatgtacctgaaggctgtgaaggccaccatgatccttgtgcccctgctgggaatccagtttgtcgtctttccctggagaccttccaacaagatgcttgggaagatatatgattacgtgatgcactctctgattcatttccagggcttctttgttgcgaccatctactgcttctgcaacaatgaggtccaaaccaccgtgaagcgccaatgggcccaattcaaaattcagtggaaccagcgttgggggaggcgcccctccaaccgctctgctcgcgctgcagccgctgctgcggaggctggcgacatcccaatttacatctgccatcaggagctgaggaatgaaccagccaacaaccaaggcgaggagagtgctgagatcatccctttgaatatcatagagcaagagtcatctgcttga

SEQ ID NO: 63400 - DNA, 1425 bp, Artificial Sequence
  derived and/or modified sequence
atgagattcaccttcaccagcagatgcctggccctgttcctgctgctgaaccaccccacccccatcctgcccgccttcagcaaccagacctaccccaccatcgagcccaagcccttcctgtacgtggtgggcagaaagaagatgatggacgcccagtacaagtgctacgacagaatgcagcagctgcccgcctaccagggcgagggcccctactgcaacagaacctgggacggctggctgtgctgggacgacacccccgccggcgtgctgagctaccagttctgccccgactacttccccgacttcgaccccagcgagaaggtgaccaagtactgcgacgagaagggcgtgtggttcaagcaccccgagaacaacagaacctggagcaactacaccatgtgcaacgccttcacccccgagaagctgaagaacgcctacgtgctgtactacctggccatcgtgggccacagcctgagcatcttcaccctggtgatcagcctgggcatcttcgtgttcttcagaagcctgggctgccagagagtgaccctgcacaagaacatgttcctgacctacatcctgaacagcatgatcatcatcatccacctggtggaggtggtgcccaacggcgagctggtgagaagagaccccgtgagctgcaagatcctgcacttcttccaccagtacatgatggcctgcaactacttctggatgctgtgcgagggcatctacctgcacaccctgatcgtggtggccgtgttcaccgagaagcagagactgagatggtactacctgctgggctggggcttccccctggtgcccaccaccatccacgccatcaccagagccgtgtacttcaacgacaactgctggctgagcgtggagacccacctgctgtacatcatccacggccccgtgatggccgccctggtggtgaacttcttcttcctgctgaacatcgtgagagtgctggtgaccaagatgagagagacccacgaggccgagagccacatgtacctgaaggccgtgaaggccaccatgatcctggtgcccctgctgggcatccagttcgtggtgttcccctggagacccagcaacaagatgctgggcaagatctacgactacgtgatgcacagcctgatccacttccagggcttcttcgtggccaccatctactgcttctgcaacaacgaggtgcagaccaccgtgaagagacagtgggcccagttcaagatccagtggaaccagagatggggcagaagacccagcaacagaagcgccagagccgccgccgccgccgccgaggccggcgacatccccatctacatctgccaccaggagctgagaaacgagcccgccaacaaccagggcgaggagagcgccgagatcatccccctgaacatcatcgagcaggagagcagcgcctag

SEQ ID NO: 63401 - DNA, 825 bp, Artificial Sequence
  derived and/or modified sequence
atgagattcaccttcaccagcagatgcctggccctgttcctgctgctgaaccaccccacccccatcctgcccgccttcagcaaccagacctaccccaccatcgagcccaagcccttcctgtacgtggtgggcagaaagaagatgatggacgcccagtacaagtgctacgacagaatgcagcagctgcccgcctaccagggcgagggcccctactgcaacagaacctgggacggctggctgtgctgggacgacacccccgccggcgtgctgagctaccagttctgccccgactacttccccgacttcgaccccagcgagaaggtgaccaagtactgcgacgagaagggcgtgtggttcaagcaccccgagaacaacagaacctggagcaactacaccatgtgcaacgccttcacccccgagaagctgaagaacgcctacgtgctgtactacctggccatcgtgggccacagcctgagcatcttcaccctggtgatcagcctgggcatcttcgtgttcttcagaagcctgggctgccagagagtgaccctgcacaagaacatgttcctgacctacatcctgaacagcatgatcatcatcatccacctggtggaggtggtgcccaacggcgagctggtgagaagagaccccgtgagctgcaagatcctgcacttcttccaccagtacatgatggcctgcaactacttctggatgctgtgcgagggcatctacctgcacaccctgatcgtggtggccgtgttcaccgagaagcagagactgagatggtactacctgctgggctgggcccccgccttccacagagactag

SEQ ID NO: 63402 - DNA, 489 bp, Artificial Sequence
  derived and/or modified sequence
atgagattcaccttcaccagcagatgcctggccctgttcctgctgctgaaccaccccacccccatcctgcccgccttcagcaaccagacctaccccaccatcgagcccaagcccttcctgtacgtggtgggcagaaagaagatgatggacgcccagtacaagtgctacgacagaatgcagcagctgcccgcctaccagggcgagggcccctactgcaacagaacctgggacggctggctgtgctgggacgacacccccgccggcgtgctgagctaccagttctgccccgactacttccccgacttcgaccccagcgagaaggtgaccaagtactgcgacgagaagggcgtgtggttcaagcaccccgagaacaacagaacctggagcaactacaccatgtgcaacgccttcacccccgagaagctgaagaacgcctacgtgctgtactacctggccatcgtgggccacagctgccagttcagcccctag

SEQ ID NO: 63403 - protein, 986 aa, Artificial Sequence
  derived and/or modified sequence
MAAHGKLRRERGLQAEYETQVKEMRWQLSEQLRCLELQGELRRELLQELAEFMRRRAEVELEYSRGLEKLAERFSSRGGRLGSSREHQSFRKEPSLLSPLHCWAVLLQHTRQQSRESAALSEVLAGPLAQRLSHIAEDVGRLVKKSRDLEQQLQDELLEVVSELQTAKKTYQAYHMESVNAEAKLREAERQEEKRAGRSVPTTTAGATEAGPLRKSSLKKGGRLVEKLWPPQRPVAASSCAPVCWLQAGFLVHPPWWGAMCAPSTHQRQAKFMEHKLKCTKARNEYLLSLASVNAAVSNYYLHDVLDLMDCCDTGFHLALGQVLRSYTAAESRTQASQVQGLGSLEEAVEALDPPGDKAKVLEVHATVFCPPLRFDYHPHDGDEVAEICVEMELRDEILPRAQNIQSRLDRQTIETEEVNKTLKATLQALLEVVASDDGDVLDSFQTSPSTESLKSTSSDPGSRQAGRRRGQQQETETFYLTKLQEYLSGRSILAKLQAKHEKLQEALQRGDKEEQEVSWTQYTQRKFQKSRQPRPSSQYNQRLFGGDMEKFIQSSGQPVPLVVESCIRFINLNGLQHEGIFRVSGAQLRVSEIRDAFERGEDPLVEGCTAHDLDSVAGVLKLYFRSLEPPLFPPDLFGELLASSELEATAERVEHVSRLLWRLPAPVLVVLRYLFTFLNHLAQYSDENMMDPYNLAVCFGPTLLPVPAGQDPVALQGRVNQLVQTLIVQPDRVFPPLTSLPGPVYEKCMAPPSASCLGDAQLESLGADNEPELEAEMPAQEDDLEGVVEAVACFAYTGRTAQELSFRRGDVLRLHERASSDWWRGEHNGMRGLIPHKYITLPAGTEKQVVGAGLQTAGESGSSPEGLLASELVHRPEPCTSPEAMGPSGHRRRCLVPASPEQHVEVDKAVAQNMDSVFKELLGKTSVRQGLGPASTTSPSPGPRSPKAPPSSRLGRNKGFSRGPGAPASPSASHPQGLDTTPKPH

SEQ ID NO: 63404 - DNA, 2961 bp, Artificial Sequence
  derived and/or modified sequence
atggccgcccacggcaagctgagaagagagagaggcctgcaggccgagtacgagacccaggtgaaggagatgagatggcagctgagcgagcagctgagatgcctggagctgcagggcgagctgagaagagagctgctgcaggagctggccgagttcatgagaagaagagccgaggtggagctggagtacagcagaggcctggagaagctggccgagagattcagcagcagaggcggcagactgggcagcagcagagagcaccagagcttcagaaaggagcccagcctgctgagccccctgcactgctgggccgtgctgctgcagcacaccagacagcagagcagagagagcgccgccctgagcgaggtgctggccggccccctggcccagagactgagccacatcgccgaggacgtgggcagactggtgaagaagagcagagacctggagcagcagctgcaggacgagctgctggaggtggtgagcgagctgcagaccgccaagaagacctaccaggcctaccacatggagagcgtgaacgccgaggccaagctgagagaggccgagagacaggaggagaagagagccggcagaagcgtgcccaccaccaccgccggcgccaccgaggccggccccctgagaaagagcagcctgaagaagggcggcagactggtggagaagctgtggcccccccagagacccgtggccgccagcagctgcgcccccgtgtgctggctgcaggccggcttcctggtgcaccccccctggtggggcgccatgtgcgcccccagcacccaccagagacaggccaagttcatggagcacaagctgaagtgcaccaaggccagaaacgagtacctgctgagcctggccagcgtgaacgccgccgtgagcaactactacctgcacgacgtgctggacctgatggactgctgcgacaccggcttccacctggccctgggccaggtgctgagaagctacaccgccgccgagagcagaacccaggccagccaggtgcagggcctgggcagcctggaggaggccgtggaggccctggacccccccggcgacaaggccaaggtgctggaggtgcacgccaccgtgttctgcccccccctgagattcgactaccacccccacgacggcgacgaggtggccgagatctgcgtggagatggagctgagagacgagatcctgcccagagcccagaacatccagagcagactggacagacagaccatcgagaccgaggaggtgaacaagaccctgaaggccaccctgcaggccctgctggaggtggtggccagcgacgacggcgacgtgctggacagcttccagaccagccccagcaccgagagcctgaagagcaccagcagcgaccccggcagcagacaggccggcagaagaagaggccagcagcaggagaccgagaccttctacctgaccaagctgcaggagtacctgagcggcagaagcatcctggccaagctgcaggccaagcacgagaagctgcaggaggccctgcagagaggcgacaaggaggagcaggaggtgagctggacccagtacacccagagaaagttccagaagagcagacagcccagacccagcagccagtacaaccagagactgttcggcggcgacatggagaagttcatccagagcagcggccagcccgtgcccctggtggtggagagctgcatcagattcatcaacctgaacggcctgcagcacgagggcatcttcagagtgagcggcgcccagctgagagtgagcgagatcagagacgccttcgagagaggcgaggaccccctggtggagggctgcaccgcccacgacctggacagcgtggccggcgtgctgaagctgtacttcagaagcctggagccccccctgttcccccccgacctgttcggcgagctgctggccagcagcgagctggaggccaccgccgagagagtggagcacgtgagcagactgctgtggagactgcccgcccccgtgctggtggtgctgagatacctgttcaccttcctgaaccacctggcccagtacagcgacgagaacatgatggacccctacaacctggccgtgtgcttcggccccaccctgctgcccgtgcccgccggccaggaccccgtggccctgcagggcagagtgaaccagctggtgcagaccctgatcgtgcagcccgacagagtgttcccccccctgaccagcctgcccggccccgtgtacgagaagtgcatggccccccccagcgccagctgcctgggcgacgcccagctggagagcctgggcgccgacaacgagcccgagctggaggccgagatgcccgcccaggaggacgacctggagggcgtggtggaggccgtggcctgcttcgcctacaccggcagaaccgcccaggagctgagcttcagaagaggcgacgtgctgagactgcacgagagagccagcagcgactggtggagaggcgagcacaacggcatgagaggcctgatcccccacaagtacatcaccctgcccgccggcaccgagaagcaggtggtgggcgccggcctgcagaccgccggcgagagcggcagcagccccgagggcctgctggccagcgagctggtgcacagacccgagccctgcaccagccccgaggccatgggccccagcggccacagaagaagatgcctggtgcccgccagccccgagcagcacgtggaggtggacaaggccgtggcccagaacatggacagcgtgttcaaggagctgctgggcaagaccagcgtgagacagggcctgggccccgccagcaccaccagccccagccccggccccagaagccccaaggccccccccagcagcagactgggcagaaacaagggcttcagcagaggccccggcgcccccgccagccccagcgccagccacccccagggcctggacaccacccccaagccccactag

SEQ ID NO: 63405 - DNA, 2307 bp, Artificial Sequence
  derived and/or modified sequence
atggccgcccacggcaagctgagaagagagagaggcctgcaggccgagtacgagacccaggtgaaggagatgagatggcagctgagcgagcagctgagatgcctggagctgcagggcgagctgagaagagagctgctgcaggagctggccgagttcatgagaagaagagccgaggtggagctggagtacagcagaggcctggagaagctggccgagagattcagcagcagaggcggcagactgggcagcagcagagagcaccagagcttcagaaaggagcccagcctgctgagccccctgcactgctgggccgtgctgctgcagcacaccagacagcagagcagagagagcgccgccctgagcgaggtgctggccggccccctggcccagagactgagccacatcgccgaggacgtgggcagactggtgaagaagagcagagacctggagcagcagctgcaggacgagctgctggaggtggtgagcgagctgcagaccgtggccgagatctgcgtggagatggagctgagagacgagatcctgcccagagcccagaacatccagagcagactggacagacagaccatcgagaccgaggaggtgaacaagaccctgaaggccaccctgcaggccctgctggaggtggtggccagcgacgacggcgacgtgctggacagcttccagaccagccccagcaccgagagcctgaagagcaccagcagcgaccccggcagcagacaggccggcagaagaagaggccagcagcaggagaccgagaccttctacctgaccaagctgcaggagtacctgagcggcagaagcatcctggccaagctgcaggccaagcacgagaagctgcaggaggccctgcagagaggcgacaaggaggagcaggaggtgagctggacccagtacacccagagaaagttccagaagagcagacagcccagacccagcagccagtacaaccagagactgttcggcggcgacatggagaagttcatccagagcagcggccagcccgtgcccctggtggtggagagctgcatcagattcatcaacctgaacggcctgcagcacgagggcatcttcagagtgagcggcgcccagctgagagtgagcgagatcagagacgccttcgagagaggcgaggaccccctggtggagggctgcaccgcccacgacctggacagcgtggccggcgtgctgaagctgtacttcagaagcctggagccccccctgttcccccccgacctgttcggcgagctgctggccagcagcgagctggaggccaccgccgagagagtggagcacgtgagcagactgctgtggagactgcccgcccccgtgctggtggtgctgagatacctgttcaccttcctgaaccacctggcccagtacagcgacgagaacatgatggacccctacaacctggccgtgtgcttcggccccaccctgctgcccgtgcccgccggccaggaccccgtggccctgcagggcagagtgaaccagctggtgcagaccctgatcgtgcagcccgacagagtgttcccccccctgaccagcctgcccggccccgtgtacgagaagtgcatggccccccccagcgccagctgcctgggcgacgcccagctggagagcctgggcgccgacaacgagcccgagctggaggccgagatgcccgcccaggaggacgacctggagggcgtggtggaggccgtggcctgcttcgcctacaccggcagaaccgcccaggagctgagcttcagaagaggcgacgtgctgagactgcacgagagagccagcagcgactggtggagaggcgagcacaacggcatgagaggcctgatcccccacaagtacatcaccctgcccgccggcaccgagaagcaggtggtgggcgccggcctgcagaccgccggcgagagcggcagcagccccgagggcctgctggccagcgagctggtgcacagacccgagccctgcaccagccccgaggccatgggccccagcggccacagaagaagatgcctggtgcccgccagccccgagcagcacgtggaggtggacaaggccgtggcccagaacatggacagcgtgttcaaggagctgctgggcaagaccagcgtgagacagggcctgggccccgccagcaccaccagccccagccccggccccagaagccccaaggccccccccagcagcagactgggcagaaacaagggcttcagcagaggccccggcgcccccgccagccccagcgccagccacccccagggcctggacaccacccccaagccccactag

SEQ ID NO: 63406 - DNA, 2961 bp, Artificial Sequence
  derived and/or modified sequence
atggctgcacacggcaagctgcgccgggagaggggcctgcaagccgaatatgagactcaggtaaaagagatgagatggcagctaagcgaacaacttcgctgccttgagctgcagggtgagctcagacgcgagcttctgcaagaactcgctgaattcatgcggagacgagccgaagttgagcttgagtatagtcgcggattggaaaagctagccgagcgattttcctcacgcggcggtcgactgggctcaagcagggaacatcagtccttcagaaaggagccttctctgttgagtcccctacactgttgggccgtgctactccagcatacacgtcagcagagccgtgagagcgcagcactgagtgaagtgctggccgggccactggctcagagattgtctcacatcgccgaggacgtcgggaggctcgtgaagaaatctagggatttggaacagcagctgcaagatgagctgctggaggtcgtgtctgagttgcagactgcgaaaaagacctatcaggcttaccacatggaatctgtcaatgctgaggctaagctgagagaagctgagaggcaagaggaaaaaagggccggacgttcagtgcctaccactaccgccggagctacggaagccggaccactgaggaagagttctctgaagaagggaggcaggttggtcgagaaattgtggcctccgcagcggcctgtcgctgcctcaagctgcgcacccgtttgttggcttcaggcaggatttctggtgcatccaccctggtggggcgcaatgtgtgcgccgagtacccaccagcgccaggctaaatttatggagcacaaactgaagtgcacaaaggcccgaaacgagtacctccttagcctggccagtgtaaatgccgcagtgtctaattattatttacatgatgtcctcgatctgatggattgttgtgataccggtttccatctggcactgggccaagtactgaggtcatataccgccgccgaatcccgtacacaggcgagccaagttcaaggcctcggatcgcttgaggaggcggtggaggctttagacccccctggagataaagcaaaagttctggaggtgcacgccaccgttttctgtccacccctgaggtttgattatcacccgcacgacggcgacgaagttgcggaaatctgtgtcgaaatggagctccgcgacgaaatattacccagggcccagaatatccaatcgagactcgataggcagacaattgaaaccgaagaagtcaataaaactctcaaagcaaccctgcaggccctgttggaagttgtcgcatcagatgatggcgatgtgctcgattccttccagacaagccctagcaccgagagcctcaaatctacgtcctccgatccaggcagtcggcaggccggcagaagacgcgggcagcagcaggagaccgaaaccttctacctgactaaactccaggagtatttgagcggacgatcgattttggcgaagctgcaggcaaaacatgagaaactccaagaagccctccagcgcggcgataaggaagagcaagaggttagttggacccagtacacacagcgcaagttccagaaaagccgccagcctcgaccttcgagccaatacaatcagcggctatttggaggggatatggagaagttcattcagtcttcaggtcagcccgttcccctggttgtggaatcctgcatccggtttataaaccttaacggcctgcagcatgaggggattttcagggtaagcggcgcccagctgagagtctctgagatccgggacgcctttgaaaggggggaagaccctttggtagaggggtgtaccgcgcacgaccttgattccgtggccggtgtgctcaagctgtattttcgttccttggagccaccactgttcccccccgatttatttggagagctgctcgcctcttccgagctcgaagcgaccgccgagcgggtagagcatgtttcccggctcttgtggcgcctgccggcacctgtgctggtcgtgttgcgttacttgtttacttttctcaatcacctcgcccagtactcagatgagaacatgatggacccttataacttggcggtgtgcttcggtcctacgctgttgccagtgcccgccggccaagatcctgttgccttacagggccgcgtaaatcagttagtccaaacactcatcgtgcagccggatagagtgtttcctcctcttacctctttgcctggacctgtgtatgaaaagtgtatggcccctccttctgcctcttgccttggcgacgctcagcttgagagcttaggcgccgacaatgagcccgaactagaagctgagatgcctgcacaggaagacgaccttgaaggcgtcgtggaggcagtggcatgctttgcctatactggccggactgcccaagagctatccttccggcgcggagacgttttgaggctccacgaaagggcttcatcggactggtggagaggtgaacacaatggtatgcgcggattgatacctcacaagtacattacgctccccgcaggcaccgagaaacaggtggtgggcgctggcctgcaaacagccggtgaaagcggcagcagcccagaggggcttctcgctagcgagctcgtgcaccggcctgaaccatgcactagcccagaagcaatgggtccctcaggccataggaggcgctgcctggtgcctgcctcgccagagcagcacgtggaggttgataaagctgtggcccaaaacatggactctgtttttaaggaactgcttggcaagaccagcgtccgccagggccttgggccagctagcacaacatcaccaagccccgggcccagatctccgaaagctccgccgagctcccgtttaggacggaataagggatttagtagggggcccggggctccagcatccccctcagcgtcccacccacagggcttggatactacccccaagccacactag

SEQ ID NO: 63407 - DNA, 2307 bp, Artificial Sequence
  derived and/or modified sequence
atggccgcacacggtaaactccggcgcgaacgtggcctccaggccgagtacgagacccaggtcaaggagatgagatggcagctcagcgagcagctaagatgtttagaactgcaaggcgagctccgccgggagctgctgcaggaacttgctgagtttatgagacggagggccgaggtggagttggagtactccagagggctggagaagttggctgaacgctttagttctagaggaggcagattaggatccagtcgcgagcaccaatctttccgcaaggaaccttccttactgagtccactccactgttgggccgtgctgctgcaacacacccgacagcagagccgcgaatccgcagctttgagcgaggtcttggccggccctttggctcagcgtttaagccatattgcagaagacgtgggtcgcttggtcaagaagagtagggacctggagcagcaactccaagatgaattgttggaggtcgtcagcgagctccagactgtcgctgagatatgcgtggagatggaacttagagatgaaattctgcctagggctcagaatatacagtcacgcctggacagacagacaatcgagactgaggaggtcaacaagacccttaaagccaccctgcaagctcttttggaggtggtggcatcagatgacggcgacgtgctggattctttccagacttcccctagcacggaatcactgaagtccacctcttcagatcccggctctagacaggctggcagacgacggggccaacaacaggagacagagaccttttacttaaccaaactgcaggagtacctatccggtcgcagcatcttggccaagcttcaggccaaacatgagaaactacaagaagctctgcagcggggagataaggaggagcaggaggtctcatggacacaatatacccaacgaaagttccagaaaagtcgtcaacctcgacccagcagccagtacaaccagagactgttcggcggggatatggaaaaattcattcagtcgagcgggcagcccgtacctctcgttgtcgagtcctgtattagatttataaacctgaacgggcttcagcatgagggaatcttccgggtcagtggtgcacagctccgtgttagtgaaatccgagatgccttcgagcggggggaggaccctttggtggaaggctgcactgctcacgacctcgacagcgtggccggcgtgctgaaactgtattttcgctcattggaaccaccactgtttccacctgacctgttcggggaacttctggcgtcctcagagctggaggccacagctgaacgagttgagcatgtgtcccgcctgctctggcgtcttcctgcccccgtcctcgtggtgttgaggtacctgtttacatttctgaatcatctggcacagtactcagatgagaatatgatggacccgtataacctggcagtgtgctttggtccaaccctgctgccagtcccagcaggccaggaccccgtggcactccaaggcagggttaaccagttggtgcagactcttatcgtgcagccggatagggttttccccccattgacatccctgccgggccccgtgtacgaaaaatgcatggctccaccctctgcttcttgcttgggcgacgcccagcttgagagtctaggggcagacaacgagccagagttggaggccgaaatgcctgcacaggaggacgacttggagggcgttgttgaggcagtggcatgtttcgcatatacggggcgtaccgctcaggaactgagttttagaagaggggatgtcttacgcctccacgaacgagcttcctcggactggtggcgcggcgagcacaatgggatgagaggtttgatcccacacaagtacatcactctccccgccggaaccgagaagcaggtcgtgggggccgggttgcagacggcaggagaaagtggaagctcacctgagggcctactagctagtgagcttgtccatcggcctgagccatgcaccagccccgaggcaatgggcccctccgggcatcgtcgaaggtgtctcgtgcccgcttcaccagaacagcatgtggaagtggacaaggctgtcgcccaaaatatggatagcgtgtttaaggagctgctgggaaaaacaagtgtgaggcaggggctggggcctgcctccactacgtcaccatctccaggaccgagatcacccaaggcaccgcccagctcccgcctcggccgcaataaaggcttcagccgcggcccaggcgcacctgcaagtccctcagctagccatccgcaaggcctggacacaaccccgaagccacactag

SEQ ID NO: 63408 - DNA, 2961 bp, Artificial Sequence
  derived and/or modified sequence
atggccgcccacggcaagctgcggcgggagcggggcctgcaggccgagtatgagacccaggtgaaggagatgcgctggcagctgtctgagcagctgcgctgcctggagctgcagggcgagctgcggcgggagctgctgcaggagctggccgagttcatgagaagaagagctgaggtggagctggagtacagccggggcctggagaagctggccgagcgcttcagcagccggggcggccgcctgggcagcagccgggagcaccagagcttcaggaaggagcccagcctgctgagccccctgcactgctgggccgtgctgctgcagcacacccggcagcagagccgggagagcgctgccctgtctgaggtgctggccggccccctggcccagaggctgagccacatcgcagaagatgtgggccgcctggtgaagaagagccgggacctggagcagcagctgcaggatgagctgctggaggtggtgtctgagctgcagacagccaagaagacctaccaggcctaccacatggagagcgtgaatgctgaggccaagctgcgggaggccgagcggcaggaggagaagagagctggccgctctgtgcccaccaccacagctggggccacagaggccggccccctgaggaagagcagcctgaagaagggcggccgcctggtggagaagctgtggccaccccagaggcctgtggccgccagcagctgtgcccctgtgtgctggctgcaggccggcttcctggtgcaccccccctggtggggcgccatgtgtgcccccagcacccaccagaggcaggccaagttcatggagcacaagctgaagtgcaccaaggccagaaatgagtacctgctgagcctggcctctgtgaatgctgctgtgagcaactactacctgcatgatgtgctggacctgatggactgctgtgacaccggcttccacctggccctgggccaggtgctgcggagctacacagctgctgagagcaggacccaggccagccaggtgcagggcctgggcagcctggaggaggccgtggaggccctggaccccccaggggacaaggccaaggtgctggaggtgcacgccaccgtcttctgcccccccctgcgctttgactaccacccccatgatggagatgaggtggccgagatctgtgtggagatggagctgagagatgagatcctgccccgggcccagaacatccagagccggctggaccggcagaccatcgagacagaggaggtgaacaagaccctgaaggccaccctgcaggccctgctggaggtggtggccagtgatgatggagatgtgctggacagcttccagaccagccccagcacagagagcctgaagagcaccagcagtgaccccggcagccggcaggccggcagaagaagaggccagcagcaggagacagagaccttctacctgaccaagctgcaggagtacctgagcggccgcagcatcctggccaagctgcaggccaagcatgagaagctgcaggaggccctgcagagaggagacaaggaggagcaggaggtgtcctggacccagtacacccagaggaagttccagaagagccggcagccccggcccagcagccagtacaaccagaggctgtttggaggagacatggagaagttcatccagagcagcggccagcctgtgcccctggtggtggagagctgcatccgcttcatcaacctgaatggcctgcagcacgagggcatcttccgggtgtctggggcccagctgcgggtgtctgagatcagagatgcctttgagcggggggaggaccccctggtggagggctgcacagcccatgacctggacagcgtggccggcgtgctgaagctgtacttccgcagcctggagcccccactcttccccccagacctgtttggagagctgctggccagcagcgagctggaggccacagctgagcgggtggagcacgtgtcccggctgctgtggaggctgcctgcccctgtgctggtggtgctgcgctacctgttcaccttcctgaaccacctggcccagtacagtgatgagaacatgatggacccctacaacctggccgtgtgcttcggccccaccctgctgcctgtgcctgctggccaggaccctgtggccctgcagggccgggtgaaccagctggtgcagaccctcatcgtgcagcctgacagagtcttcccccccctgaccagcctgcccggccctgtgtatgagaagtgcatggccccacccagcgccagctgcctgggagatgcccagctggagagcctgggcgctgacaatgaacctgagctggaggccgagatgcctgcccaggaggatgacctggagggcgtggtggaggccgtggcctgctttgcctacacaggccgcacagcccaggagctgtccttcagaagaggagatgtgctgcggctgcacgagcgggccagcagtgactggtggagaggagagcacaacggcatgaggggcctcatcccccacaagtacatcaccctgcctgctggaacagagaagcaggtggtgggcgccggcctgcagacagctggggagagcggcagcagccctgagggcctgctggccagcgagctggtgcacaggcctgagccctgcaccagccctgaggccatgggccccagcggccacagaagacgctgcctggtgcctgccagccctgagcagcacgtggaggtggacaaggctgtggcccagaacatggattctgtgttcaaggagctgctgggcaagacctctgtgcggcagggcctgggccctgccagcaccaccagccccagccctggccccaggagccccaaggccccacccagcagccggctgggcagaaataaaggcttcagccggggccctggggccccagccagccccagcgccagccacccccagggcctggacaccacccccaagccccactag

SEQ ID NO: 63409 - DNA, 2307 bp, Artificial Sequence
  derived and/or modified sequence
atggccgcccacggcaagctgcggcgggagcggggcctgcaggccgagtatgagacccaggtgaaggagatgcgctggcagctgtctgagcagctgcgctgcctggagctgcagggcgagctgcggcgggagctgctgcaggagctggccgagttcatgagaagaagagctgaggtggagctggagtacagccggggcctggagaagctggccgagcgcttcagcagccggggcggccgcctgggcagcagccgggagcaccagagcttcaggaaggagcccagcctgctgagccccctgcactgctgggccgtgctgctgcagcacacccggcagcagagccgggagagcgctgccctgtctgaggtgctggccggccccctggcccagaggctgagccacatcgcagaagatgtgggccgcctggtgaagaagagccgggacctggagcagcagctgcaggatgagctgctggaggtggtgtctgagctgcagacagtggccgagatctgtgtggagatggagctgagagatgagatcctgccccgggcccagaacatccagagccggctggaccggcagaccatcgagacagaggaggtgaacaagaccctgaaggccaccctgcaggccctgctggaggtggtggccagtgatgatggagatgtgctggacagcttccagaccagccccagcacagagagcctgaagagcaccagcagtgaccccggcagccggcaggccggcagaagaagaggccagcagcaggagacagagaccttctacctgaccaagctgcaggagtacctgagcggccgcagcatcctggccaagctgcaggccaagcatgagaagctgcaggaggccctgcagagaggagacaaggaggagcaggaggtgtcctggacccagtacacccagaggaagttccagaagagccggcagccccggcccagcagccagtacaaccagaggctgtttggaggagacatggagaagttcatccagagcagcggccagcctgtgcccctggtggtggagagctgcatccgcttcatcaacctgaatggcctgcagcacgagggcatcttccgggtgtctggggcccagctgcgggtgtctgagatcagagatgcctttgagcggggggaggaccccctggtggagggctgcacagcccatgacctggacagcgtggccggcgtgctgaagctgtacttccgcagcctggagcccccactcttccccccagacctgtttggagagctgctggccagcagcgagctggaggccacagctgagcgggtggagcacgtgtcccggctgctgtggaggctgcctgcccctgtgctggtggtgctgcgctacctgttcaccttcctgaaccacctggcccagtacagtgatgagaacatgatggacccctacaacctggccgtgtgcttcggccccaccctgctgcctgtgcctgctggccaggaccctgtggccctgcagggccgggtgaaccagctggtgcagaccctcatcgtgcagcctgacagagtcttcccccccctgaccagcctgcccggccctgtgtatgagaagtgcatggccccacccagcgccagctgcctgggagatgcccagctggagagcctgggcgctgacaatgaacctgagctggaggccgagatgcctgcccaggaggatgacctggagggcgtggtggaggccgtggcctgctttgcctacacaggccgcacagcccaggagctgtccttcagaagaggagatgtgctgcggctgcacgagcgggccagcagtgactggtggagaggagagcacaacggcatgaggggcctcatcccccacaagtacatcaccctgcctgctggaacagagaagcaggtggtgggcgccggcctgcagacagctggggagagcggcagcagccctgagggcctgctggccagcgagctggtgcacaggcctgagccctgcaccagccctgaggccatgggccccagcggccacagaagacgctgcctggtgcctgccagccctgagcagcacgtggaggtggacaaggctgtggcccagaacatggattctgtgttcaaggagctgctgggcaagacctctgtgcggcagggcctgggccctgccagcaccaccagccccagccctggccccaggagccccaaggccccacccagcagccggctgggcagaaataaaggcttcagccggggccctggggccccagccagccccagcgccagccacccccagggcctggacaccacccccaagccccactag

SEQ ID NO: 63410 - DNA, 2961 bp, Artificial Sequence
  derived and/or modified sequence
atggccgcccacggcaagctgcggcgggagcggggcctgcaggccgaatatgaaacccaagttaaggagatgcggtggcagctgtccgaacagctcagatgtctggagcttcagggcgagttgagaagagagctgctgcaagagctggccgagttcatgcgtaggcgggcagaggtcgagctcgaatactctagggggctggagaaacttgcggagcggtttagttcccgggggggcagactgggctcctctagagaacatcagtctttcagaaaagaacctagtctactgtcccctctgcattgctgggccgtgctacttcagcatactcgacagcagtctcgggagtcagccgcactcagcgaggttctggctggtcctcttgcacaacgtctttcccatatcgctgaagatgtgggaagacttgtgaaaaaaagtcgtgatctggaacagcagttgcaagatgaattactggaggttgtgagcgaactacaaacagccaagaagacctatcaggcctaccatatggaaagcgtgaacgctgaggcaaaactccgggaggccgagcgccaggaggaaaagcgggcaggccgcagtgtgccaactaccactgccggtgccacagaagctggacctctacgtaaatccagcctaaagaaaggtggacgccttgtggagaagctttggcccccacaaaggcctgtggcggcctcctcctgcgctcccgtttgctggctgcaggccggcttcctcgtacaccccccttggtggggggctatgtgtgcccccagcactcatcaacggcaggctaagttcatggaacacaagctcaaatgtactaaagcgcgcaatgaatacctgctctcattggccagcgtaaatgcagctgtcagcaattattatctacatgatgtcctggatcttatggattgttgcgacaccggctttcacctcgcactaggtcaagtactccgctcgtataccgctgctgagtcgaggacccaggcatcccaggttcagggactgggcagtctggaggaagcagttgaggctctagatcccccaggtgacaaagctaaggtcctggaggtgcatgccacagtgttttgtccacctctcaggtttgattatcatccgcacgatggcgacgaagtggccgagatctgtgtggaaatggaactgcgcgatgagatattgccccgggcccagaatattcaaagccgactcgacaggcagacaatagagacggaggaagtcaataagactctgaaagctaccctgcaggctttgctcgaagtggtcgcgagtgacgatggtgacgtgctcgactcttttcaaacgtctccctcaacggagtccctgaagtccaccagttcagaccccggctctcggcaggccgggaggaggcgtggtcagcagcaggagactgagaccttttatttgactaagctgcaggagtatttatctggaaggtcgattttagccaagttgcaagctaagcacgaaaagctgcaggaggccttgcaacgtggggacaaggaggagcaggaagttagctggactcagtatacacagcgcaaattccagaaatcaagacaacctagaccatcatctcaatacaatcagcgtctgtttggcggagatatggaaaagttcatccagtccagtggccagccagtgccactggtcgtagagtcttgtattaggttcattaacctcaacgggctgcaacacgagggtattttccgggtgtccggggcacaactgagagtgtccgagatcagagacgcctttgaaagaggtgaggatcccctggttgaaggatgcacagcacacgatctggactctgttgctggcgtcctgaagctgtatttccgcagtctggaaccgcccctgttccctccagacctgttcggagagctgttagcatcctccgagcttgaggccaccgccgaacgcgtggaacatgtgtctcgactactgtggcgtctgccagctcctgtgctggtcgtattgcgctatttgtttaccttcctcaatcatcttgcgcagtatagcgacgagaatatgatggatccatataatttagccgtttgctttggacccacacttctccccgtgcctgccggacaggaccccgtcgcccttcaaggaagagtgaaccagctcgtgcagaccctaatcgtgcagcccgatcgcgtgttccctccgcttacctctctaccaggccctgtgtacgaaaagtgtatggcccccccctccgcttcatgcctgggagacgcgcaattggagagcctaggcgccgacaatgagccggaactagaggctgagatgcctgcgcaggaggatgatttagagggagtggtagaagccgtggcttgtttcgcctacaccgggcggacagcacaggagctgagcttccgtcgcggggatgtcctgaggttacacgaaagagcaagcagtgattggtggcgaggcgagcataatggcatgagaggacttatcccgcacaagtatataacactgccagccggaactgaaaaacaggtagtcggtgcgggcctccagactgcaggtgaaagcggatccagcccggaaggcttgctggcgtccgagctcgtccatcgaccagagccctgcacctcccccgaagccatggggccctccgggcataggagacgttgtctggttcctgccagccctgagcaacacgttgaggtggacaaagctgtggcacagaacatggattcagtgtttaaggagctcctgggcaaaacttccgtccggcaggggctgggtcccgcgtccaccacctccccatcaccaggaccacggtcgccaaaggcacctccaagttcccgcctgggccgtaataagggcttttctaggggaccaggcgcgcccgcgagtcccagcgcttcccacccacagggcctggatacaacgcctaagccacattag

SEQ ID NO: 63411 - DNA, 2307 bp, Artificial Sequence
  derived and/or modified sequence
atggccgcccacggcaagctgcggcgggagcggggcctgcaggccgagtacgagactcaggtgaaggaaatgcgctggcagttgagcgagcaacttagatgtctggaactgcaaggcgagcttcgtcgagaactgctgcaagagttagcggagttcatgagacggcgtgccgaagtggagctcgagtacagcaggggactggaaaagctggctgagcggttcagcagccgtgggggcaggttaggcagcagtcgggagcatcagagcttcaggaaggagccaagcctcctgtcccctctgcattgttgggcagttctgctccagcatacccgacagcagagtcgggaatccgcagctttgagcgaggtgctagcaggccctttggcacagagactgagccacatcgccgaggatgtcggccgcctggtgaaaaaatctcgggaccttgagcagcaacttcaggacgaactcttggaagtagtctctgaactgcagactgtggcagaaatctgtgtggagatggagctgagagacgagatactcccacgggcccaaaatatacaatcacgcctggatagacagactatagagaccgaagaggtgaataaaacccttaaagcgacgttgcaggcgctactggaggtcgttgcatcagatgatggggatgtgctggactctttccagacgagcccttcaaccgaatccctgaagtccacgtcctctgatccgggatcgcgccaggccggtagaagacggggacagcagcaggaaacggagacattctatctcaccaagctgcaggagtacctgtcagggcggtctattttggcaaaattgcaggcgaaacacgaaaagctgcaggaggcactgcagcgaggggataaagaggagcaagaggtcagctggacacaatatacgcagcggaaattccagaaatctcggcagccccgccctagtagtcagtataaccagaggctgttcgggggggacatggaaaagttcatccaaagctcggggcaacccgtgccccttgtcgttgagagctgcattaggtttatcaatcttaatgggctccagcatgaaggaatctttcgggtgtctggcgcacagctacgggtgtctgagatcagggatgctttcgaacgcggcgaggatccgctggtggaagggtgcacagcccacgacctggacagcgtagcaggagtgcttaagctctactttagatctctggaaccacctctgttccctccggatctgttcggagagttgctggcctcgtccgagctggaggcaaccgcggaacgtgtggaacacgtgtctagactgctctggcgccttccggctcctgtgctggtggtccttcggtatctctttacctttctgaatcacttagctcagtacagcgatgagaacatgatggacccttataacctcgcggtgtgtttcggtcccaccttgttgccggtaccagcaggtcaggatcccgtggccctccagggcagggttaaccagctggtccagaccctaattgtgcagcccgatagggtatttccacccctgacgtcactgccaggccccgtgtacgagaagtgcatggcccctccttctgcctcttgcttaggtgacgctcagctggagagtcttggggctgacaatgagccagaactcgaggcagagatgccggcacaggaggatgacctggagggggtggtggaagccgtagcctgttttgcttacactggtcgcaccgcacaggaactttccttccggaggggcgacgtgctcaggctgcatgaacgcgcttccagcgactggtggaggggcgagcacaacggaatgcgtggcctgattccccacaagtacatcacactcccagccggcacagagaagcaggtggtaggagccggtttgcagaccgcaggcgagagcggatcaagtcctgaaggccttctcgcgtccgagctcgtgcaccgtccagaaccctgcacctcccccgaagcaatggggccatctggccacaggcggaggtgtctggtgcctgcctcacccgagcaacatgtggaggtggacaaagccgtggctcagaacatggactccgtctttaaagagctcctcggaaaaacatctgtcagacagggcctaggaccagctagtacgacctcacccagcccagggcctagaagccccaaagccccaccctctagccggttaggacggaacaaaggcttctctagggggcctggcgctcccgcctcaccttccgccagccatcctcagggattggacactacgcctaaaccacactag

SEQ ID NO: 63412 - DNA, 2961 bp, Artificial Sequence
  derived and/or modified sequence
atggcagcccacgggaaactacggagggagcgaggccttcaagccgagtatgagactcaagttaaggagatgcggtggcagctaagcgagcaacttcgttgtctggaactccaaggggagctccgtcgggaactgctccaggagctggctgagtttatgcgcaggcgggctgaggtggaactggagtacagccgtggcctcgagaagctcgcggagcgcttctcatctagggggggacggctcggttccagtcgggagcaccaatccttccgtaaggagccctccctcttatcacccctgcattgctgggctgtcctgctccaacacacccgccagcagagtagggaaagtgccgctctgtcagaggtgctcgccggacctttggcccagcggctatcccatatcgccgaggatgtcggacgtcttgttaagaaatcccgggacctcgaacagcagcttcaggacgaattgcttgaggttgtgtcagaactccagaccgccaaaaaaacgtatcaagcgtaccacatggagagtgtgaacgctgaagctaaactgcgggaggcagaacggcaagaggaaaaacgggcaggcagatccgtgcctactacaaccgccggagcgacagaagccggacctctgagaaaatcctcgctgaaaaaagggggtagacttgtggaaaaattgtggcccccacagagacctgttgctgcttcttcatgtgcacctgtatgttggctgcaggccggtttcctggtgcacccgccttggtggggggctatgtgtgcacctagtactcaccagaggcaggccaagttcatggaacacaagctcaaatgtacaaaggcaagaaacgaatatctgctctcgctggcttctgttaacgcagccgtgagtaattactatctccacgacgtgttggatcttatggattgttgtgacacaggcttccacctggcgttagggcaggtccttcgctcctatactgccgctgagtctcggactcaagcaagccaagtccaaggactcggaagcctcgaagaggcagtggaggccctggatccccctggggacaaggccaaggttctggaggtgcacgcgacagtcttttgtcccccactccgctttgattaccatccccacgatggtgacgaggtggcggaaatatgcgtcgaaatggagctacgcgatgaaatactgcccagagcccagaatattcagtctagattagatcgccagacgatcgagaccgaggaggtgaataagaccctcaaagcaacactccaggccttgttggaggtggttgctagcgacgacggcgacgtgttggacagctttcaaacaagcccaagcacagagtccttaaagagcactagctcagatcctggcagccgtcaagctggacgcagaagggggcaacaacaggaaactgagaccttttatctgactaaactccaggagtatctgtccggaaggtccattctggctaaactgcaggctaagcacgagaaactgcaagaggccctccagagaggtgacaaggaggagcaggaagtgtcatggacacagtacacccaacgcaagttccagaaatctaggcagcccagaccgtcatcacagtacaaccagaggttgttcggcggagacatggagaagttcatccagagctctgggcagcccgtaccactggtggtcgagagctgtatccgatttatcaacttgaacggactgcagcacgaaggtatttttcgcgtgtccggcgcacaattacgggttagcgaaattagagacgcttttgagcgcggagaagacccactagtggagggttgcaccgcacatgacctcgactccgttgcaggcgtcctcaaactctattttaggagcttggagccaccactgtttcctcctgacctttttggtgaactcctggcttcgtctgagttggaagcaaccgctgagagagttgaacacgtgtctcgcctgctctggcgtttacctgccccagtcctggtagtgcttcgctatctattcaccttccttaatcatctagcgcagtattcagacgagaacatgatggacccttataatctggcagtgtgtttcggaccaactttactcccggtgcctgcaggtcaggaccctgtggctctgcagggccgtgtcaatcagctcgtccagaccctgattgtccaacccgatagagttttcccaccgctaacctctctgcctggcccagtttacgagaaatgcatggcccctccaagtgctagctgtctgggggacgcacagctggagtctctcggcgctgacaatgaaccggagctggaggccgagatgcctgcccaagaggatgatctcgagggcgtagtcgaggctgtcgcatgtttcgcttataccggaagaactgcgcaagaactgtcatttcgacggggtgacgtgcttagattacatgagcgtgcctcgtctgattggtggaggggcgagcacaacgggatgagggggctaattccccacaagtatatcaccctccctgctggaacggagaagcaggtggttggcgctggcctgcagactgccggagaaagcggttccagtcctgagggtctcctagcttctgagctggtacaccggccagagccttgtacttctcctgaggcgatgggaccgagcggacaccgaagacggtgcctggtccccgcttccccggaacagcatgtggaggtggacaaggctgtggcccagaacatggactcagtttttaaggagctcctcgggaagacatccgtgcgtcagggactgggaccagcgtccacaacaagtccaagtcctggacctcgctcccctaaagctcccccttcctctagactaggacgaaacaaggggttcagtagaggccctggcgctcccgctagccccagtgcttcccatccacagggactggacacaacaccaaaacctcactag

SEQ ID NO: 63413 - DNA, 2307 bp, Artificial Sequence
  derived and/or modified sequence
atggccgcacacggcaagttacgcagagaaaggggtctgcaagctgagtatgagacacaggtgaaggaaatgcgatggcagctttcggagcagcttcgctgtttggaactgcagggagagctgcgacgcgagcttcttcaagagctggctgaatttatgcgacggagagccgaggtagaactcgaatattcacgcggactcgagaagttggcggaaagattctctagccggggaggcaggcttggcagttccagagagcaccaaagctttcgaaaggagccaagtctgctcagccccctacactgttgggctgttttattacagcataccaggcaacaatcacgggagtcggccgcactgagtgaagtcctggccggaccactggcacaaagattgagccacatcgctgaagacgtcgggcgactggtcaaaaagtcacgggatctggaacagcagctgcaggacgagctgctagaggttgtatcagagctccagactgtggcggagatatgcgtggaaatggagttgagagatgaaatcctccccagggcccagaatatccagagcaggttagacagacagactatcgagactgaggaagttaacaaaacactgaaggctacactccaggcgctgctggaagtcgtggccagcgacgatggcgacgtcttagatagctttcagacttcaccatctacggagtcccttaagagtacatcatctgacccaggatcaagacaggcaggcaggcggcgtgggcagcagcaagagaccgaaactttttatctgactaagcttcaggaatacctaagcggaaggtccatcctcgccaaattgcaggcgaagcatgaaaagttgcaggaggcactgcagaggggcgacaaagaggagcaggaagtgagctggacccaatacacacagcgaaagtttcagaagtcacggcaacctcgcccatcttcccagtacaaccaaagactgttcggaggagatatggagaaattcatccagagctcaggccagccagtgccactcgtggttgaatcatgtattcgcttcataaatctgaatgggctgcagcacgagggcattttcagggtgagcggggcacagctcagagtaagcgagatcagagatgctttcgaacggggagaggatcctctcgtggaggggtgtaccgcacatgatttagactctgttgccggagtgctgaagctgtactttcggtctctcgagccacctctgttccctcctgatttgtttggggaacttttggcttcctctgagctcgaggctaccgccgagcgggtggaacacgtgtctcgccttctctggaggctccccgcacctgtgcttgtcgtgctccgctatctgttcactttccttaatcatctggcccagtattctgacgaaaacatgatggatccctacaacttggccgtttgcttcggaccgacgctgcttcccgttcccgctggacaggatcccgtggcgctccagggccgtgttaaccagctcgtgcagactttaattgtccagccagaccgggtgtttcctccgctcaccagtctgcctgggcctgtgtacgagaagtgcatggccccacccagcgccagctgtcttggggacgcacaactggagtcgctgggggcagataatgagccggagctggaagctgaaatgcctgctcaagaggacgacctcgagggcgtggtagaggccgttgcctgcttcgcctacactggaagaacagcccaagaactaagtttccgaagaggcgatgtactccgtctccatgaacgcgcttcaagtgactggtggcgcggagagcacaacggcatgagaggactgatcccccacaaatacattacactacccgcaggaacagaaaagcaggttgtcggggcaggactgcaaaccgcaggcgagagcggctcgagccccgagggattactcgcctccgaactggtacaccgtccagagccatgcacatccccagaggccatgggcccatccggccacagacggcgttgcctggtgcccgcaagccccgaacaacacgtagaagtggacaaggctgtggctcagaatatggactccgtcttcaaggagctgctgggcaagacctccgtacgccagggcttggggccagcatcaacaacttctcctagcccaggtcctcgctccccaaaggccccaccatcgtcacggttggggcgaaacaagggcttctctaggggcccaggcgcacccgcatcaccgagcgcatcgcatcctcaggggttggacacgaccccgaaaccgcattag

SEQ ID NO: 63414 - DNA, 3372 bp, Artificial Sequence
  derived and/or modified sequence
ggcccgctcacggccgcgtgggagcagtggggttcgacggcgcggccgcgaggccgccatggccgctcacgggaagctgcggcgggagcgggggctgcaggctgagtatgagacgcaagtcaaagagatgcgctggcagctgagcgagcagctgcgctgcctggagctgcagggcgagctgcggcgggagttgctgcaggagctggcagagttcatgcggcgccgcgctgaggtggagctggaatactcccggggcctggaaaagctggccgagcgcttctccagccgtggaggccgcctggggagcagccgggagcaccaaagcttccggaaggagccgtccctcctgtcgcccttgcactgctgggcggtgctgctgcagcacacgcggcagcagagccgggagagcgcggccctgagtgaggtgctggccgggcccctggcccagcgcctgagtcacattgcagaggacgtggggcgcctggtcaagaagagcagggatctggagcagcagctgcaggatgagctcctggaggtggtctcagagctccagacggccaagaagacgtaccaggcatatcacatggagagcgtgaatgccgaggccaagctccgggaggccgagcggcaggaggagaagcgggcaggccggagtgtccccaccaccaccgctggtgccactgaggcagggcccctccgcaagagctccctcaagaagggagggaggctggtggagaagctctggcccccgcagaggcctgtggccgcttccagctgtgcacctgtgtgctggctccaagctgggtttctcgtgcaccctccatggtggggtgccatgtgcgcaccttccactcatcagcggcaggccaagttcatggagcacaaactcaagtgcacaaaggcgcgcaacgagtacctgcttagcctggctagtgtcaacgctgctgtcagtaactactacctgcatgacgtcttggacctcatggactgctgtgacacagggttccacctggccctggggcaggtgctccggagctacacggccgctgagagccgcacccaagcctcccaagtgcagggcctgggcagcctggaagaagctgtggaggccctggatcctccaggggacaaagccaaggttctcgaggtgcatgctaccgtcttctgtcccccgctgcgctttgactaccacccccatgatggggatgaggtggctgagatctgcgttgaaatggagctgcgggacgagattctgcccagagcccagaacatccagagccgcctggaccgacagaccattgagacagaggaggtgaacaagactctgaaggcgacactgcaggccctgctggaggtggtggcctcggatgacggggatgtgcttgattccttccagaccagcccctccaccgagtccctcaagtccaccagctcagacccaggcagccggcaggcgggccggaggcgcggccagcagcaggagaccgaaaccttctacctcacgaagctccaggagtatctgagtggacggagcatcctcgccaagctgcaggccaagcacgagaagctgcaggaggcccttcagcgaggtgacaaggaggagcaggaggtgtcttggacccagtacacacagagaaaattccagaagagccgccagccccgccccagctcccagtataaccagagactctttgggggagacatggagaagtttatccagagctcaggccagcctgtgcccctggtggtggagagctgcattcgcttcatcaacctcaatggcctgcagcatgaaggcatcttccgggtatcgggtgcccagctccgggtctcagagatccgtgatgccttcgagagaggggaggacccactggtggagggctgcactgcccatgacctggactcggtggccggggtgctgaagctctacttccggagcctggagcccccactcttccccccagacctgttcggcgagctgctggcttcttcggagctggaggccacagcggagagggtggagcacgtgagccgcctgctgtggcggctgcccgcgccggtgctggtggttctgcgctacctcttcaccttcctcaaccacctggcccagtacagcgatgagaacatgatggacccctacaacctggccgtgtgcttcgggcccacgctgctaccggtgcccgctgggcaggacccggtggcgctgcagggccgggtgaaccagctggtgcagacgctcatagtgcagcccgatcgggtcttcccgcccctgacctcgctgcctggccccgtctacgagaagtgcatggcaccgccttccgccagctgcctgggggacgcccagctggagagcctgggggcggacaatgagccggagctggaagccgagatgcccgcacaggaggatgacctggagggggtcgtggaggctgtggcctgctttgcctacacgggccgcacagcccaggagctgagcttccggcggggggacgtactgcggctgcacgagagggcctcgagcgactggtggcggggggagcacaacggcatgcggggcctcatcccccacaagtatatcacgctgcccgccgggacggagaagcaggtggtgggcgcagggctgcagactgcaggggagtctgggagcagtcccgagggcctcctggcatcggagctggtccaccggccagagccatgcacctcacctgaggccatgggaccctctggacacagacgacgctgcttggtcccagcctccccagagcaacacgtggaggtggataaggctgtggcacagaacatggactctgtgtttaaggagctcttgggaaagacctctgtccgccagggccttgggccagcatctaccacctctcccagtcctgggccccgaagcccaaaggccccgcccagcagccgcctgggcaggaacaaaggcttctcccggggccctggggccccagcctcaccctcagcttcccacccccagggcctagacacgacccccaagccacactgaggtgccgctgctggagatgcgtgcccccggcggctacccgctggaccggccactctccccagcccccttgcttctctccagccctgtccagcaagtgcagggtgcctgcacttcaccctgtgcagagaggtgggatggggccgtgcacacagggatgcccgctccacatcctgcctgcccctcagccctggcccaggccccttttggaggcagctgaggaaggatgctggggaaagccctcttctgcagctttgtggaaggctgatcagtggctgctgggtggcgggtacccttgctcagatgcctggcagggctgggtggcgattcataaagacctcgtgttgattccccga

SEQ ID NO: 63415 - DNA, 2721 bp, Artificial Sequence
  derived and/or modified sequence
ctcacggccgcgtgggagcagtggggttcgacggcgcggccgcgaggccgccatggccgctcacgggaagctgcggcgggagcgggggctgcaggctgagtatgagacgcaagtcaaagagatgcgctggcagctgagcgagcagctgcgctgcctggagctgcagggcgagctgcggcgggagttgctgcaggagctggcagagttcatgcggcgccgcgctgaggtggagctggaatactcccggggcctggaaaagctggccgagcgcttctccagccgtggaggccgcctggggagcagccgggagcaccaaagcttccggaaggagccgtccctcctgtcgcccttgcactgctgggcggtgctgctgcagcacacgcggcagcagagccgggagagcgcggccctgagtgaggtgctggccgggcccctggcccagcgcctgagtcacattgcagaggacgtggggcgcctggtcaagaagagcagggatctggagcagcagctgcaggatgagctcctggaggtggtctcagagctccagacggtggctgagatctgcgttgaaatggagctgcgggacgagattctgcccagagcccagaacatccagagccgcctggaccgacagaccattgagacagaggaggtgaacaagactctgaaggcgacactgcaggccctgctggaggtggtggcctcggatgacggggatgtgcttgattccttccagaccagcccctccaccgagtccctcaagtccaccagctcagacccaggcagccggcaggcgggccggaggcgcggccagcagcaggagaccgaaaccttctacctcacgaagctccaggagtatctgagtggacggagcatcctcgccaagctgcaggccaagcacgagaagctgcaggaggcccttcagcgaggtgacaaggaggagcaggaggtgtcttggacccagtacacacagagaaaattccagaagagccgccagccccgccccagctcccagtataaccagagactctttgggggagacatggagaagtttatccagagctcaggccagcctgtgcccctggtggtggagagctgcattcgcttcatcaacctcaatggcctgcagcatgaaggcatcttccgggtatcgggtgcccagctccgggtctcagagatccgtgatgccttcgagagaggggaggacccactggtggagggctgcactgcccatgacctggactcggtggccggggtgctgaagctctacttccggagcctggagcccccactcttccccccagacctgttcggcgagctgctggcttcttcggagctggaggccacagcggagagggtggagcacgtgagccgcctgctgtggcggctgcccgcgccggtgctggtggttctgcgctacctcttcaccttcctcaaccacctggcccagtacagcgatgagaacatgatggacccctacaacctggccgtgtgcttcgggcccacgctgctaccggtgcccgctgggcaggacccggtggcgctgcagggccgggtgaaccagctggtgcagacgctcatagtgcagcccgatcgggtcttcccgcccctgacctcgctgcctggccccgtctacgagaagtgcatggcaccgccttccgccagctgcctgggggacgcccagctggagagcctgggggcggacaatgagccggagctggaagccgagatgcccgcacaggaggatgacctggagggggtcgtggaggctgtggcctgctttgcctacacgggccgcacagcccaggagctgagcttccggcggggggacgtactgcggctgcacgagagggcctcgagcgactggtggcggggggagcacaacggcatgcggggcctcatcccccacaagtatatcacgctgcccgccgggacggagaagcaggtggtgggcgcagggctgcagactgcaggggagtctgggagcagtcccgagggcctcctggcatcggagctggtccaccggccagagccatgcacctcacctgaggccatgggaccctctggacacagacgacgctgcttggtcccagcctccccagagcaacacgtggaggtggataaggctgtggcacagaacatggactctgtgtttaaggagctcttgggaaagacctctgtccgccagggccttgggccagcatctaccacctctcccagtcctgggccccgaagcccaaaggccccgcccagcagccgcctgggcaggaacaaaggcttctcccggggccctggggccccagcctcaccctcagcttcccacccccagggcctagacacgacccccaagccacactgaggtgccgctgctggagatgcgtgcccccggcggctacccgctggaccggccactctccccagcccccttgcttctctccagccctgtccagcaagtgcagggtgcctgcacttcaccctgtgcagagaggtgggatggggccgtgcacacagggatgcccgctccacatcctgcctgcccctcagccctggcccaggccccttttggaggcagctgaggaaggatgctggggaaagccctcttctgcagctttgtggaaggctgatcagtggctgctgggtggcgggtacccttgctcagatgcctggcagggctgggtggcgattcataaagacctcgtgttgattccccgatgggagcca

SEQ ID NO: 63416 - protein, 419 aa, Artificial Sequence
  derived and/or modified sequence
MELKVWVDGVQRIVCGVTEVTTCQEVVIALAQAIGRTGRYTLIEKWRDTERHLAPHENPIISLNKWGQYASDVQLILRRTGPSLSERPTSDSVARIPERTLYRQSLPPLAKLRPQIDKSIKRREPKRKSLTFTGGAKGLMDIFGKGKETEFKQKVLNNCKTTADELKKLIRLQTEKLQSIEKQLESNEIEIRFWEQKYNSNLEEEIVRLEQKIKRNDVEIEEEEFWENELQIEQENEKQLKDQLQEIRQKITECENKLKDYLAQIRTMESGLEAEKLQREVQEAQVNEEEVKGKIGKVKGEIDIQGQQSLRLENGIKAVERSLGQATKRLQDKEQELEQLTKELRQVNLQQFIQQTGTKVTVLPAEPIEIEASHADIEREAPFQSGSLKRPGSSRQLPSNLRILQNPISSGFNPEGIYV

SEQ ID NO: 63417 - protein, 29 aa, Artificial Sequence
  derived and/or modified sequence
MELKVWVDGVQRIVCGVTEVTTCQEVVIA

SEQ ID NO: 63418 - DNA, 1260 bp, Artificial Sequence
  derived and/or modified sequence
atggagctgaaggtgtgggtggacggcgtgcagagaatcgtgtgcggcgtgaccgaggtgaccacctgccaggaggtggtgatcgccctggcccaggccatcggcagaaccggcagatacaccctgatcgagaagtggagagacaccgagagacacctggccccccacgagaaccccatcatcagcctgaacaagtggggccagtacgccagcgacgtgcagctgatcctgagaagaaccggccccagcctgagcgagagacccaccagcgacagcgtggccagaatccccgagagaaccctgtacagacagagcctgccccccctggccaagctgagaccccagatcgacaagagcatcaagagaagagagcccaagagaaagagcctgaccttcaccggcggcgccaagggcctgatggacatcttcggcaagggcaaggagaccgagttcaagcagaaggtgctgaacaactgcaagaccaccgccgacgagctgaagaagctgatcagactgcagaccgagaagctgcagagcatcgagaagcagctggagagcaacgagatcgagatcagattctgggagcagaagtacaacagcaacctggaggaggagatcgtgagactggagcagaagatcaagagaaacgacgtggagatcgaggaggaggagttctgggagaacgagctgcagatcgagcaggagaacgagaagcagctgaaggaccagctgcaggagatcagacagaagatcaccgagtgcgagaacaagctgaaggactacctggcccagatcagaaccatggagagcggcctggaggccgagaagctgcagagagaggtgcaggaggcccaggtgaacgaggaggaggtgaagggcaagatcggcaaggtgaagggcgagatcgacatccagggccagcagagcctgagactggagaacggcatcaaggccgtggagagaagcctgggccaggccaccaagagactgcaggacaaggagcaggagctggagcagctgaccaaggagctgagacaggtgaacctgcagcagttcatccagcagaccggcaccaaggtgaccgtgctgcccgccgagcccatcgagatcgaggccagccacgccgacatcgagagagaggcccccttccagagcggcagcctgaagagacccggcagcagcagacagctgcccagcaacctgagaatcctgcagaaccccatcagcagcggcttcaaccccgagggcatctacgtgtag

SEQ ID NO: 63419 - DNA, 1260 bp, Artificial Sequence
  derived and/or modified sequence
atggagctaaaggtttgggtcgatggcgtgcagagaattgtttgcggcgtcactgaggtcacgacgtgccaggaagttgtcatcgccttagctcaggctattggtcggaccggacgctacactctgatcgagaaatggagagacaccgagcgacacctagccccccacgaaaaccccatcattagcctgaataaatgggggcagtatgcaagcgatgtccagttaatcctccggcgaaccggacctagcctgagtgagcggcccaccagcgattctgttgctagaatccccgaacggacactgtatcgacagtctctgccccctctggctaagcttagaccccaaattgacaagtcgatcaagcgcagggaaccaaaacggaaatccttgaccttcacaggcggcgccaaaggacttatggatatattcgggaagggaaaagaaaccgagttcaaacaaaaggtactcaacaactgtaaaaccacagcagacgaactgaagaaactgattcgtcttcagaccgagaaactgcagagcatcgaaaaacagctcgaaagcaatgagattgagatcaggttttgggagcagaagtacaatagcaacctggaagaggaaatagttagattggaacaaaagatcaaacggaacgacgtggaaattgaggaagaagagttctgggaaaatgagttgcaaattgagcaagaaaacgagaagcagttgaaggatcagcttcaagaaattcggcagaaaataaccgaatgtgaaaacaaactgaaagactatctggcgcagatcagaacgatggaatccggactcgaagccgagaagctccagcgcgaggtacaggaggcgcaggtgaatgaagaggaagttaagggcaaaattggcaaggttaagggggagattgatattcagggccagcaatccttgagacttgagaacggcatcaaagccgttgaacgctccttaggacaggcaacaaagaggctccaagataaggagcaggaactcgagcagctgaccaaagagctccgtcaagtcaacttgcagcagttcattcagcagacaggcaccaaggtgaccgtgctgcccgcagagccaattgagatcgaagcatcacacgcagacattgagcgcgaggcaccattccaaagcggcagtctcaaacgccctggtagtagtcgccagctcccgagcaaccttcggatcttacagaatccaattagcagcggcttcaaccctgaggggatatacgtctag

SEQ ID NO: 63420 - DNA, 1260 bp, Artificial Sequence
  derived and/or modified sequence
atggaactgaaggtgtgggtggacggggtccagagaattgtgtgcggtgttacagaagtcactacatgccaggaggtcgtcatcgccctggcccaggcgatcggccgaaccggccggtacacccttatcgagaagtggcgcgacaccgagcgccaccttgcacctcacgagaacccaataatttccctcaataagtggggacagtatgccagcgacgtgcaactgatcctgagacgaactggtcccagtctctctgaacgcccaacaagcgactccgtggcaagaattccagagaggactctctaccgacagtccctcccccctctggccaaactgaggcctcaaattgacaaaagtataaaaagacgagaaccaaagcgcaagtcattgacatttactggaggtgcaaaggggctcatggatatctttggcaaagggaaagaaacggagttcaaacagaaagtgttaaacaactgtaagacaaccgcagacgagctgaaaaaattgatccgtctgcagacagagaagttgcagtctatcgagaaacagctcgagtccaatgagatagagatccggttctgggaacagaaatataacagcaacctcgaggaggaaatcgtacggctcgaacagaaaatcaaacggaacgacgtggagatcgaggaggaggagttctgggagaatgaactgcagatcgagcaggaaaatgaaaagcagctcaaggaccagctacaggagatcagacaaaaaattaccgagtgtgaaaacaaactcaaggactatctagcccaaatacggaccatggagagtggtctggaggcagagaaactgcagcgggaagtacaggaagctcaggtcaatgaggaggaagtgaaaggcaaaatcgggaaggttaaaggcgagattgatatccaggggcaacaatcattgcggctggaaaatggcatcaaggctgtggaacggtctctgggccaggccaccaaaaggctacaggataaagagcaggagctggaacaactaaccaaggaacttcgccaggtaaacctccaacagttcatccagcagaccggcacaaaggttacggtgctaccagccgagccgatcgagatcgaagcatcacatgccgatatcgagcgcgaagctccttttcagtccgggtctcttaaaagaccagggtcgtccagacaactccccagcaatctgcgaatactgcagaatccaattagtagtggcttcaatccagaagggatctatgtatag

SEQ ID NO: 63421 - DNA, 1260 bp, Artificial Sequence
  derived and/or modified sequence
atggagcttaaagtctgggtggatggcgtccagcgcatcgtttgcggtgtcacagaagtcacaacttgtcaggaggtagtgatagcccttgcacaggctatcggcagaaccggcaggtacacactcattgagaagtggagagacactgagagacatcttgcgcctcacgagaaccctattatcagtttaaacaaatgggggcagtatgcctccgacgtccaattgatcctgcgaaggaccggaccttccctgtccgaacggcccacctccgactccgtggcaaggattccagagcggacattgtaccgccagagcctcccaccccttgcgaagttgcgtccacagattgataagtcaatcaagcgccgcgaacctaaacggaagtctctgactttcacagggggcgcaaaaggcctcatggatatctttgggaaggggaaagagactgagtttaagcagaaagttctgaacaattgtaaaaccaccgctgacgaactcaaaaaactaatacgcctccaaaccgagaagctccaaagcatagagaagcagctggagtccaatgaaatcgaaattcgattctgggaacaaaagtacaacagtaacctggaagaggaaatagtcagacttgaacagaagattaaacgtaacgacgtggaaattgaagaagaggaattttgggagaacgaacttcagatcgaacaggaaaacgagaagcagctgaaagaccagctgcaggagataaggcagaagatcaccgagtgcgagaataagctgaaggattacctggcacagatacgaacgatggaatccggcttggaggcagagaagctccaacgtgaagtacaggaagcgcaggtgaatgaagaagaggtaaaggggaaaatcggtaaggttaagggggagatcgacatccagggacaacagagccttcgcctggaaaatggtatcaaggctgtggagaggagtttgggccaggcaacaaagaggttgcaggataaggagcaagagctcgaacagctgacaaaggagctacgccaagtgaacctgcagcagtttatccagcagactggaactaaggtcaccgtgctgccggctgagccaatcgaaattgaagctagtcacgccgacatagaacgcgaggccccgttccagtccggaagcctcaaaaggccaggcagctctcgacaactgccatcaaacctgcgaatccttcagaatccaatctcttcagggtttaatcccgagggaatatatgtctag

SEQ ID NO: 63422 - DNA, 1260 bp, Artificial Sequence
  derived and/or modified sequence
atggagctcaaggtctgggttgatggggtacagaggatagtctgtggcgtcactgaggtcactacctgtcaggaggttgttatcgccctggcccaagccattggtaggacaggccgatacactctcatagagaagtggagagacaccgaacgacacctggccccccacgagaaccctataatcagcttgaataaatggggacaatacgccagcgatgttcagctgatcttgagaagaacaggcccctcccttagcgagcgtcctacaagtgattccgtggcacggataccagaacgcacgctctataggcagtccctgccccctttggcgaaacttaggccccagattgacaaatctatcaaacggagggaacctaaacgtaagagcttaacgtttactggcggggcgaaggggctgatggatatattcggaaagggtaaagagacagaatttaagcagaaagtcttgaacaactgcaaaaccacagccgatgagctgaagaaactgatcagactgcaaaccgaaaaattgcagtcaatcgagaaacagctcgagagtaacgaaattgagattaggttttgggagcagaagtataacagcaatctggaggaagaaattgtcaggctggagcagaagattaaaagaaacgacgtggagattgaagaggaagaattttgggaaaacgagctgcagatcgagcaggaaaatgaaaagcagctgaaagatcagctgcaggagatccggcaaaagataaccgagtgtgagaataaactgaaagattatctcgcacaaatcaggactatggaatcaggactcgaagctgagaagcttcagagggaagttcaggaagctcaggtgaatgaggaagaggtgaaagggaagattggaaaggtgaagggggagatcgatatacaggggcagcagtccctgcggttagagaatggaattaaagccgtggagagatctttgggacaggcgaccaaaaggctgcaggacaaggaacaggaactggagcagttgactaaagagctacgccaggtgaacttacaacagttcatacagcagactggaactaaggtgactgtacttccagccgaaccgatcgaaatcgaagcctctcacgcggacatcgagagggaggctcccttccagtccggttctttgaagaggcctggatcgagcagacaactgccctcaaatctacggattttgcagaacccaattagttctggctttaatcctgagggcatttatgtatag

SEQ ID NO: 63423 - DNA, 1260 bp, Artificial Sequence
  derived and/or modified sequence
atggagctgaaggtgtgggtggatggagtgcagagaattgtgtgtggggtgacagaggtgaccacctgccaggaggtggtgattgccctggcccaggccatcggccgcacaggccgctacaccctgattgagaagtggagggacacagagcggcacctggcccctcatgagaaccccatcatcagcctgaacaagtggggccagtatgccagtgatgtgcagctgatcctgcggaggacaggccccagcctgtctgagcggcccaccagtgacagcgtggcccgcatccctgagaggaccctgtaccggcagagcctgccccccctggccaagctgcggccccagattgacaagagcatcaagaggcgggagcccaagaggaagagcctgaccttcaccggcggggccaagggcctgatggacatctttgggaagggcaaggagacagagttcaagcagaaggtgctgaacaactgcaagaccacagcagatgagctgaagaagctgatccggctgcagacagagaagctgcagagcattgagaagcagctggagagcaatgaaattgagatccgcttctgggagcagaagtacaacagcaacctggaggaggagatcgtgcggctggagcagaagatcaagagaaatgatgtggagattgaggaggaggagttctgggagaatgagctgcagatcgagcaggagaatgagaagcagctgaaggaccagctgcaggagatccggcagaagatcacagaatgtgagaacaagctgaaggactacctggcccagatccgcaccatggagagcggcctggaggccgagaagctgcagcgggaggtgcaggaggcccaggtgaatgaggaggaggtgaagggcaagattggcaaggtgaagggggagattgacatccagggccagcagagcctgcggctggagaatggcatcaaggctgtggagaggagcctgggccaggccaccaagaggctgcaggacaaggagcaggagctggagcagctgaccaaggagctgcggcaggtgaacctgcagcagttcatccagcagacaggcaccaaggtgacagtgctgcctgctgagcccatcgagattgaggccagccatgctgacatcgagcgggaggcccccttccagagcggcagcctgaagaggcctggcagcagccggcagctgcccagcaacctgcgcatcctgcagaaccccatcagcagcggcttcaaccctgagggcatctacgtgtag

SEQ ID NO: 63424 - DNA, 1260 bp, Artificial Sequence
  derived and/or modified sequence
atggagctgaaggtgtgggtggacggcgtgcagcggatcgtgtgcggggtgacggaggtgaccacctgccaagaggtggtaatcgccctggcacaagcgatcggcaggactggccgctacacgctgatcgagaagtggagggacactgaacgccatcttgcaccccatgagaatcccatcatcagtctcaacaagtgggggcagtacgcttccgatgttcaactgatcctgcgtagaactggcccctcactatccgagagaccaacttcagattctgtggctagaatcccggagcgaaccctttatcgtcagtcactgccccctctggccaaactgaggccacagatcgataaatctattaaaaggagggagcccaaacgtaagagtctaaccttcaccggcggggccaaaggactgatggatatcttcggcaagggtaaggaaaccgaatttaaacagaaggtacttaataattgtaagacgacggcagatgagctcaaaaagcttatacgtctgcagacggaaaagctgcaatcgatcgagaaacagctggagtcaaatgagattgagattcgtttttgggaacagaaatacaatagcaatctggaggaggaaattgttcgtctcgaacagaaaattaaaaggaatgacgtagagatcgaggaggaagagttctgggagaacgaattacagattgagcaggagaatgagaaacagctgaaagaccagttgcaggaaatccggcagaagatcaccgaatgtgaaaataaattgaaagattatctggctcagattcgcaccatggagtctggattagaggcagaaaaactgcagcgggaagtccaggaagctcaggtcaatgaggaggaggttaagggcaaaatcggcaaagtgaagggcgaaattgatatccagggccagcagagcctgagactggaaaacggcataaaagccgtagaaaggtccctagggcaggctaccaagaggcttcaggacaaggagcaggaacttgagcaactcacaaaggaactgaggcaggtaaacctgcagcagtttattcaacagacagggaccaaggttacagtgctacccgcagagcccatcgaaattgaagctagccatgcagatattgagcgggaggccccctttcaaagtgggagcctgaagagaccaggctcatctcggcaacttccctccaatctgcgcatcctgcaaaatccaatctcaagcggttttaaccccgaaggcatctatgtgtag

SEQ ID NO: 63425 - DNA, 1260 bp, Artificial Sequence
  derived and/or modified sequence
atggagctgaaggtgtgggtggacggcgtgcagcggatcgtgtgcggcgtgacggaggtgacaacatgccaggaagtcgttattgcccttgcacaggccatcggaaggaccggaagatataccttgattgagaagtggagagacacagaaaggcaccttgcaccccacgaaaatcctataatctctttgaataagtggggccagtacgcgtccgacgtccagctgatcctgcgcagaacggggccctccctctctgagcgccccacaagcgattctgttgcccgcatacccgagcggactctgtaccgtcagagcctcccacccctggcgaagcttcggcctcagatcgacaagtccattaaaaggcgcgagcctaaacgaaaaagcctcaccttcaccggtggcgcaaaaggcctgatggacatcttcggtaagggaaaggagaccgagttcaagcagaaagtccttaataattgtaagacaaccgccgatgaactgaagaaactgattcgactgcaaaccgagaaactgcagtctattgaaaaacaactggagtcgaatgagattgagatcagattctgggagcagaaatacaattccaatctggaagaggaaatcgtacgcttagagcaaaagatcaaaagaaacgacgtggagattgaggaagaggagttctgggagaacgagctgcaaatagaacaggaaaacgaaaagcagctgaaagatcagctgcaggaaatccggcagaaaatcacagagtgcgagaacaagctgaaggattatctagcccagattcgcactatggaatcggggcttgaagctgagaaacttcagagagaagtgcaagaggctcaagttaatgaggaggaagttaagggaaagatcgggaaggtgaagggtgaaattgacattcagggccagcagagtctgcggctggagaacggcattaaagccgtggaacgctcacttgggcaggctacaaagagactacaggacaaagagcaggagttagagcaactcactaaggaactgagacaggtcaatcttcagcaatttattcagcagactggaaccaaagtgacagttcttccagctgagcctatcgagattgaagctagccatgccgatatcgagcgcgaggccccatttcagagcgggtccctgaaaaggccagggagctcccggcagttgcctagcaatctacgcattctgcagaatcccatctcaagcggctttaatccagaggggatttacgtttag

SEQ ID NO: 63426 - DNA, 1260 bp, Artificial Sequence
  derived and/or modified sequence
atggagctgaaggtgtgggtggacggcgtgcagcggatcgtgtgcggcgtcaccgaggtgaccacctgtcaggaggtcgtgattgccttggcgcaggccatcggaaggaccggccgatacacactgatcgagaagtggagagacacagagcggcatttggcgccccatgagaaccccatcatttctctaaacaagtggggccaatatgcgtcagacgtacagttgatactccgccgtaccgggccctctctgtccgagagacccacgtcagattccgttgcaagaataccagagcggacactttatcgccagagcctacctccgcttgcaaaactccggccacagattgataagtctatcaaacggcgggaacccaagcgaaagagcctaacctttacaggcggagctaagggactcatggacatcttcgggaagggcaaagagaccgagttcaagcagaaagtgctgaataattgcaagacgacagcggatgaactgaaaaaacttatcaggctccagactgagaagctgcagtcaattgagaaacagctggaaagcaacgagattgagattcggttctgggaacaaaagtataattcaaacctggaagaggaaatagtccggctggagcagaaaattaagaggaatgatgtcgaaatagaggaggaggagttctgggagaacgagctgcaaattgagcaggagaatgagaaacagttgaaagatcagctgcaggagattaggcagaagatcaccgagtgcgagaataaactgaaagattacctggcacagattcgaacaatggaatccggcctagaggccgagaagctccagagagaggtgcaggaggctcaggtgaatgaagaagaggtcaagggaaagatcgggaaagtgaagggtgaaattgacatccagggccagcagtcactaaggctcgagaatggtatcaaggccgttgagagaagtcttggtcaagccaccaaacgcctgcaagacaaggagcaagaattagagcagctcacaaaggagctgcgacaggttaacctgcagcagttcatccagcagacaggtactaaggtgacagtgctgccagctgagcccatagagattgaagcatctcatgctgatatagaacgcgaggcaccatttcaatccgggtcactgaaacgccccggcagctccagacaactacctagcaatctgcgtatactgcaaaacccgattagcagcggcttcaatcctgagggaatatacgtgtag

SEQ ID NO: 63427 - DNA, 1260 bp, Artificial Sequence
  derived and/or modified sequence
atggagctgaaggtgtgggtggacggcgtgcagcggatcgtgtgcggggtgacggaggtcacaacttgccaggaagtcgtgatcgcgctggctcaggcaataggacggaccggacgatataccctaatcgagaagtggagagacaccgagaggcaccttgcgcctcacgagaaccctataatctcccttaacaagtggggccagtatgcctcagatgtgcagcttattctgcggagaaccggcccctctttatccgaacggccaaccagtgactcagtggcgaggatcccggagaggactctttaccgacaatctctgccccccctcgcaaagctgcgcccacaaatcgacaagtcaatcaaaagaagggagcctaaacggaagtcactgacctttaccggaggagccaagggcctgatggatatcttcggtaaggggaaagaaactgagtttaaacagaaagttctcaacaactgcaaaacaaccgcagacgagctaaagaaactcatcagattgcagaccgagaaactccagtcgattgagaagcagctcgaatccaacgagattgagatccgattctgggagcaaaaatacaacagcaacctggaggaggaaattgtgaggctcgaacagaaaataaagcgcaacgacgttgaaatcgaagaggaggaattttgggaaaatgagctgcagatcgagcaggagaacgagaaacagctgaaagatcaactacaggaaattcggcagaagatcacggaatgtgaaaataaactcaaggactatctggcccagattaggacaatggagtccggtttggaggccgagaagctccagcgcgaagtgcaggaagcccaggtaaatgaggaagaagtgaagggtaaaatcgggaaggtaaagggcgagattgatattcagggacagcagagccttaggctcgaaaatggaattaaagctgttgaacgatccctaggccaggccactaaacgactgcaggataaggaacaagagctcgaacagctcacgaaggagcttcgccaggtaaatctgcagcagtttatccagcagacaggtactaaggttacagtgctccctgcagagcccattgaaatcgaggcttctcatgcggacatcgaacgagaggccccctttcagagcggaagcctaaagagacctggcagcagcaggcaactcccatccaatctgcgaatcctccagaacccaatatcttcgggatttaaccccgaagggatctatgtctag

SEQ ID NO: 63428 - DNA, 1260 bp, Artificial Sequence
  derived and/or modified sequence
atggagctcaaggtgtgggtggacggcgtccagagaatcgtttgtggtgtgaccgaggtcaccacgtgccaagaagtggtaattgctttggcgcaggccattggccgaaccggcaggtacacgttgattgagaaatggcgcgacaccgagaggcaccttgcgccacatgagaaccctataatctccctcaacaagtggggccagtacgcgtctgacgtgcagttgatcctcagacggacaggacccagcctcagcgaaaggccaacctccgacagcgtggccagaatcccagagcgcactctgtatcgccagtctctacctccgctggcgaaattgcgccctcagattgacaaatccattaaaagacgagaaccaaaaagaaagagtctgacgttcacaggaggtgccaaaggcctaatggacattttcggcaagggcaaagagaccgaatttaagcagaaagtcctcaacaattgtaagactacagccgatgagctgaagaagctgattcgtctccagacagaaaaactgcagagtattgagaagcagctggaaagcaatgagattgagattaggttctgggaacagaagtacaacagtaacctcgaggaagagatcgtgaggctcgagcagaaaataaagcgaaacgatgtggaaatcgaagaagaagagttctgggaaaatgagctgcagatcgagcaggagaacgaaaagcaacttaaagatcagctgcaagagattaggcagaaaatcactgagtgcgagaataaacttaaagactacctggcccagattcgcacgatggagagcggacttgaagcagagaaactgcaaagggaagtgcaggaggcccaggtaaatgaagaagaggtcaaaggaaagattgggaaagtaaaaggagaaatcgatatacaaggtcaacagtctctccgactagaaaatggcatcaaggctgttgaaagaagtcttggacaggcaaccaagcgcttgcaggacaaggagcaagaacttgagcagctgacaaaggaactgcgtcaggtgaacctgcagcaattcatccagcagactggaactaaggtgacagtgttaccagctgagcccattgaaatcgaggcttcacacgccgacatcgaacgcgaagctccttttcaatccggttctctcaagaggcccggttccagtcggcaacttcccagtaacttacggattctgcagaaccccatctccagcgggtttaaccccgaaggaatctatgtctag

SEQ ID NO: 63429 - DNA, 1260 bp, Artificial Sequence
  derived and/or modified sequence
atggaattaaaggtctgggtggatggagtacaacggattgtttgtggcgtgacagaggtgaccacctgccaggaagttgtgatcgcactagcccaggctattggcagaacaggtcgctataccctcatcgagaaatggcgggatactgagcggcacctggcgccacatgagaaccctattatttctttgaacaaatggggccaatacgcgtctgatgtccagctcatcctgcgacggacagggccttctttgagcgagaggccaacttccgactccgtggccagaattcctgagagaactctttacaggcaatctctcccaccgcttgccaaactgcggccacagatagataagagcatcaaacgccgtgagcctaagcgaaagagcctgactttcaccggcggagcaaaaggcttgatggacatcttcggcaagggcaaagaaacggagtttaagcaaaaggtgttaaacaactgcaagacaactgccgatgagctgaagaaactcattagactgcagaccgagaaactgcagtctatcgaaaagcagttagagtccaacgaaatcgaaatcaggttttgggagcagaagtataactcaaacctcgaggaagaaatcgtccgtctggagcaaaaaatcaaaaggaatgatgtggaaatcgaggaggaggagttttgggaaaatgagctgcagattgaacaggagaacgaaaagcagctgaaagatcaactccaggaaattagacagaagattaccgaatgcgaaaataaacttaaagattaccttgcacagatccgtacaatggaatctggactcgaagcagagaaactccagagggaagtccaagaggcacaagtgaacgaagaggaagttaagggcaagatcggcaaagtaaaaggggaaatagatattcagggccaacagagcctgcgtttggaaaacggcatcaaagctgtggagcggtctctcgggcaggccaccaaaagactgcaggacaaggagcaggagttggagcagcttaccaaggagttacggcaggtcaatctccagcaatttatacaacagacgggcactaaggttacagtactgcccgcagaaccgatagagattgaagcctcccatgcggacattgaaagggaggcgccttttcagagcggaagccttaagagacccggaagcagtcggcaactaccctcgaatctgaggatattacagaacccaataagctccggattcaatccagaagggatatacgtgtag

SEQ ID NO: 63430 - DNA, 1260 bp, Artificial Sequence
  derived and/or modified sequence
atggagctgaaagtctgggttgacggggtgcagcggatagtctgtggggtaacagaggttacaacatgccaggaagtagttatagctctggctcaggctataggtcgaaccggcaggtatacattgatcgagaaatggcgggataccgagagacacctggctccccacgagaacccaatcattagcttgaacaagtggggccaatacgcaagcgatgtgcagctgatcctgcggaggacggggccaagcctttctgagcggccaacgtctgacagcgtggccaggatcccagagagaactttatataggcagagtctacccccattggccaagctgcggccacagatcgacaagtccattaaacgacgagagcccaagcgaaaatcactgactttcacaggcggagccaagggccttatggacatcttcggaaaaggcaaggagacggagtttaaacagaaggtacttaataattgcaaaaccactgccgacgagctaaaaaagctgatacggctgcaaacagaaaagctccagtcaatcgagaagcagctcgagagcaacgagattgagatccgattttgggaacagaaatacaactctaatctggaggaagaaattgtaaggcttgagcaaaagataaagcggaatgacgtggaaatcgaggaggaagagttttgggaaaacgagctgcagattgaacaggagaatgagaagcagttaaaggaccagctacaggagatccgacagaaaattactgagtgcgagaataaactgaaagattacctagcccaaatccgaactatggagtcaggtttagaagccgagaaacttcagcgggaggtgcaggaagcccaggtgaatgaagaggaagtgaaggggaaaatcgggaaggtgaagggcgagattgacattcagggtcaacagagtctgaggttggaaaacggaatcaaggccgttgagaggagtctcgggcaggccacaaagcgtctacaagacaaagagcaggaactcgaacaactcactaaagagctgagacaggtgaatctccaacagttcattcagcaaaccggaacgaaggtcaccgtactgcccgcagaaccaatagagattgaggcctctcacgctgacattgaacgcgaagcacctttccaaagcggctcactgaagcgccctggaagtagtaggcagctgcccagcaatctccgtattttacagaacccaatttcaagcggatttaaccccgagggtatctacgtgtag

SEQ ID NO: 63431 - DNA, 1260 bp, Artificial Sequence
  derived and/or modified sequence
atggaactgaaagtttgggtggatggtgtccaacgcattgtctgtggtgttacggaagtgaccacctgccaggaggttgtgattgcattggcccaggccatcggacgaaccggccgttacactctgattgagaagtggagggataccgagcggcatttggcaccccatgagaatccaatcatttcattaaacaaatgggggcagtacgccagcgacgtgcaacttatactgaggaggactggcccaagtctctcagaacgcccaacatctgactctgtagccaggattcccgaaagaacgctttatagacaatcacttccgccactggcaaagcttagaccacagattgataagagcattaagcgcagggaaccaaaaaggaagagtctgacctttacaggaggagcaaagggcctcatggacatatttggcaagggcaaggagaccgaattcaagcagaaagtgctgaacaactgcaagactaccgctgacgaactgaagaagttaatcaggcttcaaaccgagaagctgcagagtatcgaaaagcagctggaaagcaacgagattgagattcggttttgggaacagaagtataacagtaatttagaggaagagattgttagattggagcagaaaatcaaaaggaacgacgtcgaaatcgaggaggaagaattttgggagaacgagctacagattgagcaggagaatgaaaagcagctgaaggaccagctccaggagatccggcaaaaaattaccgaatgcgagaataagttaaaagattatcttgcccagatccgcacgatggaatccgggttagaggccgagaagttacaaagagaggttcaggaggcccaagtcaatgaggaggaggtgaaggggaagatcggaaaagtcaagggagaaattgatatccagggtcaacagtcactgcgactggaaaatggcattaaagctgtcgagcgttctctgggccaggccaccaagaggttgcaggacaaggaacaagagctggagcagctcaccaaggagttgaggcaggtgaatctgcaacagtttatccagcagactggaaccaaagtgacagttctcccggctgaacctatagagatcgaggcaagtcacgcagacatcgaaagggaagcaccgttccaatctggctctctaaaacggcctggctcttctagacagctcccatccaatttgagaattttgcagaatccgatctcgtctggattcaatcccgaagggatttatgtatag

SEQ ID NO: 63432 - DNA, 1994 bp, Artificial Sequence
  derived and/or modified sequence
agtctgaacgatgaccaatccaccacacgcacctacagtgtaggtcttccattttactctctagtctggttctggggctgggcatagaactgttggagttgatataaagatcagggttacagctcctagagtggagtattttgggctgagacgatggggttttccagatattggatcatgtcatctgcaaagaaagacaacttgacttcctctcctcccatttgactacactttatttctttctcttgcctgattgccctggcctgaatttccaatactatgttgaattaatgactcaatatatgactaaaagttcaaagtgaaacaatgataattcagataggaaaatatgtggcagtatgctaaagtctaaaaaggaatataaaacgtctgtgagatacctaacatcagatttatagaaacagaatagaatctgactacacagacttagtcttctccactccgtgttcctgcagctagagacatgacctaacaccctgatgaccactctcagggaccttgagtgactggccggtgcaccatggaacttaaagtatgggtggatggagttcagaggattgtttgtggagtcactgaagtcacaacttgccaggaggttgtcatagccttagctcaagcaataggtcgaactggaaggtacacccttatagagaaatggagagatactgaaagacacttagcacctcatgaaaatcctatcatatccttaaacaaatgggggcagtatgctagtgatgtgcagctcattctacgacgaactgggccgtctctcagtgagcgacccacttcagacagtgtggctcgaattcctgaaagaactttatacaggcagagtctgccccccttagctaaactgaggcctcagattgacaaatcaatcaaaaggagggaaccgaaaaggaaatcactgacatttacaggaggtgccaaaggattaatggacatttttggaaaaggtaaagaaactgagtttaagcaaaaggtgctgaataactgcaaaacaacagcagatgagttgaagaagctaatccgtctgcagacagagaagcttcaatccattgagaaacagctggaatctaatgaaatagaaataagattttgggagcaaaagtataattccaaccttgaagaggaaattgtccgtctagagcaaaagatcaaaagaaacgatgtagaaattgaggaggaagaattctgggaaaatgaattacagattgaacaggaaaatgaaaaacagctgaaggatcaacttcaagaaataagacagaaaataacagaatgtgaaaacaaattaaaggactatttggcacagatccggactatggaaagtggtcttgaagcagaaaaattgcaacgggaagttcaagaggcacaggtcaatgaggaagaggttaaaggaaagatcggtaaggtcaaaggggagattgacattcaaggccagcagagtctgaggttggaaaatggcatcaaagctgtggaaagatctcttggacaagccaccaaacgcttacaggacaaagaacaggaactggagcagttgactaaggagttgcggcaagtcaatctccagcagttcatccagcagacagggacaaaagttaccgttttgccagcggagcccattgaaatagaggcctcacatgcagacattgaaagggaggcaccattccagtctgggtccctgaagcgacctggttcatctcggcagctccccagtaatctccgcattctgcagaatcctatctcatctggttttaatcctgaaggcatatatgtatgacattatctgtctttagggaggagacccaacagaggtaccaaggacagtaaacttcctttttgatttgtgccaatgatgaacagaggatctattccacaagacgctgtatgttttttctctcctaaattgcataccacttggagccataccctgtgcactgatgctaaagaacaaagaaactgtgttttcacac

SEQ ID NO: 63433 - DNA, 5290 bp, Artificial Sequence
  derived and/or modified sequence
gcggccgcggagctccgggtgccgccgcgtccccagcgccccggccggcccctctgggcggcctgcgggggcggcgcagttgcgaaactgactgactacacagacttagtcttctccactccgtgttcctgcagctagagacatgacctaacaccctgatgaccactctcagggaccttgagtgactggccggtgcaccatggaacttaaagtatgggtggatggagttcagaggattgtttgtggagtcactgaagtcacaacttgccaggaggttgtcatagccttagctcaagcaataggtcgaactggaaggtacacccttatagagaaatggagagatactgaaagacacttagcacctcatgaaaatcctatcatatccttaaacaaatgggggcagtatgctagtgatgtgcagctcattctacgacgaactgggccgtctctcagtgagcgacccacttcagacagtgtggctcgaattcctgaaagaactttatacaggcagagtctgccccccttagctaaactgaggcctcagattgacaaatcaatcaaaaggagggaaccgaaaaggaaatcactgacatttacaggaggtgccaaaggattaatggacatttttggaaaaggtaaagaaactgagtttaagcaaaaggtgctgaataactgcaaaacaacagcagatgagttgaagaagctaatccgtctgcagacagagaagcttcaatccattgagaaacagctggaatctaatgaaatagaaataagattttgggagcaaaagtataattccaaccttgaagaggaaattgtccgtctagagcaaaagatcaaaagaaacgatgtagaaattgaggaggaagaattctgggaaaatgaattacagattgaacaggaaaatgaaaaacagctgaaggatcaacttcaagaaataagacagaaaataacagaatgtgaaaacaaattaaaggactatttggcacagatccggactatggaaagtggtcttgaagcagaaaaattgcaacgggaagttcaagaggcacaggtcaatgaggaagaggttaaaggaaagatcggtaaggtcaaaggggagattgacattcaaggccagcagagtctgaggttggaaaatggcatcaaagctgtggaaagatctcttggacaagccaccaaacgcttacaggacaaagaacaggaactggagcagttgactaaggagttgcggcaagtcaatctccagcagttcatccagcagacagggacaaaagttaccgttttgccagcggagcccattgaaatagaggcctcacatgcagacattgaaagggaggcaccattccagtctgggtccctgaagcgacctggttcatctcggcagctccccagtaatctccgcattctgcagaatcctatctcatctggttttaatcctgaaggcatatatgtatgacattatctgtctttagggaggagacccaacagaggtaccaaggacagtaaacttcctttttgatttgtgccaatgatgaacagaggatctattccacaagacgctgtatgttttttctctcctaaattgcataccacttggagccataccctgtgcactgatgctaaagaacaaagaaactgtgttttcacacatcaacagtgttgatatttttgtccagcagctataatgcaaagccttcgtttttatttgtagcattttgagagctttaggaaagtattatatagtgtgtatacataaataagccgtgacttaagtaagagtgaagagaaatttgtgactggcttagtttaatttatttcatgtaatcaatgtgtgaatgttgatgttttaatatttttattgacttatcctgtgactgacttacgttacatattgtgtgattatgaccgtgtgcatgttgccagactccatccatgcattgctgatttacactacacaagtgtcctagggtgctccaccatcgaagctaactccacaggaagccacttgcatttgttttgtgaaactgtcctagccattgcttaattaggtgaaataattcagggttttttaaatctggaatttagtcgttcctttacaatatttccaaatatacgtgtggccacagagcataacagatatttttcataagctaaattgtatgtataaaacatttgcagtgtttcagacactgttgaacaaaaatgtaattggtaagtatgtatccaaacaggcatggggtttcctgatacattatgtgttttgtttctgccctgtcttatcatttacactcatggatcttcagaattaatctaacatggaagttatagatacctgaaagctgggttggtctacttcaggaacattgctttaagtgatgtattttaaaataacccgcttcatatgtatgatctgttggtgtacacaccatgggtaaggtattgcttgcacataatttgctctgcatattatggaccattgtggtttcttccagtcacttagatggaaaggaggttaaacctaggtactttttagcaaggatataaagtcaaattcagcatatgtttttatttttaggcttgacttttacaagacattaatctccatttgtacatatgttattttatttgtaaaaccaaatatgactcaacacctttttgatgagtagtgacttaactaagatttacaagtaatatttagacagattcagtcagacaccacttagccatttttacattccctctggttagatttggtacagtataattaagactttaatctgaaatttaaagtagttttaattctgaagaagttacatcctctgtattatttacatgcaacaaaataaaagtggattaatatagtaatgccatggtaacaatagagctatgtcttatgcatgaaggcaactttggatgttttaacacatttgactgactttggtttagtgaatgctgacaatgctgctctacttaggtttcctatgaaatttttaagaatggctatgagactgtatagaagcttctagagaactgaaagtcataatgcagagttgccttttctagtgcagctaagtggcggacctcaactgaagatatgagtttctttgggttcttggagttatcaaattgatcttgccattatgttactttgcaaataactgaagtaaatgattcttacctaaataaccacaacctgtacacatttgctcacaatttatagtagttattttctatctacctatatttaaaattaggatgattaaaaaataatttatagattttgtgacagtaatgatttacatatgcccaatatatgccttatttttaaataagtcattctgtataaagtcattttgttgttgttcagagaaatcaagatcttattcacaaagaaaaacattttataaattgatcgcattttctttaagtcaaaatgttaaactggaggcagtattaaactttgcaattaggagtttcagagatgccttggcataccacgaaaaacactgtcaatatccaactcattataaattgttatcagaattaacctaataactttaagtaaggacaagcagcatcctagcaacttgtagtagtcttgggttcccagcagagtatcacagttaacctctctgacaacttcatcagaatttccaagctgccaaataatcttcatagacctaattacagatttaaaaaaatttcctaggcgacgaaagtatagaaatgtgaatatgttgaatacattgagaagctgtactttttaattagttatattacttctggaagcacatatctaaggaatattttctaagactcagagggaaaaaaactcgttttcataggatcatctgaagatactttagtatatttgtgatcatttttatctattgcaaatacaaatgaattagataagtgccacatcctggatacatttcggaggggtagtgggcaatggtatacaaaaataccaaatataaaattttcatctgggggaatgttcaggttctaaatactaaattagatttcaatgttttgtgttttttttaaaaaaatcatattgcaacttgttttattgtgattttctacaagtattaaatacatttaaagatctttttatcttaccaagaaataatttggaatagcattggtatatttgaccttttgagtgtctgtcatcctcagagaatggcccatagtgtgttgcctgtggacatagtgtccatagtccctttcttgtccttctgagatattttggtttgataacattttgttttttgtcttgatgcacagggacttttttataatatgagacttcagttggtattaataggagttacctatttaattctcccagtcatcaatgaggtaatcatcaattcctatagttcaaattagtcataaacaagagctacagcaagactgatagagtaaaaactatataaatacagtaaaaaaaaaatagaatttatggtgtgaaatatgaagtatagcaatatataacaagaacatgtaagcacttgcttccacagcataaatgtaatttacatctgcattaaaggataattttctctgtgaataagagcaaaatggtcttcagagaaacagactgttcatttgaagccatttctgtaaacatcttccaagatagaactgtaatggattgaggaaataacacagaaaagacaaaaacttttgatttcaggcatgcaaagtgcttgggcagatggacagttcccattgtgcattgcctttgataaatttggccttaatttatataacgatgctgtgttcacatccctctcctacctaaagttgtctttattggtttatattgtgttaaaattagcttataattattacttttgtattgtgttcagttttttaagttgcatgtttatactatttgctacagtatttttaagtttggggtgaaggccatcagctgtatcaaaaagacaaaacaatcactatttattcagtattgctgctttacatctccagaataagctttcgatgccaggacagtgactgcctgaaagctgcaggagctcttttcaatgcattttatatatttttagaaaccaaataaatgcagaaaactatttcgtatactaattatattaaaccagcagaaatataaaggcaataaagtatatacatatatatggggggaggggaaagattaaaaaatagatttacagccagacatggtgatagccctaaatgtatttctcaatatgtttttctttattgaccctaggaggatttgagttgctgcagcttt

SEQ ID NO: 63434 - DNA, 5505 bp, Artificial Sequence
  derived and/or modified sequence
ccaggactgtaagaaccctatgtacctttgcaggtgcctgtgtagatcatcctagaatacctgtgtggtgctgtccttcctcaagactacctcattctcactggctcggagactcctgcctgctgagctagagacatgacctaacaccctgatgaccactctcagggaccttgagtgactggccggtgcaccatggaacttaaagtatgggtggatggagttcagaggattgtttgtggagtcactgaagtcacaacttgccaggaggttgtcatagccttagctcaagcaataggtcgaactggaaggtacacccttatagagaaatggagagatactgaaagacacttagcacctcatgaaaatcctatcatatccttaaacaaatgggggcagtatgctagtgatgtgcagctcattctacgacgaactgggccgtctctcagtgagcgacccacttcagacagtgtggctcgaattcctgaaagaactttatacaggcagagtctgccccccttagctaaactgaggcctcagattgacaaatcaatcaaaaggagggaaccgaaaaggaaatcactgacatttacaggaggtgccaaaggattaatggacatttttggaaaaggtaaagaaactgagtttaagcaaaaggtgctgaataactgcaaaacaacagcagatgagttgaagaagctaatccgtctgcagacagagaagcttcaatccattgagaaacagctggaatctaatgaaatagaaataagattttgggagcaaaagtataattccaaccttgaagaggaaattgtccgtctagagcaaaagatcaaaagaaacgatgtagaaattgaggaggaagaattctgggaaaatgaattacagattgaacaggaaaatgaaaaacagctgaaggatcaacttcaagaaataagacagaaaataacagaatgtgaaaacaaattaaaggactatttggcacagatccggactatggaaagtggtcttgaagcagaaaaattgcaacgggaagttcaagaggcacaggtcaatgaggaagaggttaaaggaaagatcggtaaggtcaaaggggagattgacattcaaggccagcagagtctgaggttggaaaatggcatcaaagctgtggaaagatctcttggacaagccaccaaacgcttacaggacaaagaacaggaactggagcagttgactaaggagttgcggcaagtcaatctccagcagttcatccagcagacagggacaaaagttaccgttttgccagcggagcccattgaaatagaggcctcacatgcagacattgaaagggaggcaccattccagtctgggtccctgaagcgacctggttcatctcggcagctccccagtaatctccgcattctgcagaatcctatctcatctggttttaatcctgaaggcatatatgtatgacattatctgtctttagggaggagacccaacagaggtaccaaggacagtaaacttcctttttgatttgtgccaatgatgaacagaggatctattccacaagacgctgtatgttttttctctcctaaattgcataccacttggagccataccctgtgcactgatgctaaagaacaaagaaactgtgttttcacacatcaacagtgttgatatttttgtccagcagctataatgcaaagccttcgtttttatttgtagcattttgagagctttaggaaagtattatatagtgtgtatacataaataagccgtgacttaagtaagagtgaagagaaatttgtgactggcttagtttaatttatttcatgtaatcaatgtgtgaatgttgatgttttaatatttttattgacttatcctgtgactgacttacgttacatattgtgtgattatgaccgtgtgcatgttgccagactccatccatgcattgctgatttacactacacaagtgtcctagggtgctccaccatcgaagctaactccacaggaagccacttgcatttgttttgtgaaactgtcctagccattgcttaattaggtgaaataattcagggttttttaaatctggaatttagtcgttcctttacaatatttccaaatatacgtgtggccacagagcataacagatatttttcataagctaaattgtatgtataaaacatttgcagtgtttcagacactgttgaacaaaaatgtaattggtaagtatgtatccaaacaggcatggggtttcctgatacattatgtgttttgtttctgccctgtcttatcatttacactcatggatcttcagaattaatctaacatggaagttatagatacctgaaagctgggttggtctacttcaggaacattgctttaagtgatgtattttaaaataacccgcttcatatgtatgatctgttggtgtacacaccatgggtaaggtattgcttgcacataatttgctctgcatattatggaccattgtggtttcttccagtcacttagatggaaaggaggttaaacctaggtactttttagcaaggatataaagtcaaattcagcatatgtttttatttttaggcttgacttttacaagacattaatctccatttgtacatatgttattttatttgtaaaaccaaatatgactcaacacctttttgatgagtagtgacttaactaagatttacaagtaatatttagacagattcagtcagacaccacttagccatttttacattccctctggttagatttggtacagtataattaagactttaatctgaaatttaaagtagttttaattctgaagaagttacatcctctgtattatttacatgcaacaaaataaaagtggattaatatagtaatgccatggtaacaatagagctatgtcttatgcatgaaggcaactttggatgttttaacacatttgactgactttggtttagtgaatgctgacaatgctgctctacttaggtttcctatgaaatttttaagaatggctatgagactgtatagaagcttctagagaactgaaagtcataatgcagagttgccttttctagtgcagctaagtggcggacctcaactgaagatatgagtttctttgggttcttggagttatcaaattgatcttgccattatgttactttgcaaataactgaagtaaatgattcttacctaaataaccacaacctgtacacatttgctcacaatttatagtagttattttctatctacctatatttaaaattaggatgattaaaaaataatttatagattttgtgacagtaatgatttacatatgcccaatatatgccttatttttaaataagtcattctgtataaagtcattttgttgttgttcagagaaatcaagatcttattcacaaagaaaaacattttataaattgatcgcattttctttaagtcaaaatgttaaactggaggcagtattaaactttgcaattaggagtttcagagatgccttggcataccacgaaaaacactgtcaatatccaactcattataaattgttatcagaattaacctaataactttaagtaaggacaagcagcatcctagcaacttgtagtagtcttgggttcccagcagagtatcacagttaacctctctgacaacttcatcagaatttccaagctgccaaataatcttcatagacctaattacagatttaaaaaaatttcctaggcgacgaaagtatagaaatgtgaatatgttgaatacattgagaagctgtactttttaattagttatattacttctggaagcacatatctaaggaatattttctaagactcagagggaaaaaaactcgttttcataggatcatctgaagatactttagtatatttgtgatcatttttatctattgcaaatacaaatgaattagataagtgccacatcctggatacatttcggaggggtagtgggcaatggtatacaaaaataccaaatataaaattttcatctgggggaatgttcaggttctaaatactaaattagatttcaatgttttgtgttttttttaaaaaaatcatattgcaacttgttttattgtgattttctacaagtattaaatacatttaaagatctttttatcttaccaagaaataatttggaatagcattggtatatttgaccttttgagtgtctgtcatcctcagagaatggcccatagtgtgttgcctgtggacatagtgtccatagtccctttcttgtccttctgagatattttggtttgataacattttgttttttgtcttgatgcacagggacttttttataatatgagacttcagttggtattaataggagttacctatttaattctcccagtcatcaatgaggtaatcatcaattcctatagttcaaattagtcataaacaagagctacagcaagactgatagagtaaaaactatataaatacagtaaaaaaaaaatagaatttatggtgtgaaatatgaagtatagcaatatataacaagaacatgtaagcacttgcttccacagcataaatgtaatttacatctgcattaaaggataattttctctgtgaataagagcaaaatggtcttcagagaaacagactgttcatttgaagccatttctgtaaacatcttccaagatagaactgtaatggattgaggaaataacacagaaaagacaaaaacttttgatttcaggcatgcaaagtgcttgggcagatggacagttcccattgtgcattgcctttgataaatttggccttaatttatataacgatgctgtgttcacatccctctcctacctaaagttgtctttattggtttatattgtgttaaaattagcttataattattacttttgtattgtgttcagttttttaagttgcatgtttatactatttgctacagtatttttaagtttggggtgaaggccatcagctgtatcaaaaagacaaaacaatcactatttattcagtattgctgctttacatctccagaataagctttcgatgccaggacagtgactgcctgaaagctgcaggagctcttttcaatgcattttatatatttttagaaaccaaataaatgcagaaaactatttcgtatactaattatattaaaccagcagaaatataaaggcaataaagtatatacatatatatggggggaggggaaagattaaaaaatagatttacagccagacatggtgatagccctaaatgtatttctcaatatgtttttctttattgaccctaggaggatttgagttgctgcagctttaaacagaaaattgccatgttcactaattgtgagcacataaatatgcttttagtactgctttgcttatgtacaaataaatctgtaatatgtattatatgtaattatccttttctttgactttcattttaaatgtatattttctgatcattatgagctgtaaaacaaagaatcaatattggatattctcccaaataataaattttcaggattcattggggcatt

SEQ ID NO: 63435 - DNA, 2219 bp, Artificial Sequence
  derived and/or modified sequence
atgtgaggacacagcaagaaggtgccatccgtgaaccaaaaagtgagcccttgccagacacctgatccgctggtgccataatcatgaacttcccagtctccagaactgtgagaaatacaagtttctgttattggtgcctgtgtagatcatcctagaatacctgtgtggtgctgtccttcctcaagactacctcattctcactggctcggagactcctgcctgctgagctagagacatgacctaacaccctgatgaccactctcagggaccttgagtgactggccggtgcaccatggaacttaaagtatgggtggatggagttcagaggattgtttgtggagtcactgaagtcacaacttgccaggaggttgtcatagccttagctcaagcaataggtcgaactggaaggtacacccttatagagaaatggagagatactgaaagacacttagcacctcatgaaaatcctatcatatccttaaacaaatgggggcagtatgctagtgatgtgcagctcattctacgacgaactgggccgtctctcagtgagcgacccacttcagacagtgtggctcgaattcctgaaagaactttatacaggcagagtctgccccccttagctaaactgaggcctcagattgacaaatcaatcaaaaggagggaaccgaaaaggaaatcactgacatttacaggaggtgccaaaggattaatggacatttttggaaaaggtaaagaaactgagtttaagcaaaaggtgctgaataactgcaaaacaacagcagatgagttgaagaagctaatccgtctgcagacagagaagcttcaatccattgagaaacagctggaatctaatgaaatagaaataagattttgggagcaaaagtataattccaaccttgaagaggaaattgtccgtctagagcaaaagatcaaaagaaacgatgtagaaattgaggaggaagaattctgggaaaatgaattacagattgaacaggaaaatgaaaaacagctgaaggatcaacttcaagaaataagacagaaaataacagaatgtgaaaacaaattaaaggactatttggcacagatccggactatggaaagtggtcttgaagcagaaaaattgcaacgggaagttcaagaggcacaggtcaatgaggaagaggttaaaggaaagatcggtaaggtcaaaggggagattgacattcaaggccagcagagtctgaggttggaaaatggcatcaaagctgtggaaagatctcttggacaagccaccaaacgcttacaggacaaagaacaggaactggagcagttgactaaggagttgcggcaagtcaatctccagcagttcatccagcagacagggacaaaagttaccgttttgccagcggagcccattgaaatagaggcctcacatgcagacattgaaagggaggcaccattccagtctgggtccctgaagcgacctggttcatctcggcagctccccagtaatctccgcattctgcagaatcctatctcatctggttttaatcctgaaggcatatatgtatgacattatctgtctttagggaggagacccaacagaggtaccaaggacagtaaacttcctttttgatttgtgccaatgatgaacagaggatctattccacaagacgctgtatgttttttctctcctaaattgcataccacttggagccataccctgtgcactgatgctaaagaacaaagaaactgtgttttcacacatcaacagtgttgatatttttgtccagcagctataatgcaaagccttcgtttttatttgtagcattttgagagctttaggaaagtattatatagtgtgtatacataaataagccgtgacttaagtaagagtgaagagaaatttgtgactggcttagtttaatttatttcatgtaatcaatgtgtgaatgttgatgttttaatatttttattgacttatcctgtgactgacttacgttacatattgtgtgattatgaccgtgtgcatgttgccagactccatccatgcattgctgatttacactacacaagtgtcctagggtgctccaccatcgaagctaactccacaggaagccacttgcatttgttttgtgaaactgtcctagccattgcttaattaggtgaaataattcagggttttttaaatctggaatttagtcgttcctttacaatatttccaaatatacgtgtggcca

SEQ ID NO: 63436 - protein, 257 aa, Artificial Sequence
  derived and/or modified sequence
MAPTKPSFQQDPSRRERITAQHPLPNQSECRKIYRYDGIYCESTYQNLQALRKEKSRDAARSRRGKENFEFYELAKLLPLPAAITSQLDKASIIRLTISYLKMRDFANQGDPPWNLRMEGPPPNTSVKVIGAQRRRSPSALAIEVFEAHLGSHILQSLDGFVFALNQEGKFLYISETVSIYLGLSQVELTGSSVFDYVHPGDHVEMAEQLGMKLPPGRGLLSQGTAEDGASSASSSSQSETPEPVVCFPPASDQFLL

SEQ ID NO: 63437 - protein, 933 aa, Artificial Sequence
  derived and/or modified sequence
MAPTKPSFQQDPSRRERITAQHPLPNQSECRKIYRYDGIYCESTYQNLQALRKEKSRDAARSRRGKENFEFYELAKLLPLPAAITSQLDKASIIRLTISYLKMRDFANQGDPPWNLRMEGPPPNTSVKVIGAQRRRSPSALAIEVFEAHLGSHILQSLDGFVFALNQEGKFLYISETVSIYLGLSQVELTGSSVFDYVHPGDHVEMAEQLGMKLPPGRGLLSQGTAEDGASSASSSSQSETPEPVESTSPSLLTTDNTLERSFFIRMKSTLTKRGVHIKSSGYKVIHITGRLRLRVSLSHGRTVPSQIMGLVVVAHALPPPTINEVRIDCHMFVTRVNMDLNIIYCENRISDYMDLTPVDIVGKRCYHFIHAEDVEGIRHSHLDLLNKGQCVTKYYRWMQKNGGYIWIQSSATIAINAKNANEKNIIWVNYLLSNPEYKDTPMDIAQLPHLPEKTSESSETSDSESDSKDTSGITEDNENSKSDEKGNQSENSEDPEPDRKKSGNACDNDMNCNDDGHSSSNPDSRDSDDSFEHSDFENPKAGEDGFGALGAMQIKVERYVESESDLRLQNCESLTSDSAKDSDSAGEAGAQASSKHQKRKKRRKRQKGGSASRRRLSSASSPGGLDAGLVEPPRLLSSPNSASVLKIKTEISEPINFDNDSSIWNYPPNREISRNESPYSMTKPPSSEHFPSPQGGGGGGGGGGGLHVAIPDSVLTPPGADGAAARKTQFGASATAALAPVASDPLSPPLSASPRDKHPGNGGGGGGGGGGAGGGGPSASNSLLYTGDLEALQRLQAGNVVLPLVHRVTGTLAATSTAAQRVYTTGTIRYAPAEVTLAMQSNLLPNAHAVNFVDVNSPGFGLDPKTPMEMLYHHVHRLNMSGPFGGAVSAASLTQMPAGNVFTTAEGLFSTLPFPVYSNGIHAAQTLERKED

SEQ ID NO: 63438 - DNA, 774 bp, Artificial Sequence
  derived and/or modified sequence
atggcccctaccaaacctagctttcagcaggaccccagtcgaagggaaaggatcacagcgcaacaccccctgcctaatcagtccgaatgcagaaaaatctatcggtacgatggaatttattgtgagtcaacttaccagaatttacaggctctgcgcaaggagaagagccgagatgcagcacggtccagacgggggaaggagaatttcgaattttatgaattggccaagctgttacccctgccggccgccatcacatcccagctcgataaagccagcattatacgtctgacaatcagttacttgaaaatgcgtgatttcgctaaccagggggacccaccctggaacctgagaatggaagggccaccaccgaacacaagcgtgaaagtgataggcgcccagagacgccggagccctagtgcactagcgatcgaagtgttcgaggcccatctgggttcgcacatattgcagagtctggacggatttgtttttgccctgaaccaagaggggaaatttttatacattagtgagaccgtgagcatctacctgggtctgagtcaggttgagctaacagggagcagcgtctttgactacgtgcacccgggtgatcatgtggaaatggcagaacaactgggaatgaaattgccccccgggcgtgggttactgtcccaaggcaccgccgaggacggtgcctcttcggcgagtagtagctcccagagcgagacaccagagcctgtcgtctgcttccctccagcatctgatcagttcctgctctag

SEQ ID NO: 63439 - DNA, 2802 bp, Artificial Sequence
  derived and/or modified sequence
atggctccaacgaagccatcattccaacaggacccctcccggcgggagcgaattacagcccaacatcctctgcctaaccagtctgagtgccgtaagatttacagatatgatgggatatattgcgagtctacttatcagaacctccaggcacttagaaaggagaaaagccgtgatgccgccagatctcgccgcgggaaggagaattttgaattttacgagctggccaagctgttgccgctgcctgctgctatcacatcccagctcgataaggcctctataattcgcctcacaatcagctacttaaagatgcgggatttcgccaaccaaggcgatccaccctggaaccttagaatggaggggccccctcctaatacgtccgtgaaagtcatcggagcgcaaagacgcagaagccccagcgccctcgcgatcgaggttttcgaggcccatctgggcagccatatacttcagagtctggatggctttgtgtttgccctaaatcaagagggcaagtttctatatatctccgagaccgttagcatttatctgggtttgtcgcaagttgagctcacaggtagttccgtgtttgattatgtgcacccaggcgatcatgttgagatggccgagcagctcgggatgaaactgcctccaggccgcgggctcctctcacaaggaactgccgaggacggggccagcagtgccagctcatctagccagagtgagactcctgagcccgtggagagtacaagtccctctctgctgaccacagacaacacacttgaacgctccttcttcatccggatgaagagcaccctgaccaaacgcggtgtccacatcaaaagttccggatacaaagttatccatatcaccgggaggctgagattgagagtttcactgtcccatggtcgtactgttccaagtcaaattatgggcctggtggtggtggcacacgcgctcccacccccaaccatcaatgaggtgagaatcgattgtcacatgttcgtgacacgtgtaaatatggacttgaatattatttattgcgagaatagaatcagtgattacatggatttaacacctgtggatatcgtgggcaaaaggtgttaccatttcatccatgctgaggacgtggaaggaattaggcactcacacttggacttgctgaacaaaggccagtgtgtgaccaaatactaccgctggatgcagaaaaatgggggttacatttggattcagtcctctgccactatcgcaatcaacgccaaaaacgcaaatgaaaagaacatcatctgggtcaactacctgctcagtaatccagagtacaaggacacacccatggacatcgcccagctccctcacctccctgaaaaaacatctgagtccagcgaaacgtcagacagtgaatcggactcaaaggacacatccggtatcacagaggacaatgaaaactctaagtccgatgagaaaggtaatcagtccgagaactccgaggatcctgaaccagaccggaaaaagagcggcaatgcttgcgacaacgacatgaactgcaacgacgatggccactctagcagcaacccagactcacgcgattccgatgattcgttcgaacactctgacttcgagaacccaaaggccggggaagatggattcggcgctttgggtgccatgcagatcaaggtggagaggtacgtcgagtccgaatcagaccttcgactgcaaaactgcgagtcgctgacgagcgactctgccaaagactcagactctgcaggagaggccggagcacaggcatccagtaagcatcagaagcggaagaagcgccggaagcggcagaagggtgggtccgcttcaaggagaagactgagctccgcatcctcaccaggtggtctggacgccgggctggtggagcccccccgtctgttatcaagcccgaactctgcgagcgtactgaaaatcaaaaccgaaatttcagagcctatcaactttgataatgactcatccatctggaactacccccctaatagggagatcagccggaatgaatctccctatagcatgactaaaccaccctcgtccgagcatttcccaagtcctcagggtgggggcgggggcggcggaggaggaggcggcctccatgtggccattcctgacagcgtgctgacaccaccaggcgctgacggggctgcggcccgtaaaacacagttcggagcgtcagccaccgccgcactcgcacctgtggcttcagacccattaagcccccctctgagcgcaagtcccagggataaacaccctggaaatggaggaggaggtgggggtggcggcgggggagccggcggagggggacctagcgcatccaatagtcttctttatacaggtgacctggaggcactccagaggttacaggccggcaacgtcgtgttgcctctggtgcatcgggttaccgggaccttagccgctactagtacggcagctcaaagagtttataccactggtactattagatatgctcccgccgaggttaccctcgccatgcagagcaacctcctgccaaatgcccacgccgtcaactttgtggacgttaacagtcccggttttggacttgaccccaaaacgcctatggagatgttataccaccacgttcaccggttgaatatgagcgggcccttcggtggtgctgttagtgcagcatctctgactcagatgcccgccggaaacgtattcaccactgcggaggggctgttttcgacgctgcccttccctgtttactccaacggcatccacgcagcccagactctggaacggaaagaagactag

SEQ ID NO: 63440 - DNA, 774 bp, Artificial Sequence
  derived and/or modified sequence
atggcccccaccaagcccagcttccagcaggaccccagccggcgggagcgcatcacagcccagcaccccctgcccaaccagagtgaatgtaggaagatctaccgctatgatggcatctactgtgagagcacctaccagaacctgcaggccctgaggaaggagaagagcagagatgctgcccggagcagaagaggcaaggaaaattttgagttctatgagctggccaagctgctgcccctgcctgctgccatcaccagccagctggacaaggccagcatcatccggctgaccatctcctacctgaagatgagggactttgccaaccagggcgaccccccctggaacctgaggatggagggccccccacccaacacctctgtgaaggtgattggagcccagaggagaagaagccccagcgccctggccatcgaggtgtttgaggcccacctgggcagccacatcctgcagagcctggatggctttgtgtttgccctgaaccaggagggcaagttcctgtacatcagcgagaccgtgtccatctacctgggcctgagccaggtggagctgaccggcagctctgtgtttgattatgtgcaccctggggaccacgtggagatggccgagcagctgggcatgaagctgcccccaggccggggcctgctgagccagggcacagcagaagatggagccagcagcgccagcagcagcagccagagcgagaccccagagcctgtggtgtgcttccccccagccagtgaccagttcctgctgtag

SEQ ID NO: 63441 - DNA, 2802 bp, Artificial Sequence
  derived and/or modified sequence
atggcccccaccaagcccagcttccagcaggaccccagccggcgggagcgcatcacagcccagcaccccctgcccaaccagagtgaatgtaggaagatctaccgctatgatggcatctactgtgagagcacctaccagaacctgcaggccctgaggaaggagaagagcagagatgctgcccggagcagaagaggcaaggaaaattttgagttctatgagctggccaagctgctgcccctgcctgctgccatcaccagccagctggacaaggccagcatcatccggctgaccatctcctacctgaagatgagggactttgccaaccagggcgaccccccctggaacctgaggatggagggccccccacccaacacctctgtgaaggtgattggagcccagaggagaagaagccccagcgccctggccatcgaggtgtttgaggcccacctgggcagccacatcctgcagagcctggatggctttgtgtttgccctgaaccaggagggcaagttcctgtacatcagcgagaccgtgtccatctacctgggcctgagccaggtggagctgaccggcagctctgtgtttgattatgtgcaccctggggaccacgtggagatggccgagcagctgggcatgaagctgcccccaggccggggcctgctgagccagggcacagcagaagatggagccagcagcgccagcagcagcagccagagcgagaccccagagcctgtggagagcaccagccccagcctgctgaccacagacaacaccctggagaggagcttcttcatccgcatgaagagcaccctgaccaagaggggcgtgcacatcaagagcagcggctacaaggtgatccacatcaccggccgcctgcggctgcgggtgtccctgagccacggccgcacagtgcccagccagatcatgggcctggtggtggtggcccacgccctgcccccacccaccatcaatgaggtgagaattgactgccacatgtttgtgaccagggtgaacatggacctgaacatcatctactgtgaaaatcgcatcagtgactacatggacctgacccctgtggacatcgtgggcaagcgctgctaccacttcatccacgcagaagatgtggagggcatccgccacagccacctggacctgctgaacaagggccagtgtgtgaccaagtactaccgctggatgcagaagaatggaggctacatctggatccagagcagcgccaccatcgccatcaatgccaagaatgccaatgagaagaacatcatctgggtgaactacctgctgagcaaccctgagtacaaggacacccccatggacatcgcccagctgccccacctgcctgagaagaccagcgagagcagcgagaccagtgacagcgagagtgacagcaaggacaccagcggcatcacagaggacaatgaaaacagcaagagtgatgagaagggcaaccagagtgaaaattctgaggaccctgagccagacaggaagaagtctggaaatgcctgtgacaatgacatgaactgcaatgatgatggccacagcagcagcaacccagacagccgggacagtgatgacagctttgagcacagcgactttgagaaccccaaggccggggaggatggctttggagccctgggcgccatgcagatcaaggtggagcgctacgtggagagcgagagtgacctgcggctgcagaactgtgagagcctgaccagtgacagcgccaaggacagcgacagcgctggggaggccggggcccaggccagcagcaagcaccagaagaggaagaagaggaggaagaggcagaagggcggcagcgccagcagaagaaggctgagcagcgccagcagccctgggggcctggatgctggcctggtggagcccccccggctgctgagcagccccaacagcgcctctgtgctgaagatcaagacagagatcagcgagcccatcaactttgacaatgacagcagcatctggaactacccacccaaccgggagatcagcagaaatgaaagcccctacagcatgaccaagccacccagcagcgagcacttccccagcccccagggcggcggcggcggcggcggcggcggcggcggcctgcacgtggccatcccagacagcgtgctgaccccacctggagcagatggagctgctgccaggaagacccagtttggagccagcgccacagctgccctggcccctgtggccagtgaccccctgagcccccccctgagcgccagcccccgggacaagcaccctggaaatggaggcggcggcggcggcggcggcggcggggccggcggcggcggccccagcgccagcaacagcctgctgtacacaggagacctggaggccctgcagaggctgcaggccggaaatgtggtgctgcccctggtgcaccgggtgacaggcaccctggccgccaccagcacagctgcccagagggtgtacaccaccggcaccatccgctatgccccagctgaggtgaccctggccatgcagagcaacctgctgcccaatgcccatgctgtgaactttgtggatgtgaacagccctggcttcggcctggaccccaagacccccatggagatgctgtaccaccacgtgcaccggctgaacatgagcggcccctttggaggagctgtgtctgctgccagcctgacccagatgcctgctggaaatgtgttcaccacagctgagggcctcttcagcaccctgcccttccctgtgtacagcaatggcatccacgccgcccagaccctggagaggaaggaggactag

SEQ ID NO: 63442 - DNA, 774 bp, Artificial Sequence
  derived and/or modified sequence
atggcccccaccaagcccagcttccagcaggaccccagccggcgggaaagaatcacagcacagcatccactgcctaatcagtccgaatgtcgtaaaatctaccgctacgacggcatatattgcgaatccacctatcagaacctccaagctcttcggaaggagaagagtagagatgctgctcgaagtcggcgcggcaaggaaaactttgagttctacgaattagctaaactcttgcccctcccagctgctatcacctcacagttggataaggcttctattatccgcctgacaatttcatacctgaagatgcgcgatttcgcaaaccaaggcgacccaccctggaatctcagaatggagggtcctcctccaaacacatctgtcaaggtcattggcgcccagcgccggagatccccaagcgccttggccatcgaggttttcgaagcacacctggggtcgcacatcttacagtctcttgacggattcgtttttgctctgaatcaggaaggcaaattcctgtatatttcagagacagtgagcatttacctgggattatcacaggtggaactcactggctccagcgtgttcgattatgtccatcccggcgaccatgtggagatggccgaacaactgggcatgaaattgcccccaggtagggggttactgtcacaggggaccgccgaagacggggcgtcctcagcgtcgagttctagccagtcagagacacccgaacccgtggtttgttttccgcccgcttctgaccagttccttctatag

SEQ ID NO: 63443 - DNA, 2802 bp, Artificial Sequence
  derived and/or modified sequence
atggcccccaccaagcccagcttccagcaggaccccagccggcgggaacgcatcacggcccagcacccacttccaaatcaatcagaatgtcgcaaaatttatagatatgatggaatttactgcgaaagtacctaccagaaccttcaggccttgagaaaggaaaaatctcgagatgcggcccgatcccgcaggggtaaagaaaactttgaattttacgagctcgcgaaattgctgcctttgccggctgccatcacgtcccaactggacaaagccagcattattaggttgactatttcatatttgaaaatgagggattttgctaatcagggtgatcccccatggaatctgcgcatggagggtcccccccccaacactagcgtcaaagtcataggcgcgcagcgccggcggagcccaagcgctctggcaatcgaggttttcgaggcacacctcggtagccatattcttcagagcttagatggatttgtttttgcactgaaccaggaaggcaagttcctgtatatcagcgagacagtttccatatatctgggcctctcacaggtggaactgaccggatcctcggtcttcgattatgtgcatccaggggaccacgtggagatggcagaacagctggggatgaagttgccaccggggagagggctcctttcgcaggggacagccgaagatggagctagctccgccagctcttcatcgcagtccgaaacccccgagcccgtcgaatcaacctcacctagtctcctgacaacggacaatacactggagcgctcttttttcatcaggatgaagtccaccttgaccaaacgcggtgtccacattaagagcagcgggtacaaggtaatccacattaccgggaggctgcggcttagagtttcattatctcacggcagaaccgtgcccagtcagatcatgggtctagtcgtggtagctcatgctctaccaccacccaccatcaatgaagtccgcatcgattgtcacatgttcgtcacacgtgtaaacatggacctcaacataatatattgcgaaaacaggatctctgactacatggacctcacgcccgtagatatagtgggtaagagatgctaccactttattcatgctgaggacgtggagggtataaggcattctcacttagatctgttgaataagggacagtgtgtcacaaaatattataggtggatgcagaaaaacggaggctatatctggatccagtctagcgccactattgcaatcaatgcgaaaaatgcgaatgaaaagaatatcatttgggttaattacctgttatctaatcccgaatataaagacaccccgatggacatagcccaactgcctcaccttcccgaaaaaacgtccgagtcctctgaaaccagcgactctgagagtgattctaaagacacttctggcatcacagaagacaacgaaaattccaagagcgatgaaaagggcaaccaatctgaaaattccgaggatccggagccggaccggaaaaaatctggcaatgcctgcgacaacgatatgaactgtaatgacgacggccatagttctagtaaccccgactccagggattctgacgactcattcgagcattcggactttgaaaacccgaaggctggggaagacggcttcggagccctgggcgcaatgcagatcaaagtcgaaagatatgtagaatcggaatccgatctgcggctgcaaaattgcgagtcgctcacaagcgacagtgcgaaggatagcgactccgctggggaggcgggcgcccaagcatcttcaaagcatcagaaaagaaaaaaaagacgcaagcgtcagaagggaggctctgcttctaggaggaggctgagttccgcatcctcccctggaggccttgacgcaggcctggtcgagcctcctagattgttgtcaagcccgaactccgcctccgttcttaagattaaaacagagatcagcgaacctatcaattttgataatgattcgtctatatggaactaccctcctaacagggagatcagtagaaacgaatctccctactccatgaccaaaccaccaagttccgaacatttcccctccccgcagggaggaggaggcggcggcggcggtggcggggggctgcacgttgcgattcccgatagtgtcctgaccccccccggagctgatggcgccgcagccagaaagacgcagtttggcgcaagcgcgactgcagcactggctcccgtggcatccgacccactcagtccccctctctcagcaagtccacgggataagcaccccggcaatgggggcgggggagggggcggagggggaggcgccggtggcggaggcccctccgccagcaattccctcctgtatactggagatttagaggccctccagaggctgcaggctgggaatgtcgttttgccgctggtgcatcgggtgactggtaccctggctgccactagcaccgccgcgcaacgcgtctatactactggaacgattagatatgccccagccgaagtcactctggctatgcaatccaatctcctcccaaatgcccacgcagtaaatttcgtggatgtgaattccccaggattcggtctggatccaaagacccccatggagatgttgtatcaccatgtacaccgcctcaacatgtccggaccattcggcggggctgtcagcgctgcgtcactcacacagatgcctgccggcaacgtgttcaccaccgctgagggactctttagtaccctgccctttccagtatactccaacggcattcacgccgctcagaccctcgagagaaaagaagactag

SEQ ID NO: 63444 - DNA, 838 bp, Artificial Sequence
  derived and/or modified sequence
acgccccccacccgggaggggggagagaggcaaaaagtaagagaggaaaaaaaatagcaggaagatggcgcccaccaagcccagctttcagcaggatccttccaggcgagaacgaataactgcccagcatcctctgcccaaccaatcagaatgtaggaaaatctacagatatgacggaatctactgtgaatctacctaccagaatttacaagcattgagaaaggagaaatcccgagatgctgctcgctcccgccggggaaaagaaaactttgagttctatgaattggccaagttgttgcctcttcctgcagccattaccagccagctcgacaaggcatccatcattcgacttacaattagctatctgaaaatgagggactttgctaaccagggggaccctccgtggaacttgcgaatggaaggccctccacctaacacatcagtaaaagttataggtgcacagcgaaggagaagccccagtgcactagccattgaagtatttgaagcacatttgggaagccacattttgcagtccctggatggctttgtatttgcactaaatcaggaaggaaaatttttgtacatttccgaaacagtctccatctacctaggcctctcacaagtggagctgacaggcagcagtgtctttgactatgtccaccccggagatcacgtggagatggctgagcagctgggcatgaagctcccccctgggcggggtctcctgtcacagggcactgctgaggacggagccagctcagcatcttcctcctctcagtcggagacccccgagccagtggtttgcttcccaccagcgagtgatcagtttcttctgtag

SEQ ID NO: 63445 - DNA, 2802 bp, Artificial Sequence
  derived and/or modified sequence
atggcgcccaccaagcccagctttcagcaggatccttccaggcgagaacgaataactgcccagcatcctctgcccaaccaatcagaatgtaggaaaatctacagatatgacggaatctactgtgaatctacctaccagaatttacaagcattgagaaaggagaaatcccgagatgctgctcgctcccgccggggaaaagaaaactttgagttctatgaattggccaagttgttgcctcttcctgcagccattaccagccagctcgacaaggcatccatcattcgacttacaattagctatctgaaaatgagggactttgctaaccagggggaccctccgtggaacttgcgaatggaaggccctccacctaacacatcagtaaaagttataggtgcacagcgaaggagaagccccagtgcactagccattgaagtatttgaagcacatttgggaagccacattttgcagtccctggatggctttgtatttgcactaaatcaggaaggaaaatttttgtacatttccgaaacagtctccatctacctaggcctctcacaagtggagctgacaggcagcagtgtctttgactatgtccaccccggagatcacgtggagatggctgagcagctgggcatgaagctcccccctgggcggggtctcctgtcacagggcactgctgaggacggagccagctcagcatcttcctcctctcagtcggagacccccgagccagtggagtcaaccagccccagtctgctaaccactgacaacactcttgagcgttcctttttcatccgaatgaaatctactctgaccaaacgcggtgtgcacatcaaatcatcaggatataaggtgattcacataacaggccggctacgcctgagagtgtcgctgtcccacgggaggaccgtccccagccaaatcatgggtctcgtggttgttgcgcatgccttgcctccccctacgatcaatgaagtcagaattgactgccatatgttcgtcactcgagtaaatatggacctcaatatcatttactgtgaaaataggattagtgattatatggatctgacccctgtagatatcgtagggaagagatgctaccacttcatccatgctgaagacgtggagggcatcaggcacagtcacttggacttgctgaataagggtcagtgtgtgacaaagtactatcgctggatgcagaagaacggaggatatatttggatacagtccagtgccaccatagctattaatgccaagaatgcaaatgaaaagaatatcatctgggtgaattaccttcttagcaatcctgagtacaaggacacacccatggacatcgcacagctcccccatctgccggagaaaacttccgaatcctcggagacatccgactctgagtcagactctaaagacacctcaggtattacagaggacaacgagaactccaagtccgacgagaaggggaaccagtccgagaacagcgaagacccggagcccgaccggaagaagtcgggcaacgcgtgtgacaacgacatgaactgcaacgacgacggccacagctccagtaacccggacagccgcgacagcgacgacagcttcgagcactcggactttgagaaccccaaggcgggcgaggacggcttcggtgctctgggcgcgatgcagatcaaggtggagcgctacgtggagagcgagtcggacctgcggctgcagaactgcgagtcactcacgtccgacagcgccaaggactcggacagcgcaggcgaggcgggcgcgcaggcctccagcaagcaccagaagcgcaagaaaaggcggaaacggcaaaagggcggcagcgccagccgccggcgcctgtccagcgcgtcgagcccaggcggcctggacgcgggcctggtggagcccccgcggctgctgtcctcccccaacagtgcctcggtgctcaagatcaagacggagatctcagaacccatcaatttcgacaatgacagcagcatctggaactacccgcccaaccgggagatctccaggaacgagtccccctacagcatgaccaagccccccagctctgagcacttcccgtccccgcagggcggcggcggtgggggtggcggtggcggggggctgcacgtggccattcccgactcggtcctcaccccgcccggcgccgacggcgcggccgcccgcaagactcagttcggcgcctcggccaccgcggccctggcccccgtcgcctccgacccgctgtcacccccgctctcggcgtccccgcgggacaagcaccccgggaacggcggcgggggcgggggcgggggcggcggcgcggggggcggcggccccagcgcgtccaactccttgctgtacactggggacctggaggcgctgcagaggttgcaggcgggcaacgtcgtgctcccgctggtgcacagggtgaccgggaccctggccgccaccagcacggccgcgcagagggtctacaccacgggcaccatccgctacgcgcccgccgaggtgaccctggccatgcagagcaacctgctgcccaacgcgcacgctgttaacttcgtggacgttaacagccccggctttggcctcgaccccaagacgcccatggagatgctctaccaccacgtgcaccggctcaacatgtcaggaccgttcggcggcgcagtgagcgcagctagcctgacgcagatgcccgccggcaacgtgttcaccacggccgagggactcttctccacgctgcccttccccgtctacagcaacggcatccacgcggcacagactctggagcgcaaggaggactga

SEQ ID NO: 63446 - DNA, 774 bp, Artificial Sequence
  derived and/or modified sequence
atggcgcctacaaagccctcttttcaacaggaccctagcagacgggaaagaattacagcacagcaccctcttcccaatcagagcgaatgcagaaagatttaccgctacgatggaatctactgcgaatctacctatcaaaacctgcaggctctgcggaaagagaagagtcgtgacgctgcaaggagccgcagagggaaggaaaatttcgaattttacgaactggccaagctgctccctctgccagccgctattactagtcagctagataaggcaagtatcatccgcttaactatatcctaccttaaaatgagagatttcgccaatcagggcgaccctccttggaatttgcggatggaagggcctccacccaacacttcggtgaaggtcataggcgcacagaggagacgctccccttctgccttggctattgaggtgttcgaggctcaccttggtagtcacatcctgcagagtctggatggtttcgtgtttgccctcaatcaggaggggaagtttctgtacatctccgagaccgtttccatttatctgggactttcccaagtcgagctcaccggtagttccgtttttgattacgtgcatccaggggatcatgttgaaatggctgaacagctcggcatgaaactccctcctggtaggggcctcttgagtcaaggcacagctgaagacggggcttcatcagcaagctcctcctcccagtccgagaccccagaacccgttgtctgcttccctcccgcttctgaccagttcttactgtag

SEQ ID NO: 63447 - DNA, 2802 bp, Artificial Sequence
  derived and/or modified sequence
atggcccctactaagcctagctttcaacaggatccatcacgaagagagcggatcacagcccaacatcccctgcctaatcagtcagaatgcaggaagatttatcgttacgatggcatctattgcgaatccacataccagaatctgcaggctctaaggaaagaaaaatctcgggacgcggcaaggtccagacgcggaaaggagaatttcgaattttatgaattggccaaactcctccctcttcccgctgcaatcactagccagttggacaaggccagcataatacgcttgacaatttcttacctgaaaatgcgcgattttgccaaccaaggcgacccaccatggaatctgcggatggagggccctcctcctaacacttcggtaaaagtgatcggagcacaacggaggaggtctccctcagcgctcgcaatagaggtattcgaggcacacctggggtctcacatcttacagagtctggacggctttgtctttgcccttaatcaggaaggtaaattcctatacatatcggaaacggtcagtatatatctagggctgtctcaggtggagctaaccggatcttccgttttcgactacgtacatccaggcgatcatgtcgaaatggctgaacaactcggtatgaagcttcctcctggcagagggctgctgagccagggaacagcggaggacggagcaagctctgcatcgagctccagccagtccgaaaccccagagccagtagaaagcactagtccttcactgctcacaactgacaatacgctcgagagatcttttttcatccgcatgaaatcaacacttacaaaaagaggcgttcatatcaagtcatccggctacaaggtgattcacatcactggcaggctacgactgcgggtctcactaagtcatggcagaactgtgccttctcaaatcatgggtttggtcgtggttgcccatgctcttccccctcctaccattaatgaggtacggatagattgccatatgtttgtcaccagggtcaacatggacctgaatattatatactgcgagaataggatttccgactatatggatcttacaccagttgacatagtcgggaaacgctgctaccactttatccacgccgaggacgttgaggggatacgacattcccaccttgaccttctcaacaaaggccagtgtgtcaccaagtactaccgctggatgcagaagaacggaggctacatctggatccaatctagcgcaactattgccattaacgctaaaaatgccaacgagaagaatatcatttgggtaaactatctgttgtccaatccagagtataaggacacacccatggatattgcccagctaccacatctgcccgaaaagactagtgagagtagcgaaacctctgattccgagagcgacagcaaggacacttccgggatcacggaagacaacgagaacagtaaatctgatgagaagggaaaccaatctgagaactccgaagatcctgaaccggataggaagaagagtggtaatgcttgcgacaacgatatgaactgcaatgacgacggccactctagctccaacccggacagtcgggactctgatgacagctttgagcacagcgacttcgaaaatccaaaggccggtgaggacggatttggcgcattgggcgctatgcagatcaaagtcgaacgatacgttgagtccgagagcgatcttcgtcttcagaactgcgagtcacttacatccgactccgctaaagactcagacagcgcaggagaagcaggggctcaggcctccagcaagcaccagaaacgaaagaaaagacgcaaacgccagaaaggagggtccgccagtaggcgtaggctatcctcagcttcttcacctggcggactggatgccggacttgtagaaccgccaaggcttctgagctccccaaattctgcgtccgttctcaaaatcaagaccgaaatcagcgaaccaatcaatttcgacaatgactcctcaatatggaactatccccctaacagggagatttctcgcaatgaaagtccctactctatgactaagcctcccagtagcgaacacttcccatcaccacaaggaggtggtgggggaggcggaggtgggggtggtctgcatgtggcaatccctgactcagttctgacgcctcctggggctgatggtgcagcagccagaaagacacaatttggcgcatctgcaacagctgccctggcacctgtggcttctgacccattgtcgccccctttgagtgcctcaccccgtgacaaacacccaggcaatgggggaggcggagggggaggcggaggcggagcaggtggaggcggaccttcagctagcaactccttgctctacaccggggaccttgaagctcttcagcggctgcaggctggtaacgtggttctaccactggtgcaccgcgtaactggcacattggctgctacctcaaccgctgctcaacgggtatacacgaccgggacgatcaggtatgcccctgcggaggtgactctggccatgcagtccaatctgctgccaaacgcccacgccgtgaacttcgtggacgtcaatagtccagggtttgggctcgatcctaaaactcctatggaaatgctctatcaccatgtgcatagactgaatatgtctgggccattcggaggcgctgtgtcagctgcatccttaactcagatgcccgctggaaacgtcttcacaacggctgaagggctcttcagcactctgccttttcccgtatacagtaacggaatccatgccgcacaaacgctggagcgaaaagaggattag

SEQ ID NO: 63448 - DNA, 774 bp, Artificial Sequence
  derived and/or modified sequence
atggcccccaccaagcccagcttccagcaggaccccagcagaagagagagaatcaccgcccagcaccccctgcccaaccagagcgagtgcagaaagatctacagatacgacggcatctactgcgagagcacctaccagaacctgcaggccctgagaaaggagaagagcagagacgccgccagaagcagaagaggcaaggagaacttcgagttctacgagctggccaagctgctgcccctgcccgccgccatcaccagccagctggacaaggccagcatcatcagactgaccatcagctacctgaagatgagagacttcgccaaccagggcgaccccccctggaacctgagaatggagggccccccccccaacaccagcgtgaaggtgatcggcgcccagagaagaagaagccccagcgccctggccatcgaggtgttcgaggcccacctgggcagccacatcctgcagagcctggacggcttcgtgttcgccctgaaccaggagggcaagttcctgtacatcagcgagaccgtgagcatctacctgggcctgagccaggtggagctgaccggcagcagcgtgttcgactacgtgcaccccggcgaccacgtggagatggccgagcagctgggcatgaagctgccccccggcagaggcctgctgagccagggcaccgccgaggacggcgccagcagcgccagcagcagcagccagagcgagacccccgagcccgtggtgtgcttcccccccgccagcgaccagttcctgctgtag

SEQ ID NO: 63449 - DNA, 2802 bp, Artificial Sequence
  derived and/or modified sequence
atggcccccaccaagcccagcttccagcaggaccccagcagaagagagagaatcaccgcccagcaccccctgcccaaccagagcgagtgcagaaagatctacagatacgacggcatctactgcgagagcacctaccagaacctgcaggccctgagaaaggagaagagcagagacgccgccagaagcagaagaggcaaggagaacttcgagttctacgagctggccaagctgctgcccctgcccgccgccatcaccagccagctggacaaggccagcatcatcagactgaccatcagctacctgaagatgagagacttcgccaaccagggcgaccccccctggaacctgagaatggagggccccccccccaacaccagcgtgaaggtgatcggcgcccagagaagaagaagccccagcgccctggccatcgaggtgttcgaggcccacctgggcagccacatcctgcagagcctggacggcttcgtgttcgccctgaaccaggagggcaagttcctgtacatcagcgagaccgtgagcatctacctgggcctgagccaggtggagctgaccggcagcagcgtgttcgactacgtgcaccccggcgaccacgtggagatggccgagcagctgggcatgaagctgccccccggcagaggcctgctgagccagggcaccgccgaggacggcgccagcagcgccagcagcagcagccagagcgagacccccgagcccgtggagagcaccagccccagcctgctgaccaccgacaacaccctggagagaagcttcttcatcagaatgaagagcaccctgaccaagagaggcgtgcacatcaagagcagcggctacaaggtgatccacatcaccggcagactgagactgagagtgagcctgagccacggcagaaccgtgcccagccagatcatgggcctggtggtggtggcccacgccctgcccccccccaccatcaacgaggtgagaatcgactgccacatgttcgtgaccagagtgaacatggacctgaacatcatctactgcgagaacagaatcagcgactacatggacctgacccccgtggacatcgtgggcaagagatgctaccacttcatccacgccgaggacgtggagggcatcagacacagccacctggacctgctgaacaagggccagtgcgtgaccaagtactacagatggatgcagaagaacggcggctacatctggatccagagcagcgccaccatcgccatcaacgccaagaacgccaacgagaagaacatcatctgggtgaactacctgctgagcaaccccgagtacaaggacacccccatggacatcgcccagctgccccacctgcccgagaagaccagcgagagcagcgagaccagcgacagcgagagcgacagcaaggacaccagcggcatcaccgaggacaacgagaacagcaagagcgacgagaagggcaaccagagcgagaacagcgaggaccccgagcccgacagaaagaagagcggcaacgcctgcgacaacgacatgaactgcaacgacgacggccacagcagcagcaaccccgacagcagagacagcgacgacagcttcgagcacagcgacttcgagaaccccaaggccggcgaggacggcttcggcgccctgggcgccatgcagatcaaggtggagagatacgtggagagcgagagcgacctgagactgcagaactgcgagagcctgaccagcgacagcgccaaggacagcgacagcgccggcgaggccggcgcccaggccagcagcaagcaccagaagagaaagaagagaagaaagagacagaagggcggcagcgccagcagaagaagactgagcagcgccagcagccccggcggcctggacgccggcctggtggagccccccagactgctgagcagccccaacagcgccagcgtgctgaagatcaagaccgagatcagcgagcccatcaacttcgacaacgacagcagcatctggaactacccccccaacagagagatcagcagaaacgagagcccctacagcatgaccaagccccccagcagcgagcacttccccagcccccagggcggcggcggcggcggcggcggcggcggcggcctgcacgtggccatccccgacagcgtgctgaccccccccggcgccgacggcgccgccgccagaaagacccagttcggcgccagcgccaccgccgccctggcccccgtggccagcgaccccctgagcccccccctgagcgccagccccagagacaagcaccccggcaacggcggcggcggcggcggcggcggcggcggcgccggcggcggcggccccagcgccagcaacagcctgctgtacaccggcgacctggaggccctgcagagactgcaggccggcaacgtggtgctgcccctggtgcacagagtgaccggcaccctggccgccaccagcaccgccgcccagagagtgtacaccaccggcaccatcagatacgcccccgccgaggtgaccctggccatgcagagcaacctgctgcccaacgcccacgccgtgaacttcgtggacgtgaacagccccggcttcggcctggaccccaagacccccatggagatgctgtaccaccacgtgcacagactgaacatgagcggccccttcggcggcgccgtgagcgccgccagcctgacccagatgcccgccggcaacgtgttcaccaccgccgagggcctgttcagcaccctgcccttccccgtgtacagcaacggcatccacgccgcccagaccctggagagaaaggaggactag

SEQ ID NO: 63450 - protein, 729 aa, Artificial Sequence
  derived and/or modified sequence
MAEDKETKHGGHKNGRKGGLSGTSFFTWFMVIALLGVWTSVAVVWFDLVDYEEVLGKLGIYDADGDGDFDVDDAKVLLGLKERSTSEPAVPPEEAEPHTEPEEQVPVEAEPQNIEDEAKEQIQSLLHEMVHAEHVEGEDLQQEDGPTGEPQQEDDEFLMATDVDDRFETLEPEVSHEETEHSYHVEETVSQDCNQDMEEMMSEQENPDSSEPVVEDERLHHDTDDVTYQVYEEQAVYEPLENEGIEITEVTAPPEDNPVEDSQVIVEEVSIFPVEEQQEVPPETNRKTDDPEQKAKVKKKKPKLLNKFDKTIKAELDAAEKLRKRGKIEEAVNAFKELVRKYPQSPRARYGKAQCEDDLAEKRRSNEVLRGAIETYQEVASLPDVPADLLKLSLKRRSDRQQFLGHMRGSLLTLQRLVQLFPNDTSLKNDLGVGYLLIGDNDNAKKVYEEVLSVTPNDGFAKVHYGFILKAQNKIAESIPYLKEGIESGDPGTDDGRFYFHLGDAMQRVGNKEAYKWYELGHKRGHFASVWQRSLYNVNGLKAQPWWTPKETGYTELVKSLERNWKLIRDEGLAVMDKAKGLFLPEDENLREKGDWSQFTLWQQGRRNENACKGAPKTCTLLEKFPETTGCRRGQIKYSIMHPGTHVWPHTGPTNCRLRMHLGLVIPKEGCKIRCANETKTWEEGKVLIFDDSFEHEVWQDASSFRLIFIVDVWHPELTPQQRRSLPAI

SEQ ID NO: 63451 - DNA, 2190 bp, Artificial Sequence
  derived and/or modified sequence
atggcagaagacaaagagaccaagcacggcggccacaagaacggccggaagggagggttgagcggtacctcattcttcacctggtttatggtaattgcattgctgggcgtgtggacatcagtggctgttgtatggttcgatcttgtcgactacgaagaggttcttggcaagctagggatatatgacgcagatggcgacggcgacttcgacgtagacgatgcaaaggtcctcctgggactcaaggaaagaagcacaagcgaaccagccgtaccacctgaagaggccgagcctcacaccgaacctgaggagcaggtgcccgtagaggcagagccgcaaaatatcgaagatgaagccaaagagcagatccagagcctattgcacgaaatggtacatgccgagcacgtggagggggaagatttacaacaagaggacgggcccacaggagaaccgcaacaggaagatgacgagtttctcatggctaccgacgtggacgaccgcttcgaaacccttgagcctgaagtgtcccatgaagagactgaacattcgtaccatgtggaagagactgtttcccaggactgcaatcaggatatggaggagatgatgtctgagcaggagaatcccgactctagtgaaccagtcgtcgaggacgagcgtctgcatcatgatactgatgacgtgacctaccaggtgtacgaggaacaggccgtctacgagcctcttgaaaatgaaggtatcgagatcacagaggtaacagctccccccgaagacaaccccgtagaagattcacaagtgatcgtcgaagaagtctcaatctttcccgtagaggaacagcaggaggtccctccagagactaacaggaagacagatgacccagaacagaaagccaaagtcaagaagaaaaaacccaagctgttgaataaatttgacaagactattaaggctgagctagatgccgcagagaagctgcggaagcgcggtaagatcgaggaggccgtgaacgcgttcaaagaattggtccgaaagtatccacagtctccccgggcccggtatgggaaggcacagtgcgaggatgatcttgcggaaaaaagaagatctaacgaggtcttacgcggggcaatcgagacctaccaagaggtggcctccctcccagacgtacctgcggatttactaaagctctccttgaagagacggtctgatcggcaacagtttttaggccacatgcgaggcagcctcctaaccttacaacgcctggtgcagttatttccaaacgacactagcctgaagaatgacctgggcgtgggctatcttctgataggagataacgacaacgctaaaaaggtttacgaagaggtgctttctgtgacacctaacgacgggtttgcaaaggtccattacggattcattttgaaggcccaaaataaaatcgcagagagcattccatacctgaaagagggaattgaaagcggggatccaggaacagacgatggtaggttctacttccacctgggcgatgcaatgcaaagagtgggaaataaggaggcctataaatggtatgaactgggccacaaaagaggacattttgccagcgtgtggcagagatctctgtataacgtgaacggactgaaggcccagccctggtggacacccaaggagaccggatatactgaactcgttaaaagcttagagcgcaattggaaacttataagggatgaggggctggccgttatggataaagctaaaggcctcttcctgccagaggatgagaatcttcgagaaaagggcgactggagtcagttcacgctttggcagcaggggcggcgcaatgaaaacgcatgtaaaggcgctcccaaaacatgtacattgctggagaaattcccagaaacgaccggatgtcggagaggacagatcaaatattctatcatgcacccaggcacccacgtgtggcctcatactggccccactaattgccgacttcggatgcacctgggacttgtgatcccaaaggaagggtgtaaaattcggtgtgccaatgagacaaagacgtgggaggaaggaaaagtactaatttttgatgactcattcgaacatgaggtctggcaggatgcatcttctttccggctcatctttattgttgacgtctggcatccggagctgacccctcagcaacgccggagtcttccagcaatctag

SEQ ID NO: 63452 - DNA, 2190 bp, Artificial Sequence
  derived and/or modified sequence
atggccgaggacaaggagaccaagcatggaggccacaagaatggaagaaaaggaggcctgagcggcaccagcttcttcacctggttcatggtgattgccctgctgggcgtgtggacctctgtggccgtggtgtggtttgacctggtggactatgaggaggtgctgggcaagctgggcatctatgatgctgatggagatggagactttgatgtggatgatgccaaggtgctgctgggcctgaaggagaggagcaccagcgagcctgctgtgcccccagaggaggccgagccccacacagagcctgaggagcaggtgcctgtggaggccgagccccagaacattgaagatgaggccaaggagcagatccagagcctgctgcacgagatggtgcacgccgagcacgtggagggggaggacctgcagcaggaggatggccccactggagagccccagcaggaggatgatgagttcctgatggccacagatgtggatgacagatttgagaccctggagcctgaggtgtcccatgaggagacagagcacagctaccacgtggaggagaccgtgtcccaggactgcaaccaggacatggaggagatgatgtctgagcaggagaacccagacagcagcgagcctgtggtggaggatgagcggctgcaccacgacacagatgatgtgacctaccaggtgtatgaggagcaggccgtgtatgagcccctggagaatgaaggaattgagatcacagaggtgacagcccccccagaggacaaccctgtggaggacagccaggtgattgtggaggaggtgtccatcttccctgtggaggagcagcaggaggtgcccccagagaccaacaggaagacagatgatcctgagcagaaggccaaggtgaagaagaagaagcccaagctgctgaacaagtttgacaagaccatcaaggccgagctggatgctgctgagaagctgaggaagaggggcaagattgaggaggccgtgaatgccttcaaggagctggtgaggaagtacccccagagcccccgggcccgctatggcaaggcccagtgtgaagatgacctggccgagaagagaagaagcaatgaggtgctgcggggggccatcgagacctaccaggaggtggccagcctgcctgatgtgcctgctgacctgctgaagctgagcctgaagagaagaagtgaccggcagcagttcctgggccacatgaggggcagcctgctgaccctgcagaggctggtgcagctgttccccaatgacaccagcctgaagaatgacctgggcgtgggctacctgctgattggagacaatgacaatgccaagaaggtgtatgaggaggtgctgtctgtgaccccaaatgatggctttgccaaggtgcactacggcttcatcctgaaggcccagaacaagattgctgagagcatcccctacctgaaggagggcatcgagagcggggaccctggaacagatgatggccgcttctacttccacctgggagatgccatgcagagggtgggcaacaaggaggcctacaagtggtatgagctgggccacaagaggggccactttgcctctgtgtggcagaggagcctgtacaacgtgaatggcctgaaggcccagccctggtggacccccaaggagaccggctacacagagctggtgaagagcctggagaggaactggaagctgatcagagatgagggcctggccgtgatggacaaggccaagggcctcttcctgcctgaagatgagaacctgcgggagaagggggactggagccagttcaccctgtggcagcagggcagaagaaatgaaaatgcctgcaagggggcccccaagacctgcaccctgctggagaagtttcctgagaccaccggctgccggcggggccagatcaagtacagcatcatgcaccctggcacccacgtgtggccccacacaggccccaccaactgccgcctgaggatgcacctgggcctggtgatccccaaggagggctgcaagatccgctgtgccaatgagaccaagacctgggaggagggcaaggtgctgatctttgatgacagctttgagcacgaggtgtggcaggatgccagcagcttccgcctcatcttcatcgtggatgtgtggcaccctgagctgaccccccagcagaggaggagcctgcctgccatctag

SEQ ID NO: 63453 - DNA, 2190 bp, Artificial Sequence
  derived and/or modified sequence
atggccgaggacaaggagaccaagcacggcggccacaagaacggcagaaagggcgggctctctggtacaagcttctttacctggtttatggtcattgctctgctgggtgtttggacctcggtcgccgtggtgtggtttgatttagtcgattacgaggaggttttgggcaaacttggcatctatgacgcagacggtgatggcgatttcgatgtcgatgatgcaaaggttctgcttggcctcaaggaacgaagtacttctgagcccgctgtgccacccgaggaggccgaacctcataccgagccagaggagcaggtgccggtggaagccgagcctcagaatatcgaagacgaggctaaggagcagattcagtctcttctgcatgaaatggtgcacgccgagcatgtcgagggagaagatttgcagcaagaggacggccccacaggagagcctcaacaggaagacgatgagtttcttatggctaccgatgtcgacgataggttcgagaccctggagcctgaagtgtcacacgaggagacagaacacagttatcacgtcgaagaaaccgtgtcacaagactgtaaccaggacatggaggaaatgatgagtgagcaagaaaaccccgatagcagcgagcccgtagtggaagatgagagacttcaccacgacaccgatgacgtgacttaccaagtgtacgaggaacaagccgtgtatgaaccgctggagaacgagggtatcgaaatcacggaggtgaccgccccccccgaggacaaccctgtggaagacagtcaggtaattgtggaggaagtatctattttcccggtggaggaacaacaggaagtgcccccagaaaccaacagaaagaccgatgatcctgaacaaaaggccaaggtcaagaagaaaaagcctaagttgctgaataaatttgataagaccattaaggccgaattagatgcagcggagaagctgcgcaagaggggcaagattgaggaagccgtcaacgccttcaaggaattagtgcgcaagtatcctcagagcccccgggcgcggtatgggaaggcccaatgcgaggacgatctggccgaaaagcggagatcgaacgaggttcttaggggtgccattgaaacctaccaagaggtagcaagcctacctgacgtgcctgcagacctactcaagttatcactgaagaggcggtccgatagacaacagttcctaggacatatgaggggctccctgctgacactccaaagactcgtgcagctgtttccaaacgatacgtcactaaaaaatgacctcggagtggggtatcttttgattggggataatgacaacgcaaaaaaagtgtacgaggaagtgctctccgtcactccgaatgacggcttcgccaaggtgcattatggttttatattaaaggcccaaaataagattgcagaatcaattccatatctgaaggaaggaatagagtcaggtgaccccggcaccgacgatgggaggttttattttcaccttggagatgctatgcaacgggtcggcaataaggaagcttataaatggtacgaattagggcacaaaaggggccattttgcctctgtgtggcaaaggtccttgtataacgtgaacggcttgaaggcccagccatggtggaccccgaaagagacgggctacaccgagttggtcaaaagcctggaaaggaactggaagctcattcgggatgaaggtcttgccgtgatggacaaagcgaagggcctctttttgcccgaagacgaaaatctccgagaaaaaggagattggtcccagtttacattatggcagcagggccgacggaacgagaacgcatgcaaaggtgcccccaagacgtgtaccctgctcgagaagtttcctgaaactaccggctgtagacgaggtcagatcaagtactcaataatgcatcctggcacgcacgtgtggccgcacactggaccaaccaattgtcgcctgagaatgcacctgggcctggtgatcccaaaagaggggtgcaaaatccgatgcgccaacgaaacaaaaacctgggaggaagggaaagtgctgatctttgatgatagttttgaacacgaagtgtggcaagatgcctcaagcttcaggctcatatttattgtggatgtgtggcatccagaactgacaccccaacaacgccgcagtctgccagcaatctag

SEQ ID NO: 63454 - DNA, 2190 bp, Artificial Sequence
  derived and/or modified sequence
atggcagaagacaaagagacaaagcacggtggccataaaaatggcaggaagggcggactgtcaggtacctcattctttacttggtttatggtgatagccctgctaggcgtgtggaccagtgtagcagtagtgtggttcgatttggtagactacgaagaggttctgggtaaactggggatttacgatgcagatggagatggcgatttcgacgtggacgacgctaaagtcttactgggcctaaaagaacggagcactagtgaacctgccgtcccaccagaagaggccgagccccatacagagccagaggaacaggtgccagttgaggcagaacctcagaacatcgaagatgaggccaaagaacagattcagagcctcttacatgagatggtgcatgcagagcatgtggagggagaagatcttcagcaggaggacggcccaaccggggagccccagcaagaggatgacgagtttttgatggcgaccgacgtggacgaccgtttcgagacactggaacctgaggtgagtcacgaggagactgaacacagttaccacgtggaggagacagtgtcccaggactgcaatcaagacatggaggaaatgatgagcgaacaggagaaccccgacagctctgagcctgtggtggaggatgagaggctacatcacgacaccgacgatgtcacctaccaagtgtatgaggagcaggccgtgtatgaacccctggagaatgaaggaattgagattactgaagttacggcgcctcctgaagataacccggttgaagattcacaagttatcgtagaggaagtgtccatctttcccgtggaggagcagcaggaagtgcctcccgaaaccaatagaaagacggacgaccctgagcagaaagccaaagtgaagaaaaagaaaccaaagctgctcaacaagtttgataagacaattaaggcggagctggatgctgccgaaaagctacgaaagcgaggtaaaattgaggaggctgtgaacgccttcaaggaactcgtgcgcaaatacccccagtccccgagggcacgctatggcaaagcccagtgtgaggatgatctggccgagaagagaagatcaaatgaagtccttcggggagctattgaaacataccaggaggtggcttctctgccagatgtaccagctgatttgctgaaactgtccctgaagcgtcgttcggacagacagcagtttttgggacacatgaggggaagcctgcttacactgcagagattagtgcagctgttccccaatgacaccagccttaagaatgatctcggggttggctacctgctgataggagataatgacaacgccaaaaaggtttacgaagaggtcctttcggtgaccccgaacgatggttttgccaaagtgcactacggcttcatactcaaagcccagaataagatcgccgaaagcattccctatcttaaggagggcattgaaagcggggacccagggaccgacgatggcaggttttattttcacctgggcgacgcgatgcagcgggtcgggaacaaggaggcgtataagtggtacgagctgggccataagcgtggacactttgcttcagtctggcaacggtctctgtacaatgtgaacgggctgaaagctcagccctggtggacacctaaagagaccgggtacaccgaattggtgaagagcctggaaagaaactggaagctcatcagagacgagggcctggcagttatggataaagccaaggggcttttcctgcccgaggatgaaaacctaagagagaagggagattggagccagttcacactgtggcaacagggtcgaagaaatgaaaacgcttgtaagggtgccccaaagacatgcactttgcttgagaagtttcccgagactacaggatgccgacgtgggcagatcaaatatagcatcatgcatccagggactcacgtctggccccataccggtcctaccaattgccggcttcggatgcacctgggcctcgtcattcccaaagaggggtgcaaaataagatgcgctaatgaaaccaagacgtgggaggagggaaaagtgctgatattcgacgatagctttgaacacgaggtttggcaggatgcttcgagttttagactgatttttatagtcgacgtgtggcatccggaactgacaccccagcagcggagatcgctgcccgcaatctag

SEQ ID NO: 63455 - DNA, 5153 bp, Artificial Sequence
  derived and/or modified sequence
tttcagttctagaggcccttacagtgcagggattggccagtctcaagctctggtaggcaagtgcatgcagtgtgcctaaaacctgccagcagtacttttgagtttttttttttgttttgttttactttagcatttattattcatggattgaagaaatcaaaatggctgaagataaagagacaaagcatggaggacacaagaatgggaggaaaggcggactctcaggaacttcattcttcacgtggtttatggtgattgcattgctgggcgtctggacatctgtagctgtcgtttggtttgatcttgttgactatgaggaagttctaggaaaactaggaatctatgatgctgatggtgatggagattttgatgtggatgatgccaaagttttattaggacttaaagagagatctacttcagagccagcagtcccgccagaagaggctgagccacacactgagcccgaggagcaggttcctgtggaggcagaaccccagaatatcgaagatgaagcaaaagaacaaattcagtcccttctccatgaaatggtacacgcagaacatgttgagggagaagacttgcaacaagaagatggacccacaggagaaccacaacaagaggatgatgagtttcttatggcgactgatgtagatgatagatttgagaccctggaacctgaagtatctcatgaagaaaccgagcatagttaccacgtggaagagacagtttcacaagactgtaatcaggatatggaagagatgatgtctgagcaggaaaatccagattccagtgaaccagtagtagaagatgaaagattgcaccatgatacagatgatgtaacataccaagtctatgaggaacaagcagtatatgaacctctagaaaatgaagggatagaaatcacagaagtaactgctccccctgaggataatcctgtagaagattcacaggtaattgtagaagaagtaagcatttttcctgtggaagaacagcaggaagtaccaccagaaacaaatagaaaaacagatgatccagaacaaaaagcaaaagttaagaaaaagaagcctaaacttttaaataaatttgataagactattaaagctgaacttgatgctgcagaaaaactccgtaaaaggggaaaaattgaggaagcagtgaatgcatttaaagaactagtacgcaaataccctcagagtccacgagcaagatatgggaaggcgcagtgtgaggatgatttggctgagaagaggagaagtaatgaggtgctacgtggagccatcgagacctaccaagaggtggccagcctacctgatgtccctgcagacctgctgaagctgagtttgaagcgtcgctcagacaggcaacaatttctaggtcatatgagaggttccctgcttaccctgcagagattagttcaactatttcccaatgatacttccttaaaaaatgaccttggcgtgggatacctcttgataggagataatgacaatgcaaagaaagtttatgaagaggtgctgagtgtgacacctaatgatggctttgctaaagtccattatggcttcatcctgaaggcacagaacaaaattgctgagagcatcccatatttaaaggaaggaatagaatccggagatcctggcactgatgatgggagattttatttccacctgggggatgccatgcagagggttgggaacaaagaggcatataagtggtatgagcttgggcacaagagaggacactttgcatctgtctggcaacgctcactctacaatgtgaatggactgaaagcacagccttggtggaccccaaaagaaacgggctacacagagttagtaaagtctttagaaagaaactggaagttaatccgagatgaaggccttgcagtgatggataaagccaaaggtctcttcctgcctgaggatgaaaacctgagggaaaaaggggactggagccagttcacgctgtggcagcaaggaagaagaaatgaaaatgcctgcaaaggagctcctaaaacctgtaccttactagaaaagttccccgagacaacaggatgcagaagaggacagatcaaatattccatcatgcaccccgggactcacgtgtggccgcacacagggcccacaaactgcaggctccgaatgcacctgggcttggtgattcccaaggaaggctgcaagattcgatgtgccaacgagaccaagacctgggaggaaggcaaggtgctcatctttgatgactcctttgagcacgaggtatggcaggatgcctcatctttccggctgatattcatcgtggatgtgtggcatccggaactgacaccacagcagagacgcagccttccagcaatttagcatgaattcatgcaagcttgggaaactctggagagaggctgcctttctggttccatctccttgggtgtgaggatagaatttcgaacaccaagagtcaattcccttgacttgcagcccgagtaattcaaagcctcctcctagggtcagaagacactaaagggaatatttgcctcgctgcaattcatttaggaaacaccctgctgtgtgtcatctcatgacagcactggtcttctgccagtatttaaggtgaacatttgatagcttctaccttaccagccaaagatattttttccacatagaataggtctaattcaatgtataatgagaacatatgtagaaactgtgaatggattgctttagtttgtaatttttctatgcagttatatttttctagtgtagctagactattttgtcatcatgtaccactacatttttgtttattttaatgacaagctgtataaatgctttacttctagctatttaatggtagcattactggggaactcagacttccctcttttaattcttcttagtaaaagatactcatgaaaaaagcagttttattttcctaacaaaaaagaaagagctcattatgtcagtgtctatgaactgtacccatcccaactctcaaatcgtttggttttttttatcttgattgagatcctcttctcactatgctagtggtggagatattgacaaaatcctatttctttcaaagaggaacttttcacaccgaaaaaagagcatggaattattttatattgttataaaaatcccagatgcaaatttttttaatgccaattattagagcttctggggaaaaagtatagttcacggaaataaaactatgttctttcagggttgggtggataggtggctgctagggtgtctggctcctggcggctttgccatccatgaggcaagggctgggaacacagtgtctttgcctatggtagatccatgtgaatgtcaggaagccagctcttcagtcttggagatgatttctgctacaattctgtagaaagattaaggatggcagagtaaaaggttaccaagaatgccaggatgtttttcttgggcgtaggaggtccagattactttcctttttgatgaaagagtttggaagactgtcccatctctctggcttgagaaatctctgccattttaaacatcactgtgaaatagcaattattatcatctgtatttagttttaacattacccacaacatagaaataataggtaaaaatcgtcttgcctactcattccaaagatgatcaagtcattaatctagcaaagtattcatgtatcagattttgtatattttgaatcaaagctaactaggaatgttagatataagaatgtaatgatattcatgcactgaattctaagccaatatgaacaaaaatgctgcatgaatggcacatataggtcaccaaagttcattcacaggtagaaaaaacttgtgctttcttttccatctaaaaacaaaaggagactttctttatctcatttaaagaacagctctttgaaattgaaattgaccctttttgcttgaccttaaggagattagcttccagtagatgagtttgcaaaatacttttcctgttcttttgttttgctggtattgaaaacatcccactaaatcagatgaagaggcatgggaggaaaaatatccaaattaattactaaaatcgagaagagaaggcaaactcttgaaaagtaaaaaggtgtttgtgaccttcagtatttattgaacagaggaaataactgacaagggcaatacaattcaatgttcatgtagtaacattcatgtcacttgttgaatttggttctcatatgtatattgcatacacataaattcaaactataagtcgtcatttttgagccatcatcttacattcatgtaatgaaattatggaagagagtaaaaactagctcttaacttagtaaatataatatggtatttaaaatcaggtcactacagtaaggttctaagtattgccaattgaaaagctagaaatggtattactgttgcaaagtgttgtcaataattgactccaatagcattgtaaatacttgtatcccacaactattttaaacccaagcaataaaatggattttctaattcacttcaattctttatttctcttacctatctatgtcttggtacataagaaaagtgtttccatcactgcattggtagaattatttcagtgttattatttttgtgatttcgtatgtctacacaaaaatgaattagtttaatttatattgtgatacagttgtttgagaaatatttttaattctgtttcaactttatttctccaagtgtataatataaaaattacttctgttattgttctctaccaataggggaaaaaattaaaacattagatccattgagaaagagatgatgtaataaataattaagattagtaataatattatcaggggtgattatgaccagttgaataatctctttcccttgaattatttagctaacaaattaactctcccaaatatttaaaataatgtaaaatcatattttactgcccattattaactaaaatatttttgtttgactttgagcaccaactggtaatactaataaatacccatgtcatgcagatggctgggcgaataagagatgtctaaaaatatgcactggtcttggaaaacatggcacaagtaaggatatcatatatgatgtctgtttattttatgtctgatttcttttgaatgagtagttggggactccatttctaaggagactaggtaaataaaatgacctttgacatttc

SEQ ID NO: 63456 - DNA, 2190 bp, Artificial Sequence
  derived and/or modified sequence
atggccgaggacaaggagaccaagcacggcggccacaagaacggcagaaagggcggcctgagcggcaccagcttcttcacctggttcatggtgatcgccctgctgggcgtgtggaccagcgtggccgtggtgtggttcgacctggtggactacgaggaggtgctgggcaagctgggcatctacgacgccgacggcgacggcgacttcgacgtggacgacgccaaggtgctgctgggcctgaaggagagaagcaccagcgagcccgccgtgccccccgaggaggccgagccccacaccgagcccgaggagcaggtgcccgtggaggccgagccccagaacatcgaggacgaggccaaggagcagatccagagcctgctgcacgagatggtgcacgccgagcacgtggagggcgaggacctgcagcaggaggacggccccaccggcgagccccagcaggaggacgacgagttcctgatggccaccgacgtggacgacagattcgagaccctggagcccgaggtgagccacgaggagaccgagcacagctaccacgtggaggagaccgtgagccaggactgcaaccaggacatggaggagatgatgagcgagcaggagaaccccgacagcagcgagcccgtggtggaggacgagagactgcaccacgacaccgacgacgtgacctaccaggtgtacgaggagcaggccgtgtacgagcccctggagaacgagggcatcgagatcaccgaggtgaccgccccccccgaggacaaccccgtggaggacagccaggtgatcgtggaggaggtgagcatcttccccgtggaggagcagcaggaggtgccccccgagaccaacagaaagaccgacgaccccgagcagaaggccaaggtgaagaagaagaagcccaagctgctgaacaagttcgacaagaccatcaaggccgagctggacgccgccgagaagctgagaaagagaggcaagatcgaggaggccgtgaacgccttcaaggagctggtgagaaagtacccccagagccccagagccagatacggcaaggcccagtgcgaggacgacctggccgagaagagaagaagcaacgaggtgctgagaggcgccatcgagacctaccaggaggtggccagcctgcccgacgtgcccgccgacctgctgaagctgagcctgaagagaagaagcgacagacagcagttcctgggccacatgagaggcagcctgctgaccctgcagagactggtgcagctgttccccaacgacaccagcctgaagaacgacctgggcgtgggctacctgctgatcggcgacaacgacaacgccaagaaggtgtacgaggaggtgctgagcgtgacccccaacgacggcttcgccaaggtgcactacggcttcatcctgaaggcccagaacaagatcgccgagagcatcccctacctgaaggagggcatcgagagcggcgaccccggcaccgacgacggcagattctacttccacctgggcgacgccatgcagagagtgggcaacaaggaggcctacaagtggtacgagctgggccacaagagaggccacttcgccagcgtgtggcagagaagcctgtacaacgtgaacggcctgaaggcccagccctggtggacccccaaggagaccggctacaccgagctggtgaagagcctggagagaaactggaagctgatcagagacgagggcctggccgtgatggacaaggccaagggcctgttcctgcccgaggacgagaacctgagagagaagggcgactggagccagttcaccctgtggcagcagggcagaagaaacgagaacgcctgcaagggcgcccccaagacctgcaccctgctggagaagttccccgagaccaccggctgcagaagaggccagatcaagtacagcatcatgcaccccggcacccacgtgtggccccacaccggccccaccaactgcagactgagaatgcacctgggcctggtgatccccaaggagggctgcaagatcagatgcgccaacgagaccaagacctgggaggagggcaaggtgctgatcttcgacgacagcttcgagcacgaggtgtggcaggacgccagcagcttcagactgatcttcatcgtggacgtgtggcaccccgagctgaccccccagcagagaagaagcctgcccgccatctag

SEQ ID NO: 63457 - DNA, 897 bp, Artificial Sequence
  derived and/or modified sequence
atggccgaagataaggagaccaagcacggggggcacaagaatggccggaaagggggactgtcgggaacaagcttctttacttggttcatggtgatagctctcctgggcgtgtggaccagtgttgctgtagtttggttcgatttggtggactacgaggaggtgctggccaaagcgaaggactttcgatacaatcttagtgaggtgctgcagggaaagctcggaatttacgatgcggatggggatggagactttgacgttgacgacgctaaggtcctgcttgggttgaaagaacggagtacttctgagcccgctgtgcccccagaagaggcagaaccgcataccgagcccgaggaacaagtgcccgtagaggctgaaccacaaaatatcgaagatgaagcaaaggagcagatacaatccctactgcacgagatggtgcatgccgaacatgtagagggtgaggacctgcagcaggaggacggccccacgggagagccgcaacaggaagatgatgagtttctgatggcgactgacgtcgacgaccgattcgaaaccttggagcctgaagtcagccatgaggaaaccgagcattcttatcacgtggaagaaacagtctcgcaagattgcaaccaggatatggaagagatgatgtctgagcaagaaaaccctgactcctcggaacccgtcgttgaggatgagcggctccaccacgatactgatgatgtcacctaccaggtgtatgaagaacaggtatacgaacctttagaaaacgaagggatcgagattactgaggtgacagccccaccagaggacaatcctgtggaagattcacaggtgatagtggaagaggtgtccattttcccagtggaggaacaacaggaagtgccgcctgacacctag

SEQ ID NO: 63458 - DNA, 897 bp, Artificial Sequence
  derived and/or modified sequence
atggccgaggacaaggagaccaagcatggaggccacaagaatggaagaaaaggaggcctgagcggcaccagcttcttcacctggttcatggtgattgccctgctgggcgtgtggacctctgtggccgtggtgtggtttgacctggtggactatgaggaggtgctggccaaggccaaggacttccgctacaacctgtctgaggtgctgcagggcaagctgggcatctatgatgctgatggagatggagactttgatgtggatgatgccaaggtgctgctgggcctgaaggagaggagcaccagcgagcctgctgtgcccccagaggaggccgagccccacacagagcctgaggagcaggtgcctgtggaggccgagccccagaacattgaagatgaggccaaggagcagatccagagcctgctgcacgagatggtgcatgctgagcacgtggagggggaggacctgcagcaggaggatggccccaccggggagccccagcaggaggatgatgagttcctgatggccacagatgtggatgacagatttgagaccctggagcctgaggtgtcccatgaggagacagagcacagctaccacgtggaggagaccgtgtcccaggactgcaaccaggacatggaggagatgatgtctgagcaggagaacccagacagcagcgagcctgtggtggaggatgagcggctgcaccacgacacagatgatgtgacctaccaggtgtatgaggagcaggtgtatgagcccctggagaatgaaggaattgagatcacagaggtgacagcccccccagaggacaaccctgtggaggacagccaggtgattgtggaggaggtgtccatcttccctgtggaggagcagcaggaggtgcccccagacacctag

SEQ ID NO: 63459 - DNA, 897 bp, Artificial Sequence
  derived and/or modified sequence
atggccgaggacaaggagaccaagcacggcggccacaagaacggccgaaaaggagggctgtccggaaccagcttcttcacatggttcatggtgatagccctgctgggggtctggacaagtgtggcagtggtctggttcgacctggtggactacgaggaagtgctcgctaaggccaaggacttccggtacaatttatctgaggttctccaagggaagctcggcatctatgatgctgacggtgatggagatttcgatgtcgatgatgcaaaggtgttactcgggttaaaagaacggagcacatccgaacctgccgttcctcctgaggaggccgaaccccatacagagccagaggaacaggttcccgtggaggcggagcctcagaacatcgaggatgaggcaaaggaacaaattcagagtctgctccatgaaatggtgcacgctgaacatgtggaaggagaagatctccagcaagaggacggaccgacaggcgaacctcaacaggaagacgacgagttcctgatggctaccgatgttgacgacagattcgaaaccctcgagcctgaagtgtcacacgaggagaccgagcatagctatcatgtggaggaaaccgtaagccaggattgtaaccaggatatggaagagatgatgtcggagcaggagaatcctgatagctccgaaccagtcgtggaggacgaaaggttgcaccatgatacagatgatgtcacgtaccaagtttatgaggaacaggtatatgagcccctggagaatgaggggatcgagattacggaagtaactgccccaccagaggacaatcctgttgaagattcacaggtgattgtcgaggaagtgtccatatttccggtcgaagagcaacaggaggtgcctccagacacatag

SEQ ID NO: 63460 - DNA, 897 bp, Artificial Sequence
  derived and/or modified sequence
atggcagaggataaggagaccaagcacggcggtcacaagaacggccgaaagggcggactgtctggcacttccttctttacttggttcatggtgatcgctctgcttggagtgtggactagtgtcgccgtagtctggttcgacctggtggactatgaagaggtgctcgctaaagcgaaggattttaggtacaatctgtcagaagttttacaggggaaactaggaatttacgacgccgacggagatggcgactttgacgttgatgatgctaaagtgcttctggggctgaaggaaagatccacctctgagcctgcggtgccgccagaagaggccgaaccacatacggaacctgaggagcaagtcccagtcgaggctgaacctcaaaatattgaggatgaagccaaggagcaaatccagagcctgcttcacgaaatggtccatgcagagcacgtggaaggggaagatctgcagcaagaagacggcccaacgggtgagccccagcaggaggacgacgagttcctgatggctactgacgtggacgaccgcttcgagacactggagccagaggtgtcccatgaagagacagagcacagctatcacgtagaagagaccgtgagccaggattgcaatcaagacatggaagaaatgatgagcgaacaagaaaacccagacagctccgaaccagttgtggaggacgaacggctgcaccacgatacggatgacgttacttaccaggtttacgaagagcaggtctacgagcctttagagaacgagggcattgaaatcaccgaggtgaccgcgccacccgaggataatcctgtggaggactcgcaggtgatagtagaggaagtatcaatttttccagtagaagaacaacaagaggtgccacccgatacatag

SEQ ID NO: 63461 - DNA, 2658 bp, Artificial Sequence
  derived and/or modified sequence
tgtgcctaaaacctgccagcagtacttttgagtttttttttttgttttgttttactttagcatttattattcatggattgaagaaatcaaaatggctgaagataaagagacaaagcatggaggacacaagaatgggaggaaaggcggactctcaggaacttcattcttcacgtggtttatggtgattgcattgctgggcgtctggacatctgtagctgtcgtttggtttgatcttgttgactatgaggaagttctagccaaagcaaaggacttccgttataacttatcagaggtgcttcaaggaaaactaggaatctatgatgctgatggtgatggagattttgatgtggatgatgccaaagttttattaggacttaaagagagatctacttcagagccagcagtcccgccagaagaggctgagccacacactgagcccgaggagcaggttcctgtggaggcagaaccccagaatatcgaagatgaagcaaaagaacaaattcagtcccttctccatgaaatggtacacgcagaacatgttgagggagaagacttgcaacaagaagatggacccacaggagaaccacaacaagaggatgatgagtttcttatggcgactgatgtagatgatagatttgagaccctggaacctgaagtatctcatgaagaaaccgagcatagttaccacgtggaagagacagtttcacaagactgtaatcaggatatggaagagatgatgtctgagcaggaaaatccagattccagtgaaccagtagtagaagatgaaagattgcaccatgatacagatgatgtaacataccaagtctatgaggaacaagtatatgaacctctagaaaatgaagggatagaaatcacagaagtaactgctccccctgaggataatcctgtagaagattcacaggtaattgtagaagaagtaagcatttttcctgtggaagaacagcaggaagtaccaccagatacttaaagcttcaaaaagactgcccctaccaccacaggaggaccagcctaaccatacgctccaaaagatggctgtgatagatcttgtgaagcaattactgagcagatcaagatctttgggaaggaacactaaagatgttttgaatgaattatagtccactggcattttagtgtatttttttttctttttagaaacacacatttctaaaaatgtcatgttacattcctgcatgtcccttttgatagcattagtggatccattggatttcttttttctttttgtgagacagcttttagtcttacctgaatttatgtgtgtttttccgacagtggttaataattatattggtgatgtagcagcaattgtgttggcagggttttcatatattattagtaattaacactaactgttggactgacttgtgtacactgtgttaaacatgatttaaaagctattaagagtactttgtgttagcactcttaaaaacgctaacagagatcatcattagctgtgaagatttgagttgtatatacctgcactgatattcttatcaaaaatttctacattagctttaagtgttcagattaacacttttgaaatttttgtagcttttagctgattaattagaaaaatttaatatttcagtgaaagttttaaattatcatttatttatttttttaaatgagaggggaaagctgaaattccttgttaagacacaaggaaaaagaatggccctactattatcatgcaaaaatgctttgttggcacctcagattaatcatataatagctatagtctcttcagcatttgtttaaattttagaaaacctgtataaattactggtgcataacttaaagattattctgcctttggctaattgagtaattcccctccagcactagagaccgctcagtgctcttactagatgaactcagtaacgccttgagctgggttgattgaggatgtgtgaaaagctcacagagcccgatgcctgctgctatttcacggcaatgagcctttttctttctacactgaagattttcttcttatttaatgtggtttattttgggctcagaaataattgctctgttgaaaataatcctttgtcagaaaagaaggtagctaccacatcattttgaaaggaccatgagcaactataagcaaagccataagaagtggtttgatcgatatattaggggtagctcttgattttgttaacattaagataaggtgactttttccccctgcttttaggattaaaatcaaagatacttctatatttttatcactatagatcatagttattatacaatgtagtgagtcctgcatgggtactcgatgtgtaatgaaacctgaaataataagataataagaaaagcaataattttctaaagctgtgctgtcggtgatacagagatgatactcaaattataataaaactcttcattttgtgaattatagaagctactttttataaagccatatttttttagggaaactaaggagtgacatagaactgatgaatgagtaaaagtaagttttgctggatttttgtagaactctggacgttgaggattcattatgctgtggttaactttaaatatttttgaattccaaatatctgaattaatgagccttgtctttacaaatatgtgccattgtgcaacatcggtgga

SEQ ID NO: 63462 - DNA, 897 bp, Artificial Sequence
  derived and/or modified sequence
atggccgaggacaaggagaccaagcacggcggccacaagaacggcagaaagggcggcctgagcggcaccagcttcttcacctggttcatggtgatcgccctgctgggcgtgtggaccagcgtggccgtggtgtggttcgacctggtggactacgaggaggtgctggccaaggccaaggacttcagatacaacctgagcgaggtgctgcagggcaagctgggcatctacgacgccgacggcgacggcgacttcgacgtggacgacgccaaggtgctgctgggcctgaaggagagaagcaccagcgagcccgccgtgccccccgaggaggccgagccccacaccgagcccgaggagcaggtgcccgtggaggccgagccccagaacatcgaggacgaggccaaggagcagatccagagcctgctgcacgagatggtgcacgccgagcacgtggagggcgaggacctgcagcaggaggacggccccaccggcgagccccagcaggaggacgacgagttcctgatggccaccgacgtggacgacagattcgagaccctggagcccgaggtgagccacgaggagaccgagcacagctaccacgtggaggagaccgtgagccaggactgcaaccaggacatggaggagatgatgagcgagcaggagaaccccgacagcagcgagcccgtggtggaggacgagagactgcaccacgacaccgacgacgtgacctaccaggtgtacgaggagcaggtgtacgagcccctggagaacgagggcatcgagatcaccgaggtgaccgccccccccgaggacaaccccgtggaggacagccaggtgatcgtggaggaggtgagcatcttccccgtggaggagcagcaggaggtgccccccgacacctag

SEQ ID NO: 63463 - DNA, 771 bp, Artificial Sequence
  derived and/or modified sequence
atggccgaggataaagagacaaaacatggggggcacaagaatgggaggaagggagggctctctggcacaagtttttttacttggtttatggtgatcgccttgctgggcgtctggacctccgtcgctgtcgtttggttcgacctggtcgattatgaggaagtcttagccaaggccaaggatttccgatataacctcagcgaagtattacaaggtaagttgggtatatatgacgcagacggcgacggtgatttcgatgtggacgatgccaaagtgcttctgggcctgaaggagcgcagcacttccgaacctgcagttccaccggaggaggccgaaccacatacagaacctgaagagcaggtgcctgtagaggcagaaccccagaatatcgaagacgaggccaaggagcagatccaaagcctccttcacgagatggtgcatgcagagcacgaaaccgaacatagttatcacgtggaggagaccgtgtcacaagattgtaaccaggacatggaggaaatgatgtcagagcaggaaaatcctgacagcagtgagcctgtggtggaggatgaacggctgcatcacgataccgacgacgtaacctatcaagtctatgaggagcaggcggtttatgaaccactcgagaatgagggaatagagatcacagaggtcacggctccacccgaggacaaccccgtagaggattcacaggttatagtcgaagaagtgtctatttttccagtggaggaacagcaggaggtacctcccgatacgtag

SEQ ID NO: 63464 - DNA, 771 bp, Artificial Sequence
  derived and/or modified sequence
atggccgaggacaaggagaccaagcatggaggccacaagaatggaagaaaaggaggcctgagcggcaccagcttcttcacctggttcatggtgattgccctgctgggcgtgtggacctctgtggccgtggtgtggtttgacctggtggactatgaggaggtgctggccaaggccaaggacttccgctacaacctgtctgaggtgctgcagggcaagctgggcatctatgatgctgatggagatggagactttgatgtggatgatgccaaggtgctgctgggcctgaaggagaggagcaccagcgagcctgctgtgcccccagaggaggccgagccccacacagagcctgaggagcaggtgcctgtggaggccgagccccagaacattgaagatgaggccaaggagcagatccagagcctgctgcacgagatggtgcatgctgagcatgaaacagagcacagctaccacgtggaggagaccgtgtcccaggactgcaaccaggacatggaggagatgatgtctgagcaggagaacccagacagcagcgagcctgtggtggaggatgagcggctgcaccacgacacagatgatgtgacctaccaggtgtatgaggagcaggccgtgtatgagcccctggagaatgaaggaattgagatcacagaggtgacagcccccccagaggacaaccctgtggaggacagccaggtgattgtggaggaggtgtccatcttccctgtggaggagcagcaggaggtgcccccagacacctag

SEQ ID NO: 63465 - DNA, 771 bp, Artificial Sequence
  derived and/or modified sequence
atggccgaggacaaggagaccaagcacggcggccacaagaacggcaggaaaggcggcctgtccggaactagctttttcacctggttcatggtgattgctttgcttggggtctggacgtctgtggcagtggtctggtttgacctcgttgattacgaagaagtgctggccaaggctaaagattttcgctataacctgagtgaggtgcttcaggggaagctaggtatttacgatgcagacggcgacggcgattttgacgtggacgacgctaaagttcttctggggctgaaggaaagaagtacctcagagcctgccgtgcctccggaagaggccgagccccatacggagcctgaagagcaggtgccagttgaagcagagcctcagaacatcgaagacgaggcaaaagagcaaattcagtccctgctccacgaaatggtgcacgcagagcacgagactgaacactcataccatgtggaggagacagtgtcacaggactgtaatcaggatatggaagagatgatgtcggagcaggaaaatcccgattctagtgagcctgtggttgaagacgaaaggctgcatcacgacaccgacgacgtaacctaccaggtctacgaggagcaggcggtgtacgagcctctcgagaatgagggtattgagataacggaagtcactgcccctcctgaggataaccccgttgaagacagtcaggtcatagtggaagaggtgtcgatcttcccggtggaagagcagcaggaggtccctccagatacctag

SEQ ID NO: 63466 - DNA, 771 bp, Artificial Sequence
  derived and/or modified sequence
atggccgaagataaggagaccaagcatggaggacacaagaacgggagaaaggggggtctgtccggcactagcttttttacctggtttatggtgattgcgctgctgggtgtctggacctcagtggctgtggtgtggtttgatctggtggattacgaagaagtcctcgccaaggcaaaggactttaggtacaatttgtccgaggtgctccagggaaagctgggcatctacgacgctgacggcgacggagacttcgacgttgacgacgccaaagttttgctcggcctcaaagaacgatctacctcagaacctgccgtgccaccagaggaagccgaacctcataccgagcccgaggagcaagtacccgtagaggcagagccccagaatatagaagatgaagccaaagaacagattcagtccctcctgcatgagatggttcacgccgagcacgaaaccgagcacagctatcacgtggaggagacagtcagccaggactgtaaccaggacatggaggaaatgatgagcgagcaagaaaacccagacagttctgaaccagttgttgaagacgagagattgcatcatgacactgacgatgtgacgtaccaggtatacgaagaacaggctgtttatgaaccacttgaaaacgaggggattgagattactgaggtaacagcccctcctgaggataaccccgtggaagattcccaagtcattgtagaggaggtgtctatattccctgtcgaggaacaacaggaggtgccccctgacacttag

SEQ ID NO: 63467 - DNA, 1258 bp, Artificial Sequence
  derived and/or modified sequence
cagtctcaagctctggtaggcaagtgcatgcagtgtgcctaaaacctgccagcagtacttttgagtttttttttttgttttgttttactttagcatttattattcatggattgaagaaatcaaaatggctgaagataaagagacaaagcatggaggacacaagaatgggaggaaaggcggactctcaggaacttcattcttcacgtggtttatggtgattgcattgctgggcgtctggacatctgtagctgtcgtttggtttgatcttgttgactatgaggaagttctagccaaagcaaaggacttccgttataacttatcagaggtgcttcaaggaaaactaggaatctatgatgctgatggtgatggagattttgatgtggatgatgccaaagttttattaggacttaaagagagatctacttcagagccagcagtcccgccagaagaggctgagccacacactgagcccgaggagcaggttcctgtggaggcagaaccccagaatatcgaagatgaagcaaaagaacaaattcagtcccttctccatgaaatggtacacgcagaacatgaaaccgagcatagttaccacgtggaagagacagtttcacaagactgtaatcaggatatggaagagatgatgtctgagcaggaaaatccagattccagtgaaccagtagtagaagatgaaagattgcaccatgatacagatgatgtaacataccaagtctatgaggaacaagcagtatatgaacctctagaaaatgaagggatagaaatcacagaagtaactgctccccctgaggataatcctgtagaagattcacaggtaattgtagaagaagtaagcatttttcctgtggaagaacagcaggaagtaccaccagatacttaaagcttcaaaaagactgcccctaccaccacaggaggaccagcctaaccatacgctccaaaagatggctgtgatagatcttgtgaagcaattactgagcagatcaagatctttgggaaggaacactaaagatgttttgaatgaattatagtccactggcattttagtgtatttttttttctttttagaaacacacatttctaaaaatgtcatgttacattcctgcatgtcccttttgatagcattagtggatccattggatttcttttttctttttgtgagacagcttttagtcttacctgaatttatgtgtgtttttccgacagtggttaataattatattggtgatgtagcagcaattgtgtt

SEQ ID NO: 63468 - DNA, 771 bp, Artificial Sequence
  derived and/or modified sequence
atggccgaggacaaggagaccaagcacggcggccacaagaacggcagaaagggcggcctgagcggcaccagcttcttcacctggttcatggtgatcgccctgctgggcgtgtggaccagcgtggccgtggtgtggttcgacctggtggactacgaggaggtgctggccaaggccaaggacttcagatacaacctgagcgaggtgctgcagggcaagctgggcatctacgacgccgacggcgacggcgacttcgacgtggacgacgccaaggtgctgctgggcctgaaggagagaagcaccagcgagcccgccgtgccccccgaggaggccgagccccacaccgagcccgaggagcaggtgcccgtggaggccgagccccagaacatcgaggacgaggccaaggagcagatccagagcctgctgcacgagatggtgcacgccgagcacgagaccgagcacagctaccacgtggaggagaccgtgagccaggactgcaaccaggacatggaggagatgatgagcgagcaggagaaccccgacagcagcgagcccgtggtggaggacgagagactgcaccacgacaccgacgacgtgacctaccaggtgtacgaggagcaggccgtgtacgagcccctggagaacgagggcatcgagatcaccgaggtgaccgccccccccgaggacaaccccgtggaggacagccaggtgatcgtggaggaggtgagcatcttccccgtggaggagcagcaggaggtgccccccgacacctag

SEQ ID NO: 63469 - DNA, 813 bp, Artificial Sequence
  derived and/or modified sequence
atggctcagcgtaagaacgctaagtcaagcgggaattcgtcctcttctggatctggcagtggttcaacaagcgcaggatcctcctcacccggagccagacgggaaaccaagcacgggggccataaaaatgggcgaaagggaggcctaagcggcacgtcgttcttcacttggttcatggtaattgcgcttctcggcgtgtggacaagcgtagccgtggtctggtttgaccttgtcgattatgaagaagttctgggaaagttaggtatctacgacgctgacggggatggggactttgacgtagacgatgccaaagtgctgctcggccttaaggagagaagcacaagtgagccagcagtcccacctgaagaggcagaacctcacacagagccagaggaacaagtgcccgttgaagcagagccccagaacattgaggatgaagcgaaggagcagatccagtccttgctacatgagatggtccatgccgaacacgagactgagcactcttatcacgtggaggagaccgtgagtcaagactgcaatcaagacatggaggaaatgatgagcgagcaggagaaccctgattcctccgagcctgtggtagaggacgaaaggctgcatcatgatactgatgacgtgacgtaccaggtgtacgaggagcaggctgtgtatgagccactcgagaatgaaggaatcgaaatcaccgaggtgacagcaccgccggaggacaatccagtggaggacagccaggtaatcgtggaagaagtctccattttccctgtggaggagcagcaggaagtcccgccggacacgtag

SEQ ID NO: 63470 - DNA, 813 bp, Artificial Sequence
  derived and/or modified sequence
atggcccagaggaagaatgccaagagcagcggcaacagcagcagcagcggcagcggcagcggcagcaccagcgctggcagcagcagccctggggcccggcgggagaccaagcacggcggccacaagaatggaaggaagggcggcctgagcggcaccagcttcttcacctggttcatggtgattgccctgctgggcgtgtggacctctgtggccgtggtgtggtttgacctggtggactatgaggaggtgctgggcaagctgggcatctatgatgctgatggagatggagactttgatgtggatgatgccaaggtgctgctgggcctgaaggagaggagcaccagcgagcctgctgtgcccccagaggaggccgagccccacacagagcctgaggagcaggtgcctgtggaggccgagccccagaacattgaagatgaggccaaggagcagatccagagcctgctgcacgagatggtgcatgctgagcatgaaacagagcacagctaccacgtggaggagaccgtgtcccaggactgcaaccaggacatggaggagatgatgtctgagcaggagaacccagacagcagcgagcctgtggtggaggatgagcggctgcaccacgacacagatgatgtgacctaccaggtgtatgaggagcaggccgtgtatgagcccctggagaatgaaggaattgagatcacagaggtgacagcccccccagaggacaaccctgtggaggacagccaggtgattgtggaggaggtgtccatcttccctgtggaggagcagcaggaggtgcccccagacacctag

SEQ ID NO: 63471 - DNA, 813 bp, Artificial Sequence
  derived and/or modified sequence
atggcccagcggaagaacgccaagagcagcggcaacagcagcagctcaggatctggttctgggagtacctctgccggctcttcttcgccaggcgcccggcgggagacaaagcacggtggacacaaaaacgggcgcaagggagggctgtctggaaccagtttttttacatggtttatggtcattgccctcctgggggtctggacatctgtggccgtggtatggttcgacttggttgactacgaagaagttctaggcaaactgggaatttacgacgctgacggcgatggagacttcgatgtggatgacgccaaagtgctcctcggtctcaaggaacgcagcaccagcgagccagcagttccccctgaggaggcagaaccccacacggagcctgaagagcaggtgcccgtggaggcagagcctcagaatatagaggatgaagcaaaggagcagatccaaagcctgttgcatgagatggttcacgccgaacacgagaccgagcatagttatcatgtggaggaaacagtctcccaggattgcaatcaggatatggaagagatgatgtcagagcaggagaatcctgatagttctgagcccgtggtggaggatgagcggttgcatcatgacaccgacgacgtcacatatcaggtgtacgaagagcaagccgtgtatgaacctctggagaacgaaggaattgagataactgaggttactgcaccccctgaggataaccctgtggaagacagtcaggtgattgtggaggaagtctctattttcccagttgaagagcagcaggaagtcccaccagacacgtag

SEQ ID NO: 63472 - DNA, 813 bp, Artificial Sequence
  derived and/or modified sequence
atggcgcagcgcaaaaatgcaaaaagctccggaaactcctcctcctcgggaagtgggtctggcagcacgtccgcaggcagctcatcacccggagccaggcgtgaaacaaagcatggcggacataagaacggtcgcaaggggggactgtccggcacctcattctttacttggttcatggtgattgccttgctcggtgtgtggactagtgtggcagttgtatggttcgatcttgtggactacgaggaagtgctgggcaagctggggatctacgatgcagacggcgacggagattttgatgttgatgatgcaaaggtcctcttaggtcttaaggagcgatcaacatcagaacctgccgtgcctccagaggaggctgaaccacataccgaaccagaagagcaggttccggtggaagcagaaccccagaacattgaggacgaggcaaaggagcagatacaatcactgcttcatgagatggtgcatgccgagcatgaaacggaacattcataccacgtggaggagacagtatcccaggattgcaaccaggacatggaggaaatgatgtcggaacaggagaatccggatagctccgagccagtcgtggaagatgaacggctccaccacgataccgatgacgtgacctaccaggtgtatgaggaacaggctgtttacgagccattggaaaacgaaggaatcgagatcaccgaggtaactgctccgccagaggacaaccctgtcgaggattctcaggtcattgtggaagaagtgtcaatattcccagtggaggagcagcaagaagtacccccagatacttag

SEQ ID NO: 63473 - DNA, 2744 bp, Artificial Sequence
  derived and/or modified sequence
ccgggcgcgcgcagccggcaggcgggtgaagtcttcccaggtgctgcaggcggtgctgaggcacagggtctgctgcaggagcagcggcccgaacccgctccagcggcccgccgccgccagcggttcccgcgtcgcgtgtgtacccccgcgcactgaaggaggtccgccagccctcaccagcccccgcggaccgtgcaatggcccagcgtaagaatgccaagagcagcggcaacagcagcagcagcggctccggcagcggtagcacgagtgcgggcagcagcagccccggggcccggagagagacaaagcatggaggacacaagaatgggaggaaaggcggactctcaggaacttcattcttcacgtggtttatggtgattgcattgctgggcgtctggacatctgtagctgtcgtttggtttgatcttgttgactatgaggaagttctaggaaaactaggaatctatgatgctgatggtgatggagattttgatgtggatgatgccaaagttttattaggacttaaagagagatctacttcagagccagcagtcccgccagaagaggctgagccacacactgagcccgaggagcaggttcctgtggaggcagaaccccagaatatcgaagatgaagcaaaagaacaaattcagtcccttctccatgaaatggtacacgcagaacatgaaaccgagcatagttaccacgtggaagagacagtttcacaagactgtaatcaggatatggaagagatgatgtctgagcaggaaaatccagattccagtgaaccagtagtagaagatgaaagattgcaccatgatacagatgatgtaacataccaagtctatgaggaacaagcagtatatgaacctctagaaaatgaagggatagaaatcacagaagtaactgctccccctgaggataatcctgtagaagattcacaggtaattgtagaagaagtaagcatttttcctgtggaagaacagcaggaagtaccaccagatacttaaagcttcaaaaagactgcccctaccaccacaggaggaccagcctaaccatacgctccaaaagatggctgtgatagatcttgtgaagcaattactgagcagatcaagatctttgggaaggaacactaaagatgttttgaatgaattatagtccactggcattttagtgtatttttttttctttttagaaacacacatttctaaaaatgtcatgttacattcctgcatgtcccttttgatagcattagtggatccattggatttcttttttctttttgtgagacagcttttagtcttacctgaatttatgtgtgtttttccgacagtggttaataattatattggtgatgtagcagcaattgtgttggcagggttttcatatattattagtaattaacactaactgttggactgacttgtgtacactgtgttaaacatgatttaaaagctattaagagtactttgtgttagcactcttaaaaacgctaacagagatcatcattagctgtgaagatttgagttgtatatacctgcactgatattcttatcaaaaatttctacattagctttaagtgttcagattaacacttttgaaatttttgtagcttttagctgattaattagaaaaatttaatatttcagtgaaagttttaaattatcatttatttatttttttaaatgagaggggaaagctgaaattccttgttaagacacaaggaaaaagaatggccctactattatcatgcaaaaatgctttgttggcacctcagattaatcatataatagctatagtctcttcagcatttgtttaaattttagaaaacctgtataaattactggtgcataacttaaagattattctgcctttggctaattgagtaattcccctccagcactagagaccgctcagtgctcttactagatgaactcagtaacgccttgagctgggttgattgaggatgtgtgaaaagctcacagagcccgatgcctgctgctatttcacggcaatgagcctttttctttctacactgaagattttcttcttatttaatgtggtttattttgggctcagaaataattgctctgttgaaaataatcctttgtcagaaaagaaggtagctaccacatcattttgaaaggaccatgagcaactataagcaaagccataagaagtggtttgatcgatatattaggggtagctcttgattttgttaacattaagataaggtgactttttccccctgcttttaggattaaaatcaaagatacttctatatttttatcactatagatcatagttattatacaatgtagtgagtcctgcatgggtactcgatgtgtaatgaaacctgaaataataagataataagaaaagcaataattttctaaagctgtgctgtcggtgatacagagatgatactcaaattataataaaactcttcattttgtgaattatagaagctactttttataaagccatatttttttagggaaactaaggagtgacatagaactgatgaatgagtaaaagtaagttttgctggatttttgtagaactctggacgttgaggattcattatgctgtggttaactttaaatatttttgaattccaaatatctgaattaatgagccttgtctttacaaatatgtgccattgtgcaacatcggtggattttctaaaaataatgtaaatgtcttctattaaatgttgagtgcaataaaatacagaagaattc

SEQ ID NO: 63474 - DNA, 813 bp, Artificial Sequence
  derived and/or modified sequence
atggcccagagaaagaacgccaagagcagcggcaacagcagcagcagcggcagcggcagcggcagcaccagcgccggcagcagcagccccggcgccagaagagagaccaagcacggcggccacaagaacggcagaaagggcggcctgagcggcaccagcttcttcacctggttcatggtgatcgccctgctgggcgtgtggaccagcgtggccgtggtgtggttcgacctggtggactacgaggaggtgctgggcaagctgggcatctacgacgccgacggcgacggcgacttcgacgtggacgacgccaaggtgctgctgggcctgaaggagagaagcaccagcgagcccgccgtgccccccgaggaggccgagccccacaccgagcccgaggagcaggtgcccgtggaggccgagccccagaacatcgaggacgaggccaaggagcagatccagagcctgctgcacgagatggtgcacgccgagcacgagaccgagcacagctaccacgtggaggagaccgtgagccaggactgcaaccaggacatggaggagatgatgagcgagcaggagaaccccgacagcagcgagcccgtggtggaggacgagagactgcaccacgacaccgacgacgtgacctaccaggtgtacgaggagcaggccgtgtacgagcccctggagaacgagggcatcgagatcaccgaggtgaccgccccccccgaggacaaccccgtggaggacagccaggtgatcgtggaggaggtgagcatcttccccgtggaggagcagcaggaggtgccccccgacacctag

SEQ ID NO: 63475 - protein, 203 aa, Artificial Sequence
  derived and/or modified sequence
MAQRKNAKSSGNSSSSGSGSGSTSAGSSSPGARRETKHGGHKNGRKGGLSGTSFFTWFMVIALLGVWTSVAVVWFDLVDYEEVLAKAKDFRYNLSEVLQGKLGIYDADGDGDFDVDDAKVLLGLTKDGSNENIDSLEEVLNILAEESSDWFYGFLSFLYDIMTPFEMLEEEEEESETADGVDGTSQNEGVQGKTCVILDLHNQ

SEQ ID NO: 63476 - DNA, 612 bp, Artificial Sequence
  derived and/or modified sequence
atggcccagagaaagaatgcgaagagcagtggtaattcttcctctagcgggagcggaagcgggagcacaagtgcgggctcctcgtccccgggcgcaagaagagagaccaagcacggcggacacaagaatggaaggaaaggcggcctcagtggaacatcatttttcacgtggttcatggtgatcgcgctgctaggggtgtggacctccgtcgccgtcgtttggtttgacctggttgactacgaagaggtgctagccaaagcaaaagattttcggtataacctgagcgaagtcctgcaggggaaactgggaatttacgacgccgatggggacggcgactttgacgtggatgacgctaaagtacttttgggactgacaaaagacggcagtaacgaaaacattgatagcctggaagaggtgcttaacattttggccgaagaatcaagtgattggttctatggctttctgtccttcctttacgatatcatgacacctttcgagatgctggaagaagaggaggaagagagcgaaacagcagatggggtagatggcacaagtcagaacgaaggcgtacagggaaaaacctgtgtcatactcgatttacacaatcagtag

SEQ ID NO: 63477 - DNA, 612 bp, Artificial Sequence
  derived and/or modified sequence
atggcccagaggaagaatgccaagagcagcggcaacagcagcagcagcggcagcggcagcggcagcaccagcgctggcagcagcagccctggggcccggcgggagaccaagcacggcggccacaagaatggaaggaagggcggcctgagcggcaccagcttcttcacctggttcatggtgattgccctgctgggcgtgtggacctctgtggccgtggtgtggtttgacctggtggactatgaggaggtgctggccaaggccaaggacttccgctacaacctgtctgaggtgctgcagggcaagctgggcatctatgatgctgatggagatggagactttgatgtggatgatgccaaggtgctgctgggcctgaccaaggatggcagcaatgaaaatattgacagcctggaggaggtgctgaacatcctggccgaggagagcagtgactggttctacggcttcctgtccttcctgtatgacatcatgaccccatttgagatgctggaggaggaggaggaggagagcgagacagcagatggagtggatggcaccagccagaatgaaggagtgcagggcaagacctgtgtgatcctggacctgcacaaccagtag

SEQ ID NO: 63478 - DNA, 612 bp, Artificial Sequence
  derived and/or modified sequence
atggcccagcggaagaacgccaagagcagcggcaacagcagcagcagcggctctgggtctgggtctacaagtgctggctcttcgagtccgggtgctcggagagaaacaaagcatgggggccacaaaaatggccggaaggggggcctgagcggaacctccttttttacatggtttatggtgattgcactgcttggcgtctggacatccgtggcagttgtgtggtttgacctggttgattacgaggaggtattggctaaagctaaggattttaggtacaacctgagcgaagtactccagggtaaactgggtatttatgatgctgacggcgacggggacttcgacgtggatgatgctaaggtgttactgggactgaccaaagacggatctaatgaaaacatcgactcactggaagaggtactgaacatactagccgaagaaagcagcgactggttttatggcttcctgagtttcctttacgacatcatgactccatttgagatgctagaagaggaagaagaggaatctgagacagcggatggagtggatggcacatcccagaatgagggcgtgcaaggtaaaacttgcgtgatactggatctccacaaccagtag

SEQ ID NO: 63479 - DNA, 612 bp, Artificial Sequence
  derived and/or modified sequence
atggcccagcgaaagaacgcgaagagttctgggaacagttcctcttccgggagcggttcagggtcaactagcgcaggaagttctagcccgggagcgaggcgggaaaccaaacacggcggacacaagaatggccgaaaaggaggactcagcgggactagcttcttcacatggtttatggtgatcgctctattaggcgtctggacttcagttgcagtggtctggttcgacttggtggactatgaagaggtcctggcaaaggccaaagactttcgatataatctgtctgaagtgctgcagggcaagctggggatctacgacgccgacggcgacggtgattttgacgtggatgacgctaaggtcttactgggtctgaccaaggatggatccaacgagaacatcgattctctggaggaagttttgaacattttagctgaggagagtagtgattggttttatggctttttatccttcttgtacgacataatgacccctttcgaaatgttggaggaggaagaggaagagagcgagacagccgacggcgtggatgggacgagtcagaacgaaggagtgcaggggaagacatgcgtgattctggacctccacaatcagtag

SEQ ID NO: 63480 - DNA, 1561 bp, Artificial Sequence
  derived and/or modified sequence
cgggtgaagtcttcccaggtgctgcaggcggtgctgaggcacagggtctgctgcaggagcagcggcccgaacccgctccagcggcccgccgccgccagcggttcccgcgtcgcgtgtgtacccccgcgcactgaaggaggtccgccagccctcaccagcccccgcggaccgtgcaatggcccagcgtaagaatgccaagagcagcggcaacagcagcagcagcggctccggcagcggtagcacgagtgcgggcagcagcagccccggggcccggagagagacaaagcatggaggacacaagaatgggaggaaaggcggactctcaggaacttcattcttcacgtggtttatggtgattgcattgctgggcgtctggacatctgtagctgtcgtttggtttgatcttgttgactatgaggaagttctagccaaagcaaaggacttccgttataacttatcagaggtgcttcaaggaaaactaggaatctatgatgctgatggtgatggagattttgatgtggatgatgccaaagttttattaggcctgaccaaagatggcagtaatgaaaatattgattctcttgaggaagtccttaatattttagcagaggaaagttcagattggttttatggtttcctctcatttctctatgatataatgactccttttgaaatgctagaagaagaagaagaagaaagcgaaaccgcagatggtgttgatggtacgtcacagaatgaaggggttcagggaaagacttgtgtcatattggatttacataaccagtaaccttgattcagggactgaagtcattggctaatgaacacctgaagcagcctcctttttcttttctttccttggcttatgcagggcttaatgtgcagtggggtggttgtgatcttaccgtgcaagtcaaccatgtgatcttgcccagtacagctactagctagtcccttgctcgctcagctcccccaacttctattgaagaaaatggtactcctcattcttgtagtcagctacaaagtacactgaaaatgatgttcttggtggtataattggtttctgtatcgttttgtttcaactcatgtattcactgaactaaatttggacacttaacagcaaattgtgttgtggttaacccttgatgcttgtctttctaacacactattaattatgatgattctaatggatttcattataaaaatatttctggcatgatttttaagttaaatgcttctctgttctttaacatgactgatgtataaaatgatggttctttactaagctgatattttttattgtaatttgtttaggtttgtcagataggttcatacaaatttctatgtaaaattctgtgttaatggtgcttttaaaataatttaaaaataactccatgtttttgccttagagtaagttaacttactgttttcagatagtagcatgacatatttctgtctgtgaaagcaaaatttattttaaattttatttccaaatatacatccagagaaagtaatttgtattttttttaaagtaggcatattacacaagagggaacatgtgaat

SEQ ID NO: 63481 - DNA, 612 bp, Artificial Sequence
  derived and/or modified sequence
atggcccagagaaagaacgccaagagcagcggcaacagcagcagcagcggcagcggcagcggcagcaccagcgccggcagcagcagccccggcgccagaagagagaccaagcacggcggccacaagaacggcagaaagggcggcctgagcggcaccagcttcttcacctggttcatggtgatcgccctgctgggcgtgtggaccagcgtggccgtggtgtggttcgacctggtggactacgaggaggtgctggccaaggccaaggacttcagatacaacctgagcgaggtgctgcagggcaagctgggcatctacgacgccgacggcgacggcgacttcgacgtggacgacgccaaggtgctgctgggcctgaccaaggacggcagcaacgagaacatcgacagcctggaggaggtgctgaacatcctggccgaggagagcagcgactggttctacggcttcctgagcttcctgtacgacatcatgacccccttcgagatgctggaggaggaggaggaggagagcgagaccgccgacggcgtggacggcaccagccagaacgagggcgtgcagggcaagacctgcgtgatcctggacctgcacaaccagtag

SEQ ID NO: 63482 - protein, 501 aa, Artificial Sequence
  derived and/or modified sequence
MPSKTKYNLVDDGHDLRIPLHNEDAFQHGICFEAKYVGSLDVPRPNSRVEIVAAMRRIRYEFKAKNIKKKKVSIMVSVDGVKVILKKKKKKKEWTWDESKMLVMQDPIYRIFYVSHDSQDLKIFSYIARDGASNIFRCNVFKSKKKSQAMRIVRTVGQAFEVCHKLSLQHTQQNADGQEDGESERNSNSSGDPGRQLTGAERASTATAEETDIDAVEVPLPGNDVLEFSRGVTDLDAVGKEGGSHTGSKVSHPQEPMLTASPRMLLPSSSSKPPGLGTETPLSTHHQMQLLQQLLQQQQQQTQVAVAQVHLLKDQLAAEAAARLEAQARVHQLLLQNKDMLQHISLLVKQVQELELKLSGQNAMGSQDSLLEITFRSGALPVLCDPTTPKPEDLHSPPLGAGLADFAHPAGSPLGRRDCLVKLECFRFLPPEDTPPPAQGEALLGGLELIKFRESGIASEYESNTDESEERDSWSQEELPRLLNVLQRQELGDGLDDEIAV

SEQ ID NO: 63483 - DNA, 283 bp, Artificial Sequence
  derived and/or modified sequence
caggatggcagaggaaggtgatgtggacgaggcggatgtgttcctggcatttgcccagggtccctcccctcccaggggtcccgtgcgacgtgccttggacaaggctttctttatcttcctggccctcttcctgacactgctgatgctggaggctgcttataagctgctgtggttactactatgggcaaagttaggggactggctcctggggacacctcagaaggaggaggagctggaattgtgaccacctttcctataaacatcttctttccccaccaaggag

SEQ ID NO: 63484 - DNA, 250 bp, Artificial Sequence
  derived and/or modified sequence
ggatgtgttcctggcatttgcccagggtccctcccctcccaggggtcccgtgcgacgtgccttggacaaggctttctttatcttcctggccctcttcctgacactgctgatgctggaggctgcttataagctgctgtggttactactatgggcaaagttaggggactggctcctggggacacctcagaaggaggaggagctggaattgtgaccacctttcctataaacatcttctttccccaccaaggag

SEQ ID NO: 63485 - DNA, 1506 bp, Artificial Sequence
  derived and/or modified sequence
atgccatccaagacgaagtataacctggtggacgacggacatgatctgcggatcccactgcacaatgaggacgcctttcagcacggtatttgttttgaggcaaagtatgtgggatctttggacgtgcctcgtcctaattctagggtggagattgtggcagcgatgaggcggattaggtatgagttcaaggcaaagaatattaagaagaaaaaggtctccatcatggtctccgtagatggggtcaaggtgattctaaaaaaaaaaaaaaagaagaaggaatggacctgggacgaaagcaagatgctagtgatgcaggatcccatttacaggatattctatgtttcacatgattcccaggatttgaagatcttctcttacatcgccagagatggtgctagtaacattttcagatgcaatgtgtttaaaagcaaaaaaaagagtcaagcaatgagaatagtgcggacagtagggcaggcctttgaagtatgtcacaagttgagcttgcagcacacacagcagaacgcggacggacaggaagatggagagtccgagcgaaactcaaattctagtggggatcccggcaggcagttaacaggcgcagaacgggcctccactgcaactgcagaagagactgacatcgacgcagttgaagtccctttgcccggaaatgatgtcctggagttcagcaggggcgtgacggatctcgatgctgtgggtaaagaaggaggaagccacaccgggtccaaggttagccacccccaagagcccatgctcacagccagccctaggatgttgttgccctcctcttcatccaaaccccccggactaggaaccgaaacgccactgtctacccaccatcaaatgcagctcctgcaacagcttctgcagcagcagcagcaacagacacaagtggcagtggctcaggtccacctgctgaaggatcagctcgctgccgaggcggctgcccgcctcgaggcccaagctcgggtgcaccagctgctcctccagaacaaagacatgctgcagcacatcagtttacttgtcaaacaggtgcaggaactggagctcaagctgtccggacagaatgcgatgggcagccaggacagtcttctggagatcaccttcaggtctggagccctgcccgttctttgcgatccaaccactccaaaaccagaggacttgcactccccaccccttggagctggtctggctgattttgctcaccctgcaggctccccactgggaagacgagactgtctggttaaactggaatgttttcgatttctgcctcccgaagacacccctcctccagcccaaggagaagccctcttaggcgggcttgagcttattaagtttcgtgagtccggcattgcttcagagtatgagtccaacaccgatgagtcagaggaaagggactcctggagccaggaggagctgccgcgtctactgaacgtgttacagcgccaagagctaggggacggtctggacgacgaaatcgccgtgtag

SEQ ID NO: 63486 - DNA, 1506 bp, Artificial Sequence
  derived and/or modified sequence
atgcccagcaagaccaagtacaacctggtggatgatggccatgacctgcgcatccccctgcacaatgaagatgccttccagcacggcatctgctttgaggccaagtatgtgggcagcctggatgtgccccggcccaacagccgggtggagatcgtggccgccatgaggcgcatccgctatgagttcaaggccaagaacatcaagaagaagaaggtgtccatcatggtgtctgtggatggagtgaaggtgatcctgaagaagaagaagaagaagaaggagtggacctgggatgagagcaagatgctggtgatgcaggaccccatctaccgcatcttctacgtgtcccatgacagccaggacctgaagatcttctcctacatcgccagagatggagccagcaacatcttccgctgcaatgtgttcaagagcaagaagaagagccaggccatgagaattgtgaggacagtgggccaggcctttgaggtgtgccacaagctgagcctgcagcacacccagcagaatgctgatggccaggaggatggagagagcgagaggaacagcaacagcagcggggaccccggccggcagctgaccggggctgagcgggccagcacagccacagctgaggagacagacattgatgctgtggaggtgcccctgcctggaaatgatgtgctggagttcagcagaggagtgacagacctggatgctgtgggcaaggagggcggcagccacacaggcagcaaggtgagccacccccaggagcccatgctgacagccagccccaggatgctgctgcccagcagcagcagcaagcccccaggcctgggcacagagacccccctgagcacccaccaccagatgcagctgctgcagcagctgctgcagcagcagcagcagcagacccaggtggccgtggcccaggtgcacctgctgaaggaccagctggccgctgaggccgccgcccggctggaggcccaggcccgggtgcaccagctgctgctgcagaacaaggacatgctgcagcacatcagcctgctggtgaagcaggtgcaggagctggagctgaagctgagcggccagaatgccatgggcagccaggacagcctgctggagatcaccttccgcagcggggccctgcctgtgctgtgtgaccccaccacccccaagccagaggacctgcacagcccccccctgggcgccggcctggccgactttgcccaccctgctggcagccccctgggccggcgggactgcctggtgaagctggagtgcttccgcttcctgcccccagaggacaccccacctccagcccagggcgaggccctgctgggcggcctggagctgatcaagttccgggagagcggcatcgcctctgaatatgagagcaacacagatgagagcgaggagcgggacagctggagccaggaggagctgccccggctgctgaatgtgctgcagaggcaggagctgggagatggcctggatgatgaaattgctgtgtag

SEQ ID NO: 63487 - DNA, 1506 bp, Artificial Sequence
  derived and/or modified sequence
atgcccagcaagaccaagtacaacctggtggacgacggccacgacttgaggatccctctacacaacgaagatgctttccagcacggtatctgctttgaggctaagtatgtgggctctctggatgtccctcgacccaatagccgcgttgagatcgtggctgcaatgcgcagaatccgatacgaatttaaggccaagaacatcaaaaaaaagaaagtatctataatggtgagtgttgacggcgtaaaggtgatattaaaaaaaaagaagaaaaaaaaagagtggacctgggacgagtccaagatgctggtcatgcaagatcctatttaccgtatcttctacgtatctcacgattcccaggacctcaaaattttctcttacatcgcacgcgacggagcttccaatatatttcgctgcaatgtttttaagtccaaaaaaaagtctcaggctatgcgcatcgtacgcacagttggtcaagcttttgaagtctgccacaagctcagtctgcaacatacccagcagaacgccgacggccaggaggatggcgaaagtgaacggaactcaaactcatctggcgatcccgggcggcagctcaccggggccgagcgcgcatcaacagcaacagccgaagaaaccgatattgatgccgtcgaggtcccattgcccgggaatgacgtccttgagttctcacgaggcgtgacagacctagacgcagtggggaaggaaggcggcagccacaccggctccaaggtaagccacccccaggaaccgatgctcaccgcatctcctagaatgctcctgccatcttcatcctcaaagccacctggccttggaactgagactccactgagcactcaccatcagatgcagcttctgcaacagctcttgcagcagcaacagcagcaaacccaagtggcagtggcccaggttcacttactgaaggaccagctcgcagcggaggcggctgcaagactcgaagcacaagctagagtgcatcagcttctgttgcagaataaggatatgctgcaacacatcagcctgctggtgaaacaagttcaggaactggagctaaaactttccggccagaacgcaatgggtagccaggactccctccttgaaataactttccggtccggagccttgccggtactatgcgacccaactaccccaaaacccgaggatcttcattcccctccactgggcgcagggctagcagactttgcccacccggccggctcccccctggggcgtcgcgactgcctcgtgaagttagaatgcttcaggtttcttccgcctgaggacacccccccaccagcccagggtgaggccttgctgggtggacttgagctcatcaaattcagggagtcgggcattgccagcgaatacgagtctaacactgatgagagcgaagagagagacagttggtcccaggaagagctgccgcggctcttaaatgtactgcagcgtcaagaactgggcgacggcctcgatgatgaaatagcggtttag

SEQ ID NO: 63488 - DNA, 2894 bp, Artificial Sequence
  derived and/or modified sequence
accgtcgccttttcttcttcgtcccgggcggtgcgttccactgctctggggccggcgccgcgcccagtcccgcttcgggccgcaagccccaccgctcccctccccgggcaggggcgccgcgcagcccgctcccgccgccacctcctcccctgccgccctcctagccggcaggaattgcgcgaccacagcgccgctcgcgtcgcccgcatcagctcagcccgctgccgctcggccctcggcaccgctccgggtccggccgccgcgcggccagggctccccctgcccagcgctcccaggccccgccacgcgtcgccgcgcccagctccagtctcccctccccggggtctcgccagccccttcctgcagccgccgcctccgaaggagcgggtccgccgcgggtaaccatgcctagcaaaaccaagtacaaccttgtggacgatgggcacgacctgcggatccccttgcacaacgaggacgccttccagcacggcatctgctttgaggccaagtacgtaggaagcctggacgtgccaaggcccaacagcagggtggagatcgtggctgccatgcgccggatacggtatgagtttaaagccaagaacatcaagaagaagaaagtgagcattatggtttcagtggatggagtgaaagtgattctgaagaagaagaaaaagaaaaaggaatggacgtgggatgagagcaagatgctggtgatgcaggaccccatctacaggatcttctatgtctctcatgattcccaagacttgaagatcttcagctatatcgctcgagatggtgccagcaatatcttcaggtgtaacgtctttaaatccaagaagaagagccaagctatgagaatcgttcggacggtggggcaggcctttgaggtctgccacaagctgagcctgcagcacacgcagcagaatgcagatggccaggaagatggagagagcgagaggaacagcaacagctcaggagacccaggccgccagctcactggagccgagagggcctccacggccactgcagaggagactgacatcgatgcggtggaggtcccacttccagggaatgatgtcctggaattcagccgaggtgtgactgatctagatgctgtagggaaggaaggaggctctcacacaggctccaaggtttcgcacccccaggagcccatgctgacagcctcacccaggatgctgctcccttcttcttcctcgaagcctccaggcctgggcacagagacaccgctgtccactcaccaccagatgcagctcctccagcagctcctccagcagcagcagcagcagacacaagtggctgtggcccaggtacacttgctgaaggaccagttggctgctgaggctgcggcgcggctggaggcccaggctcgcgtgcatcagcttttgctgcagaacaaggacatgctccagcacatctccctgctggtcaagcaggtgcaagagctggaactgaagctgtcaggacagaacgccatgggctcccaggacagcttgctggagatcaccttccgctccggagccctgcccgtgctctgtgaccccacgacccctaagccagaggacctgcattcgccgccgctgggcgcgggcttggctgactttgcccaccctgcgggcagccccttaggtaggcgcgactgcttggtgaagctggagtgctttcgctttcttccgcccgaggacaccccgcccccagcgcagggcgaggcgctcctgggcggtctggagctcatcaagttccgagagtcaggcatcgcctcggagtacgagtccaacacggacgagagcgaggagcgcgactcgtggtcccaggaggagctgccgcgcctgctgaatgtcctgcagaggcaggaactgggcgacggcctggatgatgagatcgccgtgtaggtgccgagggcgaggagatggaggcggcggcgtggctggaggggccgtgtctggctgctgcccgggtaggggatgcccagtgaatgtgcactgccgaggagaatgccagccagggcccgggagagtgtgaggtttcaggaaagtattgagattctgctttggagggtaaagtggggaagaaatcggattcccagaggtgaatcagctcctctcctacttgtgactagagggtggtggaggtaaggccttccagagcccatggcttcaggagagggtctctctccaggactgccaggctgctggaggacctgcccctacctgctgcatcgtcaggctcccacgctttgtccgtgatgcccccctaccccctcactctccccgtctccatggtcccgaccaggaagggaagccatcggtaccttctcaggtactttgtttctggatatcacgatgctgcgagttgcctaaccctccccctacctttatgagaggaattccttctccaggcccttgctgagattgtagagattgagtgctctggaccgcaaaagccaggctagtccttgtagggtgagcatggaattggaatgtgtcacagtggataagcttttagaggaactgaatccaaacattttctccagccggacattgaatgttgctacaaagggagccttgaagctttaacatggttcaggcccttggtgtgagagcccagggggaggacagcttgtctgctgctccaaatcacttagatctgattcctgttttgaaagtcctgccctgccttcctcctgcctgtagcccagcccatctaaatggaagctgggaattgcccctcacctcccctgtgtcctgtccagctgaagcttttgcagcactttacctctctgaaagccccagaggaccagagcccccagccttacctctcaacctgtcccctccactgggcagtggtggtcagtttttactgcaaaaaaaaaaaaa

SEQ ID NO: 63489 - DNA, 1506 bp, Artificial Sequence
  derived and/or modified sequence
atgccctccaaaaccaagtataaccttgtagatgatggccacgatttacggattcctctccacaatgaagatgcctttcagcacggcatttgcttcgaagccaagtacgtgggcagcctggacgtgccgaggcctaactctcgcgtggaaatcgtcgctgcaatgagacgcattcgttatgagtttaaggcgaagaacatcaagaaaaagaaagtttctattatggtttcggtggacggagtgaaagtgattcttaaaaaaaagaagaagaagaaggaatggacttgggacgaatctaagatgctggttatgcaggacccaatctataggatattttatgtcagtcacgatagtcaagatttgaagatattttcctacatcgctcgtgatggcgcttcaaacatcttccgttgcaacgttttcaaaagtaagaagaagtcccaggcaatgcggatcgtgcgaactgtggggcaggcattcgaggtgtgccataaacttagccttcaacatactcaacagaatgctgacggacaggaggacggggagtccgagcgtaacagtaattccagcggtgaccccggtcgtcagctcacgggcgcagaaagggcctcaaccgctaccgcagaagagactgacatcgatgcagtggaagtcccgcttcctgggaacgacgtccttgaattctcgagaggtgtgactgatctcgatgccgtgggcaaggaaggcggtagccacaccggatctaaggtcagccatccccaggagcctatgttgaccgcatccccacgcatgcttctgccaagcagcagctcaaaaccccctgggttaggtacagaaacccccctgtccacacatcatcagatgcagttgctgcagcagctgcttcaacagcagcagcagcagacgcaggtggccgtcgcccaggtccaccttctgaaggatcagttggcagctgaggcagcggcacggttagaagcccaggcgagggttcaccaacttctgctgcagaacaaagacatgctacagcacatttcgctgctggtgaaacaggtgcaggagctggagctgaaactgtccggccagaacgcgatgggtagccaggattccctcctggaaattacctttaggtcaggggctctgccagtgctctgcgatcctacaacccctaaacctgaagatctgcacagtccaccactcggcgctgggttggcagatttcgctcaccctgccggaagccctctggggagaagggattgcctggtgaagttagaatgttttcggtttcttcctccagaggacacaccacctccggctcagggcgaagccctgctgggaggcctcgagctcattaagttcagagaaagtgggatagccagtgaatatgagagtaacactgacgaaagcgaggagcgcgatagctggagccaggaagagctcccacggctgttgaacgttctccagaggcaggagcttggcgacgggctcgacgacgaaatcgccgtgtag

SEQ ID NO: 63490 - DNA, 1506 bp, Artificial Sequence
  derived and/or modified sequence
atgcccagcaagaccaagtacaacctggtggacgacggccacgacctgagaatccccctgcacaacgaggacgccttccagcacggcatctgcttcgaggccaagtacgtgggcagcctggacgtgcccagacccaacagcagagtggagatcgtggccgccatgagaagaatcagatacgagttcaaggccaagaacatcaagaagaagaaggtgagcatcatggtgagcgtggacggcgtgaaggtgatcctgaagaagaagaagaagaagaaggagtggacctgggacgagagcaagatgctggtgatgcaggaccccatctacagaatcttctacgtgagccacgacagccaggacctgaagatcttcagctacatcgccagagacggcgccagcaacatcttcagatgcaacgtgttcaagagcaagaagaagagccaggccatgagaatcgtgagaaccgtgggccaggccttcgaggtgtgccacaagctgagcctgcagcacacccagcagaacgccgacggccaggaggacggcgagagcgagagaaacagcaacagcagcggcgaccccggcagacagctgaccggcgccgagagagccagcaccgccaccgccgaggagaccgacatcgacgccgtggaggtgcccctgcccggcaacgacgtgctggagttcagcagaggcgtgaccgacctggacgccgtgggcaaggagggcggcagccacaccggcagcaaggtgagccacccccaggagcccatgctgaccgccagccccagaatgctgctgcccagcagcagcagcaagccccccggcctgggcaccgagacccccctgagcacccaccaccagatgcagctgctgcagcagctgctgcagcagcagcagcagcagacccaggtggccgtggcccaggtgcacctgctgaaggaccagctggccgccgaggccgccgccagactggaggcccaggccagagtgcaccagctgctgctgcagaacaaggacatgctgcagcacatcagcctgctggtgaagcaggtgcaggagctggagctgaagctgagcggccagaacgccatgggcagccaggacagcctgctggagatcaccttcagaagcggcgccctgcccgtgctgtgcgaccccaccacccccaagcccgaggacctgcacagcccccccctgggcgccggcctggccgacttcgcccaccccgccggcagccccctgggcagaagagactgcctggtgaagctggagtgcttcagattcctgccccccgaggacacccccccccccgcccagggcgaggccctgctgggcggcctggagctgatcaagttcagagagagcggcatcgccagcgagtacgagagcaacaccgacgagagcgaggagagagacagctggagccaggaggagctgcccagactgctgaacgtgctgcagagacaggagctgggcgacggcctggacgacgagatcgccgtgtag

SEQ ID NO: 63491 - protein, 2789 aa, Artificial Sequence
  derived and/or modified sequence
MRLGGGQLVSEELMNLGESFIQTNDPSLKLFQCAVCNKFTTDNLDMLGLHMNVERSLSEDEWKAVMGDSYQCKLCRYNTQLKANFQLHCKTDKHVQKYQLVAHIKEGGKANEWRLKCVAIGNPVHLKCNACDYYTNSLEKLRLHTVNSRHEASLKLYKHLQQHESGVEGESCYYHCVLCNYSTKAKLNLIQHVRSMKHQRSESLRKLQRLQKGLPEEDEDLGQIFTIRRCPSTDPEEAIEDVEGPSETAADPEELAKDQEGGASSSQAEKELTDSPATSKRISFPGSSESPLSSKRPKTAEEIKPEQMYQCPYCKYSNADVNRLRVHAMTQHSVQPMLRCPLCQDMLNNKIHLQLHLTHLHSVAPDCVEKLIMTVTTPEMVMPSSMFLPAAVPDRDGNSNLEEAGKQPETSEDLGKNILPSASTEQSGDLKPSPADPGSVREDSGFICWKKGCNQVFKTSAALQTHFNEVHAKRPQLPVSDRHVYKYRCNQCSLAFKTIEKLQLHSQYHVIRAATMCCLCQRSFRTFQALKKHLETSHLELSEADIQQLYGGLLANGDLLAMGDPTLAEDHTIIVEEDKEEESDLEDKQSPTGSDSGSVQEDSGSEPKRALPFRKGPNFTMEKFLDPSRPYKCTVCKESFTQKNILLVHYNSVSHLHKLKRALQESATGQPEPTSSPDNKPFKCNTCNVAYSQSSTLEIHMRSVLHQTKARAAKLEAASGSSNGTGNSSSISLSSSTPSPVSTSGSNTFTTSNPSSAGIAPSSNLLSQVPTESVGMPPLGNPIGANIASPSEPKEANRKKLADMIASRQQQQQQQQQQQQQQQQQQQAQTLAQAQAQVQAHLQQELQQQAALIQSQLFNPTLLPHFPMTTETLLQLQQQQHLLFPFYIPSAEFQLNPEVSLPVTSGALTLTGTGPGLLEDLKAQVQVPQQSHQQILPQQQQNQLSIAQSHSALLQPSQHPEKKNKLVIKEKEKESQRERDSAEGGEGNTGPKETLPDALKAKEKKELAPGGGSEPSMLPPRIASDARGNATKALLENFGFELVIQYNENKQKVQKKNGKTDQGENLEKLECDSCGKLFSNILILKSHQEHVHQNYFPFKQLERFAKQYRDHYDKLYPLRPQTPEPPPPPPPPPPPPLPAAPPQPASTPAIPASAPPITSPTIAPAQPSVPLTQLSMPMELPIFSPLMMQTMPLQTLPAQLPPQLGPVEPLPADLAQLYQHQLNPTLLQQQNKRPRTRITDDQLRVLRQYFDINNSPSEEQIKEMADKSGLPQKVIKHWFRNTLFKERQRNKDSPYNFSNPPITSLEELKIDSRPPSPEPPKQEYWGSKRSSRTRFTDYQLRVLQDFFDANAYPKDDEFEQLSNLLNLPTRVIVVWFQNARQKARKNYENQGEGKDGERRELTNDRYIRTSNLNYQCKKCSLVFQRIFDLIKHQKKLCYKDEDEEGQDDSQNEDSMDAMEILTPTSSSCSTPMPSQAYSAPAPSANNTASSAFLQLTAEAEELATFNSKTEAGDEKPKLAEAPSAQPNQTQEKQGQPKPELQQQEQPEQKTNTPQQKLPQLVSLPSLPQPPPQAPPPQCPLPQSSPSPSQLSHLPLKPLHTSTPQQLANLPPQLIPYQCDQCKLAFPSFEHWQEHQQLHFLSAQNQFIHPQFLDRSLDMPFMLFDPSNPLLASQLLSGAIPQIPASSATSPSTPTSTMNTLKRKLEEKASASPGENDSGTGGEEPQRDKRLRTTITPEQLEILYQKYLLDSNPTRKMLDHIAHEVGLKKRVVQVWFQNTRARERKGQFRAVGPAQAHRRCPFCRALFKAKTALEAHIRSRHWHEAKRAGYNLTLSAMLLDCDGGLQMKGDIFDGTSFSHLPPSSSDGQGVPLSPVSKTMELSPRTLLSPSSIKVEGIEDFESPSMSSVNLNFDQTKLDNDDCSSVNTAITDTTTGDEGNADNDSATGIATETKSSSAPNEGLTKAAMMAMSEYEDRLSSGLVSPAPSFYSKEYDNEGTVDYSETSSLADPCSPSPGASGSAGKSGDSGDRPGQKRFRTQMTNLQLKVLKSCFNDYRTPTMLECEVLGNDIGLPKRVVQVWFQNARAKEKKSKLSMAKHFGINQTSYEGPKTECTLCGIKYSARLSVRDHIFSQQHISKVKDTIGSQLDKEKEYFDPATVRQLMAQQELDRIKKANEVLGLAAQQQGMFDNTPLQALNLPTAYPALQGIPPVLLPGLNSPSLPGFTPSNTALTSPKPNLMGLPSTTVPSPGLPTSGLPNKPSSASLSSPTPAQATMAMGPQQPPQQQQQQQQPQVQQPPPPPAAQPPPTPQLPLQQQQQRKDKDSEKVKEKEKAHKGKGEPLPVPKKEKGEAPTATAATISAPLPTMEYAVDPAQLQALQAALTSDPTALLTSQFLPYFVPGFSPYYAPQIPGALQSGYLQPMYGMEGLFPYSPALSQALMGLSPGSLLQQYQQYQQSLQEAIQQQQQRQLQQQQQQKVQQQQPKASQTPVPPGAPSPDKDPAKESPKPEEQKNTPREVSPLLPKLPEEPEAESKSADSLYDPFIVPKVQYKLVCRKCQAGFSDEEAARSHLKSLCFFGQSVVNLQEMVLHVPTGGGGGGSGGGGGGGGGGGGGGSYHCLACESALCGEEALSQHLESALHKHRTITRAARNAKEHPSLLPHSACFPDPSTASTSQSAAHSNDSPPPPSAAAPSSASPHASRKSWPQVVSRASAAKPPSFPPLSSSSTVTSSSCSTSGVQPSMPTDDYSEESDTDLSQKSDGPASPVEGPKDPSCPKDSGLTSVGTDTFRL

SEQ ID NO: 63492 - DNA, 8370 bp, Artificial Sequence
  derived and/or modified sequence
atgagactgggcggcggccagctggtgagcgaggagctgatgaacctgggcgagagcttcatccagaccaacgaccccagcctgaagctgttccagtgcgccgtgtgcaacaagttcaccaccgacaacctggacatgctgggcctgcacatgaacgtggagagaagcctgagcgaggacgagtggaaggccgtgatgggcgacagctaccagtgcaagctgtgcagatacaacacccagctgaaggccaacttccagctgcactgcaagaccgacaagcacgtgcagaagtaccagctggtggcccacatcaaggagggcggcaaggccaacgagtggagactgaagtgcgtggccatcggcaaccccgtgcacctgaagtgcaacgcctgcgactactacaccaacagcctggagaagctgagactgcacaccgtgaacagcagacacgaggccagcctgaagctgtacaagcacctgcagcagcacgagagcggcgtggagggcgagagctgctactaccactgcgtgctgtgcaactacagcaccaaggccaagctgaacctgatccagcacgtgagaagcatgaagcaccagagaagcgagagcctgagaaagctgcagagactgcagaagggcctgcccgaggaggacgaggacctgggccagatcttcaccatcagaagatgccccagcaccgaccccgaggaggccatcgaggacgtggagggccccagcgagaccgccgccgaccccgaggagctggccaaggaccaggagggcggcgccagcagcagccaggccgagaaggagctgaccgacagccccgccaccagcaagagaatcagcttccccggcagcagcgagagccccctgagcagcaagagacccaagaccgccgaggagatcaagcccgagcagatgtaccagtgcccctactgcaagtacagcaacgccgacgtgaacagactgagagtgcacgccatgacccagcacagcgtgcagcccatgctgagatgccccctgtgccaggacatgctgaacaacaagatccacctgcagctgcacctgacccacctgcacagcgtggcccccgactgcgtggagaagctgatcatgaccgtgaccacccccgagatggtgatgcccagcagcatgttcctgcccgccgccgtgcccgacagagacggcaacagcaacctggaggaggccggcaagcagcccgagaccagcgaggacctgggcaagaacatcctgcccagcgccagcaccgagcagagcggcgacctgaagcccagccccgccgaccccggcagcgtgagagaggacagcggcttcatctgctggaagaagggctgcaaccaggtgttcaagaccagcgccgccctgcagacccacttcaacgaggtgcacgccaagagaccccagctgcccgtgagcgacagacacgtgtacaagtacagatgcaaccagtgcagcctggccttcaagaccatcgagaagctgcagctgcacagccagtaccacgtgatcagagccgccaccatgtgctgcctgtgccagagaagcttcagaaccttccaggccctgaagaagcacctggagaccagccacctggagctgagcgaggccgacatccagcagctgtacggcggcctgctggccaacggcgacctgctggccatgggcgaccccaccctggccgaggaccacaccatcatcgtggaggaggacaaggaggaggagagcgacctggaggacaagcagagccccaccggcagcgacagcggcagcgtgcaggaggacagcggcagcgagcccaagagagccctgcccttcagaaagggccccaacttcaccatggagaagttcctggaccccagcagaccctacaagtgcaccgtgtgcaaggagagcttcacccagaagaacatcctgctggtgcactacaacagcgtgagccacctgcacaagctgaagagagccctgcaggagagcgccaccggccagcccgagcccaccagcagccccgacaacaagcccttcaagtgcaacacctgcaacgtggcctacagccagagcagcaccctggagatccacatgagaagcgtgctgcaccagaccaaggccagagccgccaagctggaggccgccagcggcagcagcaacggcaccggcaacagcagcagcatcagcctgagcagcagcacccccagccccgtgagcaccagcggcagcaacaccttcaccaccagcaaccccagcagcgccggcatcgcccccagcagcaacctgctgagccaggtgcccaccgagagcgtgggcatgccccccctgggcaaccccatcggcgccaacatcgccagccccagcgagcccaaggaggccaacagaaagaagctggccgacatgatcgccagcagacagcagcagcagcagcagcagcagcagcagcagcagcagcagcagcagcagcagcaggcccagaccctggcccaggcccaggcccaggtgcaggcccacctgcagcaggagctgcagcagcaggccgccctgatccagagccagctgttcaaccccaccctgctgccccacttccccatgaccaccgagaccctgctgcagctgcagcagcagcagcacctgctgttccccttctacatccccagcgccgagttccagctgaaccccgaggtgagcctgcccgtgaccagcggcgccctgaccctgaccggcaccggccccggcctgctggaggacctgaaggcccaggtgcaggtgccccagcagagccaccagcagatcctgccccagcagcagcagaaccagctgagcatcgcccagagccacagcgccctgctgcagcccagccagcaccccgagaagaagaacaagctggtgatcaaggagaaggagaaggagagccagagagagagagacagcgccgagggcggcgagggcaacaccggccccaaggagaccctgcccgacgccctgaaggccaaggagaagaaggagctggcccccggcggcggcagcgagcccagcatgctgccccccagaatcgccagcgacgccagaggcaacgccaccaaggccctgctggagaacttcggcttcgagctggtgatccagtacaacgagaacaagcagaaggtgcagaagaagaacggcaagaccgaccagggcgagaacctggagaagctggagtgcgacagctgcggcaagctgttcagcaacatcctgatcctgaagagccaccaggagcacgtgcaccagaactacttccccttcaagcagctggagagattcgccaagcagtacagagaccactacgacaagctgtaccccctgagaccccagacccccgagccccccccccccccccccccccccccccccccccccctgcccgccgcccccccccagcccgccagcacccccgccatccccgccagcgccccccccatcaccagccccaccatcgcccccgcccagcccagcgtgcccctgacccagctgagcatgcccatggagctgcccatcttcagccccctgatgatgcagaccatgcccctgcagaccctgcccgcccagctgcccccccagctgggccccgtggagcccctgcccgccgacctggcccagctgtaccagcaccagctgaaccccaccctgctgcagcagcagaacaagagacccagaaccagaatcaccgacgaccagctgagagtgctgagacagtacttcgacatcaacaacagccccagcgaggagcagatcaaggagatggccgacaagagcggcctgccccagaaggtgatcaagcactggttcagaaacaccctgttcaaggagagacagagaaacaaggacagcccctacaacttcagcaacccccccatcaccagcctggaggagctgaagatcgacagcagaccccccagccccgagccccccaagcaggagtactggggcagcaagagaagcagcagaaccagattcaccgactaccagctgagagtgctgcaggacttcttcgacgccaacgcctaccccaaggacgacgagttcgagcagctgagcaacctgctgaacctgcccaccagagtgatcgtggtgtggttccagaacgccagacagaaggccagaaagaactacgagaaccagggcgagggcaaggacggcgagagaagagagctgaccaacgacagatacatcagaaccagcaacctgaactaccagtgcaagaagtgcagcctggtgttccagagaatcttcgacctgatcaagcaccagaagaagctgtgctacaaggacgaggacgaggagggccaggacgacagccagaacgaggacagcatggacgccatggagatcctgacccccaccagcagcagctgcagcacccccatgcccagccaggcctacagcgcccccgcccccagcgccaacaacaccgccagcagcgccttcctgcagctgaccgccgaggccgaggagctggccaccttcaacagcaagaccgaggccggcgacgagaagcccaagctggccgaggcccccagcgcccagcccaaccagacccaggagaagcagggccagcccaagcccgagctgcagcagcaggagcagcccgagcagaagaccaacaccccccagcagaagctgccccagctggtgagcctgcccagcctgccccagccccccccccaggccccccccccccagtgccccctgccccagagcagccccagccccagccagctgagccacctgcccctgaagcccctgcacaccagcaccccccagcagctggccaacctgcccccccagctgatcccctaccagtgcgaccagtgcaagctggccttccccagcttcgagcactggcaggagcaccagcagctgcacttcctgagcgcccagaaccagttcatccacccccagttcctggacagaagcctggacatgcccttcatgctgttcgaccccagcaaccccctgctggccagccagctgctgagcggcgccatcccccagatccccgccagcagcgccaccagccccagcacccccaccagcaccatgaacaccctgaagagaaagctggaggagaaggccagcgccagccccggcgagaacgacagcggcaccggcggcgaggagccccagagagacaagagactgagaaccaccatcacccccgagcagctggagatcctgtaccagaagtacctgctggacagcaaccccaccagaaagatgctggaccacatcgcccacgaggtgggcctgaagaagagagtggtgcaggtgtggttccagaacaccagagccagagagagaaagggccagttcagagccgtgggccccgcccaggcccacagaagatgccccttctgcagagccctgttcaaggccaagaccgccctggaggcccacatcagaagcagacactggcacgaggccaagagagccggctacaacctgaccctgagcgccatgctgctggactgcgacggcggcctgcagatgaagggcgacatcttcgacggcaccagcttcagccacctgccccccagcagcagcgacggccagggcgtgcccctgagccccgtgagcaagaccatggagctgagccccagaaccctgctgagccccagcagcatcaaggtggagggcatcgaggacttcgagagccccagcatgagcagcgtgaacctgaacttcgaccagaccaagctggacaacgacgactgcagcagcgtgaacaccgccatcaccgacaccaccaccggcgacgagggcaacgccgacaacgacagcgccaccggcatcgccaccgagaccaagagcagcagcgcccccaacgagggcctgaccaaggccgccatgatggccatgagcgagtacgaggacagactgagcagcggcctggtgagccccgcccccagcttctacagcaaggagtacgacaacgagggcaccgtggactacagcgagaccagcagcctggccgacccctgcagccccagccccggcgccagcggcagcgccggcaagagcggcgacagcggcgacagacccggccagaagagattcagaacccagatgaccaacctgcagctgaaggtgctgaagagctgcttcaacgactacagaacccccaccatgctggagtgcgaggtgctgggcaacgacatcggcctgcccaagagagtggtgcaggtgtggttccagaacgccagagccaaggagaagaagagcaagctgagcatggccaagcacttcggcatcaaccagaccagctacgagggccccaagaccgagtgcaccctgtgcggcatcaagtacagcgccagactgagcgtgagagaccacatcttcagccagcagcacatcagcaaggtgaaggacaccatcggcagccagctggacaaggagaaggagtacttcgaccccgccaccgtgagacagctgatggcccagcaggagctggacagaatcaagaaggccaacgaggtgctgggcctggccgcccagcagcagggcatgttcgacaacacccccctgcaggccctgaacctgcccaccgcctaccccgccctgcagggcatcccccccgtgctgctgcccggcctgaacagccccagcctgcccggcttcacccccagcaacaccgccctgaccagccccaagcccaacctgatgggcctgcccagcaccaccgtgcccagccccggcctgcccaccagcggcctgcccaacaagcccagcagcgccagcctgagcagccccacccccgcccaggccaccatggccatgggcccccagcagcccccccagcagcagcagcagcagcagcagccccaggtgcagcagcccccccccccccccgccgcccagcccccccccaccccccagctgcccctgcagcagcagcagcagagaaaggacaaggacagcgagaaggtgaaggagaaggagaaggcccacaagggcaagggcgagcccctgcccgtgcccaagaaggagaagggcgaggcccccaccgccaccgccgccaccatcagcgcccccctgcccaccatggagtacgccgtggaccccgcccagctgcaggccctgcaggccgccctgaccagcgaccccaccgccctgctgaccagccagttcctgccctacttcgtgcccggcttcagcccctactacgccccccagatccccggcgccctgcagagcggctacctgcagcccatgtacggcatggagggcctgttcccctacagccccgccctgagccaggccctgatgggcctgagccccggcagcctgctgcagcagtaccagcagtaccagcagagcctgcaggaggccatccagcagcagcagcagagacagctgcagcagcagcagcagcagaaggtgcagcagcagcagcccaaggccagccagacccccgtgccccccggcgcccccagccccgacaaggaccccgccaaggagagccccaagcccgaggagcagaagaacacccccagagaggtgagccccctgctgcccaagctgcccgaggagcccgaggccgagagcaagagcgccgacagcctgtacgaccccttcatcgtgcccaaggtgcagtacaagctggtgtgcagaaagtgccaggccggcttcagcgacgaggaggccgccagaagccacctgaagagcctgtgcttcttcggccagagcgtggtgaacctgcaggagatggtgctgcacgtgcccaccggcggcggcggcggcggcagcggcggcggcggcggcggcggcggcggcggcggcggcggcggcagctaccactgcctggcctgcgagagcgccctgtgcggcgaggaggccctgagccagcacctggagagcgccctgcacaagcacagaaccatcaccagagccgccagaaacgccaaggagcaccccagcctgctgccccacagcgcctgcttccccgaccccagcaccgccagcaccagccagagcgccgcccacagcaacgacagcccccccccccccagcgccgccgcccccagcagcgccagcccccacgccagcagaaagagctggccccaggtggtgagcagagccagcgccgccaagccccccagcttcccccccctgagcagcagcagcaccgtgaccagcagcagctgcagcaccagcggcgtgcagcccagcatgcccaccgacgactacagcgaggagagcgacaccgacctgagccagaagagcgacggccccgccagccccgtggagggccccaaggaccccagctgccccaaggacagcggcctgaccagcgtgggcaccgacaccttcagactgtag

SEQ ID NO: 63493 - DNA, 8370 bp, Artificial Sequence
  derived and/or modified sequence
atgagacttggagggggccagctggtgtcagaagagctgatgaatctgggcgaatcatttatccagaccaatgacccttccttaaagctgttccaatgcgccgtttgtaacaagttcactaccgacaacctggacatgctgggactccacatgaacgtggaacgttccctgagcgaagacgagtggaaggccgtgatgggagactcataccagtgtaagctgtgccgatataacacacaacttaaagccaactttcagctgcattgtaagacagataagcacgtccagaagtaccagttagtcgcccacatcaaagaaggtggaaaggctaacgagtggcggctgaagtgtgtggccatcgggaatcctgtccatttaaaatgcaatgcgtgcgattattatactaactccctggaaaaacttcggctgcacacggtgaattcgcggcacgaggcttcactaaagctgtataaacacctacagcagcatgaatcaggggtggagggcgagagctgctattatcactgtgtcctatgtaactactctacgaaagcaaagctcaacctgattcagcacgtaagatccatgaagcatcagaggtccgaatctttgcgaaaacttcagaggctgcagaaaggattgccagaggaggacgaggatctgggccagatttttacaatccggaggtgtccctctactgatcccgaggaggcaatagaggatgtagagggccccagtgaaaccgctgctgatcctgaggagctggctaaagaccaggaggggggcgcctcatcgtcacaggcagagaaagagttgaccgactcacctgctacctccaaacggatttccttcccagggagctcggaatcccctctcagctccaaacgtccgaagactgctgaggagatcaaacccgaacagatgtaccaatgtccctactgcaagtattctaatgcagacgttaatcgactcagggtccatgctatgacccagcactcagtgcagcctatgctgagatgcccactctgccaggatatgctgaacaataagatccatcttcaactgcacctgacgcatttacatagcgtggctcctgattgcgtggaaaagctgattatgacggtcaccaccccggagatggtgatgccttcctccatgtttctcccagccgctgtgccagatcgagatggtaactccaatcttgaggaagcggggaaacagcccgagacctcggaggatttggggaaaaatattctgccctccgcatcgacagaacaatctggcgacttgaagccgagtcccgcggatccaggtagcgttagggaggactcaggatttatctgttggaaaaagggctgtaatcaggtcttcaaaacgtccgcagcgctgcagacccattttaacgaggttcacgcgaagcgccctcaactgccagtctctgaccgccatgtgtacaagtatagatgtaaccagtgcagtcttgcgttcaagaccatcgagaaactacagttgcattctcagtaccacgttataagagcagccaccatgtgttgcctgtgtcagagatccttccggacattccaggcccttaagaaacacctcgaaaccagtcacctggaactctccgaggccgatatccagcagctgtacggaggtctactggctaacggggacttgctggctatgggagatcctacgctagcagaagatcatacaatcatagttgaggaggacaaagaagaggagagcgatctagaggataagcagtcccccactgggtcagactccggatccgtccaggaggatagtggctcggaaccaaagagagcattacctttccgcaaagggccaaactttaccatggagaaattcctggacccatctaggccgtataagtgcactgtttgtaaggaatctttcacacagaaaaacatcctcctcgtccactacaactccgtaagccacctccataagcttaaaagggccctgcaggagagcgcaacaggacagccggagcctacaagctcccccgacaataaaccattcaaatgtaatacgtgcaatgtggcctattcacagagttcaactctggagattcatatgagatctgttctccaccagactaaggccagagccgctaaactcgaggctgcttctggttcttccaatggcaccgggaactccagcagcatttctttgagctccagcaccccttcacccgtgagcacctctgggagtaacacctttaccacctccaatccatctagtgctggcatcgcaccatccagcaacctgctgagccaggtgcctaccgagtctgtgggtatgccccccctggggaatcctatcggcgcaaatatcgcctccccgtcagagcccaaggaagctaacagaaagaagcttgctgacatgatcgcaagtcgccagcagcagcagcaacagcagcagcagcagcagcaacagcagcagcagcagcagcaggcccagacattagcccaggcccaagcccaggtccaagcccacctccagcaagagcttcagcagcaagcagctttgattcagtctcaattgtttaacccgacactgctcccccatttccccatgactaccgagacactgttgcaattgcaacaacagcaacatctcctgtttcctttctatattccctcggctgaattccagcttaacccggaggtctccctcccagtcacaagtggggcgctcacactgactggtactgggcctggcctgctggaagacctgaaagctcaggtgcaagtgccccagcaatcccaccagcagattctgcctcagcagcagcagaaccagctcagcattgctcaaagccatagcgccctccttcagccctcccagcatcccgaaaaaaagaacaaattagtcatcaaagagaaggaaaaagaatcacagcgggagcgagacagtgctgaaggtggcgagggcaacactggtcccaaggagactctgccagatgcgctaaaggctaaggaaaagaaggagttggcccctggcggtggttctgaaccatccatgctgcctccccgaatcgcgagcgacgccagaggcaatgcgacaaaagccttgctggagaacttcggttttgaactggtgatccagtacaacgagaataaacagaaagtccagaagaagaatgggaaaacggatcagggcgagaacctcgagaagttagagtgtgattcttgcggcaaattgttctcaaacattttaattctgaaatcccatcaagaacacgtgcaccagaactacttcccctttaaacagctcgaaaggtttgccaaacaatacagggaccactatgataagttatatcctctacggccacagactcctgagcctccacctccacctcccccgcccccgccaccaccacttccggctgctcctcctcagccagcctctacgcccgctattccagcctctgccccgcctattacatcgcccacgatcgcaccggcccaaccatctgtgcctttaacacaattgtccatgccaatggaactcccaatcttcagccccctgatgatgcagacaatgcccctgcaaaccctgccagcacaactgccgccccagctgggtcctgtggaacccctgcctgcagacttggcacagctgtaccagcaccagttgaacccaaccctcctgcagcagcagaataagcgaccccgaactagaatcacagatgatcagctccgggtcctaagacagtacttcgatattaataactccccatctgaggagcaaatcaaggagatggccgacaagagcggcctaccacagaaggtgattaagcactggttccgtaacacgctctttaaagagcgtcagagaaacaaggattctccctataacttctctaatccaccaattacatcgctggaagaattaaagatcgatagtaggccaccaagcccagagcctccgaagcaggagtactggggttctaagcggagtagccggacacgattcaccgactaccagctgagggtgctgcaggatttttttgacgcaaacgcataccccaaggatgacgaatttgaacaactttccaatcttctcaaccttcccacccgggttatcgtcgtttggttccaaaacgctagacaaaaggccaggaagaactacgagaatcagggcgagggaaaagatggagagagaagagaattgactaatgaccgctacatccggacaagtaacctcaactatcagtgtaagaagtgttcccttgtgttccagcgaatctttgacctgataaagcaccagaagaaattgtgttacaaggacgaggacgaagagggacaggatgactcccaaaacgaggactccatggatgccatggaaattctgacacctacatcctcaagttgtagcactccgatgccaagtcaggcgtacagtgcaccagcacctagcgcaaacaatactgcatcctccgcctttctgcagctcaccgcagaagccgaagaactcgcgacattcaatagtaagacagaagcaggagacgagaaaccgaagctggcggaagctccgagcgcgcagcccaaccagacgcaggagaaacaggggcaaccaaaaccggaactgcagcagcaggagcagcccgagcagaaaactaacacaccacaacaaaagctgccccagctggtgagcctgcccagcctgcctcagcctcctccccaggcccccccaccacagtgtccattgccccaatcttctccaagccccagccagctaagtcacttacctttgaagcctcttcataccagcactccacagcagctggccaacctgccccctcaactgatcccttatcagtgtgaccagtgtaaattagcctttcctagctttgagcactggcaggagcatcagcagcttcatttcttgagcgcacagaaccagttcattcacccccagtttctggaccggtccctcgacatgccattcatgctgttcgatccctcaaatcctcttctggcaagtcaattgctgagcggggcaataccacagatacccgcctcaagcgccaccagtcctagcacccctacatctaccatgaacactttgaaacggaagctggaggaaaaggctagtgccagtcctggtgaaaacgacagtggcacaggcggcgaggagccacagcgggataaacggttgcgcacgactataacaccagaacagctggagatactgtatcagaagtacctgcttgattctaacccaactcggaaaatgcttgatcacattgcccacgaagtgggccttaagaaaagagtcgtgcaggtgtggtttcaaaatactcgggcccgggagcggaaggggcagttccgtgccgtgggccctgctcaggcacaccgcagatgccccttttgcagggccctctttaaggccaaaacagcattagaggctcatatacggagccgccattggcacgaggccaagagagcagggtataacctgactctgtcagccatgttgctggattgtgatgggggactgcaaatgaagggggacatctttgacgggacctccttctctcatttacccccatccagctccgatgggcagggcgtgcctctttccccagtctccaaaaccatggaactttctccccgcacacttctgagtccttcgtctattaaagtggagggcatcgaggattttgaatccccatcaatgagctccgttaacctgaactttgaccagacgaagctcgataatgatgattgcagtagtgttaacaccgccatcacagacacaacaacaggagacgagggcaatgctgataacgactctgccactggaattgccacagaaaccaaaagttcctcggcccctaacgaaggcctcacaaaggccgctatgatggcaatgtcagaatatgaggatcggctgtcttccggacttgtgtctccggccccaagtttttattctaaagagtacgataacgagggcacagtagattatagtgagaccagtagtctagccgatccttgcagtcctagtccaggtgcttcgggctctgctggaaaatcaggcgattccggggacaggcccggacagaaacgcttcaggacccagatgactaacctccagttgaaagtcctcaaatcatgtttcaatgactacagaacgcctaccatgctggaatgcgaggtattaggcaacgacatcggtttgcccaagcgcgttgtgcaggtctggtttcagaatgccagggccaaggaaaagaagtctaaactgtccatggcgaagcattttggcatcaaccagacgagctatgaaggcccgaagaccgagtgtacgctgtgtggcatcaagtattccgcaaggctgtctgtaagggaccatattttcagccagcagcatatttccaaggtgaaggacacaatcggaagccagttagacaaagagaaggaatatttcgatcctgccactgtgaggcagctgatggcccagcaggaactcgaccgcattaaaaaggcaaacgaggtgcttggcttggctgcccaacagcagggaatgtttgacaacactccactccaagccctgaacctccccactgcctaccccgcccttcagggaatacctcctgtgctcctgccaggactaaattccccatctttacctggtttcactccctcgaatacggccctgacatcacccaagccaaacctaatgggtttgccaagcaccaccgtgccatcccccggcttgcctacaagcgggttaccaaacaagcctagcagtgcctcactctcaagcccaacccccgcccaggccaccatggcaatgggcccccagcagcctccacagcagcagcagcagcagcagcagccccaggttcaacaaccgccgcctccacccgcagcgcagcccccccccacacctcaattacccctacagcagcaacagcaaagaaaagacaaggactctgaaaaggtcaaagaaaaggaaaaagcccacaaaggaaagggcgagccgctccctgtccccaaaaaagaaaaaggtgaagcaccaactgcaacggcagccaccatcagcgcgcccttaccaactatggagtacgccgtggacccggctcagctgcaggccctgcaggccgccctgacctccgatcctactgccctgctaacaagtcagtttctgccctatttcgtgcctggcttcagcccttactacgctccccagattcccggggccctgcagagtgggtacctgcagccaatgtacggtatggagggcttgttcccatactcaccagccctgtcacaggcgctcatggggctctccccaggctctctcttgcagcagtatcagcagtatcagcagtcattacaagaggcaatacagcaacaacaacaaaggcaactgcagcaacagcagcagcagaaggtccagcagcagcagcctaaagctagccagacacccgtacctcccggtgctcccagccctgataaggatccagccaaggagtcaccaaaacctgaagaacagaaaaacaccccaagagaagtatccccactattaccaaagctccctgaggagccggaagctgagtccaagtctgccgatagcctgtacgaccccttcatcgtgccgaaagtgcagtataagctggtttgtcggaagtgtcaggctgggttttccgatgaggaagccgcccgctctcacctgaagtccctctgtttctttgggcaatcggtagtgaacttgcaggaaatggttctgcacgttccaaccggaggtggtgggggagggtcaggtggtgggggaggaggcgggggaggcggcggtggtgggggctcatatcactgccttgcatgtgaatctgctctctgcggcgaggaggctctaagtcagcatctagaatctgctctacacaaacaccgcacaattaccagggccgctcgtaatgccaaagaacacccctccctcttaccccattcagcatgttttccggacccaagtactgctagtacctctcaatctgctgcccactctaatgattcaccaccccccccctcagccgccgctccatccagcgcttcaccgcacgcttcaaggaaaagctggccccaggtggtaagtcgagcctcggccgcgaagcctccttccttcccacccttgagcagctcatctacggtcacctcatcttcttgtagcacgagcggagtgcaaccttccatgcctactgacgactactccgaagagtccgacaccgatctgtcacaaaagagcgacggcccagccagccccgtcgaagggccaaaggatccctcttgtcccaaggacagcggtctgacatccgtgggcactgacacattccgcttgtag

SEQ ID NO: 63494 - DNA, 8370 bp, Artificial Sequence
  derived and/or modified sequence
atgaggctgggcggcggccagctggtgtctgaggagctgatgaacctgggggagagcttcatccagaccaatgaccccagcctgaagctgttccagtgtgctgtgtgcaacaagttcaccacagacaacctggacatgctgggcctgcacatgaatgtggagaggagcctgtctgaagatgagtggaaggctgtgatgggagacagctaccagtgcaagctgtgccgctacaacacccagctgaaggccaacttccagctgcactgcaagacagacaagcacgtgcagaagtaccagctggtggcccacatcaaggagggcggcaaggccaatgagtggaggctgaagtgtgtggccatcggcaaccctgtgcacctgaagtgcaatgcctgtgactactacaccaacagcctggagaagctgcggctgcacacagtgaacagcagacatgaggccagcctgaagctgtacaagcacctgcagcagcatgaaagtggagtggagggggagagctgctactaccactgtgtgctgtgcaactacagcaccaaggccaagctgaacctgatccagcacgtgcgctccatgaagcaccagaggtctgagagcctgaggaagctgcagaggctgcagaagggcctgcctgaagaagatgaggacctgggccagatcttcaccatccgccgctgccccagcacagatcctgaggaggccattgaagatgtggagggccccagcgagacagctgctgaccctgaggagctggccaaggaccaggagggcggggccagcagcagccaggccgagaaggagctgacagacagccctgccaccagcaagaggatctccttccctggcagcagcgagagccccctgagcagcaagaggcccaagacagctgaggagatcaagccagagcagatgtaccagtgcccctactgcaagtacagcaatgctgatgtgaaccggctgcgggtgcacgccatgacccagcacagcgtgcagcccatgctgcgctgccccctgtgccaggacatgctgaacaacaagatccacctgcagctgcacctgacccacctgcacagcgtggccccagactgtgtggagaagctgatcatgacagtgaccaccccagagatggtgatgcccagctccatgttcctgcctgctgctgtgcctgacagagatggcaacagcaacctggaggaggccggcaagcagcctgagaccagcgaggacctgggcaagaacatcctgcccagcgccagcacagagcagagcggggacctgaagcccagccctgctgaccccggctctgtgcgggaggacagcggcttcatctgctggaagaagggctgcaaccaggtgttcaagaccagcgctgccctgcagacccacttcaatgaggtgcacgccaagaggccccagctgcctgtgtctgacagacatgtgtacaagtaccgctgcaaccagtgcagcctggccttcaagaccatcgagaagctgcagctgcacagccagtaccacgtgatccgggccgccaccatgtgctgcctgtgccagaggagcttccgcaccttccaggccctgaagaagcacctggagaccagccacctggagctgtctgaggccgacatccagcagctgtatggaggcctgctggccaacggggacctgctggccatgggagaccccaccctggccgaggaccacaccatcatcgtggaggaggacaaggaggaggagagtgacctggaggacaagcagagccccaccggcagtgacagcggctctgtgcaggaggacagcggcagcgagcccaagagggccctgcccttcaggaagggccccaacttcaccatggagaagttcctggaccccagccggccctacaagtgcaccgtgtgcaaggagagcttcacccagaagaacatcctgctggtgcactacaacagcgtgagccacctgcacaagctgaagagggccctgcaggagagcgccaccggccagcctgagcccaccagcagcccagacaacaagcccttcaagtgcaacacctgcaatgtggcctacagccagagcagcaccctggagatccacatgaggtctgtgctgcaccagaccaaggcccgggccgccaagctggaggccgccagcggcagcagcaatggaactggaaacagcagcagcatcagcctgagcagcagcacccccagccctgtgtccaccagcggcagcaacaccttcaccaccagcaaccccagcagcgctggcatcgcccccagcagcaacctgctgagccaggtgcccacagaatctgtgggcatgccacccctgggcaaccccatcggggccaacatcgccagccccagcgagcccaaggaggccaacaggaagaagctggccgacatgattgccagccggcagcagcagcagcagcagcagcagcagcagcagcagcagcagcagcagcagcagcaggcccagaccctggcccaggcccaggcccaggtgcaggcccacctgcagcaggagctgcagcagcaggccgccctgatccagagccagctgttcaaccccaccctgctgccccacttccccatgaccacagagaccctgctgcagctgcagcagcagcagcacctgctcttccccttctacatccccagcgctgagttccagctgaaccctgaggtgtccctgcctgtgaccagcggggccctgaccctgactggaactggacctggcctgctggaggacctgaaggcccaggtgcaggtgccccagcagagccaccagcagatcctgccccagcagcagcagaaccagctgagcatcgcccagagccacagcgccctgctgcagcccagccagcaccctgagaagaagaacaagctggtgatcaaggagaaggagaaggagagccagcgggagcgggacagcgctgagggcggggagggcaacacaggccccaaggagaccctgcctgatgccctgaaggccaaggagaagaaggagctggcccctgggggcggcagcgagcccagcatgctgcccccacgcatcgccagtgatgcccggggaaatgccaccaaggccctgctggagaactttggatttgagctggtgatccagtacaatgaaaacaagcagaaggtgcagaagaagaatggcaagacagaccagggcgagaacctggagaagctggagtgtgacagctgtgggaagctgttcagcaacatcctgatcctgaagagccaccaggagcacgtgcaccagaactacttccccttcaagcagctggagagatttgccaagcagtacagagaccactatgacaagctgtaccccctgcggccccagaccccagagcccccacctcctcctcctcctcctcctcctccacccctgcctgctgccccaccccagcctgccagcaccccagccatcccagccagcgccccacccatcaccagccccaccatcgccccagcccagcccagcgtgcccctgacccagctgtccatgcccatggagctgcccatcttcagccccctgatgatgcagaccatgcccctgcagaccctgcctgcccagctgcccccccagctgggccctgtggagcccctgcctgctgacctggcccagctgtaccagcaccagctgaaccccaccctgctgcagcagcagaacaagaggcccaggacccgcatcacagatgaccagctgcgggtgctgcggcagtactttgacatcaacaacagccccagcgaggagcagatcaaggagatggctgacaagagcggcctgccccagaaggtgatcaagcactggttcaggaacaccctcttcaaggagcggcagaggaacaaggacagcccctacaacttcagcaacccccccatcaccagcctggaggagctgaagattgacagccggccccccagccctgagccccccaagcaggagtactggggcagcaagaggagcagcaggacccgcttcacagactaccagctgcgggtgctgcaggacttctttgatgccaatgcctaccccaaggatgatgaatttgagcagctgagcaacctgctgaacctgcccaccagggtcatcgtggtgtggttccagaatgcccggcagaaggccaggaagaactatgagaaccagggcgagggcaaggatggagagcggcgggagctgaccaatgaccgctacatccgcaccagcaacctgaactaccagtgcaagaagtgcagcctggtgttccagaggatctttgacctgatcaagcaccagaagaagctgtgctacaaggatgaagatgaggagggccaggatgacagccagaatgaagacagcatggatgccatggagatcctgacccccaccagcagcagctgcagcacccccatgcccagccaggcctacagcgccccagcccccagcgccaacaacacagccagcagcgccttcctgcagctgacagctgaggccgaggagctggccaccttcaacagcaagacagaagctggagatgagaagcccaagctggccgaggcccccagcgcccagcccaaccagacccaggagaagcagggccagcccaagccagagctgcagcagcaggagcagcctgagcagaagaccaacaccccccagcagaagctgccccagctggtgtccctgcccagcctgccccagcccccaccccaggcccccccaccccagtgccccctgccccagagcagccccagccccagccagctgagccacctgcccctgaagcccctgcacaccagcaccccccagcagctggccaacctgcccccccagctgatcccctaccagtgtgaccagtgcaagctggccttccccagctttgagcactggcaggagcaccagcagctgcacttcctgagcgcccagaaccagttcatccacccccagttcctggacaggagcctggacatgcccttcatgctgtttgaccccagcaaccccctgctggccagccagctgctgagcggggccatcccccagatcccagccagcagcgccaccagccccagcacccccaccagcaccatgaacaccctgaagaggaagctggaggagaaggccagcgccagccctggagaaaatgattctggaactggaggagaggagccccagagggacaagaggctgcggaccaccatcaccccagagcagctggagatcctgtaccagaagtacctgctggacagcaaccccaccaggaagatgctggaccacatcgcccacgaggtgggcctgaagaagagggtggtgcaggtgtggttccagaacacccgggcccgggagaggaagggccagttccgggctgtgggccctgcccaggcccaccggcgctgccccttctgccgggccctcttcaaggccaagacagccctggaggcccacatccgcagccgccactggcatgaggccaagagagctggctacaacctgaccctgagcgccatgctgctggactgtgatggcggcctgcagatgaagggggacatctttgatggcaccagcttcagccacctgccccccagcagcagtgatggccagggcgtgcccctgagccctgtgtccaagaccatggagctgagccccaggaccctgctgagccccagcagcatcaaggtggagggcattgaagattttgagagccccagcatgagctctgtgaacctgaactttgaccagaccaagctggacaatgatgactgcagctctgtgaacacagccatcacagacaccaccactggagatgagggcaatgctgacaatgattctgccactggaattgccacagagaccaagagcagcagcgccccaaatgaaggcctgaccaaggccgccatgatggccatgtctgaatatgaagatcggctgagcagcggcctggtgtccccagcccccagcttctacagcaaggagtatgacaatgaaggaacagtggactacagcgagaccagcagcctggccgacccctgcagccccagccctggggccagcggcagcgctgggaagagcggggacagcggggaccggcccggccagaagcgcttccgcacccagatgaccaacctgcagctgaaggtgctgaagagctgcttcaatgactaccgcacccccaccatgctggagtgtgaggtgctgggcaatgacatcggcctgcccaagagggtggtgcaggtgtggttccagaatgcccgggccaaggagaagaagagcaagctgtccatggccaagcacttcggcatcaaccagaccagctatgagggccccaagacagaatgtaccctgtgtggcatcaagtacagcgcccggctgtctgtgcgggaccacatcttcagccagcagcacatcagcaaggtgaaggacaccatcggcagccagctggacaaggagaaggagtactttgatcctgccaccgtgcggcagctgatggcccagcaggagctggaccgcatcaagaaggccaatgaggtgctgggcctggccgcccagcagcagggcatgtttgacaacacccccctgcaggccctgaacctgcccacagcctacccagccctgcagggcatcccccctgtgctgctgcccggcctgaacagccccagcctgcccggcttcacccccagcaacacagccctgaccagccccaagcccaacctgatgggcctgcccagcaccaccgtgcccagccctggcctgcccaccagcggcctgcccaacaagcccagcagcgccagcctgagcagccccaccccagcccaggccaccatggccatgggcccccagcagcccccccagcagcagcagcagcagcagcagccccaggtgcagcagcccccacctcctcctgctgcccagcccccacccaccccccagctgcccctgcagcagcagcagcagaggaaggacaaggacagcgagaaggtgaaggagaaggagaaggcccacaagggcaagggggagcccctgcctgtgcccaagaaggagaagggggaggcccccacagccacagctgccaccatcagcgcccccctgcccaccatggagtatgctgtggaccctgcccagctgcaggccctgcaggccgccctgaccagtgaccccacagccctgctgaccagccagttcctgccctactttgtgcccggcttcagcccctactatgccccccagatccctggggccctgcagagcggctacctgcagcccatgtatggcatggagggcctcttcccctacagccctgccctgagccaggccctgatgggcctgagccctggcagcctgctgcagcagtaccagcagtaccagcagagcctgcaggaggccatccagcagcagcagcagaggcagctgcagcagcagcagcagcagaaggtgcagcagcagcagcccaaggccagccagacccctgtgcccccaggggcccccagcccagacaaggaccctgccaaggagagccccaagccagaggagcagaagaacaccccccgggaggtgagccccctgctgcccaagctgcctgaggagcctgaggccgagagcaagtctgctgacagcctgtatgaccccttcatcgtgcccaaggtgcagtacaagctggtgtgcaggaagtgccaggccggcttcagtgatgaggaggccgcccggagccacctgaagagcctgtgcttcttcggccagagcgtggtgaacctgcaggagatggtgctgcacgtgcccaccggcggcggcggcggcggcagcggcggcggcggcggcggcggcggcggcggcggcggcggcggcagctaccactgcctggcctgtgagagcgccctgtgtggggaggaggccctgagccagcacctggagagcgccctgcacaagcacaggaccatcaccagggctgccagaaatgccaaggagcaccccagcctgctgccccacagcgcctgcttcccagaccccagcacagccagcaccagccagagcgctgcccacagcaatgacagccccccacctccttctgctgctgcccccagcagcgccagcccccacgccagcaggaagtcctggccccaggtggtgtcccgggccagcgctgccaagcccccatccttcccccccctgagcagcagcagcacagtgaccagcagcagctgcagcaccagcggcgtgcagcccagcatgcccacagatgactacagcgaggagagtgacacagacctgagccagaagagtgatggccctgccagccctgtggagggccccaaggaccccagctgccccaaggacagcggcctgacctctgtgggcacagacaccttccggctgtag

SEQ ID NO: 63495 - DNA, 8370 bp, Artificial Sequence
  derived and/or modified sequence
atgcggctgggcggcggccagctggtgagcgaggagctgatgaacctcggcgaatcatttatccagactaacgatccgagcctcaaactttttcagtgcgcagtctgcaacaagtttactacagacaacctggatatgttgggcctgcatatgaacgtggaaagaagtctgtccgaagatgagtggaaggccgtgatgggggattcttatcaatgtaaactgtgtcgatataatacccagctcaaggctaacttccagttgcattgtaagacagataagcacgttcaaaaataccagctcgtggcccacattaaggagggagggaaagccaacgagtggcggctgaagtgcgtggcgatcggaaatccagtacacttgaaatgtaacgcttgtgattactatacaaacagtctcgagaagctccggttacacacagtgaattctcggcatgaggccagcctgaaactgtacaaacacctccagcagcatgaatctggagtcgagggcgaatcatgctactaccactgcgtgttgtgtaattatagcaccaaggcaaagctgaatctcatccagcacgtgcgttccatgaagcatcagcggtctgaatcgctgcggaagctgcagcggctacagaaaggcctccccgaagaggacgaggacctaggacagatctttaccattcggagatgtccgtcaaccgatcctgaagaagcaatagaggacgtggagggcccctccgagacagcagctgatccggaagagttagcgaaggaccaggaaggtggcgccagtagctctcaggccgagaaggagttaaccgacagcccagccacatccaagaggatcagctttcccgggtcaagcgaaagtcccttgtcatccaaaaggccaaaaaccgccgaagagatcaagccagagcaaatgtaccagtgtccctactgcaagtactctaatgccgatgtaaaccgcctcagggtacatgcgatgacacaacatagtgttcagccaatgctccgctgtccactctgtcaagacatgttgaacaacaagatccatctgcagctgcatctcacacatctgcacagcgtggcccccgactgtgtcgagaagctgattatgactgtgactacaccagaaatggttatgcctagcagcatgttcctgcctgctgccgtgcccgacagagacggtaattccaaccttgaagaggccggcaaacagccagagacatctgaagacttgggtaaaaacatcttgccaagtgccagtaccgaacagtccggagacctaaagccaagtcctgccgacccaggcagcgtgcgagaggatagcggatttatttgttggaagaaaggttgcaaccaggtgtttaaaacatcagcagcgctgcagacccacttcaacgaggtccatgccaagcgtccgcagttacctgtcagcgaccgccacgtatacaaatacaggtgcaatcaatgttccttagcattcaagaccatcgagaagctccaacttcactctcagtaccacgtgatccgcgctgcaacaatgtgctgtttgtgtcagagatcattccgcacatttcaggctctgaagaagcatctggagactagccatctcgaactgtctgaagccgatattcaacagctgtacgggggtcttctggctaatggcgatctgctcgcaatgggggaccctactcttgctgaggaccatacaataattgtggaagaggataaggaagaagaaagtgacctcgaggacaagcaatctcccacgggaagcgattctggcagtgtccaagaggatagcggatcagaaccgaagagagctctccccttccgcaaaggtcccaacttcactatggagaaatttctcgatcccagtagaccatataaatgtactgtttgcaaggagtcctttactcagaagaacattctcctggtccactacaacagtgtgagccacctccataagctgaaaagagccctgcaagaatccgccacaggtcagcccgagccaacatcatcccctgataacaagccttttaagtgcaacacgtgtaacgttgcctactctcagagttcaacactggaaatccacatgagaagtgtcttacaccagacaaaagcccgggcggccaaacttgaggcagcgagcggaagctctaacggcacagggaattcctcatctatcagtctaagcagctccacccctagtccggtgtctacttctgggtccaacacattcaccacatccaatcctagctctgcagggattgcacctagtagcaatttattatcacaggtccctactgaatccgtgggcatgcccccccttgggaaccccatcggagcaaacatcgccagtccgtccgagcccaaggaagctaacagaaaaaagctggctgacatgattgctagcagacaacaacagcaacagcaacaacaacagcagcaacaacaacaacagcaacagcaacaggcccagaccctggcgcaggcacaagctcaggtccaggcccacctgcagcaggagctgcagcagcaggctgccctcatccagtcccagctttttaaccccacgctgttgcctcactttcctatgactacagagacccttctccagctccaacagcagcagcatctgttgttcccattttatatcccgagtgcagagtttcagctgaaccccgaggtctctctgcctgttacttctggtgccctcacgttaacagggaccggaccaggcctcctcgaagacttaaaagcccaggtgcaggtcccccagcagtcccaccagcaaattcttccacagcaacagcagaaccagctgtctattgcccagtcacattccgctctgctgcaaccatcacagcaccctgaaaaaaagaataagctggtgattaaggaaaaagaaaaggagtctcagcgagaacgggactccgcagaagggggtgaaggaaataccggtccaaaagagacgttgcctgatgcactgaaggcaaaggagaaaaaggaactggcacccgggggtggatctgaaccctcaatgctcccacccagaattgcatccgacgcccgcggaaacgctactaaggctctccttgaaaatttcggttttgaactcgtgatccagtacaacgagaataagcagaaggtgcagaaaaaaaacggaaaaaccgaccagggggagaatctcgaaaaattagaatgtgactcctgtggaaaacttttcagcaacatcttgattctgaagtctcaccaggaacatgtccaccaaaactactttccctttaagcagctcgaaagatttgcaaaacagtatcgtgatcattatgacaaactctaccctctgcggccgcagacaccagagcctccacctccgccccctcccccgcccccgccccccctacctgctgccccaccccagcctgcaagtaccccagccatccccgcctccgccccacccataactagccccaccatcgcccccgcacagccatcggttccactgacccagttatcaatgcctatggaactccctatcttttcccctctcatgatgcagactatgcccctacagaccctgcctgctcagctaccgcctcagttgggcccagtggagccccttcctgcggacctcgcacagctctaccaacaccaactgaaccccacactcctgcagcagcagaacaagcggccaagaacccgcatcactgacgatcagctgcgtgtcctgaggcaatacttcgacattaataactccccttccgaagaacaaattaaagaaatggccgataagtccggcctgcctcagaaggtgattaaacattggtttcggaacactctgtttaaagagagacagcgcaacaaagactctccatacaacttctcgaatccacccattactagcctggaggaacttaagatcgattcaaggccgccctctcctgagccccctaagcaggagtattggggcagcaagcgctccagccgtacacggttcacagactatcagctgcgggtgctgcaggattttttcgacgcaaacgcatacccaaaagacgacgaatttgagcagctgagcaacctcctcaacttaccgacgagagttatagtcgtttggtttcagaacgcccggcagaaagccagaaagaattatgaaaatcaaggggaggggaaggatggcgagcgccgtgaactgaccaacgacaggtacattagaacttccaaccttaattatcagtgcaaaaaatgttccctggttttccaacgcatcttcgacttgatcaagcatcagaagaaactatgctataaggatgaagacgaggagggacaggatgacagccagaacgaagatagcatggacgcgatggagatcctcaccccaacatctagtagttgtagcacccccatgccgtcccaggcttactcagctcccgctccgagcgcgaacaacacagccagttctgcatttctgcagttgacagccgaggctgaagagctggcgacgttcaatagtaaaaccgaggctggagatgaaaagcccaaacttgcagaggcgccctccgcgcaacccaatcagactcaggaaaagcagggacagcccaagcccgagctccagcaacaggagcagcccgagcagaaaactaacactccacagcagaagctgccgcagctggtcagtctcccgagcctgccccagccaccaccacaggccccccctccacaatgtcctctgccccagtcttcaccaagcccgtcccagttatcccatctgccactgaagcctctccatacgtcaaccccgcagcagttggccaatctgccgccacaactcatcccttatcagtgtgatcaatgcaagctggccttccccagcttcgagcattggcaggagcatcagcaactgcattttctttcagcgcagaaccaattcatccacccccaattcttggatagatcgctggacatgccgttcatgttattcgatccaagcaacccgctgttagcaagtcaactgctttctggtgctatccctcagatccccgctagctccgcaacatctccctcaacccctacaagcacaatgaacaccttgaagaggaagttggaggaaaaggctagcgccagtcctggcgagaacgactcaggcaccggcggcgaggaaccacagagggacaaacgcttgcgcaccactatcaccccagaacagctggagatactctatcaaaaatatctgctcgattccaaccccactcgcaaaatgctggatcacatcgcgcatgaggtcgggcttaagaagagagtagtgcaggtgtggttccagaatacacgggcgcgggagcggaagggccagtttagagctgtgggccccgcccaggcccaccgccgctgtcctttctgccgcgctcttttcaaggccaagacggcgctggaagcccatattcggtcgagacactggcacgaggccaaacgtgccggatacaacctcactctctcagctatgctactggattgcgacggagggctgcagatgaaaggggacatattcgacgggacctctttcagtcaccttccaccaagctcttccgatggccagggtgttccgctcagccctgtgagtaagacaatggaactgagtccacggactcttttgtcacccagctctattaaggtagaaggaattgaagatttcgaaagcccgtcgatgtcctccgtgaatctgaatttcgaccagaccaagctggacaatgacgattgctcaagcgtaaacaccgctatcactgatacgaccactggtgatgaaggcaacgcagataatgacagcgccacaggaatcgcgaccgagaccaaatcaagttctgcacccaacgaaggcctgacaaaagccgcgatgatggccatgtcggagtacgaagaccgcctttccagtgggctggtcagccccgcaccaagcttttacagcaaggagtatgataacgaaggcacggttgactattctgagactagctctcttgccgatccttgctctcctagtccgggggcttctggaagtgctggaaaatcaggagatagcggtgatagacccggacagaaaaggtttcgcacccagatgactaacctacagttaaaagttctgaaaagctgtttcaacgattatcggactcccaccatgctggaatgtgaagtcttaggcaatgacatcggcctgccgaagcgcgtcgtccaggtttggtttcaaaatgcacgcgcaaaggagaaaaagagtaagttgagcatggctaagcacttcggtatcaatcagacaagttacgagggtcccaagaccgagtgtacactgtgtggaataaaatactctgcacggctgagcgtcagggatcacatcttcagccagcaacacatcagcaaggtgaaagacacaatcggaagccagcttgacaaggagaaggaatatttcgatcctgccactgtgaggcaattgatggcgcaacaggagctcgaccggattaaaaaggcaaatgaggttttaggactggccgcacagcagcaggggatgttcgataacacgcctctgcaagcactaaacctgccaaccgcatatcctgcactccaggggattccaccagtcttgctgccagggttgaattctccttctctccccggatttacccctagtaacaccgccctgacgtcgccaaagcccaacctgatgggactcccttcaaccacggtgccatccccgggtctcccaaccagcgggcttcccaacaaacccagttcagcatcactctctagtcccacaccagcacaggccaccatggccatgggaccccaacaaccgccccagcaacagcagcagcaacagcagccccaggtccagcagcccccccctccgcctgccgctcaaccccccccaactccgcagctcccacttcaacagcaacaacagcgcaaagataaggattcagaaaaggtcaaggagaaagaaaaagcacataaggggaaaggcgagccgttgccagtaccgaagaaagaaaagggagaagcccccacagctacagccgctacaatctcagccccattgcctactatggaatacgccgtggaccccgcgcagctccaggcgctgcaagcagccttgacttctgatccaaccgccctgttgacatcccagtttctgccatacttcgttccaggtttctccccttactatgctccccagatccccggggccctgcaatccggttacttgcaaccaatgtacggcatggagggcctgtttccctatagccccgccctgagtcaagcccttatgggcctaagcccgggatcgttgttgcagcagtaccagcaataccagcagtctctgcaggaggcaattcaacagcagcaacagaggcagttgcagcaacaacagcagcaaaaggtgcagcagcagcagccaaaagcctctcagaccccagttccccccggtgccccaagccccgataaagaccccgctaaggaatccccaaagcccgaagaacaaaagaacacgccgcgtgaggtgtcacctctgctccccaagctgcccgaagaaccagaggctgagtcaaaatccgctgacagcctgtacgaccctttcattgtgcctaaagttcaatataaactggtatgccgcaaatgccaggccggcttctccgatgaagaggcggcacggagccacttgaagtccctctgcttcttcggacaatctgtagtgaacctgcaggagatggtactccatgtgcccactggagggggcggaggaggctcaggcggcgggggcggggggggagggggtgggggcggcgggggctcctatcattgcctggcctgtgagtcagctctgtgtggtgaagaagctctgtcacagcacctggagtccgctcttcacaaacaccgaacaatcacgcgagccgcacgaaacgcaaaggagcatccatcccttctgccccacagcgcctgcttccctgacccatccaccgcttctacctcccagtcggcagcgcatagcaacgactcgccgcctcccccctctgctgcagctcctagctccgcttcccctcacgcttctcgaaaatcatggccgcaagttgtgtcacgtgccagcgcggccaagcctccaagcttcccacctttatctagctccagcaccgtgaccagcagctcttgcagtaccagcggagtgcagcctagcatgccgacggatgactattcagaagagagcgataccgatctatcccaaaagtctgatggacctgcgagtcccgttgagggccctaaggacccatcgtgtcctaaggacagtggtcttacttccgtgggaaccgatacattcagattgtag

SEQ ID NO: 63496 - DNA, 8369 bp, Artificial Sequence
  derived and/or modified sequence
atgaggctgggtggagggcagttagtgagcgaggagctaatgaacctgggagagtcctttattcagacaaacgatccatcactcaaactcttccaatgcgcagtttgcaataagtttactaccgacaacttagacatgttggggctgcacatgaacgtggagaggagcctgagcgaagatgaatggaaagcagtcatgggagattcttaccagtgtaagctgtgcaggtataatacccagctcaaggccaattttcagctgcactgcaaaactgacaagcatgtccaaaagtatcagctggtggctcacattaaggagggaggcaaggcaaacgagtggcgtctgaaatgtgtggccatcggtaaccctgtgcaccttaaatgcaacgcttgcgactattatactaactctctggagaagctgcgcttgcacactgtcaacagccgccacgaggcctccttgaagttgtacaagcacctgcaacagcacgaaagtggcgttgagggcgaaagctgctattatcactgcgtcttgtgcaactatagtacaaaggcaaaactcaacctcattcagcacgtccgctccatgaaacatcagaggagtgagagtctgcgaaagctgcagcgtctccagaaagggctgccggaggaggacgaggacttgggtcagatttttacaattcgtagatgtcctagcacggatcccgaagaagccatagaggacgtggaggggccttctgaaacggctgccgatcccgaggagctggccaaggatcaggaggggggagcatccagctcccaggccgagaaggaactcaccgattctcctgcgacatcaaagagaatatcctttcccggaagttccgagtcccctctctcttcaaagcgccctaagacagcagaggaaatcaaaccagaacagatgtaccagtgcccatactgtaagtacagcaacgctgacgtaaatagactgagggtgcatgctatgactcagcactcagtgcagccaatgctgcggtgccccctctgtcaagacatgctcaacaacaagatccacctgcagttacatctgactcaccttcactcagtagctccagactgcgtggaaaagctgattatgaccgtgaccactcctgaaatggtgatgccttcttccatgttcctaccagccgcagtccctgatagggacggcaacagcaatcttgaggaagccggaaagcagcctgaaacttccgaagacttgggcaagaatatacttccttccgcctccacagagcagtctggcgatctcaagccatcccccgctgaccctggcagcgttcgcgaggatagcggattcatatgctggaagaaaggatgtaaccaggtgttcaaaactagcgccgctcttcaaacccattttaacgaggtacatgcaaagcgtccccaattaccagtctcagaccgccacgtgtataagtacaggtgtaaccagtgcagtctggcctttaaaactatcgagaagctgcagctccactcccagtatcacgttattcgagccgcaactatgtgttgcttatgccaacggagctttcggacattccaggccttaaagaagcacctggaaacaagccacctggagctttcagaagccgatatccagcagttgtatggaggcctgcttgcgaacggcgacctgttagccatgggtgatccaacgctggcagaggaccacaccataattgtggaagaggataaggaagaagaaagtgatctggaggataagcagtctccaaccggttcggattccggctcggtgcaggaagatagcggtagcgagccaaagcgcgcactgcctttccgcaagggtccaaacttcaccatggagaaattcttggacccttctcggccttacaagtgtactgtgtgtaaggaatcattcacccagaagaacattctactggtgcactataatagcgtatcgcacctacataaactgaaaagagccctgcaggaaagcgcaacaggacagccggagcccacaagctccccagacaataagcccttcaaatgtaacacttgcaacgttgcctattcccagtcatcaaccctggagatccacatgcggagtgtcttacaccaaacaaaggcgagagccgctaaacttgaagccgcatcgggctctagcaatggtactgggaacagtagctctatctctctctctagctcaacgccaagtccagtgtccacctccggctctaacacatttacgaccagcaaccctagctcagcaggaatcgccccaagtagcaaccttttgagccaggtcccaaccgaatccgtaggcatgcctccactcggcaaccctattggagctaatattgcttcaccctccgaaccgaaggaggccaacagaaaaaagttagccgatatgattgcctcaaggcagcagcagcaacagcagcagcaacagcagcagcaacaacagcagcaacagcaacaagcgcagaccctggcacaggcccaagcccaggtccaggctcacctgcagcaggagctccagcaacaggctgcactgattcagtcacagctttttaacccaacactgcttccccattttcctatgactacagagaccctgctacaactgcagcagcaacagcatctcttgttccccttctatataccctcggccgagttccagctgaatccggaggtctcgctgcccgtgaccagtggagcactaactctcacaggcaccggtcctggtttacttgaggatttaaaagcccaggtccaagtgccccagcagtcacaccaacaaattcttcctcagcaacaacagaaccagctgtcgattgctcagtcccactcagccctgcttcagccatctcaacacccggagaaaaagaacaagctggtcataaaggagaaagagaaggaaagtcaaagggagcgtgacagcgccgagggcggagagggaaatacgggtcctaaggagacactaccagacgcgctcaaagctaaggaaaagaaggagctggcgccaggaggcggtagtgagccgagtatgctgccccctaggatcgccagtgacgcgagaggtaatgccacaaaggctcttctggaaaacttcggctttgaactcgtcatacagtacaatgagaacaaacagaaagtgcagaagaaaaacggcaagacggaccaaggggaaaatctcgagaaactcgagtgcgactcttgcggcaagttgttctctaatatactcatcctgaagtctcaccaagagcacgtgcaccagaattatttcccattcaaacaacttgaacggttcgctaaacagtaccgggatcattacgataaactgtatcctctgcggcctcagacccctgaaccaccacctccaccaccaccaccacccccaccccctcttccagccgcacccccacagccagcgtctactccggctattcctgcgtcggccccaccaatcacttctcccaccatcgcaccagcgcagccaagcgtccccctgacacagttatcgatgccgatggaactccctatcttctctccactgatgatgcagacaatgcctttgcagaccctgcccgcacaactccctccgcaactagggccagtcgaacctctgccagctgacctggcacagttgtatcaacaccagctgaatcctaccctactccagcaacagaacaagaggcccaggaccaggataacggatgaccagctaagggtgctgaggcagtactttgacataaacaattcccccagcgaagagcagatcaaagaaatggcagacaagagtggcctgcctcaaaaagtaatcaagcattggtttcggaatactttgttcaaggagagacagcggaacaaagattcaccatacaatttctcaaatcctccaattaccagcttagaagagctaaaaatcgattctaggcctccttcccctgagccaccaaaacaagagtattgggggagtaaaaggtcgtctcgtaccaggtttaccgattatcagctaagagtgctccaagatttctttgacgctaatgcttatcctaaggacgatgagtttgagcagctgagcaatttgctcaacctgcccactcgtgtgatcgtggtgtggttccagaacgccaggcagaaggctcgcaagaactacgagaatcaaggggaagggaaggacggggaaaggcgtgagctgacaaacgaccgatacatccggacgagcaacctgaattaccagtgcaagaaatgttcccttgtcttccaacggatcttcgaccttatcaaacaccagaaaaagctctgttataaagacgaggatgaggaaggtcaggacgactctcaaaacgaagacagtatggatgccatggagatcctgacccccacatcctcgagctgctccacccccatgccgtcccaggcctattcagctcccgcacccagcgccaacaataccgcatcttccgccttcctgcagctgactgccgaagccgaggagttagcaacctttaactccaagaccgaggcgggagatgagaagcctaagctggccgaagcaccctctgcacaacccaatcaaacccaagaaaaacagggacagcctaagcccgaactgcagcagcaggaacagcccgaacagaagacaaacaccccgcagcagaaattaccgcagctagttagcctaccaagcctgccccagccgcctccacaagcccctccgccacagtgccctctcccgcagagctccccctcacctagtcagctctcacatctgccactgaagcccctccacactagcacgccacaacaattagcaaacctgcccccacagctgataccctaccaatgtgaccagtgtaaactggctttccctagtttcgaacactggcaggagcatcagcagctccacttcttgtcagcacagaatcagttcatccatccacaatttcttgatcgtagtttggatatgcccttcatgctctttgatccgtctaacccactcctggcttctcaattactgtcaggagccataccccagattcccgcatcatctgccacctccccttcaacccccacctcaaccatgaacacattgaagaggaagcttgaggagaaagcttcagcttccccaggagagaacgacagcgggaccgggggagaggagccccagcgggacaagagactccggacaactatcaccccagaacaactggaaatcttataccagaagtaccttctcgatagtaaccccacccgaaagatgcttgatcatattgcacacgaagtggggctgaaaaaacgtgtcgtacaggtttggttccagaacacccgtgccagggagagaaaaggacagttcagggcggtgggtcccgcacaggcccaccgtaggtgccccttctgccgcgcactatttaaggcaaaaactgccctcgaggctcacattcgaagccgccattggcatgaagctaagcgggcaggatacaacttgacgttgtccgcgatgcttctcgactgcgacggcggattgcaaatgaagggagacatcttcgacggaacatctttttcccatctgcctcccagctcctcagacgggcagggcgtgccactgagcccagtgtctaagaccatggaattgtctcccagaacgcttttgtcgccatcctccatcaaagttgaagggatcgaagactttgaatctccaagcatgtcgtctgtgaacctcaatttcgaccagactaaacttgataacgacgactgtagttcagtcaatacggccattaccgacactaccaccggcgatgagggcaatgcggataacgattccgccacaggcatagccacagaaacaaaatcttcatccgctccaaacgaagggttaaccaaagcagcgatgatggcgatgtccgaatatgaggaccgcctgtcaagcggattagtgagcccagcccctagtttttactctaaggagtacgacaatgaagggacagtagattactctgagacgtcttcactggctgacccgtgtagcccctcacctggagcttccggttcagcagggaaatctggggattctggtgataggccaggccagaagaggttcaggacccagatgaccaaccttcagttaaaggtgctgaagtcgtgtttcaacgattaccgcacacctacgatgctcgaatgtgaagtgctgggaaatgatatcgggttgcccaagcgggtagttcaggtttggtttcagaatgcaagagctaaggagaagaaatccaagctttctatggcaaaacacttcggtataaatcaaacctcctatgagggcccaaagaccgaatgtactctgtgtggcataaaatacagcgcacggctgagtgttagagatcatatcttctcccagcagcacataagtaaagtgaaagacaccatcggcagtcagctggataaggagaaagagtactttgatccggcaaccgtcagacagctgatggctcaacaggagctggatcgaatcaagaaggccaacgaggtgctgggcttggccgctcagcagcaaggaatgttcgataacacccccctacaggctctgaacctgcccacggcctatccggcactgcagggtatcccccctgtgctccttccgggtctcaactcaccctctctcccagggttcacccctagtaacaccgctctgacatccccgaagcccaatctcatgggcttgccgtcaactacagtgccgagtcccggactgccaacatcaggattgcctaacaagccgagttcggcatcgctgtcctcccctactcctgcacaagcgaccatggcaatgggtcctcagcagccccctcagcagcagcagcagcagcagcagccccaagtgcagcaacctcctccccctcctgccgctcagcccccacccactcctcaacttccactccagcagcagcagcagcgcaaagataaggactccgaaaaagtgaaggagaaagagaaagcccacaagggaaagggcgaacccctgccagtgcctaagaaggagaagggagaggcccctactgccacagcagccaccattagtgcacccctgccgaccatggaatacgcagttgacccagcacagctccaggcactccaggccgcattgacgtccgacccaaccgccttgctgacttctcagtttctgccatacttcgtcccagggttcagcccatactacgctcctcagattccaggcgctctccaaagtgggtacctacaaccaatgtatggtatggaagggctattcccttactcaccagctctgagccaagcgttgatggggctttcaccaggatccctcttacaacagtaccaacaatatcagcagtcactccaggaagcgatccagcagcaacaacagcgtcagcttcaacagcagcaacagcaaaaggtccagcaacagcagccaaaggcaagccagactcctgtcccgcctggcgctccctccccggacaaggatccggctaaagagagtcctaaacccgaggagcaaaaaaatactcctcgcgaggtgtcccctcttctgcccaagctcccagaggaaccagaagcagagagtaagagtgcggacagcctttacgaccccttcatcgtaccaaaagtccaatacaagcttgtgtgccgcaagtgtcaggccggatttagcgatgaggaggccgctcggagccatcttaagagcttatgctttttcggacagagtgtggtcaatctgcaagagatggtgctgcacgtccctacgggtggtggtggtggagggagcggaggcggaggcggtggtggtggtggaggtggcggagggggatcatatcactgtcttgcgtgcgaatctgccctttgcggcgaggaagccttgtcccagcacctcgagagcgctttgcataaacatcgtacaattactcgcgcagcccgtaatgccaaggagcacccgagcctgctcccccattccgcgtgcttccccgacccctcaactgcttcaacttcccagagcgcagctcactctaacgattctccccctccgcctagtgctgccgcaccatcttccgcatcaccccatgcctcaaggaagtcttggcctcaggtggtgtctagagcctccgccgctaaacccccaagcttccccccacttagttcgagttccaccgttacctcctcctcttgctccacatcgggtgtgcagccaagcatgccgaccgatgattactctgaagagtctgataccgatctcagtcagaagagcgatgggcctgcctctcctgtcgagggccctaaggacccatcctgtcctaaggatagcgggttgaccagtgttggtactgacacttttcggctgta

SEQ ID NO: 63497 - protein, 698 aa, Artificial Sequence
  derived and/or modified sequence
MKIETSGYNSDKLICRGFIGTPAPPVCDSKFLLSPSSDVRMIPCRAALTFARCLIRRKIVTLDSLEDTKLCRCLSTMDLIALGVGSTLGAGVYVLAGEVAKADSGPSIVVSFLIAALASVMAGLCYAEFGARVPKTGSAYLYTYVTVGELWAFITGWNLILSYVIGTSSVARAWSGTFDELLSKQIGQFLRTYFRMNYTGLAEYPDFFAVCLILLLAGLLSFGVKESAWVNKVFTAVNILVLLFVMVAGFVKGNVANWKISEEFLKNISASAREPPSENGTSIYGAGGFMPYGFTGTLAGAATCFYAFVGFDCIATTGEEVRNPQKAIPIGIVTSLLVCFMAYFGVSAALTLMMPYYLLDEKSPLPVAFEYVGWGPAKYVVAAGSLCALSTSLLGSIFPMPRVIYAMAEDGLLFKCLAQINSKTKTPIIATLSSGAVAALMAFLFDLKALVDMMSIGTLMAYSLVAACVLILRYQPGLSYDQPKCSPEKDGLGSSPRVTSKSESQVTMLQRQGFSMRTLFCPSLLPTQQSASLVSFLVGFLAFLVLGLSVLTTYGVHAITRLEAWSLALLALFLVLFVAIVLTIWRQPQNQQKVAFMVPFLPFLPAFSILVNIYLMVQLSADTWVRFSIWMAIGFLIYFSYGIRHSLEGHLRDENNEEDAYPDNVHAAAEEKSAIQANDHHPRNLSSPFIFHEKTSEF

SEQ ID NO: 63498 - DNA, 2097 bp, Artificial Sequence
  derived and/or modified sequence
atgaagatcgagaccagcggctacaacagcgacaagctgatctgcagaggcttcatcggcacccccgccccccccgtgtgcgacagcaagttcctgctgagccccagcagcgacgtgagaatgatcccctgcagagccgccctgaccttcgccagatgcctgatcagaagaaagatcgtgaccctggacagcctggaggacaccaagctgtgcagatgcctgagcaccatggacctgatcgccctgggcgtgggcagcaccctgggcgccggcgtgtacgtgctggccggcgaggtggccaaggccgacagcggccccagcatcgtggtgagcttcctgatcgccgccctggccagcgtgatggccggcctgtgctacgccgagttcggcgccagagtgcccaagaccggcagcgcctacctgtacacctacgtgaccgtgggcgagctgtgggccttcatcaccggctggaacctgatcctgagctacgtgatcggcaccagcagcgtggccagagcctggagcggcaccttcgacgagctgctgagcaagcagatcggccagttcctgagaacctacttcagaatgaactacaccggcctggccgagtaccccgacttcttcgccgtgtgcctgatcctgctgctggccggcctgctgagcttcggcgtgaaggagagcgcctgggtgaacaaggtgttcaccgccgtgaacatcctggtgctgctgttcgtgatggtggccggcttcgtgaagggcaacgtggccaactggaagatcagcgaggagttcctgaagaacatcagcgccagcgccagagagccccccagcgagaacggcaccagcatctacggcgccggcggcttcatgccctacggcttcaccggcaccctggccggcgccgccacctgcttctacgccttcgtgggcttcgactgcatcgccaccaccggcgaggaggtgagaaacccccagaaggccatccccatcggcatcgtgaccagcctgctggtgtgcttcatggcctacttcggcgtgagcgccgccctgaccctgatgatgccctactacctgctggacgagaagagccccctgcccgtggccttcgagtacgtgggctggggccccgccaagtacgtggtggccgccggcagcctgtgcgccctgagcaccagcctgctgggcagcatcttccccatgcccagagtgatctacgccatggccgaggacggcctgctgttcaagtgcctggcccagatcaacagcaagaccaagacccccatcatcgccaccctgagcagcggcgccgtggccgccctgatggccttcctgttcgacctgaaggccctggtggacatgatgagcatcggcaccctgatggcctacagcctggtggccgcctgcgtgctgatcctgagataccagcccggcctgagctacgaccagcccaagtgcagccccgagaaggacggcctgggcagcagccccagagtgaccagcaagagcgagagccaggtgaccatgctgcagagacagggcttcagcatgagaaccctgttctgccccagcctgctgcccacccagcagagcgccagcctggtgagcttcctggtgggcttcctggccttcctggtgctgggcctgagcgtgctgaccacctacggcgtgcacgccatcaccagactggaggcctggagcctggccctgctggccctgttcctggtgctgttcgtggccatcgtgctgaccatctggagacagccccagaaccagcagaaggtggccttcatggtgcccttcctgcccttcctgcccgccttcagcatcctggtgaacatctacctgatggtgcagctgagcgccgacacctgggtgagattcagcatctggatggccatcggcttcctgatctacttcagctacggcatcagacacagcctggagggccacctgagagacgagaacaacgaggaggacgcctaccccgacaacgtgcacgccgccgccgaggagaagagcgccatccaggccaacgaccaccaccccagaaacctgagcagccccttcatcttccacgagaagaccagcgagttctag

SEQ ID NO: 63499 - DNA, 2097 bp, Artificial Sequence
  derived and/or modified sequence
atgaagatagagacctcgggctataattctgacaagctgatttgccgaggctttattggtacacccgccccacccgtgtgtgattccaagttcctgctgtctccctctagtgatgttcgtatgatcccgtgcagagccgcactgaccttcgcccgatgtctgatcagacgcaagatagttacacttgatagcctcgaagataccaaattgtgtcgctgcctgtccaccatggacctgatcgccctcggagttggaagcaccctgggcgccggcgtgtacgtgcttgcaggggaagttgccaaagccgactctggcccctcaatcgtggtttcgtttctcattgctgcacttgcaagcgtgatggccggactatgctatgctgagtttggggcgcgcgtgcctaagacaggcagcgcatacctgtatacttacgtcacggttggcgaactgtgggcttttattacggggtggaacctgatccttagctacgttataggcacaagtagtgtggccagggcttggtccgggactttcgacgagctcctttccaagcaaataggtcagtttcttaggacctatttcagaatgaactatacaggtttggcagaatacccagattttttcgctgtgtgtttaattcttctgttggcaggacttcttagctttggtgtgaaggaaagtgcctgggtcaataaagtgtttaccgccgttaacatcctagtgctgctattcgtgatggtggccgggttcgtgaagggtaatgtcgctaattggaaaatctcagaggaatttttgaaaaatatcagtgcctcagccagagagccgccatctgagaatggaactagcatttatggcgcggggggtttcatgccgtatggctttactggaacactggctggagccgccacctgtttttacgctttcgtgggatttgattgcatcgctaccacaggcgaggaagttcggaacccccagaaggccatccctattgggatcgtgacatctctgctcgtgtgcttcatggcctactttggtgtgtctgccgccttgactcttatgatgccatactaccttctggacgagaaatctccgttgcccgtggcgttcgaatacgttgggtggggacccgcgaagtacgtggtcgctgccggctctctctgtgcgctgtccacatctctgctgggaagcatatttcccatgccccgcgtgatctatgctatggcagaagatggcctgctctttaaatgcctggcacagataaacagcaagacaaaaactccgatcatcgctaccttatcctccggcgccgtggcagcgcttatggccttcctgttcgacttgaaggccctggttgacatgatgtcaataggtactctaatggcatactccttggtagccgcctgcgttctcatactgaggtatcagcccggcttgtcctacgaccaaccaaagtgttctccagaaaaagacggcctaggctcctcgccacgcgtaacctccaagagcgagtctcaggtgacaatgctacagagacaaggattcagcatgcgaacactgttctgtcctagtctcttgcccacccaacagtcggcttccctggtgtcttttcttgttggcttcctggccttcctcgtcttaggcctgagtgtcctgaccacatacggcgtccacgcaatcactagactggaggcttggagcctggccctgctggccctcttcctggtgctcttcgtggccatcgtgctaaccatctggagacagccccagaaccaacagaaagtagcgttcatggtgcctttcctgccctttctacccgcctttagcattctggtgaatatctatcttatggtccaactgagtgcagacacttgggtgaggttctctatttggatggccattggattcttgatatacttcagctatggaattaggcattccctggagggtcatttgcgggatgagaacaatgaggaagatgcttaccctgacaatgtccacgctgcagccgaagaaaaatctgccatccaagcaaatgatcaccacccccgcaatctgagcagcccattcattttccacgaaaagacaagtgaattctag

SEQ ID NO: 63500 - DNA, 2097 bp, Artificial Sequence
  derived and/or modified sequence
atgaagattgagaccagcggctacaacagcgacaagctgatctgccggggcttcatcggcaccccagcccctcctgtgtgtgacagcaagttcctgctgagccccagcagtgatgtgaggatgatcccctgccgggccgccctgacctttgcccgctgcctgatccggaggaagatcgtgaccctggacagcctggaggacaccaagctgtgccgctgcctgagcaccatggacctgattgccctgggcgtgggcagcaccctgggcgctggggtgtatgtgctggccggggaggtggccaaggctgacagcggccccagcatcgtggtgtccttcctgattgctgccctggcctctgtgatggccggcctgtgctacgccgagtttggagcccgggtgcccaagacaggcagcgcctacctgtacacctacgtgacagtgggggagctgtgggccttcatcaccggctggaacctgatcctgtcctatgtgattggcaccagctctgtggcccgggcctggagcggcacctttgatgagctgctgagcaagcagatcggccagttcctgcggacctacttcaggatgaactacacaggcctggccgagtacccagacttctttgctgtgtgcctgatcctgctgctggccggcctgctgagctttggagtgaaggagagcgcctgggtgaacaaggtgttcaccgctgtgaacatcctggtgctgctgtttgtgatggtggccggctttgtgaagggaaatgtggccaactggaagatcagcgaggagttcctgaagaacatcagcgccagcgcccgggagcccccatctgaaaatggcaccagcatctacggggccggcggcttcatgccctacggcttcaccggcaccctggccggggccgccacctgcttctacgcctttgtgggctttgactgcatcgccaccactggagaggaggtgaggaacccccagaaggccatccccatcggcatcgtgaccagcctgctggtgtgcttcatggcctactttggagtgtctgctgccctgaccctgatgatgccctactacctgctggatgagaagagccccctgcctgtggcctttgaatatgtgggctggggccctgccaagtatgtggtggccgccggcagcctgtgtgccctgagcaccagcctgctgggcagcatcttccccatgcccagggtcatctatgccatggctgaagatggcctgctcttcaagtgcctggcccagatcaacagcaagaccaagacccccatcatcgccaccctgagcagcggggctgtggccgccctgatggccttcctgtttgacctgaaggccctggtggacatgatgagcatcggcaccctgatggcctacagcctggtggccgcctgtgtgctgatcctgcgctaccagcccggcctgtcctatgaccagcccaagtgcagccctgagaaggatggcctgggcagcagcccccgggtgaccagcaagtctgagagccaggtgaccatgctgcagaggcagggcttctccatgaggaccctcttctgccccagcctgctgcccacccagcagagcgccagcctggtgtccttcctggtgggcttcctggccttcctggtgctgggcctgtctgtgctgaccacctacggcgtgcacgccatcacccggctggaggcctggagcctggccctgctggccctcttcctggtgctgtttgtggccatcgtgctgaccatctggaggcagccccagaaccagcagaaggtggccttcatggtgcccttcctgcccttcctgcctgccttcagcatcctggtgaacatctacctgatggtgcagctgtctgctgacacctgggtgcgcttcagcatctggatggccatcggcttcctgatctacttctcctatggcatccgccacagcctggagggccacctgagagatgagaacaatgaggaggatgcctacccagacaacgtgcatgctgctgctgaggagaagagcgccatccaggccaatgaccaccaccccaggaacctgagcagccccttcatcttccacgagaagaccagcgagttctag

SEQ ID NO: 63501 - DNA, 2097 bp, Artificial Sequence
  derived and/or modified sequence
atgaagatcgagaccagcggctacaacagcgacaagctgatctgcaggggcttcataggaacgccagctcccccagtctgtgatagtaagttccttctgtctccgtcaagcgatgtgagaatgattccctgtcgcgcggccttgacgttcgcaagatgcctcatcagaagaaaaatagtgacgctagatagcctggaggacaccaagttatgccgctgtctctcgacgatggatcttattgctctcggcgtggggtccactctgggggcgggggtctatgtattggcaggagaggtcgctaaggccgattcaggtccatccatcgttgtgagtttcttgatcgcagctttagcctcagttatggcaggtctttgctacgccgagtttggtgcacgggttcccaagacaggttcagcatacctctatacctacgttaccgttggcgagctatgggcctttattacaggatggaacctgattttgtcctatgtgatcggaacaagttccgtggctcgtgcctggagcgggacgtttgacgagctcctcagcaagcagattggtcagtttctccggacctatttccggatgaattacacaggcttggcggaatatcctgatttttttgctgtctgcctgattctactgctggctggcctattgtcctttggcgtcaaggagtctgcatgggtaaataaggtgttcacggcggtgaacattttagtgcttttgtttgtcatggtagccggcttcgtaaaagggaacgtggctaactggaaaatctcagaggagtttctgaaaaatatcagcgccagcgccagggagcctcccagtgaaaacggaaccagtatttacggcgccggtggttttatgccttacgggtttaccgggaccctggccggggctgccacatgtttctatgcctttgtgggatttgattgcatcgccacaaccggagaagaagtgcgcaatcctcaaaaggcaattcctataggtatagtgacaagcctgttagtctgttttatggcctacttcggcgtatctgcagctctcacacttatgatgccatattacttgctggacgagaaatcacctctgccagtggctttcgaatatgtgggctgggggccggccaaatacgtcgttgcagctgggagtttgtgtgctctatcgacctcgcttctcggctctatcttccccatgcctcgcgtgatttacgcgatggcggaggatggactattattcaaatgtttggcccagatcaactccaaaactaagacacctattatcgccacgctctccagtggtgcagtggcggccctgatggctttccttttcgatctgaaggcactggtcgatatgatgtccatcgggacactgatggcctattcactggtagcagcctgcgttcttattctgcggtatcagccaggtctttcctatgaccaacccaagtgttcccctgaaaaggacggtctagggagcagtcccagggtcacaagcaaatctgaatctcaagtgaccatgcttcagaggcagggcttcagtatgcgtaccctgttttgcccctctctgctgcctactcaacaaagtgccagtttggtgagcttcctagtaggcttcctcgcgttcttagtcctgggtctgtcagtgctgacaacatacggcgtccacgccatcacccgtttggaggcgtggtctctggctctgttggctctgttcctggtgctctttgttgctattgtcctgacaatttggcggcagcctcagaatcagcagaaagtggcattcatggtgcctttcttgcccttccttcccgcctttagcatcctagtgaatatctacctgatggtccagctgagcgcggatacctgggtccggttttccatctggatggctatcgggtttctgatttacttctcctatgggatccgtcactcgctggaaggacatctgcgcgatgaaaataatgaagaggacgcgtacccagacaatgtgcacgcagccgctgaggagaaatccgcaatccaggctaatgatcaccatccaagaaacctgtcaagcccctttatctttcacgagaagacatcagagttttag

SEQ ID NO: 63502 - DNA, 2097 bp, Artificial Sequence
  derived and/or modified sequence
atgaagattgagaccagtgggtataatagtgataagctcatttgcaggggcttcatcgggacacctgcccctcccgtctgtgactcaaaattccttctgagcccatcctcagacgttagaatgataccatgtagagcagccctaacatttgctagatgcctgatcaggaggaaaattgtcacactcgacagcttagaggataccaagttgtgcagatgcctctcaactatggacctgatcgccctgggcgtgggcagtacattgggcgcaggcgtgtatgtgttggccggagaagtggctaaagctgactctggcccaagcatcgtggtgagctttctcatagccgcactggcttccgtcatggctggcctctgttacgctgaattcggtgccagggtaccaaagaccgggagcgcctatctctacacttacgtcactgtgggcgaattgtgggctttcatcacaggctggaatctcatcttatcttacgtgatcgggacatcttctgtagccagagcctggtctggcacattcgacgagctgctgtccaaacagataggccagtttctcaggacctacttcagaatgaactacactggtctggctgagtacccggacttctttgctgtttgtctgatcctcctgctggccggactcctctcttttggagtaaaagaatccgcatgggttaataaagtgtttactgccgttaatatactggtactgttgtttgtcatggtggctgggttcgtcaagggcaatgtggccaactggaagatttctgaggaattcctgaagaacatttccgctagcgcgagagagcctccttctgagaatggcactagtatctatggggcaggaggcttcatgccttatggttttacagggaccttggcaggagccgcaacctgcttttacgcctttgttggctttgattgtattgccacgaccggtgaagaagtccgaaatccgcagaaggcaattccaatcggcatcgttacaagtttactcgtgtgcttcatggcctacttcggcgtgtcagccgctttgacactgatgatgccatattaccttctggatgaaaaaagcccattgcctgttgccttcgagtacgttggatggggcccagctaagtacgtggtggcggcaggctccctctgcgctctcagtacaagcctcctcggcagcatttttcctatgccacgagtgatctatgcgatggctgaagacggccttctattcaaatgtctggcacagattaatagcaaaactaagaccccaattatcgctacgctttccagcggagctgtggctgcgctaatggcttttctctttgacttaaaagccctggtggatatgatgtctattggtaccctgatggcgtattctcttgtggccgcttgtgtcctgatccttcgatatcagcccggactcagttacgatcaacccaagtgcagtcctgagaaagacggcctcggatcctcgccgagggtgacttccaagtctgagtctcaagtaaccatgctgcagaggcaaggcttttcaatgaggaccctgttctgcccttcacttttaccaacacagcagagtgcaagcctggtctcctttctcgtgggtttcctcgccttcctggtcctgggtctgagcgtactcaccacgtatggggtccatgccattacacgcctagaagcatggagtctagcgttgctggcactatttttggtcttatttgtggccatagtgttaacgatctggcggcagccgcaaaaccaacagaaagtggcttttatggtgccattcctgcccttcctgcccgcattctctatcctggtgaatatttacctgatggtacagctgagtgcagatacatgggtgaggttttccatttggatggctatcggctttctgatctactttagctatgggatcagacactcgcttgagggccacctgcgcgacgaaaataacgaggaagatgcataccctgataatgtgcatgcagccgcagaagagaagtccgcaattcaggcaaacgaccatcaccccaggaacctgagctctccctttatttttcacgagaagacttccgaattttag

SEQ ID NO: 63503 - DNA, 2097 bp, Artificial Sequence
  derived and/or modified sequence
atgaaaatcgaaaccagcggctataactctgataagctgatctgcagaggtttcatcggcactcctgcacctcctgtttgcgattctaagttcctgctgtccccctcgtccgatgtcagaatgatcccttgtagagctgccctcacattcgctcgctgtctcatcagacggaagatagtcacgcttgactctctcgaagacactaagttgtgcagatgcctgagcaccatggacctaattgctttaggtgtgggatctacactgggagccggcgtatatgttctcgctggggaagttgctaaggcggatagcggacccagcatcgttgtctctttccttattgctgccctggccagcgtcatggcaggtctgtgttacgctgagttcggcgctcgtgtcccaaagacaggatccgcgtacttgtacacatacgttaccgtgggtgaactttgggccttcatcacgggttggaatctgatactgagctacgtaatcggcacatcctctgttgccagagcctggtccggtaccttcgatgagctgttgtctaagcagatcggacagttcctgcgaacctacttccgcatgaattatacggggctcgccgagtaccctgacttctttgccgtgtgtctgatcctcttgttagctggactgctctcttttggcgtcaaagaatctgcctgggtcaataaggttttcaccgctgtgaatatcctggtgctattgtttgtcatggtagccggcttcgtaaaggggaatgtggccaattggaagatttcagaagagttccttaagaacataagcgcctctgcacgtgaaccccccagtgaaaatggcacctccatctatggggcggggggattcatgccctacggatttactggaaccttggctggggccgccacatgtttttacgcctttgtcggatttgactgtatcgccactactggagaagaggtgcgcaaccctcagaaggccatcccgatcggcatcgtgactagcctgctggtgtgttttatggcttacttcggagtttctgcagccctgaccctcatgatgccatactacctcctagacgaaaaatcaccactccctgttgccttcgaatatgtcggctgggggcccgcaaagtatgtggtggcagccgggagcttgtgtgctttgagcacatctttactaggatcgatctttccaatgcctcgagtcatttacgccatggctgaggacgggttgctctttaagtgcctggctcagatcaactccaagaccaagacacctattatcgctaccctgagctccggcgccgtggctgcactgatggcatttctctttgatctgaaggcgcttgttgacatgatgtcgatcggaacgttgatggcttatagtctggttgccgcctgcgttctgatcctccgataccagcccggcctgagttacgatcagcctaaatgctcccccgagaaagatggattgggaagctcaccccgcgtcacctctaagtccgagagccaggtgaccatgctgcaacgtcagggcttctcaatgcggactctcttttgtccatccctgttgcccactcagcagagcgcgagcctcgtttcttttctggtcggattcttagccttcctggtgttgggactgtcagtgctaacgacctatggagtccacgcaatcacccgcttagaagcttggtccctggccctgctagccctcttcttagtcctattcgttgccatcgtcctgacaatctggcgccagccacagaaccaacagaaggtggcattcatggtgcctttcctgccttttctgccagcattctccatcctcgtgaatatatacttaatggtgcaactaagtgctgacacctgggttcgattctcaatttggatggccatagggtttttgatttacttctcctacggaattagacatagtctggagggtcatctgagggacgaaaacaacgaggaggacgcttatcccgacaatgtgcatgccgctgctgaagagaagagtgctatccaagccaacgatcaccacccgcgcaatttgtcatccccatttattttccatgaaaagaccagcgaattctag

SEQ ID NO: 63504 - DNA, 2097 bp, Artificial Sequence
  derived and/or modified sequence
atgaaaattgagactagtggttacaattcagacaagctaatttgcagaggcttcatcggtactcctgctcctccagtgtgtgattccaaatttttgctctcaccttcttcagatgtaagaatgatcccttgccgcgcagctcttacattcgctaggtgcttgattcgcaggaaaatcgtgaccctagattctttggaggatactaagctgtgtaggtgtctttccactatggaccttattgctctgggagttggcagtacattaggggctggggtgtacgtcctcgccggagaagtggccaaggctgacagcggccccagcatcgtagtatcttttctaatagcagccctcgcctccgtcatggctggactttgttatgccgaatttggggcaagggtcccaaagaccggctcagcatacctctacacgtatgttaccgtgggtgaactttgggccttcatcaccggttggaatctcatcctctcctatgtcatcggtaccagcagcgtcgcccgggcatggagcggtacatttgatgaattgctttcgaaacagatcggccagttccttcgcacctatttccgcatgaattacaccggcctggccgagtaccccgacttcttcgctgtgtgtctgatcctcctgctagcaggactcctttcgttcggcgtcaaggaaagtgcatgggtgaataaagtcttcaccgccgtgaatattcttgtactgctgtttgtcatggtggctggtttcgtaaagggcaacgtggctaattggaaaatctccgaagaattcctgaagaatatctcagccagcgctagggaacccccttcagagaatggtacctctatttacggagctggtgggtttatgccttatggtttcactggcactcttgcaggcgcagcaacatgcttttacgcctttgtcgggttcgattgtattgcaaccactggcgaagaagtccgcaatccacaaaaagccatccccatcggcattgttacatccctgcttgtctgctttatggcctatttcggcgtctctgctgccctcacacttatgatgccttactatttgctcgatgagaagagccctctgccagttgctttcgaatatgtggggtggggtccggccaagtatgtcgtggccgctgggtcgctatgtgccctctcaacatctctgcttggttctatctttcctatgcctagggtcatttacgccatggccgaagatggtttgctctttaagtgcctcgctcaaattaacagtaaaactaaaacaccaatcattgccaccctctccagcggtgcggtcgcagctttaatggccttcctcttcgatcttaaggctttagttgacatgatgagcattggcacactcatggcttattccttagtggctgcctgcgtccttattttgaggtatcagccagggctctcatacgaccagccgaaatgtagccccgagaaggatgggcttggatcttctcctcgagtgacttccaagtccgaaagtcaggtgaccatgctccagagacaagggttttcaatgagaactctgttctgtccttccttactgccaacacaacagtcggcttccctggtgagttttctagtcggttttctagcatttcttgtcctcggtttgagcgtcctcaccacatatggggtgcatgccattacccgcctcgaagcctggtcactcgcattgctggccctctttctagtcctcttcgttgctatcgtgctcactatttggagacagccacaaaatcaacagaaggtggcctttatggtgccttttctgcctttcctgcccgccttttctatcctggttaatatctatctgatggtgcagctgtcagccgacacctgggtgagattctcaatctggatggccatagggttcttgatttattttagttatgggatccgccactcccttgaaggacatcttagggacgagaataacgaagaagatgcctacccagataatgtccacgccgccgctgaagaaaaatctgcgatccaggcaaacgaccaccacccaagaaacctgtcctccccttttatttttcatgaaaagactagtgagttttag

SEQ ID NO: 63505 - DNA, 7560 bp, Artificial Sequence
  derived and/or modified sequence
tcccaaaacagaaagagcagatgtctcaccacgaaactagcaactggaatgaagatagaaacaagtggttataactcagacaaactaatttgtcgagggtttattggaacacctgccccaccggtttgcgacagcaagtttctcctgtcgccttcgtcagacgtcagaatgattccttgcagagccgcgctgacctttgcccgatgtctgatccggagaaaaatcgtgaccctggacagtctagaagacaccaaattatgccgctgcttatccaccatggacctcattgccctgggcgttggaagcacccttggggccggggtttatgtcctcgctggggaggtggccaaggcagactcgggccccagcatcgtggtgtccttcctcattgctgccctggcttcagtgatggctggcctctgctatgccgaatttggggcccgtgttcccaagacggggtctgcatatttgtacacctacgtgactgtcggagagctgtgggccttcatcactggctggaatctcattttatcgtatgtgataggtacatcaagtgttgcaagagcctggagtggcacctttgatgaacttcttagcaaacagattggtcagtttttgaggacatacttcagaatgaattacactggtcttgcagaatatcccgatttttttgctgtgtgccttatattacttctagcaggtcttttgtcttttggagtaaaagagtctgcttgggtgaataaagtcttcacagctgttaatattctcgtccttctgtttgtgatggttgctgggtttgtgaaaggaaatgtggcaaactggaagattagtgaagagtttctcaaaaatatatcagcaagtgccagagagccaccttctgaaaacggaacaagtatctatggggctggtggctttatgccttatggctttacgggaacgttggctggtgctgcaacttgcttttatgcctttgtgggatttgactgcattgcaacaactggtgaagaagttcggaatccccagaaagctattcccattggaattgtgacgtctttgcttgtttgctttatggcctattttggggtctctgcagctttaacacttatgatgccgtactacctcctcgatgaaaaaagcccccttcctgtagcgtttgaatatgtgggatggggtcctgccaaatatgtcgtcgcagctggttctctctgcgccttgtcaacaagtcttcttggatccattttcccaatgcctcgtgtaatctatgctatggcggaggatgggttgcttttcaaatgtctagctcaaatcaattccaaaacgaagacaccaataattgctactttatcatcgggtgcagtggcagctttgatggcctttctgtttgacctgaaggcgcttgtggacatgatgtccattggcacactcatggcctactctctggtggcagcctgtgttctcatcctcaggtaccagcctggcttatcttacgaccagcccaaatgttctcctgagaaagatggtctgggatcgtctcccagggtaacctcgaagagtgagtcccaggtcaccatgctgcagagacagggcttcagcatgcggaccctcttctgcccctcccttctgccaacacagcagtcagcttctctcgtgagctttctggtaggattcctagctttcctcgtgttgggcctgagtgtcttgaccacttacggagttcatgccatcaccaggctggaggcctggagcctcgctctcctcgcgctgtttcttgttctcttcgttgccatcgttctcaccatctggaggcagccccagaatcagcaaaaagtagccttcatggttccattcttaccatttttgccagcgttcagcatcttggtgaacatttacttgatggtccagttaagtgcagacacttgggtcagattcagcatttggatggcaattggcttcctgatttacttttcttatggcattagacacagcctggagggtcatctgagagatgaaaacaatgaagaagatgcttatccagacaacgttcatgcagcagcagaagaaaaatctgccattcaagcaaatgaccatcacccaagaaatctcagttcacctttcatattccatgaaaagacaagtgaattctaacacttgcaggagcagagctggtcatcgtcttagcatacatatcctacactgagtaaaccgtaacgggatgtcatcagcatgctgggttgtcatgggtttgctgcatacatagttcaccctaatttatacttactcatctggacagcatctcctcagatggtgaattatgtgcacggggaaacctcctgagtggaagtttcattcatcagtgatgaatagcccccaaacagtgggagtgtgtatgtatgtgtgtatgtatgtatctatgtatatgcttgggaacatgagtgttacaagttagctggtgttttactattattgtgttacatttttccagtgtcgtcattaatcggtggcatatactgcacatactgaaatagagggaaatcactgaatgtaaagaggtttcatctatgccccctgcagttggggaaatactagtagctttaccttgtttgacttcattaatgtcagtttaggggatgccaaaaatgcagttactcatcatggtgtctgtcactggttaggggtaagatgaggggataaggaaagagacttttcaataagttgtgaatgccaacagtgggtttaatgcaaattttttttcctgtgaggtatgacagtttgctcaaacttcagccaacaggggtgtctgcttctgctgcactacacaggccaggagtggcattccatgccactagttggcatccttttgaacttttgtctcctttgcaaacagtggtcctaaaatacgaggtcttcacttgctgtgaatgacgtatccccagtcagggacttaagagaggcactgtgatatacttgggaccctttaaattaaaaagtgaagatagtcaccagggccagaaagctcatggagtggccgtaatgagaatatgtttgaagatcaaagagttagaccaatgcttgaataagtagaccccaagcatccttttctaaaaagtgacttaaaataagccaacagactctcccagaccacacaactagtggaatgattcctcctttttccattacttacttaatcacagtttagtttttttcttaacctcgtcaggcccagagttcacttctttgtttctctgtttcttttgtcttgtcttagagatgagggggctacagcagcatcatgcaaagagggaaagatgaagggatagaagaagagaaaatccccctgttctgataggaacggcctgttccattgttaaatggcaaatggcccaatttaagggctttggatctaatttgcctctgatgtttcctttggaaacatttaggaatatttttctccccctaccccataaattgtgtagcactttttattccatttgctttcaaatgactacactaagcctaataatacaagctccagtgttatacaataacccatcagtgattggggaatcaaacattttggtttaaaaaacatgattatttaaaactggaaactaaaaagaatcaaattgaattaaagctatataaacacagttaacccttgtaaatgagtaaacaaatttttacatgtaagattctctaattgtcatattttactttttaggattccctaatagtggactgtttatttgcagtgtatttgcttctcatgaactatttctcgtacaaatcattaaatagttcattggatgaggctgggtgacatttcccaggacagcatggtgaacattaccaggcatgctagctggcccgtgtaatcccaagacaaggaaaacattcgttttcctcatgggtcttccaagaaatgagctattttattgatgccattaaaaagcaagttgcgatggttttgtatagccaggagtttattgtgattaaacatcaaagaaacaggtagaaagcctgggtttctggctgctagcgttatagcatccatgacacagaactcattacggacattccacaacttccagggtgcacatggtaaaatctgaagcccagaattttctctcaagctgcgtggtttactggagagaaggagttggataagcacaggctcgggtattttggtagggactgtaggcatgctcataaatccttgctgttgtcacagtacgctgaaaacccgtttgattctatacccaatcaagaatagacccttcacacaggaaatgtgaacaattgttatatatgaacactcaaatcttttactgtaacgaaaccaagaaacttgtttagaatgtgataggcagctaaaactgttatgcccactgtgctcaatttgaagcagaatttagtgaaaaattatttttccacattgaaacactttgcagacacaaatatctatgaaaagatgctttgtcagccactgtgcctttttttctgtgaagactcaacggatgtgtgtgtttgtatgtttgttaacagttacatatgtttgtatgagtgtatatatatatctgtgtgtgtgtatctctaacgtcagtgtataagtaagttgggtttatggtgggctttgactatgtcattaggtgggtacaaaacccaactgatgtggagaaaaattgatgtttgatgttgatagatatgcttatacctaatttttagtttttaaactattttaaaatatactatgattttatatgtatatttcctatagactctttaagacgtatttataatgtttctaatatgaaatcactaaactctagtacattatagcaggtgctttgtaatctggaatggagaagaggtaggggcatttggggattcctgtttacttgctgctgccacaccttttccgactgatctgtcctggtaggtgtttattagcaaaagtcagtatcaccagctctttggcacctttctgtttctgcttgtgaattcataatgttttcaactaaattttttttttctttctcagaattacctaaatgttttgtagagttttgactagtaatcaatcaaaattatataaagtcttctccagtaattaagaaatacatatgcaaattcttttgtgattgagtaaaagcagcttaaattacttttcttttctacattaagaaatatattctcaacattttcagtgagaatttcttgtaatggcacctcaaattttatactcttaaaaaaaaacaataatttgtgaattaccaccaaaaggcaatggcagtcctacatttaagaatagagctatgcaaactctgttaaaaactatgaggaaaacttatattagaacttttgatatatactaaaatactgattatcttaatcacattttccccagagataaacattgagagaacgaaagccaaagtgtcatttaagagagatatatatgaaaaagtaacattaatatatagaactttaccatcaccagccgtagttgatagaaaatattagtttcagaattaccctcctttaaaaaataagagactatttgttttcttttaatttctatgaataaaagaaatttttaaaaactttaaaattttaaatattagtcaaaatactttttaagtcctgagtgcttacaggtagttgttaaaaaaattttaaggccaggcatggtggctcgctcacacctataatcctaggatcttgggaggtcgaggcaagctgatcgcttgagcccaggagtttaagaccggcctgagtagcatagcaagaccctgtctctacaaaaaaaacaaaaattagctgggcatggtggcatgcacatgtagtcagagctactgggggtgctgaggtgggaggatcgcttgagcccaggagagtgaggctgcagtgagctgagattacgccactgcactctagcctgggcaacggtgagaccctgcctcaaaaaaaataaaaataaaaataaaacactttaattagaatctatttttacctattttctaaatttatttaaatgcttagcaggaagcataaggaaaagccatcggcctccaatacccatgatgacagagggagcacttgagccttgccttccctcctcttaaatcagggtgtgttccgagattacagaacatcacaccttggcgtgatgaaatcatgccaagattctgactctccctttccggtgatactgctcatgatttctcctaatacgcttcaagcaactgttaccacaaaaaatacagtttccgcagggctttaaaggattgagtttagcatgtatatcatgcgttattaaagttcacgtgattcatgtgaaattaactgtcctttttgctagtgccaaaacagtgccttctctgcacactttacttgtttataaagttctcccacatgtccttaaatatcaagggggaaagtatggatattcgcgtagcaataatgccagcaaaggtcattttcattttttagtcatatagatatgaaaataagttcatatagatatgaaattgcttgactttattgttttggggagattttttttccttacatgattatattaaacactttaaaatagccttccggtttctggattttgagaagcctgatctgttattgttgtggttgttggtgtttgtaatattcattattgtttgtatatacacggtttagtcttactgatttcaaatgcattttgttattgctcaacccaactggtaacactgtttgctgggagcattatacttaactttgattcaccatggttgatgccactgccatgatcgctgggtcttaaagagctttccctagccactgacagccccgtggagatcataatcagggccccaggctggttccaggatcaggcagcctatagagtgtgagcatctatgtgtagctacccttgttgggtgggctcttagactgatggggtaggatatgaagtgaaagacttcaaatgcaagtaaggtagtttgggctccttaattccaaacatcccatgagtatatcaagatgaataaggaccaagggacctctgtgactcatagaagggctggctgaatcctgaagtagcatagtgggacctggtctacaatttatgcacatgcactgacagccttgctgtgccacgtgtctcaccaagacccagttgggaaagagcgtcatattgccaacaggttgggtttctctggcctacacctgattaatgggccctttatctttggtgtcccctaggagtgtccagttgttttattgctgtattttgttattgcagtacttaataaaaattgttgatagggcccaaaaccctacagaaattctatgtctgtaaaaaccaacaaaggcattggacttgtgtgaatgtacagggtttttttagtagtaattttaaatttaaatgttttaagtgatcatcagtgttcctttttacttataaagttggattcttttttagaatttgtaataaataaaaactgctgctttaccactgtaaaatatgctttctgatgtggtgtatttttaaaataaattttaatatgt

SEQ ID NO: 63506 - DNA, 7622 bp, Artificial Sequence
  derived and/or modified sequence
ctccttctgcagcgcggccggcgggcgctcctcttcgcgggaccagcgaggcggcggccgctgctccagcgtcccccagccgcgggcccccgacgcgctgcagccggcagcccaccgccgccttcttggcgcgaccccaacccagccccacaggagactctctgaagaccagcaggaaagcagtgagcccttacaggtcgccttcgtcagacgtcagaatgattccttgcagagccgcgctgacctttgcccgatgtctgatccggagaaaaatcgtgaccctggacagtctagaagacaccaaattatgccgctgcttatccaccatggacctcattgccctgggcgttggaagcacccttggggccggggtttatgtcctcgctggggaggtggccaaggcagactcgggccccagcatcgtggtgtccttcctcattgctgccctggcttcagtgatggctggcctctgctatgccgaatttggggcccgtgttcccaagacggggtctgcatatttgtacacctacgtgactgtcggagagctgtgggccttcatcactggctggaatctcattttatcgtatgtgataggtacatcaagtgttgcaagagcctggagtggcacctttgatgaacttcttagcaaacagattggtcagtttttgaggacatacttcagaatgaattacactggtcttgcagaatatcccgatttttttgctgtgtgccttatattacttctagcaggtcttttgtcttttggagtaaaagagtctgcttgggtgaataaagtcttcacagctgttaatattctcgtccttctgtttgtgatggttgctgggtttgtgaaaggaaatgtggcaaactggaagattagtgaagagtttctcaaaaatatatcagcaagtgccagagagccaccttctgaaaacggaacaagtatctatggggctggtggctttatgccttatggctttacgggaacgttggctggtgctgcaacttgcttttatgcctttgtgggatttgactgcattgcaacaactggtgaagaagttcggaatccccagaaagctattcccattggaattgtgacgtctttgcttgtttgctttatggcctattttggggtctctgcagctttaacacttatgatgccgtactacctcctcgatgaaaaaagcccccttcctgtagcgtttgaatatgtgggatggggtcctgccaaatatgtcgtcgcagctggttctctctgcgccttgtcaacaagtcttcttggatccattttcccaatgcctcgtgtaatctatgctatggcggaggatgggttgcttttcaaatgtctagctcaaatcaattccaaaacgaagacaccaataattgctactttatcatcgggtgcagtggcagctttgatggcctttctgtttgacctgaaggcgcttgtggacatgatgtccattggcacactcatggcctactctctggtggcagcctgtgttctcatcctcaggtaccagcctggcttatcttacgaccagcccaaatgttctcctgagaaagatggtctgggatcgtctcccagggtaacctcgaagagtgagtcccaggtcaccatgctgcagagacagggcttcagcatgcggaccctcttctgcccctcccttctgccaacacagcagtcagcttctctcgtgagctttctggtaggattcctagctttcctcgtgttgggcctgagtgtcttgaccacttacggagttcatgccatcaccaggctggaggcctggagcctcgctctcctcgcgctgtttcttgttctcttcgttgccatcgttctcaccatctggaggcagccccagaatcagcaaaaagtagccttcatggttccattcttaccatttttgccagcgttcagcatcttggtgaacatttacttgatggtccagttaagtgcagacacttgggtcagattcagcatttggatggcaattggcttcctgatttacttttcttatggcattagacacagcctggagggtcatctgagagatgaaaacaatgaagaagatgcttatccagacaacgttcatgcagcagcagaagaaaaatctgccattcaagcaaatgaccatcacccaagaaatctcagttcacctttcatattccatgaaaagacaagtgaattctaacacttgcaggagcagagctggtcatcgtcttagcatacatatcctacactgagtaaaccgtaacgggatgtcatcagcatgctgggttgtcatgggtttgctgcatacatagttcaccctaatttatacttactcatctggacagcatctcctcagatggtgaattatgtgcacggggaaacctcctgagtggaagtttcattcatcagtgatgaatagcccccaaacagtgggagtgtgtatgtatgtgtgtatgtatgtatctatgtatatgcttgggaacatgagtgttacaagttagctggtgttttactattattgtgttacatttttccagtgtcgtcattaatcggtggcatatactgcacatactgaaatagagggaaatcactgaatgtaaagaggtttcatctatgccccctgcagttggggaaatactagtagctttaccttgtttgacttcattaatgtcagtttaggggatgccaaaaatgcagttactcatcatggtgtctgtcactggttaggggtaagatgaggggataaggaaagagacttttcaataagttgtgaatgccaacagtgggtttaatgcaaattttttttcctgtgaggtatgacagtttgctcaaacttcagccaacaggggtgtctgcttctgctgcactacacaggccaggagtggcattccatgccactagttggcatccttttgaacttttgtctcctttgcaaacagtggtcctaaaatacgaggtcttcacttgctgtgaatgacgtatccccagtcagggacttaagagaggcactgtgatatacttgggaccctttaaattaaaaagtgaagatagtcaccagggccagaaagctcatggagtggccgtaatgagaatatgtttgaagatcaaagagttagaccaatgcttgaataagtagaccccaagcatccttttctaaaaagtgacttaaaataagccaacagactctcccagaccacacaactagtggaatgattcctcctttttccattacttacttaatcacagtttagtttttttcttaacctcgtcaggcccagagttcacttctttgtttctctgtttcttttgtcttgtcttagagatgagggggctacagcagcatcatgcaaagagggaaagatgaagggatagaagaagagaaaatccccctgttctgataggaacggcctgttccattgttaaatggcaaatggcccaatttaagggctttggatctaatttgcctctgatgtttcctttggaaacatttaggaatatttttctccccctaccccataaattgtgtagcactttttattccatttgctttcaaatgactacactaagcctaataatacaagctccagtgttatacaataacccatcagtgattggggaatcaaacattttggtttaaaaaacatgattatttaaaactggaaactaaaaagaatcaaattgaattaaagctatataaacacagttaacccttgtaaatgagtaaacaaatttttacatgtaagattctctaattgtcatattttactttttaggattccctaatagtggactgtttatttgcagtgtatttgcttctcatgaactatttctcgtacaaatcattaaatagttcattggatgaggctgggtgacatttcccaggacagcatggtgaacattaccaggcatgctagctggcccgtgtaatcccaagacaaggaaaacattcgttttcctcatgggtcttccaagaaatgagctattttattgatgccattaaaaagcaagttgcgatggttttgtatagccaggagtttattgtgattaaacatcaaagaaacaggtagaaagcctgggtttctggctgctagcgttatagcatccatgacacagaactcattacggacattccacaacttccagggtgcacatggtaaaatctgaagcccagaattttctctcaagctgcgtggtttactggagagaaggagttggataagcacaggctcgggtattttggtagggactgtaggcatgctcataaatccttgctgttgtcacagtacgctgaaaacccgtttgattctatacccaatcaagaatagacccttcacacaggaaatgtgaacaattgttatatatgaacactcaaatcttttactgtaacgaaaccaagaaacttgtttagaatgtgataggcagctaaaactgttatgcccactgtgctcaatttgaagcagaatttagtgaaaaattatttttccacattgaaacactttgcagacacaaatatctatgaaaagatgctttgtcagccactgtgcctttttttctgtgaagactcaacggatgtgtgtgtttgtatgtttgttaacagttacatatgtttgtatgagtgtatatatatatctgtgtgtgtgtatctctaacgtcagtgtataagtaagttgggtttatggtgggctttgactatgtcattaggtgggtacaaaacccaactgatgtggagaaaaattgatgtttgatgttgatagatatgcttatacctaatttttagtttttaaactattttaaaatatactatgattttatatgtatatttcctatagactctttaagacgtatttataatgtttctaatatgaaatcactaaactctagtacattatagcaggtgctttgtaatctggaatggagaagaggtaggggcatttggggattcctgtttacttgctgctgccacaccttttccgactgatctgtcctggtaggtgtttattagcaaaagtcagtatcaccagctctttggcacctttctgtttctgcttgtgaattcataatgttttcaactaaattttttttttctttctcagaattacctaaatgttttgtagagttttgactagtaatcaatcaaaattatataaagtcttctccagtaattaagaaatacatatgcaaattcttttgtgattgagtaaaagcagcttaaattacttttcttttctacattaagaaatatattctcaacattttcagtgagaatttcttgtaatggcacctcaaattttatactcttaaaaaaaaacaataatttgtgaattaccaccaaaaggcaatggcagtcctacatttaagaatagagctatgcaaactctgttaaaaactatgaggaaaacttatattagaacttttgatatatactaaaatactgattatcttaatcacattttccccagagataaacattgagagaacgaaagccaaagtgtcatttaagagagatatatatgaaaaagtaacattaatatatagaactttaccatcaccagccgtagttgatagaaaatattagtttcagaattaccctcctttaaaaaataagagactatttgttttcttttaatttctatgaataaaagaaatttttaaaaactttaaaattttaaatattagtcaaaatactttttaagtcctgagtgcttacaggtagttgttaaaaaaattttaaggccaggcatggtggctcgctcacacctataatcctaggatcttgggaggtcgaggcaagctgatcgcttgagcccaggagtttaagaccggcctgagtagcatagcaagaccctgtctctacaaaaaaaacaaaaattagctgggcatggtggcatgcacatgtagtcagagctactgggggtgctgaggtgggaggatcgcttgagcccaggagagtgaggctgcagtgagctgagattacgccactgcactctagcctgggcaacggtgagaccctgcctcaaaaaaaataaaaataaaaataaaacactttaattagaatctatttttacctattttctaaatttatttaaatgcttagcaggaagcataaggaaaagccatcggcctccaatacccatgatgacagagggagcacttgagccttgccttccctcctcttaaatcagggtgtgttccgagattacagaacatcacaccttggcgtgatgaaatcatgccaagattctgactctccctttccggtgatactgctcatgatttctcctaatacgcttcaagcaactgttaccacaaaaaatacagtttccgcagggctttaaaggattgagtttagcatgtatatcatgcgttattaaagttcacgtgattcatgtgaaattaactgtcctttttgctagtgccaaaacagtgccttctctgcacactttacttgtttataaagttctcccacatgtccttaaatatcaagggggaaagtatggatattcgcgtagcaataatgccagcaaaggtcattttcattttttagtcatatagatatgaaaataagttcatatagatatgaaattgcttgactttattgttttggggagattttttttccttacatgattatattaaacactttaaaatagccttccggtttctggattttgagaagcctgatctgttattgttgtggttgttggtgtttgtaatattcattattgtttgtatatacacggtttagtcttactgatttcaaatgcattttgttattgctcaacccaactggtaacactgtttgctgggagcattatacttaactttgattcaccatggttgatgccactgccatgatcgctgggtcttaaagagctttccctagccactgacagccccgtggagatcataatcagggccccaggctggttccaggatcaggcagcctatagagtgtgagcatctatgtgtagctacccttgttgggtgggctcttagactgatggggtaggatatgaagtgaaagacttcaaatgcaagtaaggtagtttgggctccttaattccaaacatcccatgagtatatcaagatgaataaggaccaagggacctctgtgactcatagaagggctggctgaatcctgaagtagcatagtgggacctggtctacaatttatgcacatgcactgacagccttgctgtgccacgtgtctcaccaagacccagttgggaaagagcgtcatattgccaacaggttgggtttctctggcctacacctgattaatgggccctttatctttggtgtcccctaggagtgtccagttgttttattgctgtattttgttattgcagtacttaataaaaattgttgatagggcccaaaaccctacagaaattctatgtctgtaaaaaccaacaaaggcattggacttgtgtgaatgtacagggtttttttagtagtaattttaaatttaaatgttttaagtgatcatcagtgttcctttttacttataaagttggattcttttttagaatttgtaataaataaaaactgctgctttaccactgtaaaatatgctttctgatgtggtgtatttttaaaataaattttaatatgtaataatatagaa

SEQ ID NO: 63507 - DNA, 2274 bp, Artificial Sequence
  derived and/or modified sequence
cttctgcagcgcggccggcgggcgctcctcttcgcgggaccagcgaggcggcggccgctgctccagcgtcccccagccgcgggcccccgacgcgctgcagccggcagcccaccgccgccttcttggcgcgaccccaacccagccccagtcgccttcgtcagacgtcagaatgattccttgcagagccgcgctgacctttgcccgatgtctgatccggagaaaaatcgtgaccctggacagtctagaagacaccaaattatgccgctgcttatccaccatggacctcattgccctgggcgttggaagcacccttggggccggggtttatgtcctcgctggggaggtggccaaggcagactcgggccccagcatcgtggtgtccttcctcattgctgccctggcttcagtgatggctggcctctgctatgccgaatttggggcccgtgttcccaagacggggtctgcatatttgtacacctacgtgactgtcggagagctgtgggccttcatcactggctggaatctcattttatcgtatgtgataggtacatcaagtgttgcaagagcctggagtggcacctttgatgaacttcttagcaaacagattggtcagtttttgaggacatacttcagaatgaattacactggtcttgcagaatatcccgatttttttgctgtgtgccttatattacttctagcaggtcttttgtcttttggagtaaaagagtctgcttgggtgaataaagtcttcacagctgttaatattctcgtccttctgtttgtgatggttgctgggtttgtgaaaggaaatgtggcaaactggaagattagtgaagagtttctcaaaaatatatcagcaagtgccagagagccaccttctgaaaacggaacaagtatctatggggctggtggctttatgccttatggctttacgggaacgttggctggtgctgcaacttgcttttatgcctttgtgggatttgactgcattgcaacaactggtgaagaagttcggaatccccagaaagctattcccattggaattgtgacgtctttgcttgtttgctttatggcctattttggggtctctgcagctttaacacttatgatgccgtactacctcctcgatgaaaaaagcccccttcctgtagcgtttgaatatgtgggatggggtcctgccaaatatgtcgtcgcagctggttctctctgcgccttgtcaacaagtcttcttggatccattttcccaatgcctcgtgtaatctatgctatggcggaggatgggttgcttttcaaatgtctagctcaaatcaattccaaaacgaagacaccaataattgctactttatcatcgggtgcagtggcagctttgatggcctttctgtttgacctgaaggcgcttgtggacatgatgtccattggcacactcatggcctactctctggtggcagcctgtgttctcatcctcaggtaccagcctggcttatcttacgaccagcccaaatgttctcctgagaaagatggtctgggatcgtctcccagggtaacctcgaagagtgagtcccaggtcaccatgctgcagagacagggcttcagcatgcggaccctcttctgcccctcccttctgccaacacagcagtcagcttctctcgtgagctttctggtaggattcctagctttcctcgtgttgggcctgagtgtcttgaccacttacggagttcatgccatcaccaggctggaggcctggagcctcgctctcctcgcgctgtttcttgttctcttcgttgccatcgttctcaccatctggaggcagccccagaatcagcaaaaagtagccttcatggttccattcttaccatttttgccagcgttcagcatcttggtgaacatttacttgatggtccagttaagtgcagacacttgggtcagattcagcatttggatggcaattggcttcctgatttacttttcttatggcattagacacagcctggagggtcatctgagagatgaaaacaatgaagaagatgcttatccagacaacgttcatgcagcagcagaagaaaaatctgccattcaagcaaatgaccatcacccaagaaatctcagttcacctttcatattccatgaaaagacaagtgaattctaacacttgcaggagcagagctggtcatcgtcttagcatacatatcctacactgagtaaaccgtaacgggatgtcatcagcatgctgggttgtcatgggtttgctgcatacatagttcaccctaatttata

SEQ ID NO: 63508 - protein, 300 aa, Artificial Sequence
  derived and/or modified sequence
MAAAALGQLFEGMKAFKGKDQQVRLFRPWLNMDRMLRSAMRLCLPSFDKLELLECIRRLIEVDKDWVPDAAGTSLYVRPVLIGNEPSLGVSQPTRALLFVILCPVGAYFPGGSVTPVSLLADPAFIRAWVGGVGNYKLGGNYGPTVLVQQEALKRGCEQVLWLYGPDHQLTEVGTMNIFVYWTHEDGVLELVTPPLNGVILPGVVRQSLLDMAQTWGEFRVVERTITMKQLLRALEEGRVREVFGSGTACQVCPVHRILYKDRNLHIPTMENGPELILRFQKELKEIQYGIRAHEWMFPV

SEQ ID NO: 63509 - DNA, 903 bp, Artificial Sequence
  derived and/or modified sequence
atggcagccgctgcactcggacagctattcgagggaatgaaggcttttaaaggcaaggatcagcaggtgaggctttttcgaccctggctaaatatggaccggatgctgagatctgccatgagactgtgtttaccatcttttgacaagctggagttattggagtgtatccgcagactcatcgaagtcgataaagactgggttccagacgccgccggcacatctttgtacgtgcgcccagtcttgatcggaaacgaaccctctctaggtgtatcacagcccacaagagcactcctcttcgtgatcctctgcccagtgggagcctatttcccagggggctccgtgacccccgtcagcctactagctgaccctgcttttattcgtgcgtgggtcgggggggtgggtaattataagctggggggaaactatggacctaccgtgctggtgcagcaagaggccttgaagcggggttgcgaacaggtactgtggctctacgggccagaccaccagctgaccgaagtgggaaccatgaacatctttgtgtactggacacatgaggatggcgtccttgagctggtcacccctcctttaaacggtgtgattctgccaggcgtggtacgccaatctctgctggacatggcacagacctggggtgagtttagagtcgtggagaggacaataacaatgaaacagctgctcagggcacttgaggagggtcgcgtgagggaggtttttggatcgggaaccgcgtgccaggtctgtcccgtgcaccgtattttgtacaaggaccggaatcttcacattcccacaatggagaacggacctgaactgattcttagatttcagaaggaacttaaggagatccagtacggcatccgagcacacgagtggatgttccctgtgtag

SEQ ID NO: 63510 - DNA, 903 bp, Artificial Sequence
  derived and/or modified sequence
atggctgctgctgccctgggccagctgtttgagggcatgaaggccttcaagggcaaggaccagcaggtgcggctcttccggccctggctgaacatggacaggatgctgcggagcgccatgaggctgtgcctgcccagctttgacaagctggagctgctggagtgcatcagaagactcatcgaggtggacaaggactgggtgcctgatgctgctggcaccagcctgtatgtgcggcctgtgctgattggaaatgagcccagcctgggcgtgtcccagcccacccgggccctgctgtttgtgatcctgtgccctgtgggcgcctacttccctgggggctctgtgacccctgtgtccctgctggccgaccctgccttcatccgggcctgggtgggcggcgtgggcaactacaagctgggcggcaactacggccccaccgtgctggtgcagcaggaggccctgaagaggggctgtgagcaggtgctgtggctgtatggccctgaccaccagctgacagaggtgggcaccatgaacatctttgtgtactggacccatgaagatggagtgctggagctggtgaccccacccctgaatggagtcatcctgcccggggtggtgcggcagagcctgctggacatggcccagacctggggcgagttccgggtggtggagaggaccatcaccatgaagcagctgctgcgggccctggaggagggccgggtgcgggaggtgtttggcagcggcacagcctgccaggtgtgccctgtgcaccgcatcctgtacaaggacaggaacctgcacatccccaccatggagaatggacctgagctgatcctgcgcttccagaaggagctgaaggagatccagtatggcatccgggcccacgagtggatgtttcctgtgtag

SEQ ID NO: 63511 - DNA, 903 bp, Artificial Sequence
  derived and/or modified sequence
atggccgccgccgccctgggccagctgttcgagggcatgaaggccttcaaggggaaggaccagcaggtgaggctctttcggccttggctgaacatggaccgcatgctgaggtcagctatgagactttgtttgccttcgttcgataagctggagctgctggagtgcattcgtcgcctgattgaagttgataaggactgggtgcccgacgctgctggaacgtcactatacgtaagaccggtacttattggcaacgagccgtcgttgggggtgagtcagcccacacgtgcactgctgttcgtgatcctgtgtcccgttggggcctactttccaggggggtccgtcacccccgtgtctttactcgcagaccctgccttcatcagagcttgggtcggcggggtggggaactataaattaggcggaaactatggaccgacggtgctggttcagcaggaagcgttgaagagaggatgcgagcaggtactttggttgtacggtccagatcaccaacttacggaagtcggaaccatgaacattttcgtttattggactcacgaggacggcgtactcgagttggtcaccccacccctgaacggagtgatcctccctggtgtggtaaggcagtccctcctggatatggcccagacatggggggaatttagagtcgttgagcggacgatcaccatgaagcagctgctgcgggccctggaggaggggcgggtgcgagaggtcttcggtagcggcacggcctgtcaagtgtgcccggttcatcggatactgtacaaggatagaaatctgcatattccgactatggagaatggacctgagctcatcctaaggtttcagaaagagctgaaagaaatacagtatggtatacgcgcccacgaatggatgtttcctgtgtag

SEQ ID NO: 63512 - DNA, 903 bp, Artificial Sequence
  derived and/or modified sequence
atggctgccgcagctcttggacagctatttgaaggaatgaaggcttttaagggtaaggaccaacaggtcaggttattccgaccttggttgaacatggatcgaatgttgaggagcgctatgcgcctgtgtctgccctctttcgataaattggaactgcttgaatgcatccgacggttgatagaagtggataaggactgggtcccagatgcagccggaacttctctctatgtccgccctgtgcttatcgggaatgaaccttctctcggtgtctcccaacccactcgggcattgcttttcgtgattctgtgccctgtgggggcatacttccccggaggttcagttacgcctgttagcctcttagcggatcccgctttcataagggcgtgggtggggggagtgggtaactacaaactcggtgggaattacggaccaacagtcctggtgcagcaagaggcactgaaaaggggctgcgaacaagtgctgtggctgtacggccctgatcaccaattaaccgaagtgggaaccatgaacatctttgtctattggacccacgaggatggcgtactagaactggttacccctccactcaacggtgtcattctccccggagtggtgcgccagtcactgctggatatggcgcagacctggggggagtttagggtggtcgagagaacaatcaccatgaagcagctgctccgcgcactcgaggagggtcgtgtccgggaagttttcgggagcggtactgcctgtcaggtctgtcctgtccaccggatcctgtacaaggacaggaatctgcatattccaacgatggagaatggcccagaactcatcttgcgcttccagaaagaattgaaagagatccagtatggaatcagagcacatgaatggatgtttcccgtgtag

SEQ ID NO: 63513 - DNA, 1320 bp, Artificial Sequence
  derived and/or modified sequence
aacgtctctcttcggagccgcgccccgggcgggcacagttacgcgccgcacggatcatggccgcagccgctctggggcagctgtttgagggcatgaaggcgttcaaaggcaaagaccagcaggtgcgcctcttccgcccctggctcaacatggaccggatgctgcgctcagccatgcgcctgtgcctgccgagtttcgacaagctggagttgctggagtgcatccgccggctcatcgaagtggacaaggactgggtccccgatgccgccggcaccagcctctatgtgcggcctgtgctcattgggaacgagccctcgctgggtgtcagccagcccacgcgcgcgctcctgttcgtcattctctgcccagtgggtgcctacttccctggaggctccgtgaccccggtctccctcctggccgacccagccttcatccgggcctgggtgggcggggtcggcaactacaagttaggtgggaattatgggcccaccgtgttagtgcaacaggaggcactcaagcggggctgtgaacaggtcctctggctgtatgggcccgaccaccagctcaccgaggtgggaaccatgaacatctttgtctactggacccacgaagatggggtgctggagctggtgacgcccccgctgaatggtgttatcctgcctggagtggtcagacagagtctactggacatggctcagacctggggtgagttccgggtggtggagcgcacgatcaccatgaagcagttgctgcgggccctggaggagggccgcgtgcgggaagtctttggctcgggcaccgcttgccaggtctgcccagtgcaccgaatcctgtacaaagacaggaacctccacattcccaccatggaaaatgggcctgagctgatcctccgcttccagaaggagctgaaggagatccagtacggaatcagagcccacgagtggatgttcccggtgtgaagctgcaggctgtgctccagatccaccgacccgtagcatctcgtcacgccagcactcgcctccctaccaatgactcacctgaagtgcaatacgaaataaaaggccagcgggcggcgtctgggtctctggcgcccccatgtggttgcgacactcccaaagccgtaagggccgacccaggcatcttggcccccagcccctcgtcgcgggttcaggtccgcccattactccttgtcgtgcggtcaaggatacaccttggccccgattccggatctctccgttctcaggccagacccctggtgctgccgttgatttttttttctctgtctttgctgcaattttgaaataaaatgccaaagaacac

SEQ ID NO: 63514 - DNA, 903 bp, Artificial Sequence
  derived and/or modified sequence
atggccgccgccgccctgggccagctgttcgagggcatgaaggccttcaagggcaaggaccagcaggtgagactgttcagaccctggctgaacatggacagaatgctgagaagcgccatgagactgtgcctgcccagcttcgacaagctggagctgctggagtgcatcagaagactgatcgaggtggacaaggactgggtgcccgacgccgccggcaccagcctgtacgtgagacccgtgctgatcggcaacgagcccagcctgggcgtgagccagcccaccagagccctgctgttcgtgatcctgtgccccgtgggcgcctacttccccggcggcagcgtgacccccgtgagcctgctggccgaccccgccttcatcagagcctgggtgggcggcgtgggcaactacaagctgggcggcaactacggccccaccgtgctggtgcagcaggaggccctgaagagaggctgcgagcaggtgctgtggctgtacggccccgaccaccagctgaccgaggtgggcaccatgaacatcttcgtgtactggacccacgaggacggcgtgctggagctggtgaccccccccctgaacggcgtgatcctgcccggcgtggtgagacagagcctgctggacatggcccagacctggggcgagttcagagtggtggagagaaccatcaccatgaagcagctgctgagagccctggaggagggcagagtgagagaggtgttcggcagcggcaccgcctgccaggtgtgccccgtgcacagaatcctgtacaaggacagaaacctgcacatccccaccatggagaacggccccgagctgatcctgagattccagaaggagctgaaggagatccagtacggcatcagagcccacgagtggatgttccccgtgtag

SEQ ID NO: 63515 - DNA, 549 bp, Artificial Sequence
  derived and/or modified sequence
atgatacgcgtgcagcaaatgcaccgaccaaaattgataggagaggaactcgcacaacttaaggagcagagagtccataagacagacctggagcgcgtattggaggcgaatgacgggtctgggatgctggacgaggatgaggaggacctccaaagggccctcgctctttcccggcaggagatagacatggaggacgaggaagcggacctgagaagggccatccagttgtctatgcagggctcgagtcgcaacatctcccaggatatgacacaaactagcggaacaaatctgacctctgaggaactgaggaaacgccgggaggcctatttcgagaagcaacagcagaagcaacaacagcagcagcagcagcagcaacagggcgatctgtcaggacaatcttcccacccctgtgaaaggcctgccacatcgtctggggccctgggttctgatctgggcgatgcaatgtcagaagaagacatgctccaagccgcagtgaccatgtccctcgagaccgtccgtaacgatctcaagacagaaggcaagaagtag

SEQ ID NO: 63516 - DNA, 549 bp, Artificial Sequence
  derived and/or modified sequence
atgatccgggtgcagcagatgcaccggcccaagctgattggagaggagctggcccagctgaaggagcagagggtgcacaagacagacctggagcgggtgctggaggccaatgatggcagcggcatgctggatgaagatgaggaggacctgcagagggccctggccctgagccggcaggagattgacatggaggatgaggaggccgacctgcggcgggccatccagctgtccatgcagggcagcagcaggaacatcagccaggacatgacccagaccagcggcaccaacctgaccagcgaggagctgaggaagagaagagaggcctactttgagaagcagcagcagaagcagcagcagcagcagcagcagcagcagcagggcgacctgagcggccagagcagccacccctgtgagaggcctgccaccagcagcggggccctgggcagtgacctgggagatgccatgtctgaggaggacatgctgcaggccgctgtgaccatgagcctggagaccgtgagaaatgacctgaagacagagggcaagaagtag

SEQ ID NO: 63517 - DNA, 549 bp, Artificial Sequence
  derived and/or modified sequence
atgatccgggtgcagcagatgcaccggcccaagctgatcggcgaggaacttgctcaattaaaggagcagagggttcataagacagacctcgagagagtgctcgaggctaacgatggcagcggcatgctcgacgaagatgaagaagacttgcagagggcactggccttatctagacaggagatcgacatggaagatgaagaggccgatttacgcagggccattcagttgtcaatgcaggggtcctcccgaaacattagtcaagacatgacacaaacatctggcacaaacttgacatcagaggagcttcgaaagaggagagaggcctatttcgaaaagcagcaacagaagcagcagcaacagcagcagcagcagcagcagggggatctctctggacagtctagtcacccttgcgagagacccgccacatccagtggagcgcttgggtctgacctgggagatgccatgagtgaggaagacatgctgcaggcagccgtgacgatgtctcttgagacagtaaggaatgatctcaagactgaagggaagaaatag

SEQ ID NO: 63518 - DNA, 549 bp, Artificial Sequence
  derived and/or modified sequence
atgatacgagtgcaacaaatgcaccggcctaagctgattggcgaagagctggcccaattgaaggagcagagggtgcataagacagatctcgaacgcgtgctggaggccaatgacggatctggtatgctggacgaggatgaagaggacttgcagcgcgcactggccttatccagacaggaaattgacatggaagatgaagaggcagatctgagaagagcgatacagctgtccatgcaagggagcagtcgcaacattagtcaggatatgactcagacaagcggcacaaatctaacaagcgaggaattacgcaagcggagagaggcctacttcgagaagcagcaacagaagcagcagcagcaacaacagcagcagcagcagggcgacctgtcgggtcagtccagccatccatgcgagagacctgccacaagctctggcgctctcggaagcgaccttggagacgctatgtctgaagaagacatgctgcaggccgcagttacgatgagcctagagactgttaggaatgatttgaaaacagagggaaaaaaatag

SEQ ID NO: 63519 - DNA, 549 bp, Artificial Sequence
  derived and/or modified sequence
atgatcagagtgcagcagatgcacagacccaagctgatcggcgaggagctggcccagctgaaggagcagagagtgcacaagaccgacctggagagagtgctggaggccaacgacggcagcggcatgctggacgaggacgaggaggacctgcagagagccctggccctgagcagacaggagatcgacatggaggacgaggaggccgacctgagaagagccatccagctgagcatgcagggcagcagcagaaacatcagccaggacatgacccagaccagcggcaccaacctgaccagcgaggagctgagaaagagaagagaggcctacttcgagaagcagcagcagaagcagcagcagcagcagcagcagcagcagcagggcgacctgagcggccagagcagccacccctgcgagagacccgccaccagcagcggcgccctgggcagcgacctgggcgacgccatgagcgaggaggacatgctgcaggccgccgtgaccatgagcctggagaccgtgagaaacgacctgaagaccgagggcaagaagtag

SEQ ID NO: 63520 - protein, 182 aa, Artificial Sequence
  derived and/or modified sequence
MIRVQQMHRPKLIGEELAQLKEQRVHKTDLERVLEANDGSGMLDEDEEDLQRALALSRQEIDMEDEEADLRRAIQLSMQGSSRNISQDMTQTSGTNLTSEELRKRREAYFEKQQQKQQQQQQQQQQGDLSGQSSHPCERPATSSGALGSDLGDAMSEEDMLQAAVTMSLETVRNDLKTEGKK

SEQ ID NO: 63521 - DNA, 1259 bp, Artificial Sequence
  derived and/or modified sequence
gtgggggccgttggctccagacaaataaacatggagtccatcttccacgagaaaaaatgaaagatcatttatatgcaattataaggaacactggtttacagttagaaaattaggaaaacagtggtttaacttgaattctctcttgacgggtccagaattaatatcagatacatatcttgcacttttcttggctcaattacaacaggaaggttattctatatttgtcgttaagggtgatctgccagattgcgaagctgaccaactcctgcagatgattagggtccaacagatgcatcgaccaaaacttattggagaagaattagcacaactaaaagagcaaagagtccataaaacagacctggaacgagtgttagaagcaaatgatggctcaggaatgttagacgaagatgaggaggatttgcagagggctctggcactaagtcgccaagaaattgacatggaagatgaggaagcagatctccgcagggctattcagctaagtatgcaaggtagttccagaaacatatctcaagatatgacacagacatcaggtacaaatcttacttcagaagagcttcggaagagacgagaagcctactttgaaaaacagcagcaaaagcagcaacagcagcagcagcagcagcagcagggggacctatcaggacagagttcacatccatgtgaaaggccagccaccagttcaggagcacttgggagtgatctaggtgatgctatgagtgaagaagacatgcttcaggcagctgtgaccatgtctttagaaactgtcagaaatgatttgaaaacagaaggaaaaaaataatacctttaaaaaataatttagatattcatactttccaacattatcctgtgtgattacagcatagggtccactttggtaatgtgtcaaagagatgaggaaataagacttttagcggtttgcaaacaaaatgatgggaaagtggaacaatgcgtcggttgtaggactaaataatgatcttccaaatattagccaaagaggcattcagcaattaaagacatttaaaatagttttctaaatgtttctttttcttttttgagtgtgcaatatgtaacatgtctaaagttagggcatttttcttggatctttttgcagactagctaattagctctcgcctcaggctttttccatatagtttgttttctttttctgtcttgtaggtaagttggctcacatcatgtaatagtggctttcatttcttattaaccaaattaacctttca

SEQ ID NO: 63522 - protein, 102 aa, Artificial Sequence
  derived and/or modified sequence
  misc_feature (1)..(1): Xaa can be any naturally occurring amino acid
XMFICPQEMMGILLKTAIQAEITQVLVILEIMHHHHEIILTVIMVIPVHVMTIHQEDIAIEMDMVVIVTIQIIQVEVPTEIHMRVMVGDFAHYGRGVLIDSQ

SEQ ID NO: 63523 - protein, 196 aa, Artificial Sequence
  derived and/or modified sequence
MVEADRPGKLFIGGLNTETNEKALEAVFGKYGRIVEVLLMKDRETNKSRGFAFVTFESPADAKDAARDMNGKLLYHVEEIVMEVHLEGNRCPLVEMFICPQEMMGILLKTAIQAEITQVLVILEIMHHHHEIILTVIMVIPVHVMTIHQEDIAIEMDMVVIVTIQIIQVEVPTEIHMRVMVGDFAHYGRGVLIDSQ

SEQ ID NO: 63524 - DNA, 309 bp, Artificial Sequence
  derived and/or modified sequence
tgaatgttcatctgcccccaggagatgatgggcatcctgctgaagaccgccatccaggccgagatcacccaggtgctggtgatcctggagatcatgcaccaccaccacgagatcatcctgaccgtgatcatggtgatccccgtgcacgtgatgaccatccaccaggaggacatcgccatcgagatggacatggtggtgatcgtgaccatccagatcatccaggtggaggtgcccaccgagatccacatgagagtgatggtgggcgacttcgcccactacggcagaggcgtgctgatcgacagccagtag

SEQ ID NO: 63525 - DNA, 591 bp, Artificial Sequence
  derived and/or modified sequence
atggtggaggccgacagacccggcaagctgttcatcggcggcctgaacaccgagaccaacgagaaggccctggaggccgtgttcggcaagtacggcagaatcgtggaggtgctgctgatgaaggacagagagaccaacaagagcagaggcttcgccttcgtgaccttcgagagccccgccgacgccaaggacgccgccagagacatgaacggcaagctgctgtaccacgtggaggagatcgtgatggaggtgcacctggagggcaacagatgccccctggtggagatgttcatctgcccccaggagatgatgggcatcctgctgaagaccgccatccaggccgagatcacccaggtgctggtgatcctggagatcatgcaccaccaccacgagatcatcctgaccgtgatcatggtgatccccgtgcacgtgatgaccatccaccaggaggacatcgccatcgagatggacatggtggtgatcgtgaccatccagatcatccaggtggaggtgcccaccgagatccacatgagagtgatggtgggcgacttcgcccactacggcagaggcgtgctgatcgacagccagtag

SEQ ID NO: 63526 - DNA, 309 bp, Artificial Sequence
  derived and/or modified sequence
tgaatgttcatatgtccccaagagatgatgggcatcttactgaaaacagccatccaggccgagatcacacaagttctcgttatcctagagattatgcatcatcatcatgagattatcctgaccgtgattatggtgatccccgtccacgtgatgaccattcatcaggaggacattgctatcgagatggacatggtggtgatagtgacaattcagattatccaagtggaggttcctaccgagatccatatgcgggttatggtgggagatttcgcccactacggcaggggtgtactgattgactcccaatag

SEQ ID NO: 63527 - DNA, 591 bp, Artificial Sequence
  derived and/or modified sequence
atggtggaagcagatcggccagggaaactgtttattggggggctgaatacagagactaatgaaaaagctctcgaggccgtgttcggtaaatacggccgcatcgtcgaggtgttgctcatgaaagatagggagactaataaaagcagaggattcgcatttgttactttcgagtctccagccgacgcaaaggacgccgcaagggacatgaacggcaaactgttataccacgtggaagagatagtaatggaagtgcatctcgagggcaaccgatgcccattggtggagatgtttatctgtccacaggaaatgatgggtatcttactcaagacagctatacaggctgagattactcaggtattagtgatcctggagataatgcaccatcaccacgaaatcattctgactgttatcatggttatcccagtgcacgtgatgaccattcaccaggaggatatcgcgattgaaatggacatggtcgtcatcgtcacgattcagatcatccaagttgaagtgcccactgagatacatatgagggtcatggtgggagactttgctcactacggtcgaggggtgctgatcgactcccagtag

SEQ ID NO: 63528 - DNA, 309 bp, Artificial Sequence
  derived and/or modified sequence
tgaatgttcatctgcccccaggagatgatgggcatcctgctgaagacagccatccaggccgagatcacccaggtgctggtgatcctggagatcatgcaccaccaccacgagatcatcctgaccgtcatcatggtgattcctgtgcacgtgatgaccatccaccaggaggacatcgccatcgagatggacatggtggtgattgtgaccatccagatcatccaggtggaggtgcccacagagatccacatgagggtgatggtgggggactttgcccactacggccggggcgtgctgattgacagccagtag

SEQ ID NO: 63529 - DNA, 591 bp, Artificial Sequence
  derived and/or modified sequence
atggtggaggccgacaggcctgggaagctgttcatcggcggcctgaacacagagaccaatgagaaggccctggaggccgtgtttgggaagtatggccgcatcgtggaggtgctgctgatgaaggaccgggagaccaacaagagccggggctttgcctttgtgacctttgagagccctgcagatgccaaggatgctgcccgggacatgaatggcaagctgctgtaccacgtggaggagatcgtgatggaggtgcacctggagggcaaccgctgccccctggtggagatgttcatctgcccccaggagatgatgggcatcctgctgaagacagccatccaggccgagatcacccaggtgctggtgatcctggagatcatgcaccaccaccacgagatcatcctgaccgtcatcatggtgattcctgtgcacgtgatgaccatccaccaggaggacatcgccatcgagatggacatggtggtgattgtgaccatccagatcatccaggtggaggtgcccacagagatccacatgagggtgatggtgggggactttgcccactacggccggggcgtgctgattgacagccagtag

SEQ ID NO: 63530 - DNA, 309 bp, Artificial Sequence
  derived and/or modified sequence
tgaatgttcatctgcccccaggagatgatgggcatcctgctgaagacggctattcaggctgaaatcactcaggtccttgtaatactagagatcatgcatcaccatcacgaaatcattctgacagtgattatggtgattcctgtacacgtgatgaccattcaccaggaggatattgcaatcgagatggatatggtggttatcgtcactatccagattatccaggtggaagtacccaccgagattcacatgcgcgttatggtgggagactttgctcattacggcaggggtgtgctgatcgactcccaatag

SEQ ID NO: 63531 - DNA, 591 bp, Artificial Sequence
  derived and/or modified sequence
atggtggaggccgaccggcccggcaagctgttcatcggcggcctgaataccgagacaaacgaaaaagcattagaagccgttttcggtaagtacggaaggattgtggaggtactgttgatgaaagacagagaaacaaataagtcccgggggttcgcctttgtcacgtttgagtctcccgcggatgccaaggatgccgccagggatatgaatggcaaactcctctatcacgttgaggagatcgtgatggaggttcacctggaggggaaccgctgccccctagtggaaatgtttatctgtccacaggagatgatgggaatactcctcaagaccgccatccaggccgaaattacccaggttctggtgatcctggaaatcatgcaccaccatcacgaaattatcctgacagtgataatggtgatcccagtgcacgtgatgaccattcatcaggaagacatcgctattgaaatggacatggttgtgattgttacaatccagataattcaggtggaggtacccactgaaatccacatgagagtgatggtcggagacttcgctcattacggaaggggtgtactgattgacagccagtag

SEQ ID NO: 63532 - DNA, 309 bp, Artificial Sequence
  derived and/or modified sequence
tgaatgtttatttgcccccaggaaatgatgggaatacttctcaaaaccgctattcaggcggaaatcacccaggtgttagtgatccttgagattatgcatcaccatcatgaaataatattgacagtcatcatggtgattccagtgcacgtcatgactattcatcaagaagatatcgccattgagatggatatggtggtgattgtaacaattcagattatccaggtcgaggttcccaccgaaatccacatgagggtgatggtgggagactttgctcactacggacggggtgtgctgatcgattcccaatag

SEQ ID NO: 63533 - DNA, 591 bp, Artificial Sequence
  derived and/or modified sequence
atggtcgaggctgatagacccggaaaactgtttattggaggcttaaatactgagactaacgaaaaggcactagaggccgtcttcggcaaatatgggaggatcgtcgaggtgctgcttatgaaagaccgtgaaactaacaagagtcggggttttgccttcgtcactttcgaatctcccgctgatgctaaggacgccgctagagatatgaacgggaaattattgtaccacgtcgaggagatagtgatggaggtgcaccttgagggtaaccgctgtcctttagttgagatgttcatctgccctcaggaaatgatgggaattctcctgaaaactgcgattcaagcagagatcacccaggtgttggttattctcgaaatcatgcaccaccatcacgaaatcatcctgaccgtgatcatggtcattccagtgcacgtgatgacaattcatcaggaagacatcgctatcgagatggatatggtcgttattgtgacaatacagatcatacaggtcgaagtgccaaccgagattcatatgcgcgtaatggtgggagactttgcccattatggtcggggtgttctgattgactcacagtag

SEQ ID NO: 63534 - DNA, 671 bp, Artificial Sequence
  derived and/or modified sequence
gatgtttatttgtccccaagagatgatgggtattctactaaagacagctattcaagcagagattacccaagttctcgtgatactagagattatgcaccaccaccacgagattatacttaccgtgattatggtcattccagttcacgtgatgactatccatcaagaggatatagcgatagagatggatatggtcgtgatcgtgactattcagatcatccaagtggaggttcctacagagattcatatgagagttatggttggtgattttgctcattatggtcgtggagtgctgattgattcacagtagataaagctggcagtaagaaatgctaagagttgttgaagcagaaggcggctgattgtcaataagtcactacagttgcataagcagtgctgtcagaattggtttggtgcaggcaatagattttgccttcaggggttcctgtggatctgaggaaggcatcagtgttgattaacactcataactagggagtgactggtagttacttaaagcaagtaattgaccaaatggaaaaggggaagtaattaaggaaattggtaagtggaggtagtcaggaagttcttgtggttcttcacatagattttacagctttggctttcattttgtttagctaaagtcatggggacaactcttcaatttagaacttaag

SEQ ID NO: 63535 - DNA, 2052 bp, Artificial Sequence
  derived and/or modified sequence
ggtccttcagcctcgttcccgggcagtataaagtttgctgtctcctttgttcgccctcgttgcgcagtagtgctagcggcttcgcggttcggtcctcgcacccggcagccgccactggtgctgagctgctaggaagcccctatcgccgagctcgttggagcttgaacccattgtcacccctccgactcaccggcccaaaaaaaaaaaaacatggttgaagcagatcgcccaggaaagctcttcattggtgggcttaatacggaaacaaatgagaaagctcttgaagcagtatttggcaaatatggacgaatagtggaagtactcttgatgaaagaccgtgaaaccaacaaatcaagaggatttgcttttgtcacctttgaaagcccagcagacgctaaggatgcagccagagacatgaatggaaagctcctgtatcacgtggaagagatagttatggaggtccacctcgaagggaaccgctgccctctcgtagagatgtttatttgtccccaagagatgatgggtattctactaaagacagctattcaagcagagattacccaagttctcgtgatactagagattatgcaccaccaccacgagattatacttaccgtgattatggtcattccagttcacgtgatgactatccatcaagaggatatagcgatagagatggatatggtcgtgatcgtgactattcagatcatccaagtggaggttcctacagagattcatatgagagttatggttggtgattttgctcattatggtcgtggagtgctgattgattcacagtagataaagctggcagtaagaaatgctaagagttgttgaagcagaaggcggctgattgtcaataagtcactacagttgcataagcagtgctgtcagaattggtttggtgcaggcaatagattttgccttcaggggttcctgtggatctgaggaaggcatcagtgttgattaacactcataactagggagtgactggtagttacttaaagcaagtaattgaccaaatggaaaaggggaagtaattaaggaaattggtaagtggaggtagtcaggaagttcttgtggttcttcacatagattttacagctttggctttcattttgtttagctaaagtcatggggacaactcttcaatttagaacttaagttgaattataaaaatgatggatataagtggtagctgtatctagtgaagtgtctgtcagtaagtgaaacattttttggtggtggcttatccacaaacagtttagttgtagaataaaacttatgagtgacatctggaaagtaaccatgctaagatggcaagcacactggaaacaattaggccacttggctttcttttgctgtattgttttataagcctactttacctcccagtcttggaaacaagttttagttttttattggtttggagactagagccaatagtataatgttctcaaaggaaacagacttgagttgttggattagaggaactaacccaacttatatgattttttttttgtttttgtcgtgtagttatggcactgtcttatttggaacatttgcaactagggataatacaacatttttaactctcatttgacaacctactactaatcacagaccacaagggtaatgaccaaatttatgtggtttttgcactccatagttgtcttagcccaatctttctatactcttacgattacttgggttaacgcttctgtgaggaccttctggctcttgagataccctaaatatttaagatatttagatatcttgaagatagtataggatatagagattgtaccaaataggaatataaggagtatgttaaaatgaccagatacctgtttgatagtttactgacctagcagatgtgtggaaaaggaatcagatcttgattcttctgggtttatactggttgtaaaacagaatgatacagaaaatgttttccttgtttaactggtagttgaacatagaacttgggtattatagatcacttttcactttttggaatgttttgtattgaaacttaataaaactttaacatgg

SEQ ID NO: 63536 - protein, 81 aa, Artificial Sequence
  derived and/or modified sequence
MSRSSKVVLGLSVLLTAATVAGVHVKQQWDQQRLRDGVIRDIERQIRKKENIRLLGEQIILTEQLEAEREKMLLAKGSQKS

SEQ ID NO: 63537 - DNA, 949 bp, Artificial Sequence
  derived and/or modified sequence
ctctgcccgctcggttcctcagctcctcttcgtgtctttcccccgcggtggcgcggccctgcaccccacgcgtttgcggctgcggccggcggccgctctgctgggctccgggcgctgcagctcccggcgggcgtgtgcagcccgcagattcaggacgacccggctgcccggcttagcgcctttggagctccgcgctgaaggggccttgctccgcacaggcacggcacgcaagcttttggggtgcccagtggctctgttttcaagtcacagccggcccgcagggtgcggacctttccacatctcacttgggccgctagaaaatagaagaggcttcgtgacggagttatcagagacattgagaggcaaattcggaaaaaagaaaacattcgtcttttgggagaacagattattttgactgagcaacttgaagcagaaagagagaagatgttattggcaaaaggatctcaaaaatcatgacttgaatgtgaaatatctgttggacagacaacacgagtttgtgtgtgtgtgttgatggagagtagcttagtagtatcttcatctttttttttggtcactgtccttttaaacttgatcaaataaaggacagtgggtcatataagttactgctttcagggtcccttatatctgaataaaggagtgtgggcagacactttttggaagagtctgtctgggtgatcctggtagaagccccattagggtcactgtccagtgcttagggttgttactgagaagcactgccgagcttgtgagaaggaagggatggatagtagcatccacctgagtagtctgatcagtcggcatgatgacgaagccacgagaacatcgacctcagaaggactggaggaaggtgaagtggagggagagacgctcctgatcgtcgaatccgaggatcaggcatcagtggacttatcgcacgaccagagtgggg

SEQ ID NO: 63538 - DNA, 246 bp, Artificial Sequence
  derived and/or modified sequence
atgagcagaagcagcaaggtggtgctgggcctgagcgtgctgctgaccgccgccaccgtggccggcgtgcacgtgaagcagcagtgggaccagcagagactgagagacggcgtgatcagagacatcgagagacagatcagaaagaaggagaacatcagactgctgggcgagcagatcatcctgaccgagcagctggaggccgagagagagaagatgctgctggccaagggcagccagaagagctag

SEQ ID NO: 63539 - DNA, 1156 bp, Artificial Sequence
  derived and/or modified sequence
gaggggtcgagcctgggcagtacaggcggcggtgcgcactctgcggcggcctctgcgcctcgggcgggcgggagagagaggccgcggccgccagcgtggggatgtctaggagctcgaaggtggtgctgggcctctcggtgctgctgacggcggccacagtggccggcgtacatgtgaagcagcagtgggaccagcagaggcttcgtgacggagttatcagagacattgagaggcaaattcggaaaaaagaaaacattcgtcttttgggagaacagattattttgactgagcaacttgaagcagaaagagagaagatgttattggcaaaaggatctcaaaaatcatgacttgaatgtgaaatatctgttggacagacaacacgagtttgtgtgtgtgtgttgatggagagtagcttagtagtatcttcatctttttttttggtcactgtccttttaaacttgatcaaataaaggacagtgggtcatataagttactgctttcagggtcccttatatctgaataaaggagtgtgggcagacactttttggaagagtctgtctgggtgatcctggtagaagccccattagggtcactgtccagtgcttagggttgttactgagaagcactgccgagcttgtgagaaggaagggatggatagtagcatccacctgagtagtctgatcagtcggcatgatgacgaagccacgagaacatcgacctcagaaggactggaggaaggtgaagtggagggagagacgctcctgatcgtcgaatccgaggatcaggcatcagtggacttatcgcacgaccagagtggggattccctcaacagtgatgaaggagacgtgtcttggatggaggagcagctgtcctacttctgtgacaagtgccaaaaatggataccagccagtaaggagcttctcaattcctttgatttgtcaattcctgtgtgaaggtttgtttttccaacctgtgaaagaaacgtgaatgtaaaagagacctaaataaaaggataattatatttattctctagttgatcagctataaatttatataaaacataggcatgtttgtactaatgaaacgtactgtcaacctctatcacattgttaaattaacacttttggtggtaactcaataaaattgagaaaattgg

SEQ ID NO: 63540 - DNA, 246 bp, Artificial Sequence
  derived and/or modified sequence
atgagcaggagtagtaaggtggttttgggtttaagtgttctgctaactgctgctacagtggcaggagtccatgtcaagcagcaatgggaccagcaacggcttcgtgacggcgtaatacgagacattgaaaggcaaatcaggaaaaaagagaacatccgactactcggcgaacaaatcattctgacagaacagctggaggctgagcgcgagaagatgttgctggctaagggctcgcagaagtcctag

SEQ ID NO: 63541 - DNA, 246 bp, Artificial Sequence
  derived and/or modified sequence
atgagccgcagcagcaaggtggtgctgggcctgtctgtgctgctgacagctgccaccgtggccggcgtgcacgtgaagcagcagtgggaccagcagaggctgagagatggagtcatccgggacatcgagcggcagatcaggaagaaggagaacatccggctgctgggggagcagatcatcctgacagagcagctggaggccgagcgggagaagatgctgctggccaagggcagccagaagagctag

SEQ ID NO: 63542 - DNA, 246 bp, Artificial Sequence
  derived and/or modified sequence
atgagccggagcagcaaggtggtgctgggcctgagcgtgctgctgaccgcagcaacagtggctggcgtgcatgtcaaacagcagtgggaccagcagcggttgagagatggagtcatacgcgacattgaaaggcagatcaggaagaaagaaaacatccggctccttggagagcagattatcctgactgagcagctcgaagccgaacgggagaagatgctgctggccaagggaagccagaagtcctag

SEQ ID NO: 63543 - DNA, 246 bp, Artificial Sequence
  derived and/or modified sequence
atgtctagaagcagcaaggtcgtgctcggactcagcgtgcttctgaccgccgcaaccgtagccggagtgcacgtgaagcagcagtgggaccagcagcgtttacgcgatggggttattcgggacatcgaacgccagattcgtaagaaggaaaatattcggctcctcggggagcaaattatactgaccgagcagctggaggcggagcgggagaagatgttgctagccaaaggcagccagaagagctag

SEQ ID NO: 63544 - protein, 1328 aa, Artificial Sequence
  derived and/or modified sequence
MWRRKHPRTSGGTRGVLSGNRGVEYGSGRGHLGTFEGRWRKLPKMPEAVGTDPSTSRKMAELEEVTLDGKPLQALRVTDLKAALEQRGLAKSGQKSALVKRLKGALMLENLQKHSTPHAAFQPNSQIGEEMSQNSFIKQYLEKQQELLRQRLEREAREAAELEEASAESEDEMIHPEGVASLLPPDFQSSLERPELELSRHSPRKSSSISEEKGDSDDEKPRKGERRSSRVRQARAAKLSEGSQPAEEEEDQETPSRNLRVRADRNLKTEEEEEEEEEEEEDDEEEEGDDEGQKSREAPILKEFKEEGEEIPRVKPEEMMDERPKTRSQEQEVLERGGRFTRSQEEARKSHLARQQQEKEMKTTSPLEEEEREIKSSQGLKEKSKSPSPPRLTEDRKKASLVALPEQTASEEETPPPLLTKEASSPPPHPQLHSEEEIEPMEGPAPAVLIQLSPPNTDADTRELLVSQHTVQLVGGLSPLSSPSDTKAESPAEKVPEESVLPLVQKSTLADYSAQKDLEPESDRSAQPLPLKIEELALAKGITEECLKQPSLEQKEGRRASHTLLPSHRLKQSADSSSSRSSSSSSSSSRSRSRSPDSSGSRSHSPLRSKQRDVAQARTHANPRGRPKMGSRSTSESRSRSRSRSRSASSNSRKSLSPGVSRDSSTSYTETKDPSSGQEVATPPVPQLQVCEPKERTSTSSSSVQARRLSQPESAEKHVTQRLQPERGSPKKCEAEEAEPPAATQPQTSETQTSHLPESERIHHTVEEKEEVTMDTSENRPENDVPEPPMPIADQVSNDDRPEGSVEDEEKKESSLPKSFKRKISVVSTKGVPAGNSDTEGGQPGRKRRWGASTATTQKKPSISITTESLKEAVVDLHADDSRISEDETERNGDDGTHDKGLKICRTVTQVVPAEGQENGQREEEEEEKEPEAEPPVPPQVSVEVALPPPAEHEVKKVTLGDTLTRRSISQQKSGVSITIDDPVRTAQVPSPPRGKISNIVHISNLVRPFTLGQLKELLGRTGTLVEEAFWIDKIKSHCFVTYSTVEEAVATRTALHGVKWPQSNPKFLCADYAEQDELDYHRGLLVDRPSETKTEEQGIPRPLHPPPPPPVQPPQHPRAEQREQERAVREQWAEREREMERRERTRSEREWDRDKVREGPRSRSRSRDRRRKERAKSKEKKSEKKEKAQEEPPAKLLDDLFRKTKAAPCIYWLPLTDSQIVQKEAERAERAKEREKRRKEQEEEEQKEREKEAERERNRQLEREKRREHSRERDRERERERERDRGDRDRDRERDRERGRERDRRDTKRHSRSRSRSTPVRDRGGRR

SEQ ID NO: 63545 - DNA, 3987 bp, Artificial Sequence
  derived and/or modified sequence
atgtggagaagaaagcaccccagaaccagcggcggcaccagaggcgtgctgagcggcaacagaggcgtggagtacggcagcggcagaggccacctgggcaccttcgagggcagatggagaaagctgcccaagatgcccgaggccgtgggcaccgaccccagcaccagcagaaagatggccgagctggaggaggtgaccctggacggcaagcccctgcaggccctgagagtgaccgacctgaaggccgccctggagcagagaggcctggccaagagcggccagaagagcgccctggtgaagagactgaagggcgccctgatgctggagaacctgcagaagcacagcaccccccacgccgccttccagcccaacagccagatcggcgaggagatgagccagaacagcttcatcaagcagtacctggagaagcagcaggagctgctgagacagagactggagagagaggccagagaggccgccgagctggaggaggccagcgccgagagcgaggacgagatgatccaccccgagggcgtggccagcctgctgccccccgacttccagagcagcctggagagacccgagctggagctgagcagacacagccccagaaagagcagcagcatcagcgaggagaagggcgacagcgacgacgagaagcccagaaagggcgagagaagaagcagcagagtgagacaggccagagccgccaagctgagcgagggcagccagcccgccgaggaggaggaggaccaggagacccccagcagaaacctgagagtgagagccgacagaaacctgaagaccgaggaggaggaggaggaggaggaggaggaggaggaggacgacgaggaggaggagggcgacgacgagggccagaagagcagagaggcccccatcctgaaggagttcaaggaggagggcgaggagatccccagagtgaagcccgaggagatgatggacgagagacccaagaccagaagccaggagcaggaggtgctggagagaggcggcagattcaccagaagccaggaggaggccagaaagagccacctggccagacagcagcaggagaaggagatgaagaccaccagccccctggaggaggaggagagagagatcaagagcagccagggcctgaaggagaagagcaagagccccagcccccccagactgaccgaggacagaaagaaggccagcctggtggccctgcccgagcagaccgccagcgaggaggagacccccccccccctgctgaccaaggaggccagcagcccccccccccacccccagctgcacagcgaggaggagatcgagcccatggagggccccgcccccgccgtgctgatccagctgagcccccccaacaccgacgccgacaccagagagctgctggtgagccagcacaccgtgcagctggtgggcggcctgagccccctgagcagccccagcgacaccaaggccgagagccccgccgagaaggtgcccgaggagagcgtgctgcccctggtgcagaagagcaccctggccgactacagcgcccagaaggacctggagcccgagagcgacagaagcgcccagcccctgcccctgaagatcgaggagctggccctggccaagggcatcaccgaggagtgcctgaagcagcccagcctggagcagaaggagggcagaagagccagccacaccctgctgcccagccacagactgaagcagagcgccgacagcagcagcagcagaagcagcagcagcagcagcagcagcagcagaagcagaagcagaagccccgacagcagcggcagcagaagccacagccccctgagaagcaagcagagagacgtggcccaggccagaacccacgccaaccccagaggcagacccaagatgggcagcagaagcaccagcgagagcagaagcagaagcagaagcagaagcagaagcgccagcagcaacagcagaaagagcctgagccccggcgtgagcagagacagcagcaccagctacaccgagaccaaggaccccagcagcggccaggaggtggccaccccccccgtgccccagctgcaggtgtgcgagcccaaggagagaaccagcaccagcagcagcagcgtgcaggccagaagactgagccagcccgagagcgccgagaagcacgtgacccagagactgcagcccgagagaggcagccccaagaagtgcgaggccgaggaggccgagccccccgccgccacccagccccagaccagcgagacccagaccagccacctgcccgagagcgagagaatccaccacaccgtggaggagaaggaggaggtgaccatggacaccagcgagaacagacccgagaacgacgtgcccgagccccccatgcccatcgccgaccaggtgagcaacgacgacagacccgagggcagcgtggaggacgaggagaagaaggagagcagcctgcccaagagcttcaagagaaagatcagcgtggtgagcaccaagggcgtgcccgccggcaacagcgacaccgagggcggccagcccggcagaaagagaagatggggcgccagcaccgccaccacccagaagaagcccagcatcagcatcaccaccgagagcctgaaggaggccgtggtggacctgcacgccgacgacagcagaatcagcgaggacgagaccgagagaaacggcgacgacggcacccacgacaagggcctgaagatctgcagaaccgtgacccaggtggtgcccgccgagggccaggagaacggccagagagaggaggaggaggaggagaaggagcccgaggccgagccccccgtgcccccccaggtgagcgtggaggtggccctgcccccccccgccgagcacgaggtgaagaaggtgaccctgggcgacaccctgaccagaagaagcatcagccagcagaagagcggcgtgagcatcaccatcgacgaccccgtgagaaccgcccaggtgcccagcccccccagaggcaagatcagcaacatcgtgcacatcagcaacctggtgagacccttcaccctgggccagctgaaggagctgctgggcagaaccggcaccctggtggaggaggccttctggatcgacaagatcaagagccactgcttcgtgacctacagcaccgtggaggaggccgtggccaccagaaccgccctgcacggcgtgaagtggccccagagcaaccccaagttcctgtgcgccgactacgccgagcaggacgagctggactaccacagaggcctgctggtggacagacccagcgagaccaagaccgaggagcagggcatccccagacccctgcacccccccccccccccccccgtgcagcccccccagcaccccagagccgagcagagagagcaggagagagccgtgagagagcagtgggccgagagagagagagagatggagagaagagagagaaccagaagcgagagagagtgggacagagacaaggtgagagagggccccagaagcagaagcagaagcagagacagaagaagaaaggagagagccaagagcaaggagaagaagagcgagaagaaggagaaggcccaggaggagccccccgccaagctgctggacgacctgttcagaaagaccaaggccgccccctgcatctactggctgcccctgaccgacagccagatcgtgcagaaggaggccgagagagccgagagagccaaggagagagagaagagaagaaaggagcaggaggaggaggagcagaaggagagagagaaggaggccgagagagagagaaacagacagctggagagagagaagagaagagagcacagcagagagagagacagagagagagagagagagagagagagagacagaggcgacagagacagagacagagagagagacagagagagaggcagagagagagacagaagagacaccaagagacacagcagaagcagaagcagaagcacccccgtgagagacagaggcggcagaagatag

SEQ ID NO: 63546 - DNA, 3987 bp, Artificial Sequence
  derived and/or modified sequence
atgtggcgccggaagcatccaagaaccagcgggggaacgaggggcgtgctgtctggcaaccgcggagtggagtacggcagcggccggggacacctcggcactttcgagggccggtggcgaaagctgcctaaaatgcctgaggctgttggaacggatccctcaaccagccggaagatggccgagctggaagaagtgaccttggacggcaagcccctgcaagccttgcgcgtcactgacctgaaggctgcactggaacagcgagggcttgcaaagagcgggcagaaatcggccctcgtcaagaggttgaagggggcgctgatgctggaaaaccttcagaaacattcaacgccccatgctgcattccaaccgaacagccagataggcgaggaaatgagtcaaaatagttttattaagcagtatctcgagaaacagcaggagctgctccgacagcgactagagagggaggccagagaggccgccgagctcgaggaagccagcgcggagagtgaggatgaaatgattcatcctgaaggggtggcttccctgttgccgcccgatttccaaagctcactggagaggcccgaattggagttaagcaggcactcacctcggaagtcgtcaagcatttctgaggaaaaaggtgactcagacgacgaaaagcctaggaagggcgaacggcgtagcagtcgagtaaggcaggcacgggccgcaaagttgtcagagggatctcaacccgcagaagaggaggaagaccaggagacacccagccgaaacctgcgcgtgagagctgataggaaccttaagaccgaggaagaggaagaagaggaagaggaagaggaagaggatgatgaggaggaggagggtgatgatgagggccagaagtccagggaggccccaatcttaaaggagtttaaggaagagggagaggaaattccccgggtgaaacctgaggaaatgatggacgaaaggccgaagacacggagccaggaacaggaggtgttagagcgtgggggccgcttcacaagatcccaggaggaggctcgtaaaagccatctggcacggcaacaacaggaaaaagagatgaagaccactagccccttggaagaggaagagcgtgagatcaagagcagtcaaggattaaaggaaaaatccaaatctccctctcccccaagactgaccgaagatcggaaaaaggcgtctctggtagctctgccagagcagaccgctagcgaagaagagactccccccccccttctgacgaaggaggccagctcacctccccctcaccctcagctgcattcagaggaggaaattgaacctatggagggacctgcccccgctgttctgattcagctgtctccgccgaacaccgacgctgatactcgggagctcctggttagccaacacacagtccagcttgtcggaggtctgtctccactcagctccccgtctgacactaaagccgaaagcccggcagaaaaagtaccagaggagagcgtgctgcccttggtacagaagagcacactggcggattattctgcccagaaggatttagagcccgaatcagaccgctccgcgcaacctctaccactgaagattgaggagctggctcttgccaaagggataacggaggagtgtcttaagcagccaagcttggagcagaaggagggtcgtcgggcatctcacacccttttgccttcccaccgactaaagcaatcagcagattcaagcagttcccggtcaagtagcagttcatccagttcctcccgtagtcgctctagatctcctgattcctcaggatcacgatcccacagccctctgcggtctaaacagcgagacgtggcacaggccaggacccacgcgaaccctagggggaggcctaagatggggtcccgatcaacttcagagtcgcggtcgcgctctagaagcagatcccggtctgcctctagtaatagtcgaaagtctctgtcccctggcgtctccagggacagcagtacttcctatacggaaacaaaagatccctcatccggtcaagaagttgcaaccccacctgtcccccagctacaagtatgtgagcccaaagagcgtacgtccacatctagtagttctgtgcaagcacgacggctcagtcaacctgaaagtgccgagaaacacgtcacacagagacttcagccggagagggggtcacctaagaagtgtgaagccgaggaagcagaaccccctgccgctacacagccccaaacatccgagactcagaccagtcacctgccggagagcgaaagaatccaccacacagtggaagagaaggaggaggtcactatggatacttctgagaaccgacccgaaaacgacgtgcctgagccacctatgcccatcgcagatcaggtcagcaacgatgatcgccctgaagggtcagttgaagacgaggaaaagaaggaaagctctctccctaaatccttcaaacgcaagatctctgtggtttcaaccaaaggggtgcccgccggcaatagcgatacagaaggcggacagccaggtagaaagcggagatggggcgcttcgactgcgaccactcagaagaaacccagtatttcaattacaacagagtcattgaaagaagcggtggtggatttacacgctgatgatagtcgaatctctgaggacgagacagaacgcaatggcgacgacggcacacacgataagggactgaagatatgtcgcacggtcacccaggtcgtgcccgcggaaggacaggagaacggccaacgagaagaagaagaggaggagaaagagcccgaggcagaaccacctgtgccacctcaggtgagtgtggaggtggccctgcctcccccagcagagcacgaagtcaagaaagtcactcttggcgacactttaacacggcgcagcatcagtcaacaaaagagcggggtttctatcactatcgatgatcctgtacggacagcccaggtcccaagccctccgcgcggcaaaatcagcaacatcgtgcacattagtaacctggtacgcccattcaccctgggccagctaaaagagttgctcggcagaacaggcactctggtcgaggaggctttctggatcgataagataaaatctcactgctttgtcacctactcaacagtggaagaagccgtggccaccagaaccgccctgcacggagtgaagtggccccaaagtaatcccaagttcttatgtgccgactatgcggaacaggatgagttggactatcataggggactgctggtggatcgtccttctgaaaccaagaccgaggagcaggggatcccgcgccccctgcatccacccccaccaccccctgtgcaacccccccagcacccacgtgctgaacagcgcgagcaggagagagccgtgcgggaacagtgggccgaacgggaacgcgaaatggagaggcgcgagcgcacaagaagcgagcgcgaatgggatcgtgacaaggtaagagaggggcccagatccagatcccgaagtagagaccggagacggaaagagagggccaagtccaaggagaagaagtccgagaaaaaagagaaggcgcaggaagaacctcctgcaaaactcctggatgatctgtttagaaagaccaaggctgccccttgcatttactggctgcctttaaccgacagccaaattgtccagaaggaggccgaaagagccgaaagggccaaagaaagggagaagcggcgcaaggaacaggaggaagaggagcaaaaggagcgggagaaggaagctgagcgagaaagaaaccgacagcttgagcgtgagaagcgtcgcgagcactctcgggagcgggatcgggagcgcgaacgggagcgggagagggaccggggagatagggatcgggaccgcgaacgcgatcgtgagcgggggcgtgaaagagaccgtcgcgataccaaaaggcactcgaggtctcgctcccggtccacaccagtcagagaccgaggcggacggcgctag

SEQ ID NO: 63547 - DNA, 3987 bp, Artificial Sequence
  derived and/or modified sequence
atgtggaggaggaagcaccccaggaccagcggcggcacccggggcgtgctgagcggcaacagaggagtggagtatggcagcggccggggccacctgggcacctttgagggccgctggaggaagctgcccaagatgcctgaggccgtgggcacagaccccagcaccagcaggaagatggccgagctggaggaggtgaccctggatggcaagcccctgcaggccctgcgggtgacagacctgaaggccgccctggagcagaggggcctggccaagagcggccagaagagcgccctggtgaagaggctgaagggggccctgatgctggagaacctgcagaagcacagcacccctcatgctgccttccagcccaacagccagattggagaggagatgagccagaacagcttcatcaagcagtacctggagaagcagcaggagctgctgcggcagaggctggagcgggaggcccgggaggccgctgagctggaggaggccagcgctgagagtgaagatgagatgatccaccctgagggcgtggccagcctgctgcccccagacttccagagcagcctggagaggcctgagctggagctgagccgccacagccccaggaagagcagcagcatcagcgaggagaagggggacagtgatgatgagaagcccaggaaaggagagcggcgcagcagccgggtgcggcaggcccgggccgccaagctgtctgagggcagccagcctgctgaggaggaggaggaccaggagacccccagcaggaacctgcgggtgcgggctgacaggaacctgaagacagaggaggaggaggaggaggaggaggaggaggaggaggatgatgaggaggaggagggagatgatgagggccagaagagccgggaggcccccatcctgaaggagttcaaggaggagggggaggagatcccccgggtgaagccagaggagatgatggatgagcggcccaagaccaggagccaggagcaggaggtgctggagcggggcggccgcttcaccaggagccaggaggaggccaggaagagccacctggcccggcagcagcaggagaaggagatgaagaccaccagccccctggaggaggaggagcgggagatcaagagcagccagggcctgaaggagaagagcaagagccccagccccccccggctgacagaggacaggaagaaggccagcctggtggccctgcctgagcagacagccagcgaggaggagaccccaccacccctgctgaccaaggaggccagcagccccccaccccacccccagctgcacagcgaggaggagattgagcccatggagggccctgccccagctgtgctgatccagctgagcccccccaacacagatgctgacacccgggagctgctggtgtcccagcacacagtgcagctggtgggcggcctgagccccctgagcagccccagcgacaccaaggccgagagccctgctgagaaggtgcctgaggagagcgtgctgcccctggtgcagaagagcaccctggccgactacagcgcccagaaggacctggagcctgagagtgacagaagtgcccagcccctgcccctgaagattgaggagctggccctggccaagggcatcacagaagaatgtctgaagcagcccagcctggagcagaaggagggccggcgggccagccacaccctgctgcccagccaccggctgaagcagagcgctgacagcagcagcagccgcagcagcagcagcagcagcagcagcagccgcagccgcagccgcagcccagacagcagcggcagccgcagccacagccccctgcggagcaagcagagagatgtggcccaggcccggacccacgccaacccccggggccggcccaagatgggcagccgcagcaccagcgagagccgcagccgcagccgcagccgcagccgcagcgccagcagcaacagcaggaagagcctgagccctggggtgtcccgggacagcagcaccagctacacagagaccaaggaccccagcagcggccaggaggtggccaccccacctgtgccccagctgcaggtgtgtgagcccaaggagaggaccagcaccagcagcagctctgtgcaggcccggcggctgagccagcctgagagcgctgagaagcacgtgacccagaggctgcagcctgagcggggcagccccaagaagtgtgaggccgaggaggccgagcccccagctgccacccagccccagaccagcgagacccagaccagccacctgcctgagagcgagcgcatccaccacacagtggaggagaaggaggaggtgaccatggacaccagcgagaacagaccagaaaatgatgtgcctgagccccccatgcccatcgctgaccaggtgtccaatgatgacaggcctgagggctctgtggaggatgaggagaagaaggagagcagcctgcccaagagcttcaagaggaagatctctgtggtgtccaccaagggcgtgcctgctggcaacagcgacacagaaggaggccagcccggcaggaagaggcgctggggcgccagcacagccaccacccagaagaagcccagcatcagcatcaccacagagagcctgaaggaggccgtggtggacctgcatgctgatgacagccgcatcagtgaagatgaaacagaaagaaatggagatgatggcacccatgacaagggcctgaagatctgcaggacagtgacccaggtggtgcctgctgagggccaggagaatggccagcgggaggaggaggaggaggagaaggagcctgaggccgagccccctgtgcccccccaggtgtctgtggaggtggccctgcccccacctgctgagcacgaggtgaagaaggtgaccctgggggacaccctgacccggcgcagcatcagccagcagaagagcggcgtgtccatcaccattgatgatcctgtgaggacagcccaggtgcccagccccccccggggcaagatcagcaacatcgtgcacatcagcaacctggtgcggcccttcaccctgggccagctgaaggagctgctgggccgcacaggcaccctggtggaggaggccttctggattgacaagatcaagagccactgctttgtgacctacagcacagtggaggaggccgtggccaccaggacagccctgcatggagtgaagtggccccagagcaaccccaagttcctgtgtgccgactatgcagagcaggatgagctggactaccaccggggcctgctggtggaccggcccagcgagaccaagacagaggagcagggcatcccccggcccctgcaccccccacctcctcctcctgtgcagcccccccagcaccccagggctgagcagcgggagcaggagagagctgtgcgggagcagtgggccgagcgggagcgggagatggagcggcgggagaggaccaggtctgagcgggagtgggaccgggacaaggtgcgggagggccccaggagccgcagccgcagccgggacagaagaaggaaggagcgggccaagagcaaggagaagaagtctgagaagaaggagaaggcccaggaggagcccccagccaagctgctggatgacctcttcaggaagaccaaggccgccccctgcatctactggctgcccctgacagacagccagatcgtgcagaaggaggccgagagagctgagcgggccaaggagcgggagaagaggaggaaggagcaggaggaggaggagcagaaggagcgggagaaggaggccgagcgggagaggaaccggcagctggagcgggagaagagaagagagcacagccgggagcgggaccgggagcgggagcgggagcgggagcgggacagaggagaccgggaccgggaccgggagcgggaccgggagcggggccgggagcgggacagaagagacaccaagaggcacagccgcagccgcagccgcagcacccctgtgcgggacagaggaggaagaagatag

SEQ ID NO: 63548 - DNA, 3987 bp, Artificial Sequence
  derived and/or modified sequence
atgtggcggcggaagcacccccggaccagcggcggcacccggggcgtgctcagcgggaaccggggcgttgagtacggctctggaagaggacaccttgggacttttgagggacggtggcgaaagctgccaaaaatgccagaggctgtgggcactgacccctccacgtctcggaagatggcagagctggaagaagtgactctggacggcaagcccctccaggccctgcgcgtcacagatctgaaagctgctttagagcaacggggacttgccaagtcaggacagaaatcagcactggttaagcgtctgaagggcgcccttatgctagaaaatctccagaagcattccacaccacacgccgcatttcaacctaacagccaaattggcgaggaaatgtcccagaacagttttatcaagcagtacctcgaaaaacagcaagaactgctgcgacagagactggaaagggaggcaagagaagccgccgagctggaggaggcttcagccgagtccgaagacgagatgatccatccggagggcgttgctagcctcctgcctccagacttccagagcagcctcgagcggcctgagcttgaactgtctcgccacagccctcgcaagtctagttctatctctgaggaaaagggggactcagatgacgagaagccgcgaaaaggggagcgacggtcgtcgagggtccgtcaggcaagagccgccaagctgtcagagggaagccagccagctgaggaagaggaggaccaagagacaccttcaagaaatcttcgagtaagggccgataggaatctgaagaccgaggaggaagaggaagaagaagaggaggaagaagaggatgacgaagaggaggagggcgacgatgaagggcagaaatcacgggaggcacctatactgaaagagtttaaagaggagggagaggagatcccaagagtgaaacctgaagagatgatggacgagcgcccaaaaacccgctcccaggagcaggaggtcttggagcgtggtggacgctttacacgatctcaggaagaagcacgaaagtcacacctcgccagacagcaacaggagaaggagatgaagacaaccagccctttggaggaggaggagcgggagatcaaaagctcccagggcctgaaggaaaagtccaagtctccatcaccacctagacttacggaggatcggaagaaggcctctctagtggcactgccagagcagacggcctccgaggaggaaacgcccccacccctgctgacgaaagaagcctcgagtccccctcctcacccccaactgcattcagaggaagaaatcgagcccatggagggacctgctcctgccgtgttaattcaactgagccctcccaacacggatgccgatacccgtgaactgcttgtgtctcagcacacggtacagctggtagggggactgagccccctctcaagcccttctgacactaaggccgagagccctgcagagaaggtgcccgaggagtctgtgttgcctttagtccaaaagagtaccctagcagactactcagctcagaaagatctcgagccggagtcagaccggtcagcccaacctctcccactgaaaatcgaggagctcgctctggcaaaaggcattacagaagagtgtttaaaacaaccatctttggagcaaaaagagggcaggagagcatcgcatactctcctccccagccacaggctgaaacaaagtgctgatagtagctctagccgcagttcctctagctcatccagttcctcgagatctaggtccaggtcccctgacagcagtggaagcagatctcatagccctctgcgcagcaaacagcgagatgtcgcacaggccagaacccatgccaatcccaggggccgccctaagatgggcagccgctctacttccgagtctagaagcagaagtcgatccagatctaggtccgcctccagtaattcacgcaagagcttgagtccgggtgtgtcacgagacagctctaccagctacaccgaaactaaggacccctccagtgggcaggaagtggccacgcctcccgtgccccagctgcaggtgtgcgagcccaaagagcgaacttcgacatcttccagcagcgtccaagcgcggcggcttagtcagcccgaaagtgccgagaagcatgtgacacagcgtttgcaacctgagcgggggagccctaaaaaatgtgaggccgaggaggcagaacctcctgccgcaactcaaccacagaccagtgaaacccagaccagccacctccccgaaagcgaacgcatacaccatacggtggaagagaaggaggaggtgaccatggatacgagtgagaataggcctgagaatgacgtgccggaacctccaatgccaattgcagatcaggtttcaaatgacgatagacccgaggggtccgtcgaagatgaggaaaaaaaggagagcagcttgccgaaatcattcaagcggaagattagcgtggtgtccaccaaaggcgtaccagcaggcaacagcgataccgagggcgggcagccagggaggaagaggcggtggggtgcgtctaccgccacaactcagaagaaacctagcatctcaatcacaaccgagagtctcaaggaggccgtagtggatctgcatgcagacgattcacggattagcgaagatgagacagagcggaacggggatgatggcacacacgataaagggttgaaaatatgccgcacagtaacgcaggtggtacctgccgagggccaggagaacggccagcgcgaggaggaggaggaggagaaggagccggaggctgaaccacctgtgccaccccaggtatctgtggaggtcgcacttccaccaccagctgaacacgaggtcaaaaaagtcaccctaggcgacacactcacacggcggagtataagtcaacagaaatccggtgtcagcatcacaattgatgacccagttaggactgctcaagtccccagtcccccccgcggtaaaattagtaatattgttcacatctccaatttggtcaggcctttcactttgggacagctcaaggagctgcttggccgcactgggacccttgtcgaagaagccttttggatcgataagatcaaaagtcactgcttcgtgacctacagcacagttgaagaagccgtcgctaccagaactgcgctgcatggggtgaaatggccacagtcaaatccaaaattcttgtgcgcggactatgctgagcaggatgagctagactatcatcgcggtctgctcgtggaccgtccttccgaaaccaaaaccgaggagcaaggcattcccaggccactgcatcccccacctcctcctccggtgcagcccccacagcatccccgtgccgagcaacgcgagcaggaaagggccgttcgtgagcagtgggcagaacgggagcgggagatggaaaggcgagagcggacaaggtcggagcgggagtgggatagagataaggtgcgcgaaggtcctaggtcaagatcacgatctcgcgatcggcggagaaaggagagagcaaagagcaaggagaaaaagtccgaaaaaaaggagaaagcacaggaggaaccccccgccaagctgctcgatgatctgttcaggaaaaccaaggcagctccttgcatctattggctcccattgacagattcccaaatcgtgcaaaaggaagccgagcgcgctgagcgtgccaaagaacgggagaaacgcaggaaggagcaagaggaagaagaacagaaggagagagagaaggaagcagagagagagagaaacagacaactcgagcgggagaagcgtagagaacattcccgagagcgtgatagagagcgagaaagagagagggaaagggacaggggcgatagggatagagacagagagagggatagggagagaggcagagagcgtgaccgacgagacactaaaaggcacagcagatcccggagccgctccactcccgttcgggaccgaggaggtcggcgctag

SEQ ID NO: 63549 - DNA, 3987 bp, Artificial Sequence
  derived and/or modified sequence
atgtggagacgaaagcatccacgcacttctggcggaactcgcggtgtgctgtccggaaaccggggagttgaatacggctccgggagaggacaccttggcactttcgaaggcagatggagaaaactacctaagatgcctgaggcggtagggacagacccctccacttctcgaaaaatggccgagctggaagaggtgacactcgatggaaaacctcttcaggccttacgtgttacagaccttaaggccgctcttgagcagcgcggtctggctaagagcgggcaaaaatctgcactcgtgaagagactgaagggggctctcatgttggagaatttgcaaaagcatagtacaccacacgccgctttccaaccaaacagtcagattggagaagaaatgagccaaaacagctttatcaagcagtatttagagaaacagcaagagctccttagacaacggttggagcgggaagcgagagaagccgcagagctcgaagaggcctcggcagaatccgaggacgaaatgatacatcccgagggtgtggcttccctactccccccagacttccagtcaagcctggagaggcccgaactggaactgtctagacacagtccccgtaagagcagcagtatatcagaagaaaaaggggattccgatgatgagaagcccagaaagggggagaggaggagcagtcgggtgcgccaggccagggccgctaagctgagtgaggggtcgcaacccgctgaagaggaagaagaccaggagacgcccagtaggaatctgcgggttagagcggaccgcaacctcaaaacagaagaggaagaagaagaagaggaggaagaagaggaagatgatgaagaggaggagggggatgatgaggggcaaaagagtagggaggctccaatacttaaggagttcaaggaggaaggcgaggagattcccagggtaaaacccgaggaaatgatggacgagagacccaagacccggtctcaggagcaggaagtgctggagaggggtgggagattcactcggagtcaggaggaggcaagaaagagccatctggcaagacaacaacaggaaaaggagatgaaaaccacttccccgcttgaggaagaagaacgcgagattaaatcgagccagggcttgaaggagaagtcaaagagtccgtccccccctagacttaccgaggaccgaaagaaggcatctctggtggccctgccagaacagacggcgtccgaagaagaaacaccgcctccactgctcaccaaagaagcttccagtccccctcctcatcctcagctgcattctgaagaggaaatagagccaatggaagggcctgctcctgccgtcctgatccagctgagtccacctaacactgatgctgacactcgcgaactgttggtgagccagcacactgtccagctagttggtgggctttcacctctttctagtccttcagacaccaaggccgaaagtcctgcagagaaggtgcctgaggagtccgtgttacccttagtacaaaagtctacactcgcggattactctgcccaaaaggaccttgaacctgaaagcgaccgctccgcgcagcctctccctctgaaaatcgaggagctggcactcgccaagggcatcaccgaggagtgtcttaagcaaccttccctggaacagaaggaaggcaggagggcgagccatactctgctgccatctcacagactgaaacagagcgccgactcgagctctagccgctcttcttcaagcagtagttctagcagccgctcacggagtaggagtcctgattcctcgggcagcaggtctcattcacctttgcgctcaaagcaaagagatgtcgcacaggcaaggacccatgccaacccacgcggacgacctaagatggggtctcgatccacctcagagtctcggagcaggagccgttcaaggtctcggtcagcctcttccaacagtcgcaagagcttaagccctggcgtgtctagggactccagtacctcctatacggagactaaggacccatcttctggtcaggaagttgccacaccacccgtgccacagctacaagtttgcgaacctaaagagaggacctccacaagtagcagttctgtgcaagcgcgaagactgagtcagcctgaaagcgctgaaaagcatgtcactcagcgcttacagcctgaaagaggttcaccaaaaaagtgtgaggctgaagaggcagagccacccgcagccacccagccccagacaagcgaaacccaaactagtcatttgcctgaaagtgaaaggatacatcacacggtggaagagaaggaggaagtgacaatggacacctcagagaaccgacccgagaacgatgtccctgagccacccatgccaatcgcagaccaggtttccaacgatgatcgccctgaaggatctgtggaagacgaggaaaaaaaagagagctccttaccgaaatccttcaaacggaagattagcgtcgtgagtacaaagggcgtgcccgctggcaacagtgacactgagggcggacagcccggacgcaagcgaagatggggcgcaagcactgccaccacccagaaaaaacctagcattagcataactaccgaatccttgaaagaggccgtggttgacttacacgccgacgattcaaggatttcagaagacgaaaccgagagaaatggagatgatggtacacatgataaggggctgaagatctgccggacggttacccaagtcgtcccagcggaggggcaggaaaatggacagagggaagaggaagaggaagaaaaggagccagaagcagagcccccagtgcctccccaagtgtcggtggaagttgccttaccacctccggctgagcacgaggtgaagaaggtaaccttgggcgatactttgaccagaagaagcattagccaacaaaaaagcggtgtctctattaccatcgacgacccagtccgcactgcccaggtgccttctcctccacgcggaaagatttcaaacatcgtccacatcagtaatctggtgcgaccttttacccttggacagctgaaagaacttctgggacgcaccggcaccctagttgaggaggctttttggatcgataagatcaagtcgcattgttttgtcacgtatagcacagttgaagaggcggtagcgaccaggacagccctgcatggagtaaaatggccccaaagcaacccaaagtttctgtgcgcagattatgccgagcaggatgaacttgactatcatagaggcctcctggtggatcgtccttctgaaacgaagactgaagaacagggcattcctagacccctgcaccccccaccaccccctcccgtacagcctcctcaacatcctagagcagaacaacgggaacaggagagggccgtgagagagcagtgggcagagagggaaagagaaatggaacgccgtgaaaggacccgttcagagcgggaatgggaccgcgacaaggtgcgcgaggggcctagaagtaggtcaagatccagagatcgcaggaggaaggaacgggctaagagcaaagaaaaaaagagtgaaaaaaaagagaaagcccaggaggaacctcccgctaagctgctggatgatctgttccgtaagacaaaggcggctccttgtatctattggttgccactaaccgatagccagatagtgcaaaaggaagccgaaagagcagaaagggccaaagaacgcgagaagcgaagaaaagagcaggaggaggaagaacagaaagagcgcgaaaaggaggcagaacgagaaagaaatcgacagttagaaagggaaaaaagaagagagcatagccgggagagggatcgtgagcgggaaagagaacgtgagcgcgacaggggcgacagagatagggatcgggaacgtgatagagagaggggacgggaaagagataggcgtgataccaagcgccatagcagatcacgcagccggtcaacgccggtgcgggacagaggaggcaggcgttag

SEQ ID NO: 63550 - DNA, 4173 bp, Artificial Sequence
  derived and/or modified sequence
tcgattcaaagcttcggcaagacgaagaaaaccgagcctgaaagcagggcgagaaaaggggcgctgcagggcggatggaaagaattgattggtaacgatgtggagacggaaacatccgaggacatccggaggaacccggggagttctgagtggtaatcgaggggtagagtatggcagtgggcggggtcatctcggtacgttcgaagggcgttggcggaaattaccgaagatgcccgaagccgtcgggacggacccgagtacctcacgcaagatggcggagctggaggaggtgactctggacgggaagcctcttcaggcgctgcgggtgaccgacctgaaggccgcactggagcagcgaggcctagccaagagcgggcagaagagtgccctggtcaagcggctcaaaggggctctaatgctagaaaatttacagaaacactcaacaccccatgctgcattccagccaaattcccagattggtgaggaaatgagccagaacagtttcataaaacagtatctggaaaagcagcaggagctacttaggcagcgtctggaacgtgaagctcgagaagctgcagaacttgaagaagcttcagctgagtcggaggacgagatgatccatcctgagggagtggcttccctgctgcctcctgactttcagagcagcctggagagaccagagctggagctcagcagacattcgcccagaaaaagctcctcaatttctgaagagaaaggtgactctgatgatgagaaaccaaggaaaggagaaagacgatcatctagggtcagacaggcaagagcagctaaactgtctgagggcagccaacctgctgaggaggaagaggatcaagaaacaccttccagaaacctaagggtcagagcagatcgaaatttgaaaacagaggaggaagaagaggaggaggaggaggaggaagaagatgatgaagaagaggaaggtgatgatgagggacaaaaatctagggaggcaccaatcctgaaagagtttaaggaagaaggggaagagatacctagagtaaaaccagaggagatgatggatgagagacccaaaacaagatcccaggaacaggaggtgttagagagaggagggagatttacaagatcccaggaagaggctagaaaaagtcatctggccagacagcagcaggagaaggaaatgaaaacaacatctccccttgaggaggaagaaagagaaataaaatcttcacaaggcttaaaggaaaaatcgaagtctccttcccctcctcgactgactgaagatcgaaagaaggcctcacttgtagcgctgccagagcaaactgccagcgaggaggagactcctccacctttactaacaaaggaagcatcttctccaccacctcatccacagctccatagcgaagaagaaatagagcccatggaaggcccagcccccgctgtcctcattcagttatctcctcctaatacagatgctgacaccagggagctattagtatctcagcatactgtccagttggtaggaggcctgtctcctttgtcaagtccttcagacaccaaagcagaatctccagcagagaaagtgccagaggagagtgtcctgcctctggttcagaaaagcacactggctgactactcagcccagaaggatcttgaacctgagtcagacagatctgctcagcccctccctctaaaaattgaggaattagcactggccaaaggaatcactgaagaatgtctgaaacagccatctttggaacagaaggaaggcagaagagcttctcatacccttctcccaagccacagattgaaacagtcagctgattcatcctctagccggtcctcctcatcttcctcctccagttctagatcaagatctcgctctcctgacagttcaggttctcggtctcattcaccgctcagatccaagcagagagatgtagcccaggcacgtactcatgccaaccctcgtggtagacccaagatgggctccagatcaacatcagagtccagatcaaggtcacgttcacgttctcgttcagcatcaagcaacagcagaaaatctctgagccctggagtctccagggacagcagcaccagctatactgaaaccaaagatccctcttctggtcaggaggttgcaactccaccagtgccacaactgcaggtctgtgagccaaaggagaggacttccacctcctcatcctctgtccaagcaaggcgtctgagtcagcctgaatcagctgaaaagcatgtgacccagaggttacagcctgagcgggggagcccaaagaagtgtgaagctgaagaggcagagccaccagctgccacacagccccaaacctcagagactcagacctctcatctgccagaatcagaaagaattcatcacactgttgaggagaaggaggaagtgaccatggacacaagtgaaaacagacctgaaaatgatgttccagaacctcccatgcctattgcagaccaagtcagcaatgatgaccgcccggagggcagtgttgaagatgaggagaagaaagagagctcgctgcccaaatcattcaagaggaagatctccgttgtctctaccaagggggtgccagctggaaacagtgacacagaggggggccagcctggtcggaaacgacgctggggagccagcacagccaccacacagaagaaaccttccatcagtatcaccactgaatcactaaaggaggctgttgtggatcttcatgctgatgactctcgcatctctgaggatgagacagagcgtaatggcgatgatgggacccatgacaaggggctgaaaatatgccggacagtcactcaggtagtacctgcagagggccaggagaatgggcagagggaagaagaggaagaagagaaggaacctgaagcagaacctcctgtacctccccaggtgtcagtagaggtggccttgcccccacctgcagagcatgaagtaaagaaagtgactttaggagataccttaactcgacgttccattagccagcagaagtccggagtttccattaccattgatgacccagtccgaactgcccaggtgccctccccaccccggggcaagattagcaacattgtccatatctccaatttggtccgtcctttcactttaggccagctaaaggagttgttggggcgcacaggaaccttggtggaagaggccttctggattgacaagatcaaatctcattgctttgtaacgtactcaacagtagaggaagctgttgccacccgcacagctctgcacggggtcaaatggccccagtccaatcccaaattcctttgtgctgactatgccgagcaagatgagctggattatcaccgaggcctcttggtggaccgtccctctgaaactaagacagaggagcagggaataccacggcccctgcaccccccacccccacccccggtccagccaccacagcacccccgggcagagcagcgggagcaggaacgggcagtgcgggaacagtgggcagaacgggaacgggaaatggagcggcgggagcggactcgatcagagcgtgaatgggatcgggacaaagttcgagaagggccccgttcccgatcaaggtcccgtgaccgccgccgcaaggaacgtgcgaagtctaaagaaaagaagagtgagaagaaagagaaagcccaggaggaaccacctgccaagctgctggatgaccttttccgaaagaccaaggcagctccctgcatctattggctcccactgactgacagccagatcgttcagaaagaggcagagcgggccgaacgggccaaggagcgggagaagcggcgaaaggagcaagaagaagaagagcaaaaggagcgggagaaggaagccgagcgggaacggaaccgacagctggagcgagagaaacgtcgggagcacagtcgggagagggacagggagagagagagagaaagggagcgggacaggggggaccgagatcgggatagggaaagggaccgagaacgaggcagggaaagggatcgcagggacaccaagcgccacagcagaagccggagtcggagcacacctgtgcgggaccggggtgggcgccgctagctgggaaaacactagagctgcaggtaccagccactcggccccagggggttatggccacagagggataggcacagtctccaccaccctgg

SEQ ID NO: 63551 - protein, 1301 aa, Artificial Sequence
  derived and/or modified sequence
MWRRKHPRTSGGTRGVLSGNRGVEYGSGRGHLGTFEGRWRKLPKMPEAVGTDPSTSRKMAELEEVTLDGKPLQALRVTDLKAALEQRGLAKSGQKSALVKRLKGALMLENLQKHSTPHAAFQPNSQIGEEMSQNSFIKQYLEKQQELLRQRLEREAREAAELEGKSSSISEEKGDSDDEKPRKGERRSSRVRQARAAKLSEGSQPAEEEEDQETPSRNLRVRADRNLKTEEEEEEEEEEEEDDEEEEGDDEGQKSREAPILKEFKEEGEEIPRVKPEEMMDERPKTRSQEQEVLERGGRFTRSQEEARKSHLARQQQEKEMKTTSPLEEEEREIKSSQGLKEKSKSPSPPRLTEDRKKASLVALPEQTASEEETPPPLLTKEASSPPPHPQLHSEEEIEPMEGPAPAVLIQLSPPNTDADTRELLVSQHTVQLVGGLSPLSSPSDTKAESPAEKVPEESVLPLVQKSTLADYSAQKDLEPESDRSAQPLPLKIEELALAKGITEECLKQPSLEQKEGRRASHTLLPSHRLKQSADSSSSRSSSSSSSSSRSRSRSPDSSGSRSHSPLRSKQRDVAQARTHANPRGRPKMGSRSTSESRSRSRSRSRSASSNSRKSLSPGVSRDSSTSYTETKDPSSGQEVATPPVPQLQVCEPKERTSTSSSSVQARRLSQPESAEKHVTQRLQPERGSPKKCEAEEAEPPAATQPQTSETQTSHLPESERIHHTVEEKEEVTMDTSENRPENDVPEPPMPIADQVSNDDRPEGSVEDEEKKESSLPKSFKRKISVVSATKGVPAGNSDTEGGQPGRKRRWGASTATTQKKPSISITTESLKSLIPDIKPLAGQEAVVDLHADDSRISEDETERNGDDGTHDKGLKICRTVTQVVPAEGQENGQREEEEEEKEPEAEPPVPPQVSVEVALPPPAEHEVKKVTLGDTLTRRSISQQKSGVSITIDDPVRTAQVPSPPRGKISNIVHISNLVRPFTLGQLKELLGRTGTLVEEAFWIDKIKSHCFVTYSTVEEAVATRTALHGVKWPQSNPKFLCADYAEQDELDYHRGLLVDRPSETKTEEQGIPRPLHPPPPPPVQPPQHPRAEQREQERAVREQWAEREREMERRERTRSEREWDRDKVREGPRSRSRSRDRRRKERAKSKEKKSEKKEKAQEEPPAKLLDDLFRKTKAAPCIYWLPLTDSQIVQKEAERAERAKEREKRRKEQEEEEQKEREKEAERERNRQLEREKRREHSRERDRERERERERDRGDRDRDRERDRERGRERDRRDTKRHSRSRSRSTPVRDRGGRR

SEQ ID NO: 63552 - DNA, 3906 bp, Artificial Sequence
  derived and/or modified sequence
atgtggagaagaaagcaccccagaaccagcggcggcaccagaggcgtgctgagcggcaacagaggcgtggagtacggcagcggcagaggccacctgggcaccttcgagggcagatggagaaagctgcccaagatgcccgaggccgtgggcaccgaccccagcaccagcagaaagatggccgagctggaggaggtgaccctggacggcaagcccctgcaggccctgagagtgaccgacctgaaggccgccctggagcagagaggcctggccaagagcggccagaagagcgccctggtgaagagactgaagggcgccctgatgctggagaacctgcagaagcacagcaccccccacgccgccttccagcccaacagccagatcggcgaggagatgagccagaacagcttcatcaagcagtacctggagaagcagcaggagctgctgagacagagactggagagagaggccagagaggccgccgagctggagggcaagagcagcagcatcagcgaggagaagggcgacagcgacgacgagaagcccagaaagggcgagagaagaagcagcagagtgagacaggccagagccgccaagctgagcgagggcagccagcccgccgaggaggaggaggaccaggagacccccagcagaaacctgagagtgagagccgacagaaacctgaagaccgaggaggaggaggaggaggaggaggaggaggaggaggacgacgaggaggaggagggcgacgacgagggccagaagagcagagaggcccccatcctgaaggagttcaaggaggagggcgaggagatccccagagtgaagcccgaggagatgatggacgagagacccaagaccagaagccaggagcaggaggtgctggagagaggcggcagattcaccagaagccaggaggaggccagaaagagccacctggccagacagcagcaggagaaggagatgaagaccaccagccccctggaggaggaggagagagagatcaagagcagccagggcctgaaggagaagagcaagagccccagcccccccagactgaccgaggacagaaagaaggccagcctggtggccctgcccgagcagaccgccagcgaggaggagacccccccccccctgctgaccaaggaggccagcagcccccccccccacccccagctgcacagcgaggaggagatcgagcccatggagggccccgcccccgccgtgctgatccagctgagcccccccaacaccgacgccgacaccagagagctgctggtgagccagcacaccgtgcagctggtgggcggcctgagccccctgagcagccccagcgacaccaaggccgagagccccgccgagaaggtgcccgaggagagcgtgctgcccctggtgcagaagagcaccctggccgactacagcgcccagaaggacctggagcccgagagcgacagaagcgcccagcccctgcccctgaagatcgaggagctggccctggccaagggcatcaccgaggagtgcctgaagcagcccagcctggagcagaaggagggcagaagagccagccacaccctgctgcccagccacagactgaagcagagcgccgacagcagcagcagcagaagcagcagcagcagcagcagcagcagcagaagcagaagcagaagccccgacagcagcggcagcagaagccacagccccctgagaagcaagcagagagacgtggcccaggccagaacccacgccaaccccagaggcagacccaagatgggcagcagaagcaccagcgagagcagaagcagaagcagaagcagaagcagaagcgccagcagcaacagcagaaagagcctgagccccggcgtgagcagagacagcagcaccagctacaccgagaccaaggaccccagcagcggccaggaggtggccaccccccccgtgccccagctgcaggtgtgcgagcccaaggagagaaccagcaccagcagcagcagcgtgcaggccagaagactgagccagcccgagagcgccgagaagcacgtgacccagagactgcagcccgagagaggcagccccaagaagtgcgaggccgaggaggccgagccccccgccgccacccagccccagaccagcgagacccagaccagccacctgcccgagagcgagagaatccaccacaccgtggaggagaaggaggaggtgaccatggacaccagcgagaacagacccgagaacgacgtgcccgagccccccatgcccatcgccgaccaggtgagcaacgacgacagacccgagggcagcgtggaggacgaggagaagaaggagagcagcctgcccaagagcttcaagagaaagatcagcgtggtgagcgccaccaagggcgtgcccgccggcaacagcgacaccgagggcggccagcccggcagaaagagaagatggggcgccagcaccgccaccacccagaagaagcccagcatcagcatcaccaccgagagcctgaagagcctgatccccgacatcaagcccctggccggccaggaggccgtggtggacctgcacgccgacgacagcagaatcagcgaggacgagaccgagagaaacggcgacgacggcacccacgacaagggcctgaagatctgcagaaccgtgacccaggtggtgcccgccgagggccaggagaacggccagagagaggaggaggaggaggagaaggagcccgaggccgagccccccgtgcccccccaggtgagcgtggaggtggccctgcccccccccgccgagcacgaggtgaagaaggtgaccctgggcgacaccctgaccagaagaagcatcagccagcagaagagcggcgtgagcatcaccatcgacgaccccgtgagaaccgcccaggtgcccagcccccccagaggcaagatcagcaacatcgtgcacatcagcaacctggtgagacccttcaccctgggccagctgaaggagctgctgggcagaaccggcaccctggtggaggaggccttctggatcgacaagatcaagagccactgcttcgtgacctacagcaccgtggaggaggccgtggccaccagaaccgccctgcacggcgtgaagtggccccagagcaaccccaagttcctgtgcgccgactacgccgagcaggacgagctggactaccacagaggcctgctggtggacagacccagcgagaccaagaccgaggagcagggcatccccagacccctgcacccccccccccccccccccgtgcagcccccccagcaccccagagccgagcagagagagcaggagagagccgtgagagagcagtgggccgagagagagagagagatggagagaagagagagaaccagaagcgagagagagtgggacagagacaaggtgagagagggccccagaagcagaagcagaagcagagacagaagaagaaaggagagagccaagagcaaggagaagaagagcgagaagaaggagaaggcccaggaggagccccccgccaagctgctggacgacctgttcagaaagaccaaggccgccccctgcatctactggctgcccctgaccgacagccagatcgtgcagaaggaggccgagagagccgagagagccaaggagagagagaagagaagaaaggagcaggaggaggaggagcagaaggagagagagaaggaggccgagagagagagaaacagacagctggagagagagaagagaagagagcacagcagagagagagacagagagagagagagagagagagagagagacagaggcgacagagacagagacagagagagagacagagagagaggcagagagagagacagaagagacaccaagagacacagcagaagcagaagcagaagcacccccgtgagagacagaggcggcagaagatag

SEQ ID NO: 63553 - DNA, 3906 bp, Artificial Sequence
  derived and/or modified sequence
atgtggcggagaaagcatccacgtacttctggcggcacaagaggagtcttgtccgggaatcgcggggttgagtatggatctgggcgcggccacctcggaacttttgagggcagatggagaaaactccccaaaatgcctgaggccgtagggactgatccctccacttctcggaagatggctgagctggaggaggtgactttagacggaaaacctctgcaagcattacgggtgaccgacttaaaggcagcattggagcagcgaggcttggcaaaaagcgggcagaaatctgctctggtcaaacgactgaaaggtgctctgatgctggaaaacctacagaagcacagcaccccacacgctgcttttcagccaaattctcagatcggcgaggagatgtcccagaatagctttatcaaacagtatctggagaagcaacaggagctcttgcgccaaagactcgaacgggaagccagagaagccgccgaactggagggcaaaagctcctctatctccgaggaaaaaggcgattctgacgatgagaaaccccgaaaaggcgagaggcgctcgagccgtgtcaggcaagcacgcgcggccaagctctccgagggaagtcaacccgccgaggaggaggaggaccaggaaaccccctcccggaacctacgcgtgagggctgacaggaacctgaagacagaagaagaggaggaggaagaggaggaagaggaagaggatgatgaggaagaagagggcgatgatgagggccagaagtctagagaggcacctatactcaaggagtttaaagaggagggcgaggagatcccacgggtaaaacctgaggaaatgatggacgagcgacctaaaacaaggtcccaggagcaagaggtgctagaaagaggaggtagatttacccgctcacaagaagaagcccggaaaagccaccttgcaagacagcagcaagagaaagaaatgaaaacaacctctcccctcgaggaagaagagcgtgagattaaatcctcccaggggctgaaggagaaatcaaagtctccaagtcctccaagactgacagaggatcgaaaaaaggcttccctcgtagcgcttcccgaacagacggcatctgaggaggaaactcccccccctctgctgacgaaggaggcctccagtcccccaccccatccacagctgcacagcgaggaagagattgagcctatggaggggcctgctccggccgtgcttatccagcttagcccacctaacaccgacgccgatacccgagaactgctggtaagccagcatacagtgcaactcgtgggaggccttagccccctgagcagtccttctgacacgaaggcagagtcccccgccgagaaagtgcccgaggaatccgtgctccccttagtgcagaagtccaccctggccgattactcagcccagaaagatctagaaccagaatctgaccgtagcgcacaaccactgccactcaagatcgaagaactggcccttgccaaaggtatcacagaggagtgtttaaaacagccttcccttgaacagaaagaagggcgccgcgcctctcacacgcttcttcccagtcatagacttaaacaatcagcggactcatcttcatctcggtcaagcagctcctcttccagctcctctagatcccgttcccggtctcccgactcttccggtagccggtcacacagccctttacgtagcaaacagagagacgtcgcacaggcacggacacatgccaaccctagaggccggcccaagatgggatcacggtccacctcagagagccggagccggtccaggagtcgtagccgctctgccagctctaattcacgaaagtcactttcacccggagtgagtagggactcgagcaccagttataccgagaccaaagacccctcctccgggcaggaggtggctacgccccccgttcctcagcttcaggtttgcgagcctaaagaacggacatccacatcctcctcttccgtgcaggcccgcagactgtctcagccagaaagcgcagaaaagcacgtgactcagcgtctgcagcctgaacggggatctccaaaaaaatgtgaagccgaagaagcggaacctccggccgcaacccaaccacagacatccgagactcaaacctcccacttgccagaaagtgagcgtatacatcatacagtggaagagaaagaggaagtaactatggataccagtgagaaccgcccagagaacgatgttcctgagcccccaatgcctatcgctgaccaagtcagcaacgatgaccgcccagagggctcagtggaggacgaagagaagaaggaatcttctctgccaaaatcattcaaacgcaaaatatccgttgtgagcgcaactaagggcgtgccggccgggaatagtgacaccgaaggtggccagccagggaggaagcggcgctggggggctagtacagctacaacccagaagaaaccaagcatttcaatcaccaccgaatccctgaaaagtctgatccctgatattaaaccactggcaggccaggaggctgtcgttgacctccacgccgatgactctaggatcagcgaagatgaaaccgagcgtaatggagatgatggaacacacgacaagggcctgaagatttgtcggacagttactcaagttgtgcccgccgaagggcaggagaacggacagcgggaagaagaggaagaagagaaggaaccagaggccgagccacccgttcctccgcaggtctccgtggaggtagccctgcctcctcccgccgagcatgaggtgaaaaaggtgacattaggcgacactttgacgcgccgttccatttctcagcagaagtcgggcgtgagcatcacaatcgacgaccctgtccgaactgctcaagtgcctagtccacctcgggggaaaatttccaacatcgtgcatatttccaatttagttagacccttcacgctgggccagcttaaggagctgttgggacgcaccggaaccctggttgaagaggctttttggattgacaagattaagagccattgctttgtcacgtattcaactgtcgaagaagccgtcgctacgcggacagcgctgcacggcgtgaagtggccacagagtaatccaaaatttctgtgtgccgattatgcagaacaggatgagctggactatcatcgcggcttgctggtggataggccgtccgaaacaaagacagaagaacaaggcattcctaggccgctgcatcccccccctcctccaccagttcagcctcctcagcatcctcgcgcggagcagcgggagcaggaaagagctgtgagggaacagtgggcagaacgggaaagggagatggaaagaagggagagaacgcgatccgagagggaatgggacagagataaagttagagagggacccaggagccggtctagatcaagggatcggcgccgaaaggagagagcaaaaagtaaggaaaaaaaatccgagaagaaagagaaggcccaggaggagcctcctgctaagctgctcgacgaccttttccgtaaaaccaaggcagctccttgtatctattggcttccgctgaccgatagccagattgtgcagaaggaggccgagagagccgagagggccaaagagcgtgagaaacgccggaaggagcaggaagaagaagagcagaaagaaagagaaaaagaggctgagagggaacgcaaccgccagctggagcgggaaaaacgacgggagcactcccgtgagcgagacagagaaagagagcgggagcgtgaacgagatcggggggacagagacagagatcgcgaacgcgaccgggagcgaggacgtgaacgcgaccgacgagatacgaagagacactcaagatcacggagtcgatcaactcccgtgagggatcggggtggccggagatag

SEQ ID NO: 63554 - DNA, 3906 bp, Artificial Sequence
  derived and/or modified sequence
atgtggaggaggaagcaccccaggaccagcggcggcacccggggcgtgctgagcggcaacagaggagtggagtatggcagcggccggggccacctgggcacctttgagggccgctggaggaagctgcccaagatgcctgaggccgtgggcacagaccccagcaccagcaggaagatggccgagctggaggaggtgaccctggatggcaagcccctgcaggccctgcgggtgacagacctgaaggccgccctggagcagaggggcctggccaagagcggccagaagagcgccctggtgaagaggctgaagggggccctgatgctggagaacctgcagaagcacagcacccctcatgctgccttccagcccaacagccagattggagaggagatgagccagaacagcttcatcaagcagtacctggagaagcagcaggagctgctgcggcagaggctggagcgggaggcccgggaggccgctgagctggagggcaagagcagcagcatcagcgaggagaagggggacagtgatgatgagaagcccaggaaaggagagcggcgcagcagccgggtgcggcaggcccgggccgccaagctgtctgagggcagccagcctgctgaggaggaggaggaccaggagacccccagcaggaacctgcgggtgcgggctgacaggaacctgaagacagaggaggaggaggaggaggaggaggaggaggaggaggatgatgaggaggaggagggagatgatgagggccagaagagccgggaggcccccatcctgaaggagttcaaggaggagggggaggagatcccccgggtgaagccagaggagatgatggatgagcggcccaagaccaggagccaggagcaggaggtgctggagcggggcggccgcttcaccaggagccaggaggaggccaggaagagccacctggcccggcagcagcaggagaaggagatgaagaccaccagccccctggaggaggaggagcgggagatcaagagcagccagggcctgaaggagaagagcaagagccccagccccccccggctgacagaggacaggaagaaggccagcctggtggccctgcctgagcagacagccagcgaggaggagaccccaccacccctgctgaccaaggaggccagcagccccccaccccacccccagctgcacagcgaggaggagattgagcccatggagggccctgccccagctgtgctgatccagctgagcccccccaacacagatgctgacacccgggagctgctggtgtcccagcacacagtgcagctggtgggcggcctgagccccctgagcagccccagcgacaccaaggccgagagccctgctgagaaggtgcctgaggagagcgtgctgcccctggtgcagaagagcaccctggccgactacagcgcccagaaggacctggagcctgagagtgacagaagtgcccagcccctgcccctgaagattgaggagctggccctggccaagggcatcacagaagaatgtctgaagcagcccagcctggagcagaaggagggccggcgggccagccacaccctgctgcccagccaccggctgaagcagagcgctgacagcagcagcagccgcagcagcagcagcagcagcagcagcagccgcagccgcagccgcagcccagacagcagcggcagccgcagccacagccccctgcggagcaagcagagagatgtggcccaggcccggacccacgccaacccccggggccggcccaagatgggcagccgcagcaccagcgagagccgcagccgcagccgcagccgcagccgcagcgccagcagcaacagcaggaagagcctgagccctggggtgtcccgggacagcagcaccagctacacagagaccaaggaccccagcagcggccaggaggtggccaccccacctgtgccccagctgcaggtgtgtgagcccaaggagaggaccagcaccagcagcagctctgtgcaggcccggcggctgagccagcctgagagcgctgagaagcacgtgacccagaggctgcagcctgagcggggcagccccaagaagtgtgaggccgaggaggccgagcccccagctgccacccagccccagaccagcgagacccagaccagccacctgcctgagagcgagcgcatccaccacacagtggaggagaaggaggaggtgaccatggacaccagcgagaacagaccagaaaatgatgtgcctgagccccccatgcccatcgctgaccaggtgtccaatgatgacaggcctgagggctctgtggaggatgaggagaagaaggagagcagcctgcccaagagcttcaagaggaagatctctgtggtgtctgccaccaagggcgtgcctgctggcaacagcgacacagagggcggccagcccggcaggaagaggcgctggggcgccagcacagccaccacccagaagaagcccagcatcagcatcaccacagagagcctgaagagcctcatcccagacatcaagcccctggccggccaggaggccgtggtggacctgcacgcagatgacagccgcatcagtgaagatgaaacagaaagaaatggagatgatggcacccatgacaagggcctgaagatctgcaggacagtgacccaggtggtgcctgctgagggccaggagaatggccagcgggaggaggaggaggaggagaaggagcctgaggccgagccccctgtgcccccccaggtgtctgtggaggtggccctgcccccacctgctgagcacgaggtgaagaaggtgaccctgggggacaccctgaccaggaggagcatcagccagcagaagtctggagtgtccatcaccattgatgatcctgtgaggacagcccaggtgcccagccccccccggggcaagatcagcaacatcgtgcacatcagcaacctggtgcggcccttcaccctgggccagctgaaggagctgctgggccgcacaggcaccctggtggaggaggccttctggattgacaagatcaagagccactgctttgtgacctacagcacagtggaggaggccgtggccaccaggacagccctgcacggcgtgaagtggccccagagcaaccccaagttcctgtgtgccgactatgcagagcaggatgagctggactaccaccggggcctgctggtggaccggcccagcgagaccaagacagaggagcagggcatcccccggcccctgcaccccccacctcctcctcctgtgcagcccccccagcaccccagggctgagcagcgggagcaggagagagctgtgcgggagcagtgggccgagcgggagcgggagatggagcggcgggagaggaccaggtctgagcgggagtgggaccgggacaaggtgcgggagggccccaggagccgcagccgcagccgggacagaagaaggaaggagcgggccaagagcaaggagaagaagtctgagaagaaggagaaggcccaggaggagcccccagccaagctgctggatgacctcttcaggaagaccaaggccgccccctgcatctactggctgcccctgacagacagccagatcgtgcagaaggaggccgagcgggcagagcgggccaaggagcgggagaagaggaggaaggagcaggaggaggaggagcagaaggagcgggagaaggaggccgagcgggagaggaaccggcagctggagcgggagaagaggcgggagcacagccgggagcgggaccgggagcgggagcgggagcgggagcgggacagaggagaccgggaccgggaccgggagcgggaccgggagcggggccgggagcgggaccggcgggacaccaagaggcacagccgcagccgcagccgcagcacccctgtgcgggaccggggcggcagaagatag

SEQ ID NO: 63555 - DNA, 3906 bp, Artificial Sequence
  derived and/or modified sequence
atgtggcggcggaagcacccccggaccagcggcggcacccggggcgttttgtcaggcaacagaggcgtggagtatggaagcggccggggccacctcggtactttcgagggccgctggcggaaactccccaagatgccagaggccgtcggaactgaccctagtaccagcaggaaaatggctgagctggaagaagtgacgttagacggtaaacctctgcaggccctgagggtgactgatttgaaagcagctctcgaacagaggggattagccaagtccggacagaagtccgccctcgtaaaacggctgaagggcgctctgatgttagaaaacctgcagaagcatagtacacctcatgcggcatttcagcccaatagtcagataggagaagagatgtcccaaaactcattcataaaacagtacctggaaaaacagcaggagctgctccgacagagactcgaaagagaagcaagagaggccgccgagttagagggtaaaagcagctcgatctccgaggagaagggggattccgacgacgagaagccaagaaagggcgaaagaagaagctctagagtgaggcaggcccgggctgctaagctctcggaagggtcacagcccgcagaagaggaagaggatcaggagaccccttcacgtaacctaagggtgagagccgatagaaacctgaagactgaggaggaagaggaggaggaggaggaggaggaggaggatgatgaggaagaagagggggatgacgaggggcagaaatcccgggaggcccccatattaaaggagttcaaggaagaaggtgaggaaatacctcgggtgaaaccagaggaaatgatggatgaaaggccaaagacacggtcccaggagcaggaggttctcgagaggggaggcagattcacaagatcccaggaagaggcccgcaaatcgcatttagcccgccagcaacaggaaaaagagatgaaaactacctctcctctcgaagaggaggaacgcgaaattaagagttcacaggggttgaaggaaaaatctaaaagccccagtccccccaggctaactgaggaccgaaagaaggcatcactggtggcgttgccagagcaaacagctagtgaagaagagacccctccccctctacttactaaggaggcttccagtccaccgccccacccccagcttcactctgaagaggagatcgagccaatggaaggacccgccccagccgtcttaatacaactgtccccccccaacactgatgcagacactcgtgagctgctggttagccagcacacagttcagctggttggcggactttcaccactctcaagcccttccgatactaaagctgaatcgcctgcagaaaaggtgcctgaggagtcagttctgcccctggtgcagaagagtactctggccgactactcagctcagaaggatctcgagcccgaatccgaccgcagcgcccagccgctgcctttaaagattgaagaactggccctcgccaagggcattaccgaagagtgcctaaagcagccttcattggagcagaaagaaggccgaagagctagccatacgttacttccttcccatcgacttaaacagagcgcggactcttcgtcaagcagatcctcatcttcctctagttctagtagtcgctcacgctcacggagtccagactccagtggctctaggtcccattccccactcaggtccaagcagcgcgacgtcgcccaggcacggacccatgccaaccccaggggcaggcccaagatgggatctcggtcaacttccgaatctcgaagccgctcaaggtcacggtcacgcagcgcatcatcgaacagtcgtaagagcctgagtccaggggtctcccgcgatagctccactagctatacggagactaaagatcctagttcgggccaggaggtggcaacaccaccagtcccccaactgcaggtttgtgagcctaaagaacggacctctacttcttcatcttccgtgcaagctagacggctgtcacagcctgagtctgctgaaaagcacgtgactcagagactgcagcccgagaggggatcacccaagaaatgcgaggccgaggaggccgaaccaccagccgctactcagccacagacatccgaaacgcagacatcccaccttccagaaagcgagagaatccaccataccgtagaggaaaaggaggaggttaccatggatacctcggagaacaggcccgaaaatgatgtgccagagccaccgatgccaatcgcggaccaggtgtccaacgatgatagacccgaaggatcagtcgaggacgaggagaagaaagaatcatcgctccccaagagctttaagcggaaaatctccgtcgtctctgctaccaagggagtgcctgctggaaacagtgacaccgaaggcggtcaaccagggcgcaagcgtcggtggggagcttcgactgcaacaacacaaaagaagccatcgattagcataacgaccgagtccttgaagagtcttattcctgacatcaagccacttgctgggcaagaagcagtagtggacttgcacgctgatgactcccgcataagcgaggatgagacggagcggaacggagatgatggcacacacgacaagggcctgaagatctgcaggactgtgacacaggtcgtacccgccgaggggcaggaaaatggacagcgggaggaggaagaggaagagaaggagccagaagcagaacccccggtgcctccacaggtctcagtggaggtggctctccctcctcccgcggagcacgaagtgaaaaaggtaaccctcggggacaccttgacaagaagatctatctctcagcagaagtccggcgtatcgatcacaatcgacgatcctgtgcggaccgcacaggtgcccagccccccaagaggaaaaatctcaaacattgtacacatatcaaacctcgtacgaccatttactctaggccagctcaaagagctactgggcagaacaggcaccctggtggaagaagctttctggattgacaaaattaagtctcattgcttcgtaacctattctactgtagaggaggcagtggccactcggacagcgctgcacggagtgaaatggcctcagtccaaccctaaatttttgtgcgcagattacgctgagcaggacgagctggactaccaccggggacttctagtggatagaccaagcgagactaagacagaagaacaggggatcccccggccattgcatccaccacccccccctccagtgcagcccccacagcacccacgtgctgagcaacgagagcaggagcgagcagtgcgggaacagtgggctgagcgcgaacgcgaaatggagaggagggaaaggacgcgtagcgagagagaatgggatagggataaggtccgggaaggtcctcgttctcgcagccgaagtcgcgatcggcgcaggaaagaacgagctaagtctaaggagaagaaatccgagaagaaagagaaggctcaggaggagccgcctgccaaattactagacgacttgtttcggaagactaaggccgctccatgtatttattggctccctctaaccgactcccagatcgtacagaaagaagcagaaagagccgaacgcgccaaggaaagggagaaacggcgtaaagagcaggaagaggaagaacagaaagagagggagaaagaagctgagagagagaggaaccgacagcttgagagagagaagcggagagagcatagcagggagcgtgatagagagcgggaaagggaacgtgagagagaccggggtgatagagacagggatcgcgaaagagaccgggaaaggggaagggagcgggatcgtcgtgataccaagagacattcgcggagcagaagtaggtctactcccgtccgcgatagaggaggccggaggtag

SEQ ID NO: 63556 - DNA, 3906 bp, Artificial Sequence
  derived and/or modified sequence
atgtggaggagaaaacaccccaggaccagtggcggtacaagaggtgttttgagcggaaaccggggagtcgagtacgggagcggtcggggacatctgggtacatttgaggggagatggcgaaaactccccaaaatgcccgaagctgtgggcaccgacccatccactagccgcaagatggctgaactagaggaggtgactcttgatggaaaacccctgcaggcgctgcgggtcaccgacctgaaagctgcgctcgaacagaggggtctggcgaaatctggtcagaagtcggccttggtgaaaaggctgaagggtgccttgatgttggaaaacctgcaaaaacattctaccccacacgccgctttccaacccaatagtcagatcggtgaggagatgagccagaattccttcatcaagcagtacctggagaagcaacaggaactgcttaggcaaaggctggagcgagaagcacgtgaagcagcagagctggagggaaagagcagctctatctctgaagagaagggggatagcgatgatgagaagccgaggaaaggtgagagaagaagttccagggtgaggcaagctcgagccgcaaaactgtcagaggggagccaacccgctgaggaagaagaggatcaagagacaccaagtcgcaacctgcgcgtgagggcggaccggaacctcaagaccgaggaggaagaggaggaagaggaggaggaggaggaggacgacgaagaagaggagggagatgacgaggggcagaaatcaagggaagcacctattctcaaagaattcaaggaagaaggtgaagaaatcccacgtgtaaaacccgaggagatgatggatgagcgacccaaaactcgctcccaggaacaagaagtcctcgaacgcggtgggaggttcacgcggtcacaggaagaggctaggaagtcacacctggctaggcagcagcaagagaaagagatgaaaacgacctcacccctggaggaggaagaacgcgaaattaaaagctctcaggggcttaaggagaaatctaagagcccgtccccgcctaggctgacggaggaccgcaagaaagcaagtctcgtggcccttcccgagcagacagccagtgaggaggaaacaccgcctcccctcctgacaaaagaggcatccagccctccacctcatcctcagttgcattccgaagaggaaatcgagcccatggaaggtcctgcacccgctgttctcattcaactgagcccacctaataccgatgcggacacccgggagctcctggtctcccagcacaccgtgcagcttgtgggaggtttatctccactgagctctccatctgacacaaaggccgaatcgccggctgagaaggtgcccgaggagtcagtgctccccctggtccagaagtccactcttgccgactactccgcgcagaaggacctcgagccagaaagcgaccgctccgcgcagcctctccccttgaaaattgaggagctcgcattggcgaaaggaatcacagaagaatgtctgaagcaaccatcactcgagcagaaggaaggcagacgggctagccatacccttcttccttcccacaggctcaagcaatctgctgacagcagttctagtcgttcttccagtagctctagctcctctagccggagccggtcacgctcccccgacagctcggggagtcgcagccacagtcctctgcgctccaagcagagggacgtcgcccaggctaggacccatgccaatcccagagggagacccaagatgggctctagatcgacctcggaaagccgctcacgatccaggtctcgatccagaagtgctagctccaacagtagaaagagtctgagcccaggggttagtagggactcctctacttcatacactgagacgaaggatccatcttcgggacaagaagtggccacaccgcctgtgccccagctgcaggtttgtgaacccaaggagcggacaagtacatcatcatcctcagttcaggctcgcaggctcagccagcccgagagtgcagagaagcatgttactcagaggctgcagccggaaaggggctcacctaagaaatgtgaggccgaggaagccgaaccacctgcggcaacccagcctcagacatcagagactcagacttctcacctaccagaatctgaacgcatccaccatacagtggaggagaaggaggaggttaccatggatacctccgagaacaggccagaaaatgacgtgccggagcctccaatgccgatcgcagatcaggttagcaatgacgacagaccagaaggctcggtcgaggatgaggaaaagaaggagagctcccttcccaaatcttttaagagaaagattagcgtagtcagtgctactaagggcgtcccggctggcaatagcgacactgaaggaggtcaacctggacgcaagcgtaggtggggggcaagcacagcgacaacacagaagaaacctagcattagcataaccaccgaaagtctgaaatctttaatccctgacattaagcccctcgcgggacaggaagcagtggtggacctccatgctgatgacagccggattagtgaggatgaaacagaacggaatggagatgacggcacccatgataaagggctcaaaatttgcaggaccgttactcaggtagtgccagctgaggggcaagagaacggccagagagaagaagaggaagaggagaaagagcccgaagcagaacctcccgtgccaccacaggtttctgtggaggttgctctgccccctcctgcggaacacgaagtgaagaaggtgacactgggggatacacttacgcggcgaagcatctcacaacagaagtctggcgtaagcatcacaattgacgaccctgttagaacggcacaggtcccgtcacctccaaggggtaagatatctaacatcgtccatattagcaatctggtgaggccgttcacccttgggcagctgaaggaactactcggcaggactggcacccttgtggaagaagccttttggatcgacaagattaagagccattgcttcgttacttactccacagtggaagaggcagtcgccacccgcacagcactccatggagtgaaatggcctcagagtaatccaaaatttctgtgtgctgattacgccgagcaggatgaactggactatcaccgaggcctactggtggaccgaccctccgagaccaagactgaggagcaggggataccccgacccttacaccccccaccaccccctcctgtccagccccctcagcatcctcgggcagagcagagagagcaggagagagccgtaagagagcagtgggctgagagggagagagagatggaacggcgagagagaactaggtcagaacgggagtgggaccgggataaggtccgtgaaggcccacggtctcgctccaggagccgcgatagacggagaaaggaaagggccaagtctaaagaaaaaaaatctgaaaaaaaggaaaaggcccaggaggagccacctgctaaactgctcgacgacttattcagaaaaacgaaagccgctccctgcatatattggctccccttaacagattcacaaatagtccagaaagaggctgagcgggctgagagggcgaaggagcgcgaaaagcgtcgtaaggaacaggaggaagaggaacagaaagaaagggagaaagaagccgaacgcgaaaggaacaggcagttggaacgagaaaaacgtcgagagcactcaagagagcgcgatcgggagagagaaagggaacgtgagagggacagaggagatcgcgatcgcgaccgcgagcgtgatagggaacgcggaagggagagggatagaagagatacaaagaggcacagtaggagccgctcacgctccaccccagtgagggatcgcggaggccgtaggtag

SEQ ID NO: 63557 - DNA, 4815 bp, Artificial Sequence
  derived and/or modified sequence
cttttctctcgaagggcacccgaagattgtcacgagtccttagactccaactactgcggcagcttccaaatttcctgaaaaccctaagctgggccagcccggcagcccacgcacttccggcctcggacccgccccaaacacccaagcgccccagcgcctcatctctaggtccggaaataaacgaacatctccgattatggttataccagggtcgagggtttccgaatatattcgattcaaagcttcggcaagacgaagaaaaccgagcctgaaagcagggcgagaaaaggggcgctgcagggcggatggaaagaattgattggtaacgatgtggagacggaaacatccgaggacatccggaggaacccggggagttctgagtggtaatcgaggggtagagtatggcagtgggcggggtcatctcggtacgttcgaagggcgttggcggaaattaccgaagatgcccgaagccgtcgggacggacccgagtacctcacgcaagatggcggagctggaggaggtgactctggacgggaagcctcttcaggcgctgcgggtgaccgacctgaaggccgcactggagcagcgaggcctagccaagagcgggcagaagagtgccctggtcaagcggctcaaaggggctctaatgctagaaaatttacagaaacactcaacaccccatgctgcattccagccaaattcccagattggtgaggaaatgagccagaacagtttcataaaacagtatctggaaaagcagcaggagctacttaggcagcgtctggaacgtgaagctcgagaagctgcagaacttgaaggaaaaagctcctcaatttctgaagagaaaggtgactctgatgatgagaaaccaaggaaaggagaaagacgatcatctagggtcagacaggcaagagcagctaaactgtctgagggcagccaacctgctgaggaggaagaggatcaagaaacaccttccagaaacctaagggtcagagcagatcgaaatttgaaaacagaggaggaagaagaggaggaggaggaggaggaagaagatgatgaagaagaggaaggtgatgatgagggacaaaaatctagggaggcaccaatcctgaaagagtttaaggaagaaggggaagagatacctagagtaaaaccagaggagatgatggatgagagacccaaaacaagatcccaggaacaggaggtgttagagagaggagggagatttacaagatcccaggaagaggctagaaaaagtcatctggccagacagcagcaggagaaggaaatgaaaacaacatctccccttgaggaggaagaaagagaaataaaatcttcacaaggcttaaaggaaaaatcgaagtctccttcccctcctcgactgactgaagatcgaaagaaggcctcacttgtagcgctgccagagcaaactgccagcgaggaggagactcctccacctttactaacaaaggaagcatcttctccaccacctcatccacagctccatagcgaagaagaaatagagcccatggaaggcccagcccccgctgtcctcattcagttatctcctcctaatacagatgctgacaccagggagctattagtatctcagcatactgtccagttggtaggaggcctgtctcctttgtcaagtccttcagacaccaaagcagaatctccagcagagaaagtgccagaggagagtgtcctgcctctggttcagaaaagcacactggctgactactcagcccagaaggatcttgaacctgagtcagacagatctgctcagcccctccctctaaaaattgaggaattagcactggccaaaggaatcactgaagaatgtctgaaacagccatctttggaacagaaggaaggcagaagagcttctcatacccttctcccaagccacagattgaaacagtcagctgattcatcctctagccggtcctcctcatcttcctcctccagttctagatcaagatctcgctctcctgacagttcaggttctcggtctcattcaccgctcagatccaagcagagagatgtagcccaggcacgtactcatgccaaccctcgtggtagacccaagatgggctccagatcaacatcagagtccagatcaaggtcacgttcacgttctcgttcagcatcaagcaacagcagaaaatctctgagccctggagtctccagggacagcagcaccagctatactgaaaccaaagatccctcttctggtcaggaggttgcaactccaccagtgccacaactgcaggtctgtgagccaaaggagaggacttccacctcctcatcctctgtccaagcaaggcgtctgagtcagcctgaatcagctgaaaagcatgtgacccagaggttacagcctgagcgggggagcccaaagaagtgtgaagctgaagaggcagagccaccagctgccacacagccccaaacctcagagactcagacctctcatctgccagaatcagaaagaattcatcacactgttgaggagaaggaggaagtgaccatggacacaagtgaaaacagacctgaaaatgatgttccagaacctcccatgcctattgcagaccaagtcagcaatgatgaccgcccggagggcagtgttgaagatgaggagaagaaagagagctcgctgcccaaatcattcaagaggaagatctccgttgtctcagctaccaagggggtgccagctggaaacagtgacacagaggggggccagcctggtcggaaacgacgctggggagccagcacagccaccacacagaagaaaccttccatcagtatcaccactgaatcactaaagagcctcatccccgacatcaaacccctggcggggcaggaggctgttgtggatcttcatgctgatgactctcgcatctctgaggatgagacagagcgtaatggcgatgatgggacccatgacaaggggctgaaaatatgccggacagtcactcaggtagtacctgcagagggccaggagaatgggcagagggaagaagaggaagaagagaaggaacctgaagcagaacctcctgtacctccccaggtgtcagtagaggtggccttgcccccacctgcagagcatgaagtaaagaaagtgactttaggagataccttaactcgacgttccattagccagcagaagtccggagtttccattaccattgatgacccagtccgaactgcccaggtgccctccccaccccggggcaagattagcaacattgtccatatctccaatttggtccgtcctttcactttaggccagctaaaggagttgttggggcgcacaggaaccttggtggaagaggccttctggattgacaagatcaaatctcattgctttgtaacgtactcaacagtagaggaagctgttgccacccgcacagctctgcacggggtcaaatggccccagtccaatcccaaattcctttgtgctgactatgccgagcaagatgagctggattatcaccgaggcctcttggtggaccgtccctctgaaactaagacagaggagcagggaataccacggcccctgcaccccccacccccacccccggtccagccaccacagcacccccgggcagagcagcgggagcaggaacgggcagtgcgggaacagtgggcagaacgggaacgggaaatggagcggcgggagcggactcgatcagagcgtgaatgggatcgggacaaagttcgagaagggccccgttcccgatcaaggtcccgtgaccgccgccgcaaggaacgtgcgaagtctaaagaaaagaagagtgagaagaaagagaaagcccaggaggaaccacctgccaagctgctggatgaccttttccgaaagaccaaggcagctccctgcatctattggctcccactgactgacagccagatcgttcagaaagaggcagagcgggccgaacgggccaaggagcgggagaagcggcgaaaggagcaagaagaagaagagcaaaaggagcgggagaaggaagccgagcgggaacggaaccgacagctggagcgagagaaacgtcgggagcacagtcgggagagggacagggagagagagagagaaagggagcgggacaggggggaccgagatcgggatagggaaagggaccgagaacgaggcagggaaagggatcgcagggacaccaagcgccacagcagaagccggagtcggagcacacctgtgcgggaccggggtgggcgccgctagctgggaaaacactagagctgcaggtaccagccactcggccccagggggttatggccacagagggataggcacagtctccaccaccctggagccaagggtctttcacatcacctatccctacatacataccaaatggaaaagtggccatccttttccccccaaacacacccccttaacctatctcttgggacttagcccgaccctccctctcatttcccattaagtctgagaggcaagagctaggttaggcaaggaggtggttggccagagatggggaacagccaggtgccccagtcctctgatttttcctccatcctgcttaccacctccctgggtacttacagccttctcttgggaacagccggggccaggactgggtcacctatgagctgaatcagcatctcctcctgagtcccagggcccctgcagttcccagtctcttctgtcctgcagcccttgcctctttcccacaggttccactttatatccaccttttccttttgttcaatttttatttttattttttttattattaaatgatgtggtctatggaaaaaaaaataaaaatctgacttagtttt

SEQ ID NO: 63558 - protein, 614 aa, Artificial Sequence
  derived and/or modified sequence
MSPADRCRSANTIEPATTSSLALFLLLQRDQSSRTRGLPEEKEEVTMDTSENRPENDVPEPPMPIADQVSNDDRPEGSVEDEEKKESSLPKSFKRKISVVSATKGVPAGNSDTEGGQPGRKRRWGASTATTQKKPSISITTESLKSLIPDIKPLAGQEAVVDLHADDSRISEDETERNGDDGTHDKGLKICRTVTQVVPAEGQENGQREEEEEEKEPEAEPPVPPQVSVEVALPPPAEHEVKKVTLGDTLTRRSISQQKSGVSITIDDPVRTAQVPSPPRGKISNIVHISNLVRPFTLGQLKELLGRTGTLVEEAFWIDKIKSHCFVTYSTVEEAVATRTALHGVKWPQSNPKFLCADYAEQDELDYHRGLLVDRPSETKTEEQGIPRPLHPPPPPPVQPPQHPRAEQREQERAVREQWAEREREMERRERTRSEREWDRDKVREGPRSRSRSRDRRRKERAKSKEKKSEKKEKAQEEPPAKLLDDLFRKTKAAPCIYWLPLTDSQIVQKEAERAERAKEREKRRKEQEEEEQKEREKEAERERNRQLEREKRREHSRERDRERERERERDRGDRDRDRERDRERGRERDRRDTKRHSRSRSRSTPVRDRGGRR

SEQ ID NO: 63559 - DNA, 1845 bp, Artificial Sequence
  derived and/or modified sequence
atgagccccgccgacagatgcagaagcgccaacaccatcgagcccgccaccaccagcagcctggccctgttcctgctgctgcagagagaccagagcagcagaaccagaggcctgcccgaggagaaggaggaggtgaccatggacaccagcgagaacagacccgagaacgacgtgcccgagccccccatgcccatcgccgaccaggtgagcaacgacgacagacccgagggcagcgtggaggacgaggagaagaaggagagcagcctgcccaagagcttcaagagaaagatcagcgtggtgagcgccaccaagggcgtgcccgccggcaacagcgacaccgagggcggccagcccggcagaaagagaagatggggcgccagcaccgccaccacccagaagaagcccagcatcagcatcaccaccgagagcctgaagagcctgatccccgacatcaagcccctggccggccaggaggccgtggtggacctgcacgccgacgacagcagaatcagcgaggacgagaccgagagaaacggcgacgacggcacccacgacaagggcctgaagatctgcagaaccgtgacccaggtggtgcccgccgagggccaggagaacggccagagagaggaggaggaggaggagaaggagcccgaggccgagccccccgtgcccccccaggtgagcgtggaggtggccctgcccccccccgccgagcacgaggtgaagaaggtgaccctgggcgacaccctgaccagaagaagcatcagccagcagaagagcggcgtgagcatcaccatcgacgaccccgtgagaaccgcccaggtgcccagcccccccagaggcaagatcagcaacatcgtgcacatcagcaacctggtgagacccttcaccctgggccagctgaaggagctgctgggcagaaccggcaccctggtggaggaggccttctggatcgacaagatcaagagccactgcttcgtgacctacagcaccgtggaggaggccgtggccaccagaaccgccctgcacggcgtgaagtggccccagagcaaccccaagttcctgtgcgccgactacgccgagcaggacgagctggactaccacagaggcctgctggtggacagacccagcgagaccaagaccgaggagcagggcatccccagacccctgcacccccccccccccccccccgtgcagcccccccagcaccccagagccgagcagagagagcaggagagagccgtgagagagcagtgggccgagagagagagagagatggagagaagagagagaaccagaagcgagagagagtgggacagagacaaggtgagagagggccccagaagcagaagcagaagcagagacagaagaagaaaggagagagccaagagcaaggagaagaagagcgagaagaaggagaaggcccaggaggagccccccgccaagctgctggacgacctgttcagaaagaccaaggccgccccctgcatctactggctgcccctgaccgacagccagatcgtgcagaaggaggccgagagagccgagagagccaaggagagagagaagagaagaaaggagcaggaggaggaggagcagaaggagagagagaaggaggccgagagagagagaaacagacagctggagagagagaagagaagagagcacagcagagagagagacagagagagagagagagagagagagagagacagaggcgacagagacagagacagagagagagacagagagagaggcagagagagagacagaagagacaccaagagacacagcagaagcagaagcagaagcacccccgtgagagacagaggcggcagaagatag

SEQ ID NO: 63560 - DNA, 2445 bp, Artificial Sequence
  derived and/or modified sequence
ggcaagatggctcccctgcatgtctccggctgatcgctgccgctccgccaatacaatagagccagccactaccagcagcctggccctcttcctccttctccagagagaccaatccagccgaactcggggtttgcctgaggagaaggaggaagtgaccatggacacaagtgaaaacagacctgaaaatgatgttccagaacctcccatgcctattgcagaccaagtcagcaatgatgaccgcccggagggcagtgttgaagatgaggagaagaaagagagctcgctgcccaaatcattcaagaggaagatctccgttgtctcagctaccaagggggtgccagctggaaacagtgacacagaggggggccagcctggtcggaaacgacgctggggagccagcacagccaccacacagaagaaaccttccatcagtatcaccactgaatcactaaagagcctcatccccgacatcaaacccctggcggggcaggaggctgttgtggatcttcatgctgatgactctcgcatctctgaggatgagacagagcgtaatggcgatgatgggacccatgacaaggggctgaaaatatgccggacagtcactcaggtagtacctgcagagggccaggagaatgggcagagggaagaagaggaagaagagaaggaacctgaagcagaacctcctgtacctccccaggtgtcagtagaggtggccttgcccccacctgcagagcatgaagtaaagaaagtgactttaggagataccttaactcgacgttccattagccagcagaagtccggagtttccattaccattgatgacccagtccgaactgcccaggtgccctccccaccccggggcaagattagcaacattgtccatatctccaatttggtccgtcctttcactttaggccagctaaaggagttgttggggcgcacaggaaccttggtggaagaggccttctggattgacaagatcaaatctcattgctttgtaacgtactcaacagtagaggaagctgttgccacccgcacagctctgcacggggtcaaatggccccagtccaatcccaaattcctttgtgctgactatgccgagcaagatgagctggattatcaccgaggcctcttggtggaccgtccctctgaaactaagacagaggagcagggaataccacggcccctgcaccccccacccccacccccggtccagccaccacagcacccccgggcagagcagcgggagcaggaacgggcagtgcgggaacagtgggcagaacgggaacgggaaatggagcggcgggagcggactcgatcagagcgtgaatgggatcgggacaaagttcgagaagggccccgttcccgatcaaggtcccgtgaccgccgccgcaaggaacgtgcgaagtctaaagaaaagaagagtgagaagaaagagaaagcccaggaggaaccacctgccaagctgctggatgaccttttccgaaagaccaaggcagctccctgcatctattggctcccactgactgacagccagatcgttcagaaagaggcagagcgggccgaacgggccaaggagcgggagaagcggcgaaaggagcaagaagaagaagagcaaaaggagcgggagaaggaagccgagcgggaacggaaccgacagctggagcgagagaaacgtcgggagcacagtcgggagagggacagggagagagagagagaaagggagcgggacaggggggaccgagatcgggatagggaaagggaccgagaacgaggcagggaaagggatcgcagggacaccaagcgccacagcagaagccggagtcggagcacacctgtgcgggaccggggtgggcgccgctagctgggaaaacactagagctgcaggtaccagccactcggccccagggggttatggccacagagggataggcacagtctccaccaccctggagccaagggtctttcacatcacctatccctacatacataccaaatggaaaagtggccatccttttccccccaaacacacccccttaacctatctcttgggacttagcccgaccctccctctcatttcccattaagtctgagaggcaagagctaggttaggcaaggaggtggttggccagagatggggaacagccaggtgccccagtcctctgatttttcctccatcctgcttaccacctccctgggtacttacagccttctcttgggaacagccggggccaggactgggtcacctatgagctgaatcagcatctcctcctgagtcccagggcccctgcagttcccagtctcttctgtcctgcagcccttgcctctttcccacaggttccactttatatccaccttttccttttgttcaatttttatttttattttttttattattaaatgatgtggtctatggaaaaaaaaataaaaatctgacttagtttt

SEQ ID NO: 63561 - DNA, 1845 bp, Artificial Sequence
  derived and/or modified sequence
atgtcaccagccgacaggtgccgatccgccaacaccatcgaaccagcgaccacgtcctccttggcattgttcctgctcttacagcgtgatcagagcagtcgtacacggggcctgcctgaggagaaggaagaggtcacaatggatacgagcgaaaaccgcccagagaacgacgtgcctgagcctccaatgcctatcgcagaccaggttagcaacgacgaccgccccgaggggtccgttgaggatgaagaaaaaaaagaaagctccctccccaaatcttttaaacgaaagattagcgttgtcagcgctacaaagggagtgccagccggaaactctgacacggaaggcgggcagccaggccgcaagaggaggtggggtgcgtcgactgccacaacccagaagaaaccatcaataagcatcactaccgagtcccttaagagtctgataccagacattaagccactggccggacaggaggcagttgtcgacctgcacgcagacgattctagaattagcgaggatgaaaccgaaaggaacggcgacgacggtacacacgataaggggctgaagatatgtaggaccgttacccaggtggtgcctgcagaaggacaggagaacggccagagagaagaggaggaggaggagaaagaaccagaggcagaaccccctgtgccaccacaggtgtccgtcgaagtggctctgcccccccccgcggagcacgaagttaaaaaagtgaccctgggggacactcttactaggaggtctattagccaacaaaaaagtggcgtgtctatcacgatagacgatcccgttcggactgcccaggttccgtcccctccccggggcaaaatttcaaatatagtacatattagcaacctggtacgcccttttacgttgggacagctgaaggagctgttgggaagaaccggcactctcgtcgaggaagccttctggatcgacaagattaagtcccattgttttgtgacatactccaccgtggaagaagcagttgccacgagaacagccttacacggcgtcaaatggccgcaatctaatccaaagtttctctgcgccgactacgctgaacaggatgagctggattaccatcgcggcttgctcgtagaccggccctcagaaacgaagacagaagagcaaggcatccctcgaccgcttcacccaccccccccacctcccgttcaacctccacagcacccccgtgccgaacaacgggaacaagaaagggcagtgcgtgaacaatgggccgaacgcgagagggagatggaacgccgtgagaggacccggtcagagagggaatgggacagggataaggtgcgcgaagggcctaggtctcgatctcggagcagagacaggcggaggaaggagagggccaagagcaaagagaagaaatccgaaaagaaagaaaaggctcaagaagaacctcctgcgaaattgctcgacgatctgtttcggaagacaaaggccgctccttgcatctattggctgccattgacagattcacagatagtgcagaaggaagctgaacgggcggagagagctaaagagagggaaaaacgcaggaaagagcaggaggaagaagaacagaaggagagggagaaggaggctgagcgggagaggaaccggcagctggagcgagagaagcggcgcgaacactctcgggagagagacagagagcgggagagagagcgggagcgagaccgtggagaccgagaccgagacagggagagagatcgagaacgaggacgggaacgggaccggcgcgacactaagcgacacagtcgttccaggtcacgctcaaccccagtccgcgaccgggggggacgacgttag

SEQ ID NO: 63562 - DNA, 1845 bp, Artificial Sequence
  derived and/or modified sequence
atgagccctgctgaccgctgccgcagcgccaacaccattgaaccagccaccaccagcagcctggccctcttcctgctgctgcagagggaccagagcagcaggacccggggcctgcctgaggagaaggaggaggtgaccatggacaccagtgaaaatagaccagaaaatgatgtgcctgagccccccatgcccatcgctgaccaggtgtccaatgatgacaggcctgagggctctgtggaggatgaggagaagaaggagagcagcctgcccaagagcttcaagaggaagatctctgtggtgtctgccaccaagggcgtgcctgctggcaacagcgacacagaaggaggccagcccggcaggaagaggcgctggggcgccagcacagccaccacccagaagaagcccagcatcagcatcaccacagagagcctgaagagcctcatcccagacatcaagcccctggccggccaggaggccgtggtggacctgcatgctgatgacagccgcatcagtgaagatgaaacagaaagaaatggagatgatggcacccatgacaagggcctgaagatctgcaggacagtgacccaggtggtgcctgctgagggccaggagaatggccagcgggaggaggaggaggaggagaaggagcctgaggccgagccccctgtgcccccccaggtgtctgtggaggtggccctgcccccacctgctgagcacgaggtgaagaaggtgaccctgggggacaccctgacccggcgcagcatcagccagcagaagagcggcgtgtccatcaccattgatgatcctgtgaggacagcccaggtgcccagccccccccggggcaagatcagcaacatcgtgcacatcagcaacctggtgcggcccttcaccctgggccagctgaaggagctgctgggccgcacaggcaccctggtggaggaggccttctggattgacaagatcaagagccactgctttgtgacctacagcacagtggaggaggccgtggccaccaggacagccctgcatggagtgaagtggccccagagcaaccccaagttcctgtgtgccgactatgcagagcaggatgagctggactaccaccggggcctgctggtggaccggcccagcgagaccaagacagaggagcagggcatcccccggcccctgcaccccccacctcctcctcctgtgcagcccccccagcaccccagggctgagcagcgggagcaggagagagctgtgcgggagcagtgggccgagcgggagcgggagatggagcggcgggagaggaccaggtctgagcgggagtgggaccgggacaaggtgcgggagggccccaggagccgcagccgcagccgggacagaagaaggaaggagcgggccaagagcaaggagaagaagtctgagaagaaggagaaggcccaggaggagcccccagccaagctgctggatgacctcttcaggaagaccaaggccgccccctgcatctactggctgcccctgacagacagccagatcgtgcagaaggaggccgagagagctgagcgggccaaggagcgggagaagaggaggaaggagcaggaggaggaggagcagaaggagcgggagaaggaggccgagcgggagaggaaccggcagctggagcgggagaagagaagagagcacagccgggagcgggaccgggagcgggagcgggagcgggagcgggacagaggagaccgggaccgggaccgggagcgggaccgggagcggggccgggagcgggacagaagagacaccaagaggcacagccgcagccgcagccgcagcacccctgtgcgggacagaggaggaagaagatag

SEQ ID NO: 63563 - DNA, 1845 bp, Artificial Sequence
  derived and/or modified sequence
atgagccccgccgaccggtgccggagcgccaacaccatcgagcccgctactaccagttcactggcactatttcttctactgcagcgggaccagtcgtcacgaacacgcggtctccctgaagagaaggaggaggtgactatggatacctctgaaaatcgtccagagaacgacgtacctgagcccccaatgcctatcgccgaccaagtcagtaatgatgatcgaccggagggcagtgtggaggatgaggagaagaaggaatcatccctccccaagagcttcaaacgaaagatatcagtggtcagcgcaacaaagggggtccccgccggcaactcagatactgagggaggccagccaggtcggaaacggcggtggggcgcaagcactgccactacccagaaaaaaccctctattagcatcacaacggaaagcttgaagtctcttatccccgacataaagcctctcgctggccaggaggccgtcgtggatctgcacgccgacgacagcagaatcagcgaggatgagacagagcgaaatggagacgatgggactcatgacaaggggttaaagatctgtcgcacagtcacccaagtcgtgcccgccgaagggcaggaaaacgggcagcgcgaagaagaagaagaggagaaggaacccgaggctgaaccacccgtgcccccccaggtttccgtggaggtcgcgctacctccccctgccgaacacgaagttaaaaaagtcacattgggcgacactctcaccagaaggtctatcagtcagcagaaaagtggtgtgtccatcacaatcgatgatcccgttaggaccgctcaggtgccaagcccacctagaggcaagatcagtaatatcgtgcacatatccaacctcgtgcgccctttcaccttaggacagctgaaggagctcctcggacgaactggcaccctcgtggaagaggccttttggatcgataaaatcaagtcccactgctttgtgacttactcgactgtagaggaggcagtggcaacgagaaccgccttacacggcgtcaagtggccgcaatctaatcctaagtttttgtgtgcggactacgcagaacaggatgagttagattaccacagaggcttactcgtagaccgcccaagcgaaacgaagactgaggaacaaggcattccacgcccgctccatcctccccccccaccacccgtgcagcctcctcaacacccgcgagctgaacagcgagagcaggagcgggccgtccgcgagcagtgggcggagcgtgaacgcgaaatggagcgacgggagcggactcggagcgagagggaatgggaccgtgacaaggtgcgggagggaccaaggtcaaggtcaagaagcagggacaggcgccgcaaggaacgagcgaagtccaaggagaaaaagagcgagaagaaggagaaagctcaagaagaaccccccgcaaaacttttggatgatcttttcaggaagaccaaggccgcaccttgtatctactggttaccactcaccgactctcaaatagtccagaaggaggctgagcgcgcagaacgagcaaaggaaagagaaaagcgtaggaaagagcaggaggaggaggaacaaaaagaaagagaaaaagaagctgagagggaacgaaatcgacagttggaacgggagaaaagacgggagcactcccgcgaacgtgaccgcgagcgtgagagggaacgggaaagggataggggggacagggatcgcgaccgggagcgggacagagaaaggggtagggagagggatcggcgggatactaagaggcatagccgttcgcgaagccggtcaactccagtcagggatcgcggtgggagacggtag

SEQ ID NO: 63564 - DNA, 1845 bp, Artificial Sequence
  derived and/or modified sequence
atgtcacccgctgatcggtgccgcagcgctaatactatcgaacctgccaccacgtccagcctggccttgttccttctgctgcagcgagaccagtccagcaggactcgcggtctgcctgaggagaaggaggaagtaactatggacaccagcgagaaccggccagagaacgacgtgcctgaaccacccatgcctattgcggatcaggtcagcaatgatgaccgcccagaagggtccgtggaggatgaagaaaaaaaagaaagctctctacccaagtcattcaaacggaaaatctcagtggtctccgctacaaaaggcgtccccgcaggcaactcggacaccgaaggcggacagcctggcagaaagaggcgatggggtgcatctaccgcaacgactcagaaaaagcctagtatctctataactacggagagcttaaaatcactcataccagatattaaaccattggctggccaggaggcagtggtggatctccacgcggatgacagccggatttccgaggatgagacagaaagaaacggagatgatggcacacacgacaagggattaaaaatatgccgaacggtgactcaggtagttccagctgagggccaggaaaacggccagcgagaagaagaggaggaggaaaaggaacctgaggccgagcctcccgtcccacctcaggtgagcgtcgaggttgccctgccaccccctgccgagcacgaggtcaaaaaggtaacactcggcgataccctgactaggaggtctatcagtcagcagaagagcggggtgagtatcacgattgacgatcctgtgcgtaccgctcaagttccatccccgcctaggggaaaaatctccaatatcgtgcacatctccaatctcgttcgtccgtttacactagggcagctgaaggagctgctcggcagaacagggaccttggtggaagaggccttttggattgataaaatcaaatcccactgttttgtaacgtacagcactgtggaggaggcagtggctactaggactgctctccacggagtgaagtggcctcagtcaaatccgaagtttctatgcgctgactacgcagagcaggatgagctggactaccataggggactccttgttgataggccttcagaaactaagaccgaggaacaaggcatccccaggcccttgcaccccccaccaccaccacccgtccagccaccacagcatccccgagccgagcagcgcgaacaggaacgcgctgtacgggaacagtgggcagaacgagagcgcgaaatggagcggcgagagcgaacccgttcagaacgagagtgggatagggacaaggtgagagagggtccacgttcccgatcccgctccagggacaggagaaggaaagaaagagctaaaagcaaagaaaagaagtccgagaagaaagagaaggcacaggaggaacctcccgcaaagctgctcgacgacttgtttcggaagacaaaggctgcaccctgtatatactggctgccgctaacagatagccagatcgtgcagaaggaggccgaacgcgcagagagagccaaggaacgggagaaacgcagaaaggaacaagaggaggaagagcagaaggaaagagagaaagaagccgagcgggaaagaaatcggcagctcgaaagagaaaaaagacgggaacactccagggaacgggacagggaaagagagagagaacgagagagagacagaggggaccgagaccgggacagggagcgcgaccgagagcggggtagagaacgagatagacgggacactaagcggcactctagatcacggtctcggtcgaccccagtgcgagataggggaggcagacgctag

SEQ ID NO: 63565 - protein, 453 aa, Artificial Sequence
  derived and/or modified sequence
MGPTRKPNVCSRLSRRALGCFSRDAGVVQRTNLGILRALVCQESTKFKNVWTTHSRSPIAYERGRIYFDNYRRCVSSVASEPRKLYEMPKCSKSEKIEDALLWECPVGDILPNSSDYKSSLIALTAHNWLLRISATTGKILEKIYLAPYCKFRYLSWDTPQEVIAVKSAQNRGSAVARQAGIQQHVLLYLAVFRVLPFSLVGILEINKKIFGNVTDATLSHGILIVMYSSGLVRLYSFQTIAEQFMQQKLDLGCACRWGGTTGTVGEAPFGIPCNIKITDMPPLLFEVSSLENAFQIGGHPWHYIVTPNKKKQKGVFHICALKDNSLNENVLTVTASGRVVKKSFNLLDDDPEQETFKIVDYEDELDLLSVVAVTQIDAEGKAHLDFHCNEYGTLLKSIPLVESWDVTYSHEVYFDRDLVLHIEQKPNRVFSCYVYQMICDTGEEEETINRSC

SEQ ID NO: 63566 - DNA, 1362 bp, Artificial Sequence
  derived and/or modified sequence
atgggccccaccagaaagcccaacgtgtgcagcagactgagcagaagagccctgggctgcttcagcagagacgccggcgtggtgcagagaaccaacctgggcatcctgagagccctggtgtgccaggagagcaccaagttcaagaacgtgtggaccacccacagcagaagccccatcgcctacgagagaggcagaatctacttcgacaactacagaagatgcgtgagcagcgtggccagcgagcccagaaagctgtacgagatgcccaagtgcagcaagagcgagaagatcgaggacgccctgctgtgggagtgccccgtgggcgacatcctgcccaacagcagcgactacaagagcagcctgatcgccctgaccgcccacaactggctgctgagaatcagcgccaccaccggcaagatcctggagaagatctacctggccccctactgcaagttcagatacctgagctgggacaccccccaggaggtgatcgccgtgaagagcgcccagaacagaggcagcgccgtggccagacaggccggcatccagcagcacgtgctgctgtacctggccgtgttcagagtgctgcccttcagcctggtgggcatcctggagatcaacaagaagatcttcggcaacgtgaccgacgccaccctgagccacggcatcctgatcgtgatgtacagcagcggcctggtgagactgtacagcttccagaccatcgccgagcagttcatgcagcagaagctggacctgggctgcgcctgcagatggggcggcaccaccggcaccgtgggcgaggcccccttcggcatcccctgcaacatcaagatcaccgacatgccccccctgctgttcgaggtgagcagcctggagaacgccttccagatcggcggccacccctggcactacatcgtgacccccaacaagaagaagcagaagggcgtgttccacatctgcgccctgaaggacaacagcctgaacgagaacgtgctgaccgtgaccgccagcggcagagtggtgaagaagagcttcaacctgctggacgacgaccccgagcaggagaccttcaagatcgtggactacgaggacgagctggacctgctgagcgtggtggccgtgacccagatcgacgccgagggcaaggcccacctggacttccactgcaacgagtacggcaccctgctgaagagcatccccctggtggagagctgggacgtgacctacagccacgaggtgtacttcgacagagacctggtgctgcacatcgagcagaagcccaacagagtgttcagctgctacgtgtaccagatgatctgcgacaccggcgaggaggaggagaccatcaacagaagctgctag

SEQ ID NO: 63567 - DNA, 5623 bp, Artificial Sequence
  derived and/or modified sequence
actaggaactacatttcccggtgagagagcggctccggccggccgcgcggtaccggagcgtcgcactgtcagcggccagagagcctggggcagatcgaaaagggagtgcttcttcccttctctccgcgctctggcggtgcaagcggctctgctttccctcgccccgccgtcgggtgctccctgcccgcctccccgtgtcagctttccctgggccccgccgggaaagtctgggcctcgaaattcgaaggcagcggcggctgcccagcacgggagtgtggggcgcgccactcggcggcccagcctacccagggcccggcccgcgcctccatgggcccgacccggaagcccaacgtgtgcagccggctgagtcgccgggcgctgggctgcttctcgcgcgacgcaggcgtggtgcagaggaccaacctgggcatcctgcgggcgctggtgtgccaggaaagtactaaatttaagaatgtctggacaactcattccaggtcacctatagcctatgagagaggaagaatatattttgacaattatcggcgctgtgtcagcagtgttgcatctgagccaagaaaactttatgaaatgccaaaatgttccaaatcagaaaaaatagaggatgctttattatgggaatgcccagtgggagatatacttcccaattcatcagattataagtcctcactcatagcactgactgctcataattggctacttcgtatatcagcaactacgggaaaaatccttgagaaaatatatcttgcaccttattgcaaattcagatacttgagctgggacactcctcaagaagtcattgcagttaagtcagctcagaacagaggctcagcagtggcccggcaggcaggcattcaacaacatgttttgctgtaccttgcagtgttccgagttctacctttttcacttgtagggattctagagatcaacaaaaagatttttgggaacgttacagatgctaccttgtctcatggaatactgattgtgatgtacagctcaggactggtcagactctatagcttccaaaccatcgctgaacagttcatgcaacagaaacttgacttagggtgtgcatgcagatggggtgggactactggaactgtaggagaggctccttttggcattccttgtaatattaaaatcacagacatgccaccactgctctttgaggtgtcatccctggagaatgcttttcagattggaggccatccttggcactacatcgtcacacctaataagaagaaacagaaaggagttttccatatttgtgccctaaaagacaattccctgaatgaaaatgtactcactgttacagcttctggacgggtggtaaaaaaaagttttaaccttctggatgatgacccagaacaagagactttcaaaattgtggactatgaagatgagttagatttgctttctgtggtagctgttactcaaatagatgctgaaggaaaagctcacctggatttccactgtaatgaatatggaactttacttaaaagcattccactagtggagtcatgggatgtgacatatagccatgaagtctactttgacagagacttggtgctacacatagagcagaaacccaacagagtcttcagctgctatgtttaccagatgatatgtgacactggggaagaagaagaaaccataaacagaagctgttaaaaagagtgagataattgtaacctaagagacttttagccaaacaccccagcagctgcgtccaatccattttattatctgcatggcacattctccagtattttccaaaaaagtcttgtgttgacttcagatgactatgacttcttttttaaactcttgctgtaaaagatggtgaggacttcattttttttaaaggttttttagaatactgttccaagaagtttagtgttttgcagctttgagctaggtggtaatgcaaatataaaatgctgggaacagaaaaggacaggttaattccaattgttgaggagttaagtcattgatggggtgggtcattgatgagttcttaaaggatggtatggaattttgtttgttaaggctaggaaagacagggagagacaaaagtaaacatgcagaaagaaatcttatatcctctataccaaactttgcttaaggatgagaaatgagatgtgttatgtgagaacattattttgagcccaaaatgtgtcatcacagtttttaaaaatcttatatatgtatttatatgtgtttcgtatttgtatatagtatcaggaattggttctagttcccaaattatcttttcttccttggttttgttctcttggcttgatgttcacattgaatatttgtgtttctatataggctaatgtaaaagattccaagcaaaccttaagtgaaattgttttctgatttgcatcctgtttagctcttaatgtatctaaggatgttctcatctcaccattctactcatttagtgagttttctgatcttgtttaggcaatatttgcatacttatgcaataagataaaggtacccttgcctgcagtagttctgtttcctgtagaaaagtggataaagagtcccagaagaagttcttactagcttgggagttacctgattaaccagagaaaatttttggcttacttatggaacaagcattatttcttctttgttaggaaagatctaaatatggtccttgacttttaataatcattctttagaatgttaaataaaggcaacccaagtaaagggagaaaatgtttctttgtgcttcctgtttgagaaattcagttgcttccatttcgcatgttctgcacatttatccgatgtaacctcaaaagaataactggtaataagggaaggaaacagcagcaacaatcattgctgattcaagtttaaggttaaaatatggaatttttagcttggatgatttatattaaaatctttccattttttttttcagttttggcttgatgccatgttaagaatgatgtgaattcttcccagttctgccctggtgctagacattgccccatactttcaattagacactagctgtatctaaatagtcccactcagtaaacttacatcttgaaaaacaagaccagtaagaggccagtgaaagtactaaagaaagaaaccaatgttgtgtgagtttcaaagcagctgcaatgctgtgtaaaagtagagtgttcattctccatttccaagagtgtttcagaataggatgtcttaagacttcagtcatgtcagagatttttttttttaggtgattattgagtttctccttctcctttaagtcatcaccttccttttatgaaatgatagtaaggaactcgtctattctgaaaggcatttgagaaatagctgaattcctggctgcttttttgctgggggtagatggtggaatacttctggtctagatataacttaccactaagaaacccccagtatgtcaccactgcctaaatctaactagaccagggtccaaatgccatccaggccaggcaggaaatatacctcatgtgaaagacagtaaggagttgtgggcagtgtaacaaacaggagagctatgccccaactaaaaggagcagctgctactgcttagtttcagccagttgcaacagtatgtgggaatgtaggctgcatggttgttaacaagatagatggtaaaaagatgccagaagatacagaagatagcaaagaatgtggggaatttggataccacacatagcgagagacaatgaagcatgcttcccagctcgccagagtgtcacacagctgctcattctgccacctgccagacattaatgtcttcctgccctacctaaaccccctctttacctgatattttaattcgagactctagctacatgcccacctacttaacaggtactagtgacaggtacaaaacattatgggtaacaattctgagtgtttaatgcaagcccaggtgaagcagggtagcttccatcagcaggtacagacgttacgctgaaaagaggtgcattctgcattgcactcctggatctaagtttctgcattctcagagcatcaatgcagcaagcttattgttcctcaattttttacaatatttatcacaactctgggagaaaacaaaacaaatcctatcctatttactatttgtgctacctagtgaggagataccgctctgtttagacaaattaaggcacttcacattcttccaccaattgaaagttttgtatcttacagttctttttttaaataatatatttattgagcactttctatctactagtcactgtgatacagtataagtaaagtgggttgtctcatttaatattcagaataaccacatgaagtatgaactgccattatctttcccctttgtacaaatgaggaaagtgaggctcacagaagttaattggcccagggtcccacaactagtcagtgcagaggtgggaaacataaccagatttgttcggcatgaacttgtgccaaatttcctccaaagttctcaaaaggcaaggcatgttattttatcccaatttagcataccaacaactataatactagatatgtaggaaagtgcttaataatcgttttttactgatgattcagtgtctaaattttgaacaaatttgggtaagatacaagtcacacataaattgacagaaaatgtagttcttcattcaatggttagcagtcattaaaaggtactttccctttgtttgtggtgataatcagtattagtagttttcatattatttggcttccatattaatcatttttatattttcttctccttcttaccatgtttacttatatcatccatcttttagaatcccagggagctaatttctggtccctgtgttgctatcaaatctgtatcttgcagaaagaataatttatttcaaacaagggacatacaatagaaagataagacctactgaggtctttttcccatcattttattatgaaaaatgttcaaacatacagtaaaattgaaagaattttatagtaaatactgaccacggggattctacatcttactctacttgttttattattttcctatccagcgtactttttgatggatttcaaaataaattgcagttgctgatatacttccccctagtacttcaactgcagattattaactagagtttagtatttatttagtttttaaatttttttgatttaagatttacctgcaataaaatgtacaaatcttaagtataaatttactgagttcttgcagacatatacacctgtgtaacccaaaccctttccaaaatttagaccattgcaatcatcttcagaaagtttcctaaatccctctcccagtctatcccctccccacccctcaggtataactactgttctcattcttttatatcaaaggttaaatttacctgttctaaacttcatatgagtgaaattatacaaaatgtaatgcttctttcacttagcataatgtttttgagatttattcatgttgttgcatgtgtcagtgattcatttctttttattgctgagtattctttcgtatgaatatatcacagtttgtttttttatctttctgttgatggacactgggctctttctgcttgttttttactgttatgaataaagctgctatgaacattcttag

SEQ ID NO: 63568 - DNA, 1362 bp, Artificial Sequence
  derived and/or modified sequence
atgggccctaccaggaaacctaatgtgtgctcccgtctgtcccgcagggccctcggctgtttttcacgtgatgctggcgtggttcagcggacaaatctcgggatcctgagggctctagtttgtcaggagagtaccaagtttaaaaacgtgtggactacacattccaggtcacccattgcatacgaacgcggcagaatatatttcgacaactataggcgatgtgtcagctccgtcgcctcagagccaagaaagctctatgagatgcctaagtgctccaaatctgagaaaattgaagatgcccttttgtgggagtgccctgttggcgatatactacctaacagcagtgactataagtcctctcttatcgcattaaccgcacacaattggctgctgcggatctctgccacaactggaaaaattttggagaagatctatcttgcgccttactgtaagttcagatacctctcgtgggataccccacaggaagtaatcgcagtgaagagtgctcaaaaccgcggctccgccgtggcccgccaggccggcatccagcaacatgtcttgctttatttagccgtgtttagggtgctccctttcagtcttgtaggaatcctcgaaataaataagaagatattcggaaacgtgacagacgccaccctcagccacgggatcctcattgttatgtattcctctggccttgtgcgcctctactcttttcagacaattgccgaacagtttatgcagcaaaagctggatctggggtgtgcctgccgctggggggggacaactggaacggtgggggaggcaccctttgggataccctgcaatatcaaaatcactgatatgcccccccttttattcgaggtgagcagtcttgaaaacgctttccaaattggaggccatccctggcattacatcgtcactcccaacaagaagaaacaaaaaggggtcttccacatttgtgccctgaaggacaatagtctgaacgaaaacgtcctcaccgtgaccgctagcgggagggtcgtgaaaaaatcttttaacctcctggatgacgaccccgagcaggaaacctttaaaatcgtggactacgaagacgagctggatctgctgtcggtggtcgcagtcactcaaattgacgccgagggcaaggcccacctggacttccactgcaatgagtacggcactctgctcaagtccatcccactggtggaatcctgggacgtgacatattcacacgaggtgtacttcgatcgcgatctcgtactgcatatagagcagaagcccaacagagtctttagttgctacgtgtatcagatgatttgcgacacaggagaagaggaagaaaccatcaataggagctgctag

SEQ ID NO: 63569 - DNA, 1362 bp, Artificial Sequence
  derived and/or modified sequence
atgggccccaccaggaagcccaacgtgtgcagccggctgagcagaagagccctgggctgcttcagcagagatgctggggtggtgcagaggaccaacctgggcatcctgcgggccctggtgtgccaggagagcaccaagttcaagaatgtgtggaccacccacagccgcagccccatcgcctatgagcggggccgcatctactttgacaactaccgccgctgtgtgtcctctgtggccagcgagcccaggaagctgtatgagatgcccaagtgcagcaagtctgagaagattgaagatgccctgctgtgggagtgccctgtgggggacatcctgcccaacagcagtgactacaagagcagcctcatcgccctgacagcccacaactggctgctgcgcatcagcgccaccaccgggaagatcctggagaagatctacctggccccctactgcaagttccgctacctgtcctgggacaccccccaggaggtgattgctgtgaagagcgcccagaacagaggcagcgctgtggcccggcaggccggcatccagcagcacgtgctgctgtacctggccgtgttccgggtgctgcccttcagcctggtgggcatcctggagatcaacaagaagatctttggaaatgtgacagatgccaccctgagccacggcatcctgattgtgatgtacagcagcggcctggtgcggctgtacagcttccagaccatcgccgagcagttcatgcagcagaagctggacctgggctgtgcctgccgctggggcggcaccaccggcaccgtgggggaggcccccttcggcatcccctgcaacatcaagatcacagacatgccacccctgctgtttgaggtgagcagcctggagaatgccttccagattggaggccacccctggcactacatcgtgacccccaacaagaagaagcagaagggcgtcttccacatctgtgccctgaaggacaacagcctgaatgaaaatgtgctgactgtgacagccagcggccgggtggtgaagaagagcttcaacctgctggatgatgatcctgagcaggagaccttcaagatcgtggactatgaagatgagctggacctgctgtctgtggtggccgtgacccagattgatgctgagggcaaggcccacctggacttccactgcaatgaatatggcaccctgctgaagagcatccccctggtggagagctgggatgtgacctacagccatgaggtgtactttgaccgggacctggtgctgcacatcgagcagaagcccaacagagtcttcagctgctacgtgtaccagatgatctgtgacaccggggaggaggaggagaccatcaacagaagctgctag

SEQ ID NO: 63570 - DNA, 1362 bp, Artificial Sequence
  derived and/or modified sequence
atgggccccacccggaagcccaacgtgtgcagccggctgagccggcgcgctctcggctgctttagtagagatgctggtgtggtgcagcggactaaccttggcattctgcgcgcgcttgtttgtcaggagagtaccaaattcaagaacgtttggaccacacactccagatccccaattgcctacgagagagggaggatatatttcgataactacaggaggtgtgtgtcctcagtcgctagtgaacccagaaagctctacgagatgccaaaatgctcgaagtccgagaagattgaggacgcattgctgtgggagtgtccagtcggcgacatcctgccgaatagctcggactataaatccagtctgattgccctgaccgctcacaactggcttctgcggatctctgcaaccaccggaaaaatccttgaaaaaatttacctggccccatattgcaaatttagatatctgtcctgggacactcctcaggaggtcatcgccgtaaagtcggcccaaaatcgcggctcagctgtggctcggcaagccggcattcagcagcacgtgctcctttaccttgccgtctttcgggtgctgccgttttcactcgtgggtatccttgaaatcaataaaaagattttcgggaatgtcacagacgctacgctgtcccatggcatactgatcgtgatgtattcctcaggactggtccggctgtattcttttcagaccattgcggaacagtttatgcagcagaaacttgaccttggctgtgcatgtcggtggggcggtactacaggcacagtcggggaagccccgtttggaatcccttgtaatatcaaaataactgacatgccacctctgctgtttgaggtcagctccctcgagaacgcgtttcagattggggggcatccttggcactacatcgttacacccaacaagaagaagcagaaaggtgtcttccacatttgcgcgcttaaagataatagccttaacgaaaacgtcctgactgtgacagcgtcagggagggtcgtcaaaaaatcattcaatctactggatgatgatcccgaacaagaaaccttcaaaatcgtagattacgaagatgagctagacctgctgtctgtcgtggcggtgacgcaaatagatgcggaaggaaaagctcatttagatttccactgtaatgagtacggcaccctgctgaagagcataccccttgttgaatcatgggacgtgacctattctcatgaggtttattttgacagggatcttgtcctccatatcgaacagaagccaaatcgtgtgtttagctgctacgtgtaccagatgatctgcgatacgggcgaggaggaggagacaataaacaggtcatgttag

SEQ ID NO: 63571 - DNA, 1362 bp, Artificial Sequence
  derived and/or modified sequence
atgggccctaccagaaaacctaacgtatgcagccgcttgtctaggagagcacttggatgtttcagccgagacgcaggggttgtgcagaggactaacctcggaatcctccgcgcactggtgtgccaagagtccactaaatttaaaaacgtgtggacaactcattcgcggagccccatagcctatgaacgtggacgtatttattttgacaattatcgtaggtgcgtgtctagcgtggcttccgagccacggaagctgtacgagatgcctaagtgctctaaaagcgagaagatcgaggatgcactcctgtgggaatgcccagtcggcgatatccttcctaactctagcgattacaagtctagcttaattgctctgactgcacacaactggctcctgcgtatttcggcaacaaccgggaaaattctagagaaaatttacctcgccccttattgcaagttccggtatttgtcatgggacacgccccaggaggttatcgcggttaagtcagcgcagaatcgcggtagcgccgtggctcgccaggcgggtattcagcagcatgtcttgctctatttggcggtcttccgggtattgccgttctccttagtcgggattcttgagatcaataagaagatcttcggaaacgtgacagatgcgactcttagtcacggtatcctgatcgtgatgtacagcagtggcctcgtgaggctttatagcttccagacaatcgctgaacagttcatgcagcagaagctggatctgggatgtgcctgtcggtggggcggaacaacggggaccgtgggagaggcccctttcggcatcccttgcaacatcaagatcacggatatgcctccactccttttcgaggtgtctagtctggaaaacgcttttcagattggcggtcatccttggcactacatcgtgactccaaacaaaaagaagcaaaaaggagtgtttcacatttgcgcactcaaggataactccctcaacgaaaatgtcctcacggtaacagcttctggacgcgttgtgaagaagtccttcaacttactggacgatgatccggagcaggaaaccttcaaaattgtggactacgaagatgagttagatctgctgagcgtagtcgccgtaacgcagatagacgccgagggaaaagcccacctcgacttccattgcaatgagtacgggacactgcttaagtccattcctttagtggaatcctgggatgttacttatagtcatgaagtctatttcgacagagatctcgtcttgcatatcgagcaaaaacccaaccgcgtgtttagctgctacgtctatcaaatgatctgtgacactggagaggaggaggagactatcaatcggtcatgctag

SEQ ID NO: 63572 - protein, 95 aa, Artificial Sequence
  derived and/or modified sequence
MELVLVFLCSLLAPMVLASAAEKEKEMDPFHYDYQTLRIGGLVFAVVLFSVGILLILSRRCKCSFNQKPRAPGDEEAQVENLITANATEPQKAEN

SEQ ID NO: 63573 - DNA, 1926 bp, Artificial Sequence
  derived and/or modified sequence
agccagcccgactcctaggaggaggggaggcgggaaagcagctcaagcctcacccaccgccctgcccccagccccgccactcccaggctcctcgggactcggcgggtcctcctgggagtctcggaggggaccggctgtgcagagaacttcagccaaagcatctgagacgggaagcagaaaaaggagggacagtttggagaagaaaaacgcagctgtgtgtttgggccttgacgtggctgtggatgcagtcgttctgacccctggtggccgagaggtgaagtgcagtggcggctgcttgctcaaggccggaggaagacgccatggagttggtgctggtcttcctctgcagcctgctggcccccatggtcctggccagtgcagctgaaaaggagaaggaaatggacccttttcattatgattaccagaccctgaggattgggggactggtgttcgctgtggtcctcttctcggttgggatcctccttatcctaagtcgcaggtgcaagtgcagtttcaatcagaagccccgggccccaggagatgaggaagcccaggtggagaacctcatcaccgccaatgcaacagagccccagaaagcagagaactgaagtgcagccatcaggtggaagcctctggaacctgaggcggctgcttgaacctttggatgcaaatgtcgatgcttaagaaaaccggccacttcagcaacagccctttccccaggagaagccaagaacttgtgtgtcccccaccctatcccctctaacaccattcctccacctgatgatgcaactaacacttgcctccccactgcagcctgcggtcctgcccacctcccgtgatgtgtgtgtgtgtgtgtgtgtgtgtgactgtgtgtgtttgctaactgtggtctttgtggctacttgtttgtggatggtattgtgtttgttagtgaactgtggactcgctttcccaggcaggggctgagccacatggccatctgctcctccctgcccccgtggccctccatcaccttctgctcctaggaggctgcttgttgcccgagaccagccccctcccctgatttagggatgcgtagggtaagagcacgggcagtggtcttcagtcgtcttgggacctgggaaggtttgcagcactttgtcatcattcttcatggactcctttcactcctttaacaaaaaccttgcttccttatcccacctgatcccagtctgaaggtctcttagcaactggagatacaaagcaaggagctggtgagcccagcgttgacgtcaggcaggctatgcccttccgtggttaatttcttcccaggggcttccacgaggagtccccatctgccccgccccttcacagagcgcccggggattccaggcccagggcttctactctgcccctggggaatgtgtcccctgcatatcttctcagcaataactccatgggctctgggaccctaccccttccaaccttccctgcttctgagacttcaatctacagcccagctcatccagatgcagactacagtccctgcaattgggtctctggcaggcaatagttgaaggactcctgttccgttggggccagcacaccgggatggatggagggagagcagaggcctttgcttctctgcctacgtccccttagatgggcagcagaggcaactcccgcatcctttgctctgcctgtcagtggtcagagcggtgagcgaggtgggttggagactcagcaggctccgtgcagcccttgggaacagtgagaggttgaaggtcataacgagagtgggaactcaacccagatcccgcccctcctgtcctctgtgttcccgcggaaaccaaccaaaccgtgcgctgtgacccattgctgttctctgtatcgtgatctatcctcaacaacaacagaaaaaaggaataaaatatcctttgtttccta

SEQ ID NO: 63574 - DNA, 1033 bp, Artificial Sequence
  derived and/or modified sequence
agtctcctcctcgactcctctctggaacattgctggctgggcggggcgggcaatcatttcaagttaggtgatttaacaataattgatgcttaattgtttatttgatgggcatttaaaatgcaaattgagggaactggttgcattttccactgatggatctgtggcctctggtcgacccaaagcacttgttttaaaaggcagctttaaaagcccttgatggttgtttgtttgctctgaggctctgaaccagagaagcccagctcctgttacagattcatcaaatgccggaaagacgccatggagttggtgctggtcttcctctgcagcctgctggcccccatggtcctggccagtgcagctgaaaaggagaaggaaatggacccttttcattatgattaccagaccctgaggattgggggactggtgttcgctgtggtcctcttctcggttgggatcctccttatcctaagtcgcaggtgcaagtgcagtttcaatcagaagccccgggccccaggagatgaggaagcccaggtggagaacctcatcaccgccaatgcaacagagccccagaaagcagagaactgaagtgcagccatcaggtggaagcctctggaacctgaggcggctgcttgaacctttggatgcaaatgtcgatgcttaagaaaaccggccacttcagcaacagccctttccccaggagaagccaagaacttgtgtgtcccccaccctatcccctctaacaccattcctccacctgatgatgcaactaacacttgcctccccactgcagcctgcggtcctgcccacctcccgtgatgtgtgtgtgtgtgtgtgtgtgtgtgactgtgtgtgtttgctaactgtggtctttgtggctacttgtttgtggatggtattgtgtttgttagtgaactgtggactcgctttcccaggcaggggctgagccacatggccatctgctcctccctgcccccgtggccctccatcaccttctgctcctaggaggctgcttgttgcccgagaccagccccct

SEQ ID NO: 63575 - DNA, 2171 bp, Artificial Sequence
  derived and/or modified sequence
aattaccaaggctcccaattaacgtgggctgctgtgtctggtgctgggttattttctcctatttttccgttcctcggggtttactattgcagagagacaccaggtctgtcattgtgcctgtcttgctcccttcccaccctaaccagagggaaaccgaaaagcaacagctgatggcaaatccgctccggcgcttgcacgcctcctcggcggcagtctcctgttgcttctcggagcttgactgccctttggaaaaatctctccgcccctcgagaggagagaggagcagaggacgcgcgcgagcacagagcgggaggacggacagggagaggaggagagggggtctgcgcgcggccgctacccagaagccagcggacggcagcacggagtgggctgtccccgagcccagccccgagcgagccccccccccgcccccgcaggacgcgcctcccagccagcccgactcctaggaggaggggaggcgggaaagcagctcaagcctcacccaccgccctgcccccagccccgccactcccaggctcctcgggactcggcgggtcctcctgggagtctcggaggggaccggctgtgcagacgccatggagttggtgctggtcttcctctgcagcctgctggcccccatggtcctggccagtgcagctgaaaaggagaaggaaatggacccttttcattatgattaccagaccctgaggattgggggactggtgttcgctgtggtcctcttctcggttgggatcctccttatcctaagtcgcaggtgcaagtgcagtttcaatcagaagccccgggccccaggagatgaggaagcccaggtggagaacctcatcaccgccaatgcaacagagccccagaaagcagagaactgaagtgcagccatcaggtggaagcctctggaacctgaggcggctgcttgaacctttggatgcaaatgtcgatgcttaagaaaaccggccacttcagcaacagccctttccccaggagaagccaagaacttgtgtgtcccccaccctatcccctctaacaccattcctccacctgatgatgcaactaacacttgcctccccactgcagcctgcggtcctgcccacctcccgtgatgtgtgtgtgtgtgtgtgtgtgtgtgactgtgtgtgtttgctaactgtggtctttgtggctacttgtttgtggatggtattgtgtttgttagtgaactgtggactcgctttcccaggcaggggctgagccacatggccatctgctcctccctgcccccgtggccctccatcaccttctgctcctaggaggctgcttgttgcccgagaccagccccctcccctgatttagggatgcgtagggtaagagcacgggcagtggtcttcagtcgtcttgggacctgggaaggtttgcagcactttgtcatcattcttcatggactcctttcactcctttaacaaaaaccttgcttccttatcccacctgatcccagtctgaaggtctcttagcaactggagatacaaagcaaggagctggtgagcccagcgttgacgtcaggcaggctatgcccttccgtggttaatttcttcccaggggcttccacgaggagtccccatctgccccgccccttcacagagcgcccggggattccaggcccagggcttctactctgcccctggggaatgtgtcccctgcatatcttctcagcaataactccatgggctctgggaccctaccccttccaaccttccctgcttctgagacttcaatctacagcccagctcatccagatgcagactacagtccctgcaattgggtctctggcaggcaatagttgaaggactcctgttccgttggggccagcacaccgggatggatggagggagagcagaggcctttgcttctctgcctacgtccccttagatgggcagcagaggcaactcccgcatcctttgctctgcctgtcagtggtcagagcggtgagcgaggtgggttggagactcagcaggctccgtgcagcccttgggaacagtgagaggttgaaggtcataacgagagtgggaactcaacccagatcccgcccctcctgtcctctgtgttcccgcggaaaccaaccaaaccgtgcgctgtgacccattgctgttctctgtatcgtgatctatcctcaacaacaacag

SEQ ID NO: 63576 - DNA, 1799 bp, Artificial Sequence
  derived and/or modified sequence
atgctccaagtcgcgtcacaggcagggttgccgagccaggatttatttacatcttcacattcaaagttcgtcatcatgaattttgactcttggggactgggctgaggacggggtggtactgctcctggcagggccagaggtggatggggcttgaaaagggggttcaaggcagcagatctatggttcagacgccatggagttggtgctggtcttcctctgcagcctgctggcccccatggtcctggccagtgcagctgaaaaggagaaggaaatggacccttttcattatgattaccagaccctgaggattgggggactggtgttcgctgtggtcctcttctcggttgggatcctccttatcctaagtcgcaggtgcaagtgcagtttcaatcagaagccccgggccccaggagatgaggaagcccaggtggagaacctcatcaccgccaatgcaacagagccccagaaagcagagaactgaagtgcagccatcaggtggaagcctctggaacctgaggcggctgcttgaacctttggatgcaaatgtcgatgcttaagaaaaccggccacttcagcaacagccctttccccaggagaagccaagaacttgtgtgtcccccaccctatcccctctaacaccattcctccacctgatgatgcaactaacacttgcctccccactgcagcctgcggtcctgcccacctcccgtgatgtgtgtgtgtgtgtgtgtgtgtgtgactgtgtgtgtttgctaactgtggtctttgtggctacttgtttgtggatggtattgtgtttgttagtgaactgtggactcgctttcccaggcaggggctgagccacatggccatctgctcctccctgcccccgtggccctccatcaccttctgctcctaggaggctgcttgttgcccgagaccagccccctcccctgatttagggatgcgtagggtaagagcacgggcagtggtcttcagtcgtcttgggacctgggaaggtttgcagcactttgtcatcattcttcatggactcctttcactcctttaacaaaaaccttgcttccttatcccacctgatcccagtctgaaggtctcttagcaactggagatacaaagcaaggagctggtgagcccagcgttgacgtcaggcaggctatgcccttccgtggttaatttcttcccaggggcttccacgaggagtccccatctgccccgccccttcacagagcgcccggggattccaggcccagggcttctactctgcccctggggaatgtgtcccctgcatatcttctcagcaataactccatgggctctgggaccctaccccttccaaccttccctgcttctgagacttcaatctacagcccagctcatccagatgcagactacagtccctgcaattgggtctctggcaggcaatagttgaaggactcctgttccgttggggccagcacaccgggatggatggagggagagcagaggcctttgcttctctgcctacgtccccttagatgggcagcagaggcaactcccgcatcctttgctctgcctgtcagtggtcagagcggtgagcgaggtgggttggagactcagcaggctccgtgcagcccttgggaacagtgagaggttgaaggtcataacgagagtgggaactcaacccagatcccgcccctcctgtcctctgtgttcccgcggaaaccaaccaaaccgtgcgctgtgacccattgctgttctctgtatcgtgatctatcctcaacaacaacagaaaaaaggaataaaatatcctttgtttccta

SEQ ID NO: 63577 - DNA, 2130 bp, Artificial Sequence
  derived and/or modified sequence
aaccgaaaagcaacagctgatggcaaatccgctccggcgcttgcacgcctcctcggcggcagtctcctgttgcttctcggagcttgactgccctttggaaaaatctctccgcccctcgagaggagagaggagcagaggacgcgcgcgagcacagagcgggaggacggacagggagaggaggagagggggtctgcgcgcggccgctacccagaagccagcggacggcagcacggagtgggctgtccccgagcccagccccgagcgagccccccccccgcccccgcaggacgcgcctcccagccagcccgactcctaggaggaggggaggcgggaaagcagctcaagcctcacccaccgccctgcccccagccccgccactcccaggctcctcgggactcggcgggtcctcctgggagtctcggaggggaccggctgtgcagagaacttcagccaaagcatctgagacgggaagcagaaaaaggagggacagtttggagaagaaaaacgcagctgtgtacgccatggagttggtgctggtcttcctctgcagcctgctggcccccatggtcctggccagtgcagctgaaaaggagaaggaaatggacccttttcattatgattaccagaccctgaggattgggggactggtgttcgctgtggtcctcttctcggttgggatcctccttatcctaagtcgcaggtgcaagtgcagtttcaatcagaagccccgggccccaggagatgaggaagcccaggtggagaacctcatcaccgccaatgcaacagagccccagaaagcagagaactgaagtgcagccatcaggtggaagcctctggaacctgaggcggctgcttgaacctttggatgcaaatgtcgatgcttaagaaaaccggccacttcagcaacagccctttccccaggagaagccaagaacttgtgtgtcccccaccctatcccctctaacaccattcctccacctgatgatgcaactaacacttgcctccccactgcagcctgcggtcctgcccacctcccgtgatgtgtgtgtgtgtgtgtgtgtgtgtgactgtgtgtgtttgctaactgtggtctttgtggctacttgtttgtggatggtattgtgtttgttagtgaactgtggactcgctttcccaggcaggggctgagccacatggccatctgctcctccctgcccccgtggccctccatcaccttctgctcctaggaggctgcttgttgcccgagaccagccccctcccctgatttagggatgcgtagggtaagagcacgggcagtggtcttcagtcgtcttgggacctgggaaggtttgcagcactttgtcatcattcttcatggactcctttcactcctttaacaaaaaccttgcttccttatcccacctgatcccagtctgaaggtctcttagcaactggagatacaaagcaaggagctggtgagcccagcgttgacgtcaggcaggctatgcccttccgtggttaatttcttcccaggggcttccacgaggagtccccatctgccccgccccttcacagagcgcccggggattccaggcccagggcttctactctgcccctggggaatgtgtcccctgcatatcttctcagcaataactccatgggctctgggaccctaccccttccaaccttccctgcttctgagacttcaatctacagcccagctcatccagatgcagactacagtccctgcaattgggtctctggcaggcaatagttgaaggactcctgttccgttggggccagcacaccgggatggatggagggagagcagaggcctttgcttctctgcctacgtccccttagatgggcagcagaggcaactcccgcatcctttgctctgcctgtcagtggtcagagcggtgagcgaggtgggttggagactcagcaggctccgtgcagcccttgggaacagtgagaggttgaaggtcataacgagagtgggaactcaacccagatcccgcccctcctgtcctctgtgttcccgcggaaaccaaccaaaccgtgcgctgtgacccattgctgttctctgtatcgtgatctatcctcaacaacaacagaaaaaaggaataaaatatcctttgtttcctagtg

SEQ ID NO: 63578 - DNA, 2151 bp, Artificial Sequence
  derived and/or modified sequence
aaccgaaaagcaacagctgatggcaaatccgctccggcgcttgcacgcctcctcggcggcagtctcctgttgcttctcggagcttgactgccctttggaaaaatctctccgcccctcgagaggagagaggagcagaggacgcgcgcgagcacagagcgggaggacggacagggagaggaggagagggggtctgcgcgcggccgctacccagaagccagcggacggcagcacggagtgggctgtccccgagcccagccccgagcgagccccccccccgcccccgcaggacgcgcctcccagccagcccgactcctaggaggaggggaggcgggaaagcagctcaagcctcacccaccgccctgcccccagccccgccactcccaggctcctcgggactcggcgggtcctcctgggagtctcggaggggaccggctgtgcaggtttgggccttgacgtggctgtggatgcagtcgttctgacccctggtggccgagaggtgaagtgcagtggcggctgcttgctcaaggccggaggaagacgccatggagttggtgctggtcttcctctgcagcctgctggcccccatggtcctggccagtgcagctgaaaaggagaaggaaatggacccttttcattatgattaccagaccctgaggattgggggactggtgttcgctgtggtcctcttctcggttgggatcctccttatcctaagtcgcaggtgcaagtgcagtttcaatcagaagccccgggccccaggagatgaggaagcccaggtggagaacctcatcaccgccaatgcaacagagccccagaaagcagagaactgaagtgcagccatcaggtggaagcctctggaacctgaggcggctgcttgaacctttggatgcaaatgtcgatgcttaagaaaaccggccacttcagcaacagccctttccccaggagaagccaagaacttgtgtgtcccccaccctatcccctctaacaccattcctccacctgatgatgcaactaacacttgcctccccactgcagcctgcggtcctgcccacctcccgtgatgtgtgtgtgtgtgtgtgtgtgtgtgactgtgtgtgtttgctaactgtggtctttgtggctacttgtttgtggatggtattgtgtttgttagtgaactgtggactcgctttcccaggcaggggctgagccacatggccatctgctcctccctgcccccgtggccctccatcaccttctgctcctaggaggctgcttgttgcccgagaccagccccctcccctgatttagggatgcgtagggtaagagcacgggcagtggtcttcagtcgtcttgggacctgggaaggtttgcagcactttgtcatcattcttcatggactcctttcactcctttaacaaaaaccttgcttccttatcccacctgatcccagtctgaaggtctcttagcaactggagatacaaagcaaggagctggtgagcccagcgttgacgtcaggcaggctatgcccttccgtggttaatttcttcccaggggcttccacgaggagtccccatctgccccgccccttcacagagcgcccggggattccaggcccagggcttctactctgcccctggggaatgtgtcccctgcatatcttctcagcaataactccatgggctctgggaccctaccccttccaaccttccctgcttctgagacttcaatctacagcccagctcatccagatgcagactacagtccctgcaattgggtctctggcaggcaatagttgaaggactcctgttccgttggggccagcacaccgggatggatggagggagagcagaggcctttgcttctctgcctacgtccccttagatgggcagcagaggcaactcccgcatcctttgctctgcctgtcagtggtcagagcggtgagcgaggtgggttggagactcagcaggctccgtgcagcccttgggaacagtgagaggttgaaggtcataacgagagtgggaactcaacccagatcccgcccctcctgtcctctgtgttcccgcggaaaccaaccaaaccgtgcgctgtgacccattgctgttctctgtatcgtgatctatcctcaacaacaacagaaaaaaggaataaaatatcctttgtttcctagtg

SEQ ID NO: 63579 - DNA, 288 bp, Artificial Sequence
  derived and/or modified sequence
atggagcttgtgctggtctttctgtgttccctgctcgcacccatggttctcgcttccgctgcggaaaaagagaaagagatggacccattccactacgattaccaaacgctgagaatcggaggtctcgtctttgccgtggtgctgtttagcgttggcatcctattaatcctctcacggaggtgcaagtgcagcttcaatcagaagcctagggccccgggcgatgaagaggcccaagtggagaacctgattacggctaatgcaaccgagccacagaaagccgaaaactag

SEQ ID NO: 63580 - DNA, 288 bp, Artificial Sequence
  derived and/or modified sequence
atggagcttgtgctggtcttcctgtgctctttgttggccccgatggtgctggcgtccgcagctgagaaagaaaaggagatggacccgttccattacgattatcagaccctgcgcattggaggactcgttttcgcggtcgtcctcttcagcgtcggcattctgctgatcttatcacgtaggtgtaagtgtagcttcaatcagaagccccgcgcccctggagatgaagaggcacaagtcgagaacctgatcacggccaacgctactgagccgcaaaaggctgagaactag

SEQ ID NO: 63581 - DNA, 288 bp, Artificial Sequence
  derived and/or modified sequence
atggagctcgtgttggtgttcctctgtagcttactcgctcccatggtcctggcctcagcggcagagaaggagaaggagatggacccattccactacgactatcagacactgaggatagggggtctggtgttcgcggtggtgctcttttcagtgggcatcttgctcatcttgagccggagatgcaagtgttcttttaatcagaagccacgagcacctggggatgaggaggcccaggtagaaaatttgataaccgcaaacgctactgagccacagaaggccgaaaactag

SEQ ID NO: 63582 - DNA, 288 bp, Artificial Sequence
  derived and/or modified sequence
atggaactcgtgctggtgttcctgtgttccttgcttgcccctatggtcctggctagtgcggccgaaaaagagaaggaaatggacccattccattatgactaccagacattgagaatcggtggactggtgtttgccgtggttctctttagcgttgggatcctcctgatcctttcgaggagatgtaagtgctcctttaaccagaaaccacgagctcctggtgacgaggaggcgcaggttgagaatttgatcaccgccaatgcaacggaaccacagaaagccgaaaattag

SEQ ID NO: 63583 - DNA, 288 bp, Artificial Sequence
  derived and/or modified sequence
atggagctcgtcctcgtgtttctgtgctccctgctagctccaatggttctggcttcggctgctgagaaggagaaagagatggatccttttcactacgattaccagaccctgagaatcggcggactggttttcgctgtagtccttttctcagtgggaattctgctgattctgtccagaaggtgcaagtgcagctttaaccagaaaccgagagctcccggcgatgaggaagcccaggtcgaaaatctcattaccgccaatgcaaccgagccacagaaggcagagaactag

SEQ ID NO: 63584 - DNA, 288 bp, Artificial Sequence
  derived and/or modified sequence
atggagctggttctggtatttttgtgtagtctcttagcgcccatggtactcgcaagcgctgctgaaaaggagaaggagatggaccctttccattacgactaccagacactgaggatcggaggcttagtctttgctgtggttctattctcagtgggaattcttctgatcctcagccggcgttgcaaatgtagctttaatcagaaacccagggccccgggagacgaggaggctcaggtcgagaaccttatcacggcaaacgctacagagccccaaaaagcagagaattag

SEQ ID NO: 63585 - DNA, 288 bp, Artificial Sequence
  derived and/or modified sequence
atggagctggtgctggtgttcctgtgcagcctgctggcccccatggtgctggccagcgctgctgagaaggagaaggagatggaccccttccactatgactaccagaccctgagaattggaggcctggtgtttgctgtggtgctcttctctgtgggcatcctgctgatcctgagccgccgctgcaagtgcagcttcaaccagaagccccgggcccctggagatgaggaggcccaggtggagaacctgatcacagccaatgccacagagccccagaaggccgagaactag

SEQ ID NO: 63586 - DNA, 288 bp, Artificial Sequence
  derived and/or modified sequence
atggagctggtgctggtgttcctgtgcagcctgctggcccccatggtgctggcttcagcggccgaaaaggaaaaggagatggatccatttcactatgactaccagaccctgcgtatcggaggactggttttcgccgtggtgctgttctctgtgggtattctgttgatcctaagtcgtcgctgcaaatgtagcttcaatcagaagccaagggccccaggcgacgaggaagctcaggtggaaaatctgattaccgccaacgccacagaaccgcaaaaagcggaaaactag

SEQ ID NO: 63587 - DNA, 288 bp, Artificial Sequence
  derived and/or modified sequence
atggagctggtgctggtgttcctgtgcagcctgctggcccccatggtccttgcctcagcggccgagaaggagaaggagatggacccgtttcattacgactatcaaacccttaggatcggtggtttggtctttgcagtcgtgctctttagtgtaggcatcctgcttatcttatctagaagatgcaaatgctccttcaaccaaaaacctcgtgcacctggggatgaagaagcacaggtagagaatcttattaccgcgaacgccacagagcctcagaaggctgaaaattag

SEQ ID NO: 63588 - DNA, 288 bp, Artificial Sequence
  derived and/or modified sequence
atggagctggtgctggtgttcctgtgcagcctgctggcccccatggtgctggcttccgcagcagagaaagaaaaagaaatggacccattccactacgattatcagaccctgaggattggaggactcgtgtttgctgtggtcctgttttccgtcgggatacttctgattctcagtcgaaggtgcaaatgttcatttaaccagaagcccagagcacccggtgacgaggaagcgcaggtcgagaacctgatcactgccaacgcaacagagccccagaaagccgagaactag

SEQ ID NO: 63589 - DNA, 288 bp, Artificial Sequence
  derived and/or modified sequence
atggagctggtgctggtgttcctgtgcagcctgctggcccccatggtgctcgccagcgccgcagaaaaagaaaaagagatggatcctttccactatgactatcagacactgcggatagggggacttgtatttgctgtggtcctgttctccgttgggatccttctgatcctttctcgtagatgtaaatgcagtttcaatcagaaacctagagccccaggcgacgaagaggcccaggtcgagaacctgattacagctaatgccacagagcctcaaaaggcagagaattag

SEQ ID NO: 63590 - DNA, 288 bp, Artificial Sequence
  derived and/or modified sequence
atggagctggtgctggtgttcctgtgcagcctgctggcccccatggtgctggcctcagccgccgagaaagagaaggaaatggatcccttccattacgactatcagaccctgcgaatcggtggtctggtatttgcagtcgttttatttagcgtggggattctgctgatcctgtctcggaggtgcaagtgttcctttaatcaaaagccacgcgccccaggcgacgaagaagctcaagtggaaaatttgataacagcaaacgcaaccgagcctcagaaggccgagaactag

SEQ ID NO: 63591 - DNA, 288 bp, Artificial Sequence
  derived and/or modified sequence
atggagctggtgctggtgttcctgtgcagcctgctggcccccatggtcttagcttccgcagctgagaaagagaaggaaatggacccttttcactatgactaccagaccctcaggattggcgggctggtgttcgccgttgtgctgttttccgtggggattctgcttatcctgtccaggcgatgtaaatgctcatttaatcagaagcctcgcgctccgggagacgaggaggcacaggtggaaaacctaattacggcaaatgctacggagccgcagaaagcagagaattag

SEQ ID NO: 63592 - DNA, 288 bp, Artificial Sequence
  derived and/or modified sequence
atggaactggtactggtgtttctatgttcccttttggcacccatggtactggccagtgctgcggagaaagagaaagagatggatccattccactacgactaccagaccctcagaatcggaggtcttgtgttcgcagttgtgctcttcagcgtgggcatcttgttgattctgtccagacgttgcaagtgtagtttcaatcagaaaccccgtgcgcctggtgacgaggaggcgcaggttgaaaatctcattacggcgaacgccacagagcctcagaaggcagagaactag

SEQ ID NO: 63593 - DNA, 288 bp, Artificial Sequence
  derived and/or modified sequence
atggagctcgtgcttgtgttcttatgttcccttctggctcctatggtcctcgcgtccgccgctgaaaaagaaaaagagatggatccgtttcattatgactatcaaactctgcgaataggtggcctagtgttcgccgtagtattgttcagtgtgggaattctgcttatcctgtcaagaaggtgcaagtgctccttcaatcagaaaccgcgagcccctggggatgaggaggctcaggtggaaaatctcataacagctaatgctacagaacctcagaaggctgagaattag

SEQ ID NO: 63594 - DNA, 288 bp, Artificial Sequence
  derived and/or modified sequence
atggagctcgtactagtgtttctttgcagtctactggcacccatggtcctggcaagcgccgctgagaaggaaaaggagatggacccgttccactatgactaccagactctccggattggcggtctggtgttcgccgtcgtcctgtttagcgtggggattctgctgatattgagtcgtcgctgtaagtgtagctttaaccagaagccgagagctcctggcgacgaggaggctcaggtagagaatttgataaccgctaatgctaccgagccacagaaggccgaaaattag

SEQ ID NO: 63595 - DNA, 288 bp, Artificial Sequence
  derived and/or modified sequence
atggagctggtgctcgtgttcctgtgttccctcttagcacctatggttttagccagcgccgcagaaaaggagaaagaaatggacccctttcattatgactaccaaacactccggataggagggctcgtgttcgcagtagtcctatttagcgtgggaattctgctgatcctatcacgcaggtgcaaatgctccttcaaccagaagccaagggcgccaggagatgaggaggcgcaggtcgaaaacctgatcaccgccaacgccaccgagccccagaaagcagagaattag

SEQ ID NO: 63596 - DNA, 288 bp, Artificial Sequence
  derived and/or modified sequence
atggagttagtcctggtctttctgtgctcactgcttgccccaatggtgctggcatcggcagccgaaaaggagaaagagatggatccttttcattatgattatcaaaccttaaggatcggtggcctggtgtttgcagtagtgctgttttctgtgggtatactcctgatcctctctcggagatgtaaatgcagtttcaaccagaagcccagggccccaggagatgaagaggctcaagtggaaaatttgattaccgcaaacgcaactgagcctcagaaagctgaaaattag

SEQ ID NO: 63597 - DNA, 288 bp, Artificial Sequence
  derived and/or modified sequence
atggagctggttctcgtgtttttgtgctctttactggccccaatggttctcgcaagtgccgcagagaaagagaaggagatggacccgttccactatgattaccagaccttgaggattggtggactggtattcgccgtggttctttttagtgtgggtattctgctgattctttcacggcgatgtaagtgttctttcaatcagaagccaagggctccaggagatgaggaagcgcaggtagagaacctgatcacagcaaacgccaccgagccacagaaagctgagaattag

SEQ ID NO: 63598 - DNA, 288 bp, Artificial Sequence
  derived and/or modified sequence
atggagctggtgctggtgttcctgtgcagcctgctggcccccatggtgctggccagcgccgccgagaaggagaaggagatggaccccttccactacgactaccagaccctgagaatcggcggcctggtgttcgccgtggtgctgttcagcgtgggcatcctgctgatcctgagcagaagatgcaagtgcagcttcaaccagaagcccagagcccccggcgacgaggaggcccaggtggagaacctgatcaccgccaacgccaccgagccccagaaggccgagaactag

SEQ ID NO: 63599 - protein, 130 aa, Artificial Sequence
  derived and/or modified sequence
MAASSRAQVLSLYRAMLRESKRFSAYNYRTYAVRRIRDAFRENKNVKDPVEIQTLVNKAKRDLGVIRRQMDSHSVAQAGVHWNDLSSLQPLPPWFKQFSCLSLPSSWDYRRTPPRLANFCILSRDVISLY

SEQ ID NO: 63600 - DNA, 348 bp, Artificial Sequence
  derived and/or modified sequence
gacttgcaacactccgaggccaggaacgctccgtctggaacggcgcagatggagtctcactctgttgcccaggctggagtacggtggcgcgatctcagctcaccacaacctctgcctcccaggttcaagtgattctcctgcctcggcctcctgagtaactgggactacaggtcccagcagctggggttccccctcagcccgtgagcagccatgtccaaccccagcgccccaccaccatatgaagaccgcaaccccctgtacccaggccctccgccccctgggggctatgggcagccatctgtcctgccaggagggtatcctgcctaccctggctacccgcagcctggc

SEQ ID NO: 63601 - DNA, 450 bp, Artificial Sequence
  derived and/or modified sequence
gctccgagtgtgtgtgtatttgtgtatcggcggtcccgcaggtcccggatgttgcggacagtatgaggcaagcgcagggggacggggaccagcagctgtcgccgccgctctcagatcgagtcttgctctgtcacccaggctggagtgcagtggcgcgatctcagctcactgccacctttgcctcctgggttcaagcgattcttctgcctcagcctcccgagtagctgggattacaggctctgggaaccacccttctactttctgtctctaggaatttcactactctagggtgaagagggaacagaaatctttgccccctgactttggaaatctcgtttaaccttcaaactggcgatgtcaagggttccaagtcctccacctccggcagaaatgtcgagtggccccgtagctgagagttggtgctacacacagatcaaggtagtgaaattc

SEQ ID NO: 63602 - DNA, 393 bp, Artificial Sequence
  derived and/or modified sequence
atggcagcctcttctcgcgcacaagttctttcattatatagagccatgctccgagaatcaaagagattctctgcctataactataggacgtacgccgtgaggaggattagagacgctttccgcgagaataagaacgttaaggaccccgtggagattcagactttggtgaacaaggctaaacgagaccttggggtaatccgacgccaaatggattcccacagcgtagcacaggccggggtccattggaacgacctctcttcactgcagccactacctccgtggtttaaacagttttcttgcctctcccttccgtctagttgggactacagacgtaccccgccccgtttggccaacttctgcatcttatcccgggatgtaatttcactctactag

SEQ ID NO: 63603 - DNA, 393 bp, Artificial Sequence
  derived and/or modified sequence
atggccgccagcagccgggcccaggtgctgagcctgtaccgggccatgctgcgggagagcaagcgcttcagcgcctacaactaccgcacctatgctgtgcggcgcatcagagatgccttccgggagaacaagaatgtgaaggaccctgtggagatccagaccctggtgaacaaggccaagagggacctgggcgtcatccggcggcagatggacagccacagcgtggcccaggccggcgtgcactggaatgacctgagcagcctgcagcccctgcccccctggttcaagcagttcagctgcctgagcctgcccagctcctgggactacagaaggaccccaccccggctggccaacttctgcatcctgagcagagatgtgatcagcctgtactag

SEQ ID NO: 63604 - DNA, 794 bp, Artificial Sequence
  derived and/or modified sequence
gcgcccgcccccgaagcggcgcgggacgcctggcgccgtccgcgatccgcagggctgcccgcttaggcttaggcccggcccgctggcaaagccgagccgcagcattttatttcgttcgtggtttccgcacaggctggagtttcgtgggttgggtcgtacttgggacctcggcgaagaggacccgtttatttttttttctttccaaaatggcagcctccagtcgcgcacaagtgttatctctgtaccgggcgatgctgagagagagcaagcgtttcagcgcctacaattacagaacatatgctgtcaggaggataagagatgccttcagagaaaataaaaatgtaaaggatcctgtagaaattcaaaccctagtgaataaagccaagagagaccttggagtaattcgtcgacagatggactctcactctgtcgcccaggctggagtgcattggaacgatctcagctcactacaacctctgcctccctggttcaagcaattctcctgcctcagcctcccgagtagctgggattataggcgcacgccaccacgcctggctaatttttgtattcttagtagagatgtgatttcactgtattagtcaggctggtctcgaagtcctgacctcaagtgatccacctgcctcagcctcccaaagtgctgggattacaggtgtgaaccactgtgcccggcagacaattataatttttatgtagttacatttcacttcattgtctttgaattttgtgtcatgctgaattcccactccaagacaataaaaattctcttgcatttc

SEQ ID NO: 63605 - DNA, 393 bp, Artificial Sequence
  derived and/or modified sequence
atggccgccagcagccgggcccaggtgctgagcctgtaccgggccatgcttagggaatcaaagaggttctccgcttacaattaccggacatatgccgtgagacgcatacgggatgcattcagggagaataaaaacgtaaaggacccggtggaaatccagaccttggtaaataaagccaagcgagacctaggtgtgattcggagacagatggactctcactccgtggcccaagctggcgtgcactggaatgatctctcctctctccagcctctgcccccctggtttaagcagttttcatgcctttccctgccaagcagttgggattaccgacgcactcctcctcggttggccaatttctgcattttgtcccgagatgttatttccctgtactag

SEQ ID NO: 63606 - DNA, 393 bp, Artificial Sequence
  derived and/or modified sequence
atggcggctagcagtcgcgctcaggtgctgagcttatatagagcaatgcttcgcgagtcaaaacgatttagcgcctataattatagaacctatgccgtgagaagaataagagacgcgtttcgtgaaaataagaacgtcaaggatcccgttgaaatccagaccctggtaaataaggccaaacgggacctgggtgtgatccgccgtcagatggacagccatagtgtggctcaggctggggtgcactggaacgacctcagcagtctgcagcccctcccgccatggtttaagcagttttcttgcctcagcctgcctagcagttgggactaccggagaactccccctcgcttagccaatttttgcatcctgtccagggacgtaatatccttatactag

SEQ ID NO: 63607 - DNA, 393 bp, Artificial Sequence
  derived and/or modified sequence
atggccgccagcagcagagcccaggtgctgagcctgtacagagccatgctgagagagagcaagagattcagcgcctacaactacagaacctacgccgtgagaagaatcagagacgccttcagagagaacaagaacgtgaaggaccccgtggagatccagaccctggtgaacaaggccaagagagacctgggcgtgatcagaagacagatggacagccacagcgtggcccaggccggcgtgcactggaacgacctgagcagcctgcagcccctgcccccctggttcaagcagttcagctgcctgagcctgcccagcagctgggactacagaagaaccccccccagactggccaacttctgcatcctgagcagagacgtgatcagcctgtactag

SEQ ID NO: 63608 - protein, 96 aa, Artificial Sequence
  derived and/or modified sequence
MAASSRAQVLSLYRAMLRESKRFSAYNYRTYAVRRIRDAFRENKNVKDPVEIQTLVNKAKRDLGVIRRQVAEQGTAARRKSGNSSRSLGKPCTSWP

SEQ ID NO: 63609 - DNA, 291 bp, Artificial Sequence
  derived and/or modified sequence
atggccgccagcagcagggcccaggtgctgtccttataccgggccatgctacgagagtctaagagattttctgcctataactatagaacctacgccgtacgtcggatacgggacgcctttcgcgaaaacaaaaacgtgaaggatcccgtggaaattcagactttggtgaataaggccaaaagagatttaggcgtgattcggcgccaagtggctgagcagggcactgccgccaggagaaagagcggcaatagcagtcgctctctgggcaaaccatgcactagttggccgtag

SEQ ID NO: 63610 - DNA, 291 bp, Artificial Sequence
  derived and/or modified sequence
atggccgccagcagccgggcccaggtgctgagcctgtaccgggccatgctgcgggagagcaagcgcttcagcgcctacaactaccgcacctatgctgtgcggcgcatcagagatgccttccgggagaacaagaatgtgaaggaccctgtggagatccagaccctggtgaacaaggccaagagggacctgggcgtcatccggcggcaggtggccgagcagggcacagctgcccggaggaagagcggcaacagcagccgcagcctgggcaagccctgcacctcctggccctag

SEQ ID NO: 63611 - DNA, 1401 bp, Artificial Sequence
  derived and/or modified sequence
atggcagcctccagtcgcgcacaagtgttatctctgtaccgggcgatgctgagagagagcaagcgtttcagcgcctacaattacagaacatatgctgtcaggaggataagagatgccttcagagaaaataaaaatgtaaaggatcctgtagaaattcaaaccctagtgaataaagccaagagagaccttggagtaattcgtcgacaggtagctgagcaaggcacagccgccaggaggaagtcggggaacagcagccggagcctggggaagccctgcacaagttggccttgaggaaaccacctgacagacgtttgctcttcctcacagagctggtccacattggccaactgtattcaactgacaagctgatcattgagaatcgagacatgcccaggacctagcaagccggggaccagccaccagtggcggccagggaccaccttcagcatccactctctgtttgagatgggggctcccaaaaccagcttacaatagccttttgcgctgcctgtcctgtgggagctgataaaccaagtcacatttgcattctgttgcaggcttagtgaaaaaggactgctgtctttccttggttcaagtgttagaatggagagctggagttcgttcagaatagtgctgtgtgttaccacgtctcccctgcaccccattcctaccttgtagctcatgaccattgtgtatagcatttctacactttgtttcttggtccttggcaataaaaagaatgatctccctgagcctttgaccccagataaacccctcccaattaatgcattttcatttcctactgatacaaggcctggagagggctgttgggggccctcagggagggttcaactctgagacgagaactgccttggtgaaggcaagttcaagcaccacttgagactgggggcagcatggagtagggcagggctacggggatacacggtgcaccctgcaacttatacctgagcccagtacaacaaaggtgacgggtgtgtaggtacacacccagagatggagcactgcagatcagcaacctcagccccacctgggaatttgctggaaatgcaggctcaagcccctccccacacctggtgaatgagagagccccagcctgacccaagcccagggcgactcccataccctgaagcctggggcatgctgggcagcaccggtgcccaaatctggctggtggacagaagcacctggagagttggagagctttttaaaaagacatctctcagcacttccctctctgcagattctgactcagtaagtgaggggtgaggcacagtcatttttctctattctgaagctctcccactgttttcaatgtttaaccaactggggacccctgctctttaagtatattacaggtaataaagatattgtttgtatgct

SEQ ID NO: 63612 - DNA, 291 bp, Artificial Sequence
  derived and/or modified sequence
atggccgccagcagccgggcccaggtgctgagcctgtaccgggccatgctccgggaatctaagagattctcagcctacaactacagaacatatgcagtcagaaggatcagggatgcttttcgagagaataaaaacgtcaaagatcccgtggaaattcaaaccctggtgaacaaagccaagcgcgaccttggagtgattcggcgacaggttgcagaacagggcactgcagctcgaagaaagagcggcaattcctcgcgatcgcttggcaaaccatgcacgagttggccttag

SEQ ID NO: 63613 - DNA, 291 bp, Artificial Sequence
  derived and/or modified sequence
atggctgctagctcaagggcacaggttctgtctctgtaccgggcaatgctacgagagtctaagagattcagcgcctataattacaggacctacgccgtgcgaaggataagggatgccttcagggaaaataaaaatgtgaaggatcctgtagaaatccagaccttagtgaacaaggccaagagagatctcggtgtaatccgccgtcaggtggctgaacagggcactgcagcgaggagaaagagcggtaattcatcccggagcctaggaaagccatgtacatcttggccttag

SEQ ID NO: 63614 - DNA, 291 bp, Artificial Sequence
  derived and/or modified sequence
atggccgccagcagcagagcccaggtgctgagcctgtacagagccatgctgagagagagcaagagattcagcgcctacaactacagaacctacgccgtgagaagaatcagagacgccttcagagagaacaagaacgtgaaggaccccgtggagatccagaccctggtgaacaaggccaagagagacctgggcgtgatcagaagacaggtggccgagcagggcaccgccgccagaagaaagagcggcaacagcagcagaagcctgggcaagccctgcaccagctggccctag

SEQ ID NO: 63615 - protein, 117 aa, Artificial Sequence
  derived and/or modified sequence
MTSATSPIILKWDPKSLEIRTLTVERLLEPLVTQVTTLVNTSNKGPSGKKKGRSKKAHVLAASVEQATQNFLEKGEQIAKESQDLKEELVAAVEDVRKQGETMRIASSEFADDPCSS

SEQ ID NO: 63616 - protein, 860 aa, Artificial Sequence
  derived and/or modified sequence
MTSATSPIILKWDPKSLEIRTLTVERLLEPLVTQVTTLVNTSNKGPSGKKKGRSKKAHVLAASVEQATQNFLEKGEQIAKESQDLKEELVAAVEDVRKQGETMRIASSEFADDPCSSVKRGTMVRAARALLSAVTRLLILADMADVMRLLSHLKIVEEALEAVKNATNEQDLANRFKEFGKEMVKLNYVAARRQQELKDPHCRDEMAAARGALKKNATMLYTASQAFLRHPDVAATRANRDYVFKQVQEAIAGISNAAQATSPTDEAKGHTGIGELAAALNEFDNKIILDPMTFSEARFRPSLEERLESIISGAALMADSSCTRDDRRERIVAECNAVRQALQDLLSEYMNNTGRKEKGDPLNIAIDKMTKKTRDLRRQLRKAVMDHISDSFLETNVPLLVLIEAAKSGNEKEVKEYAQVFREHANKLVEVANLACSISNNEEGVKLVRMAATQIDSLCPQVINAALTLAARPQSKVAQDNMDVFKDQWEKQVRVLTEAVDDITSVDDFLSVSENHILEDVNKCVIALQEGDVDTLDRTAGAIRGRAARVIHIINAEMENYEAGVYTEKVLEATKLLSETVMPRFAEQVEVAIEALSANVPQPFEENEFIDASRLVYDGVRDIRKAVLMIRTPEELEDDSDFEQEDYDVRSRTSVQTEDDQLIAGQSARAIMAQLPQEEKAKIAEQVEIFHQEKSKLDAEVAKWDDSGNDIIVLAKQMCMIMMEMTDFTRGKGPLKNTSDVINAAKKIAEAGSRMDKLARAVADQLDSATSLIQAAKNLMNAVVLTVKASYVASTKYQKVYGTAAVNSPVVSWKMKAPEKKPLVKREKPEEFQTRVRRGSQKKHISPVQALSEFKAMDSF

SEQ ID NO: 63617 - DNA, 354 bp, Artificial Sequence
  derived and/or modified sequence
atgacaagtgcgaccagcccgatcattctgaagtgggatccaaagtctttagaaattcgcacacttactgtggaacggctcttggaaccactggtcactcaggttacaaccctggtcaacacatctaacaagggcccctccgggaaaaagaaagggaggtctaagaaagcacacgtgctcgcagcctccgtggagcaggctacgcagaacttcctggagaagggcgaacagatagccaaagaaagccaggatttaaaagaagaactggtagccgccgtggaggacgtaaggaaacagggagaaactatgcggatagcctctagcgagttcgccgacgatccttgttcatcatag

SEQ ID NO: 63618 - DNA, 201 bp, Artificial Sequence
  derived and/or modified sequence
atgacttccgctacatcccccattattttgaaatgggatcccaaaagccttgagatacggaccttgaccgtggaacgcctgttagagccactggtaacacaggtgaccaccctggtgaatacaagcaacaaaggccctagcgggaagaagaaaggaagatctaaaaaagcacatgtgctcgccgcttcagtggagcaatag

SEQ ID NO: 63619 - DNA, 2583 bp, Artificial Sequence
  derived and/or modified sequence
atgacatctgcaacttcacccatcatccttaagtgggacccaaagtcacttgagattcgcacactgacagtggagaggctcctagagcctttagtgacacaggtgaccactcttgtcaacacctccaacaaagggcctagcggcaagaagaaggggcgaagcaagaaggcgcacgtgttggctgcgtcggtggagcaagctacccagaactttctggagaagggggaacagattgctaaagagagccaagacctcaaggaagagctggtggccgccgtcgaagatgtgcgtaagcaaggagagaccatgagaattgcaagtagcgagtttgcagacgacccctgctctagcgtgaagcgcgggactatggtgagggccgcacgagccttgctgtcggccgtgacaagacttctcattttggcagacatggccgacgtcatgagacttcttagccaccttaagatcgtagaggaggctctcgaggctgtgaagaacgctaccaatgagcaggatctcgctaatagattcaaggagtttggaaaagagatggtcaaactgaactatgtcgcggcccggcgacagcaagaattaaaggaccctcattgcagggacgagatggctgctgcccggggcgctcttaaaaaaaacgctaccatgctgtacacagcctcccaggcctttcttcgtcacccggatgtggccgcaacacgtgccaatagggattacgtgtttaagcaggtgcaggaagctattgctggaatcagtaatgcggcccaagccacatctcccacagatgaagctaagggacacaccggcattggtgaactcgctgccgcgcttaatgagtttgacaacaaaatcatactggaccctatgaccttctctgaagccaggtttcgaccctctctggaggaacgactggaatcaatcatctcaggtgctgctctgatggccgactcttcttgtactcgagacgaccgccgggagagaattgtggctgaatgcaacgcagtacggcaggctctgcaggatctcctgagcgagtacatgaacaataccggaagaaaggaaaagggagatccccttaatatcgcaattgataagatgaccaaaaagacacgtgaccttaggcgacagttgcgcaaggctgtgatggatcacatatctgattcatttctggaaacaaacgttccactcttagtcctcatagaagccgcaaagagcggcaatgagaaagaagttaaggagtatgctcaagtgttccgagaacacgcaaacaagctggtcgaggtggctaacctggcatgcagtatttcaaacaacgaggagggcgtgaagctcgttcgcatggccgccacacagatcgactctctctgtccccaggttattaacgcagcactcactctggctgccaggccccaaagcaaagtggcccaagacaacatggatgtgtttaaggaccagtgggagaagcaggtccgcgtactgactgaggccgtggatgatataacgtctgtagacgattttctctccgtcagcgagaaccacatcctggaggacgtaaataaatgcgtaatcgcactccaggagggggacgtggacacactggaccggacggccggcgccatcaggggacgcgcagccagagtgatccacatcataaacgccgagatggaaaattatgaggccggggtctacacggagaaagttttggaggcgacaaaactgctgtctgagaccgtgatgccgcggttcgcagaacaagtggaagtggccatcgaggccttgtccgctaacgttcctcagccctttgaggaaaatgagttcatcgacgcaagcaggctagtctatgatggcgttcgcgacatcaggaaagccgtgctgatgatcaggactccagaggagctggaagacgatagtgatttcgagcaggaggactacgatgtgcggagccgcacaagtgttcagacagaggatgatcagttgattgcgggtcagtctgctagagccatcatggcacagctgcctcaggaggaaaaagcaaaaattgctgaacaggtcgagatttttcatcaggaaaaatctaagctggacgcggaagtggctaaatgggatgattctggaaacgatatcatcgtcctcgccaagcagatgtgcatgatcatgatggaaatgacagacttcacgaggggtaagggccccctaaaaaatacttcagatgttatcaatgctgctaagaaaatcgccgaggcaggaagtcggatggataagcttgcccgggccgtagctgaccagttggattcagccacctctctgatccaggccgcaaaaaatcttatgaacgctgttgtcctgactgtgaaagcatcttacgtggcctccacaaaataccagaaagtgtacggcacggccgccgtgaattcacctgtagtttcatggaagatgaaagccccagaaaagaagccactggtcaaaagggaaaaaccggaggagtttcagacacgggtccgccgagggtcgcagaagaagcacatatctcctgtacaagcactctccgaatttaaagcaatggactctttctag

SEQ ID NO: 63620 - DNA, 354 bp, Artificial Sequence
  derived and/or modified sequence
atgaccagcgccaccagccccatcatcctgaagtgggaccccaagagcctggagatccgcaccctgactgtggagcggctgctggagcccctggtgacccaggtgaccaccctggtgaacaccagcaacaagggccccagcggcaagaagaagggccgcagcaagaaggcccacgtgctggccgcctctgtggagcaggccacccagaacttcctggagaagggggagcagatcgccaaggagagccaggacctgaaggaggagctggtggccgctgtggaggatgtgaggaagcagggcgagaccatgagaattgccagcagcgagtttgctgatgacccctgcagcagctag

SEQ ID NO: 63621 - DNA, 201 bp, Artificial Sequence
  derived and/or modified sequence
atgaccagcgccaccagccccatcatcctgaagtgggaccccaagagcctggagatccgcaccctgactgtggagcggctgctggagcccctggtgacccaggtgaccaccctggtgaacaccagcaacaagggccccagcggcaagaagaagggccgcagcaagaaggcccacgtgctggccgcctctgtggagcagtag

SEQ ID NO: 63622 - DNA, 2583 bp, Artificial Sequence
  derived and/or modified sequence
atgaccagcgccaccagccccatcatcctgaagtgggaccccaagagcctggagatccgcaccctgactgtggagcggctgctggagcccctggtgacccaggtgaccaccctggtgaacaccagcaacaagggccccagcggcaagaagaagggccgcagcaagaaggcccacgtgctggccgcctctgtggagcaggccacccagaacttcctggagaagggggagcagatcgccaaggagagccaggacctgaaggaggagctggtggccgctgtggaggatgtgaggaagcagggcgagaccatgagaattgccagcagcgagtttgctgatgacccctgcagctctgtgaagaggggcaccatggtgcgggccgcccgggccctgctgtctgctgtgacccggctgctgatcctggccgacatggctgatgtgatgaggctgctgagccacctgaagatcgtggaggaggccctggaggccgtgaagaatgccaccaatgagcaggacctggccaaccgcttcaaggagtttgggaaggagatggtgaagctgaactacgtggccgcccggcggcagcaggagctgaaggacccccactgcagagatgagatggccgccgcccggggggccctgaagaagaatgccaccatgctgtacacagccagccaggccttcctgcggcacccagatgtggccgccacccgggccaacagagattatgtgttcaagcaggtgcaggaggccatcgccggcatcagcaatgctgcccaggccaccagccccacagatgaggccaagggccacactggaattggagagctggccgccgccctgaatgaatttgacaacaagatcatcctggaccccatgaccttcagcgaggcccgcttccggcccagcctggaggagcggctggagagcatcatcagcggggccgccctgatggctgacagcagctgcaccagagatgacagaagagaaagaattgtggccgagtgcaatgctgtgcggcaggccctgcaggacctgctgtctgagtacatgaacaacacaggcaggaaggagaagggggaccccctgaacatcgccatcgacaagatgaccaagaagacccgggacctgcggcggcagctgaggaaggctgtgatggaccacatcagtgacagcttcctggagaccaacgtgcccctgctggtgctgattgaagctgccaagtctggaaatgagaaggaggtgaaggagtatgcccaggtgttccgggagcacgccaacaagctggtggaggtggccaacctggcctgcagcatcagcaacaatgaggagggcgtgaagctggtgaggatggccgccacccagattgacagcctgtgcccccaggtgatcaatgctgccctgaccctggccgcccggccccagagcaaggtggcccaggacaacatggatgtgttcaaggaccagtgggagaagcaggtgcgggtgctgacagaagctgtggatgacatcacctctgtggatgacttcctgtctgtgtctgagaaccacatcctggaggatgtgaacaagtgtgtgattgccctgcaggagggagatgtggacaccctggacagaacagctggggccatccggggccgggccgcccgggtcatccacatcatcaatgctgagatggagaactatgaagctggggtgtacacagagaaggtgctggaggccaccaagctgctgtctgagaccgtgatgcccaggtttgctgagcaggtggaggtggccatcgaggccctgagcgccaacgtgccccagccctttgaggagaatgagttcattgatgccagccggctggtgtatgatggagtgcgggacatcaggaaggctgtgctgatgatccgcaccccagaggagctggaggatgacagcgactttgagcaggaggactatgatgtgcgcagcaggacctctgtgcagacagaagatgaccagctgattgctggccagagcgcccgggccatcatggcccagctgccccaggaggagaaggccaagattgctgagcaggtggagatcttccaccaggagaagagcaagctggatgctgaggtggccaagtgggatgattctggaaatgacatcatcgtgctggccaagcagatgtgcatgatcatgatggagatgacagacttcacccggggcaagggccccctgaagaacaccagtgatgtgatcaatgctgccaagaagattgctgaggccggcagcaggatggacaagctggcccgggctgtggccgaccagctggacagcgccaccagcctcatccaggccgccaagaacctgatgaatgctgtggtgctgactgtgaaggccagctatgtggccagcaccaagtaccagaaggtgtatggaacagctgctgtgaacagccctgtggtgtcctggaagatgaaggcccctgagaagaagcccctggtgaagcgggagaagccagaggagttccagaccagggtgagaagaggcagccagaagaagcacatcagccctgtgcaggccctgtctgagttcaaggccatggacagcttctag

SEQ ID NO: 63623 - DNA, 354 bp, Artificial Sequence
  derived and/or modified sequence
atgaccagcgccaccagccccatcatcctgaagtgggaccccaagtccctagaaatccgaacactgaccgtggaacgattgttagagccacttgtcacccaggtgaccactctggttaacacatctaacaaaggtccctctggtaagaaaaagggacggagtaagaaagcccacgtgctcgctgccagtgtcgaacaggccacacaaaactttcttgaaaaaggcgaacaaatagccaaagaatctcaggatctcaaggaagagcttgttgcggccgtggaagacgtaagaaagcaaggagagacaatgagaatagcgagtagtgagttcgctgacgatccctgtagctcctag

SEQ ID NO: 63624 - DNA, 201 bp, Artificial Sequence
  derived and/or modified sequence
atgaccagcgccaccagccccatcatcctgaagtgggaccccaagtcgctagaaatacggaccctcaccgtggaaagactgcttgagcctctagtgacacaggttacaactctggtcaatactagtaacaagggcccaagtgggaagaaaaagggccggtctaagaaagcacatgttctggcagcttcggtagaacaatag

SEQ ID NO: 63625 - DNA, 2583 bp, Artificial Sequence
  derived and/or modified sequence
atgaccagcgccaccagccccatcatcctgaagtgggaccccaagtcactggaaatccgtaccctcacagtagagagattgctggaacccctcgttacacaagtcaccacactcgtgaacaccagtaataaaggtccatctggcaagaagaagggtagatccaaaaaagcacacgttctcgccgcatccgtggagcaggcgacccagaactttctcgaaaagggggagcagattgcaaaggaaagccaggacctcaaggaggaactggttgctgccgtcgaggacgtgcgcaagcagggagagaccatgaggatagcttcatctgagtttgccgacgatccctgttccagcgtgaagcgtggaacaatggtccgtgccgctagagccctgttatccgccgtaaccagactcctcatcttggccgacatggcagatgttatgagacttttatcacacctgaaaatcgtagaagaagcactcgaggccgtcaaaaacgctactaacgagcaggatttggctaatcggttcaaggagtttggcaaagagatggtcaaacttaattacgtggccgcccggaggcagcaagagctcaaggaccctcactgtagagacgaaatggccgcagcccgaggggcactgaagaaaaatgctacaatgctctacactgcctctcaggcgtttctgaggcatcccgatgttgccgctactagagccaaccgagattatgtattcaagcaagtacaggaggctattgcgggcatctccaacgcagcccaggccacttcccccacagatgaagcgaagggccatacaggtatcggggagctggctgccgcgcttaatgaatttgacaacaagatcattctggatcccatgacgttctccgaagctcgtttccgccctagtcttgaagaacggctggagtctattatctcaggcgcggcactaatggctgattccagttgtactagggacgaccgccgggagcgcattgtagcggagtgcaacgccgtgcgtcaggccctccaggacttactgtccgagtacatgaataacacaggcagaaaggagaagggggatcctctcaacatcgctatagacaaaatgaccaagaagacaagggacttgcgacgccagttgaggaaggccgtcatggatcatatctctgattcatttctggaaaccaacgttcctcttcttgtgctcatagaagcggctaagagtggaaacgagaaagaagtgaaagaatacgcgcaggtgtttagggagcatgccaataagctagtggaggttgcaaacttagcctgcagcatctccaacaacgaggaaggggtcaagctggtgagaatggccgcaacccaaattgattcattgtgtccacaagttatcaatgccgcgctgacgttagctgcccgccctcaatctaaggtcgcccaagataatatggatgtatttaaagatcagtgggagaaacaggttcgggtccttacggaagcagtggatgacatcacgtctgtcgacgatttcctgtcagtaagtgagaatcatattctggaggatgttaataagtgtgtgattgcattgcaggagggagatgtggacactttagacaggactgccggtgcaatcagaggacgcgcagccagggtgatccacattattaatgccgagatggagaactatgaggcaggtgtgtacacggagaaggtcctcgaggctactaaactcctgtccgaaaccgtaatgcctcggttcgcagagcaggtggaggtcgcaatcgaggctctcagcgctaacgtgcctcagcccttcgaggagaatgagttcatcgacgccagtagactggtgtacgacggggtaagagacatacggaaagcagtgctgatgatccgcacgcctgaggaactggaagacgactctgattttgagcaagaggactatgacgtccgctctcggacctccgttcagaccgaagacgatcagctcatcgcgggccagagcgccagggcaatcatggcgcagctgccccaggaagagaaggccaaaatcgctgagcaagtggaaattttccaccaagagaagagtaaactggatgcagaagtggcaaagtgggacgactcaggcaacgatatcatcgtcctggccaaacagatgtgtatgatcatgatggagatgactgacttcacccgaggcaaagggcctttgaaaaatacgagtgacgtgattaacgccgccaaaaagatagccgaggcggggagtcgtatggacaagctggctagagccgtagctgatcaactcgattcagccacgtcccttattcaggctgctaagaacctgatgaatgccgtcgtcttgacagtaaaggcgagctacgttgcctcaactaagtaccagaaggtctacggcactgcggccgtgaactcgcccgtcgtctcctggaagatgaaagccccagagaagaaacccttggtcaaacgtgagaaacccgaggaattccaaacacgggtccgacgggggtcacagaaaaagcatatttccccagtacaagctctcagtgaatttaaggctatggattcattctag

SEQ ID NO: 63626 - DNA, 354 bp, Artificial Sequence
  derived and/or modified sequence
atgacatctgcaacaagccctatcatcctcaaatgggaccccaaatcactggagatccggactctgaccgttgagagactcctggaacctttggttacacaggtcactaccttggtcaatacttccaataaaggaccatccgggaagaagaaagggaggtctaagaaggctcacgtgctggccgctagcgtcgagcaagctacccaaaatttcttggagaagggtgagcagatcgcaaaagaatctcaggatctgaaggaagagctggtcgcggcagtggaggacgtgcgtaagcaaggtgagaccatgcgcattgccagttcggaatttgcagacgacccttgctcatcatag

SEQ ID NO: 63627 - DNA, 201 bp, Artificial Sequence
  derived and/or modified sequence
atgacctccgccacaagtcccattattctcaaatgggaccccaagtctctggaaatcagaacgctcacggttgagcggctgcttgagcctctcgtgacacaggtgacaacactggtaaatacttctaacaagggccctagtggcaaaaaaaaaggacggagtaagaaagctcatgtcctggcagccagcgttgaacaatag

SEQ ID NO: 63628 - DNA, 2583 bp, Artificial Sequence
  derived and/or modified sequence
atgacctctgccaccagcccaatcatcctgaagtgggaccccaaatcattggagatccgcaccctcaccgtggaaaggttgctcgagcccctggtgactcaggtgacaacccttgtgaatacatccaataagggtccatccggtaagaagaaggggcgatctaagaaagcacacgtgctcgctgcctcagtggagcaggcaactcagaattttctggagaagggggaacaaatcgccaaagagtctcaggacttaaaagaagagttggtggcggctgtggaggatgttcggaaacaaggcgaaactatgcgtattgccagtagtgaattcgccgatgacccttgttcctctgtcaaaagaggcaccatggttagagctgccagggcactgttaagtgcagtcaccaggctgctgatcttagcggacatggccgacgttatgagactcttgtcgcatctcaaaatcgtagaggaagccctcgaggccgttaaaaatgccacaaatgaacaagatctggccaaccgctttaaagagtttgggaaagaaatggtcaagctcaactatgtggcggctcggagacagcaggagctgaaggatcctcactgcagagacgaaatggcagccgcacgcggagccctgaagaaaaatgccactatgctgtacactgctagccaagcctttcttcgccatccggatgtggcggctaccagagcaaacagagattatgtgttcaaacaggttcaagaggctatcgccggtatcagtaacgcggcacaggcgacaagtcccactgatgaggccaaaggccacacaggcattggagagctggcagctgccctgaacgagttcgataataagatcattctggatcccatgacttttagcgaggcgagatttagaccctccctagaggagcgcttggagtcaattatctctggagcagccttaatggccgactcttcctgcacacgcgacgataggagggagcgaattgtggccgagtgcaacgccgtaaggcaggcactgcaagacctgctgtcagagtatatgaacaacacaggacgcaaagagaagggagaccctctcaatatagccatcgataaaatgaccaagaaaacccgcgatctccggcgacagctgagaaaagctgtgatggaccatattagtgactctttcctcgagaccaatgttccactgctggtactgatcgaggcggcaaagtctggcaacgaaaaagaggtgaaagaatacgcacaggtcttccgggagcacgcaaataaactcgtggaggttgccaatctggcttgcagtatttctaacaatgaggaaggcgtaaagctggtgcggatggctgctactcagattgattcactgtgtccacaggtgataaacgcagccctcaccctcgctgctaggccacagagtaaggtcgcccaggataatatggacgtttttaaggaccaatgggagaaacaggtccgggtactgaccgaggcagtggacgacattaccagcgtagatgatttcctgagcgtctccgaaaatcacatactagaagacgtcaacaaatgtgtgattgcgctgcaagagggcgacgtagacacccttgatcgcaccgccggagccataagaggccgagcggctagagtgatccatatcattaacgctgagatggagaattacgaggccggagtttatacagaaaaggtgttagaggcgacaaagttactctcagaaacggtgatgcctaggttcgctgagcaagttgaagttgccatcgaggcactgtcggctaatgttccccagccctttgaggagaacgagtttatagacgctagccgactcgtatacgacggggtgcgagatatcaggaaggctgtccttatgatacggacccctgaggagctagaggacgattccgatttcgagcaggaggattacgatgtgagaagcagaaccagtgtgcagaccgaggacgatcagctcattgctgggcagtccgctagagctatcatggctcagctgccccaggaagagaaagctaagatagcagagcaagtcgagattttccaccaagagaagagtaaactcgacgccgaggtggctaagtgggacgattcaggcaatgacatcattgtgcttgcaaagcagatgtgcatgatcatgatggagatgactgacttcacacggggaaagggccctttaaagaataccagtgacgtcatcaatgccgcaaagaaaatagcagaggctggctccagaatggacaagcttgccagggcagtggctgaccaactcgattcggctaccagcctgatccaggctgcaaagaatttgatgaacgcggtggtcctcacggttaaagcctcatacgttgcttcaacaaagtaccaaaaagtttacggcacagcggcagtgaattctcctgttgtgagctggaaaatgaaggctcccgaaaagaagcccctggtaaagagggaaaaacctgaagagttccagaccagagtgagaaggggatctcagaaaaagcatatcagcccagtgcaggctttaagcgagttcaaggcaatggactcattttag

SEQ ID NO: 63629 - DNA, 2583 bp, Artificial Sequence
  derived and/or modified sequence
atgacttcggcaacttcacctatcattctgaaatgggaccccaaaagtttggaaatccggacgctaacagtggaaaggctgttggagccacttgttacacaggtgactacacttgtcaacacaagcaacaaaggcccatctggtaaaaagaaagggaggtcaaagaaagcccatgtactagctgcctctgtagagcaagccactcagaatttcctggaaaagggtgaacagatcgctaaggagagtcaagatctcaaagaagagttggtggctgctgtagaggatgtgcgcaaacaaggtgagacgatgcggatcgcctcctccgagtttgcagatgacccttgctcgtcggtaaagcgcggcaccatggtacgggcggcaagggctttgctctccgcggtgacacgcttactcatcctggcggacatggcagatgtcatgagacttttatcccatctgaaaattgtggaagaggccctggaagctgtcaaaaatgctacaaatgagcaagaccttgcaaaccgttttaaagagtttgggaaagagatggtgaaacttaactatgtagcagcaagaagacaacaggagctgaaggatcctcactgtcgggatgagatggcagccgcccgaggggctctgaagaagaatgccacaatgctgtacacggcctctcaagcatttctccgccacccagatgtcgccgctacgagagccaaccgagattatgtgttcaaacaagtccaggaggccatcgccggcatctccaatgctgctcaagctacctcgcccactgacgaagccaagggccacacgggcatcggcgagctggctgcggctcttaatgagtttgacaataagattatcctggaccccatgacgttcagcgaggccaggttccggccgtccctggaggagaggctggagagcatcatcagcggcgcagcgctgatggccgactcctcctgcacgcgagacgaccggcgcgagaggatcgtggcggagtgcaacgccgtgcggcaggcgctccaggacctgctcagcgagtacatgaataatactggaaggaaagaaaaaggagatcctctcaacattgcgattgataagatgactaagaaaacaagagatctaaggagacagcttcggaaagcagtgatggatcacatatctgactctttcctggaaaccaatgttcctttgctagttctcattgaggctgcaaagagcggaaatgaaaaggaagtgaaagaatatgcccaagttttccgtgagcatgccaacaaactggtagaggttgccaatttggcctgttccatctccaacaatgaagaaggggtgaaattagttcggatggcagccacccagattgacagcctgtgtccccaggtcatcaatgccgctctgacactggctgcccggccacagagcaaagttgctcaggataacatggacgtcttcaaagaccagtgggagaagcaggtccgagtgttgacagaggccgtggatgacatcacctcagtggatgacttcctctctgtctcagaaaatcacatcttggaggatgtgaacaagtgtgtgatagccctccaagagggcgatgtggacactctggaccggactgcaggggccatcaggggccgggcagctcgagtcatacacatcatcaatgctgagatggagaactatgaagctggggtttatactgagaaggtgttggaagctacaaaattgctttctgaaacagtgatgccacgcttcgctgaacaagtagaggttgccattgaagccctgagtgccaacgttcctcaaccgtttgaggagaatgagttcatcgatgcctctcgcctggtgtatgatggcgttcgggacatcagaaaggctgtgctgatgatcaggaccccagaagaactagaggatgattctgactttgagcaggaagattatgatgtgcgtagcaggacaagtgttcagactgaggatgaccagctcattgcagggcagagcgcacgggccatcatggcgcaactaccgcaggaggagaaggcaaaaatagctgagcaggtggagatattccatcaagagaaaagcaagctggatgcagaagtggccaaatgggacgacagcggcaatgatatcattgtactggccaagcagatgtgtatgatcatgatggaaatgacagacttcacaagaggcaaaggcccattgaaaaatacatctgatgtcattaatgctgccaagaaaattgccgaagcaggttctcgaatggacaaattagctcgtgctgtggctgatcagctggacagtgccacatcgcttatccaggcagctaaaaacctgatgaatgctgttgtcctcacggtgaaagcatcctatgtggcctcaaccaaataccagaaggtctatgggacagcagctgtcaactcacctgttgtgtcttggaagatgaaggctccagagaagaagccccttgtgaagagagaaaagcctgaagaattccagacacgagttcgacgaggttctcagaagaaacacatttcgcctgtacaggctttaagtgaattcaaagcaatggattccttctag

SEQ ID NO: 63630 - DNA, 354 bp, Artificial Sequence
  derived and/or modified sequence
atgaccagcgccaccagccccatcatcctgaagtgggaccccaagagcctggagatcagaaccctgaccgtggagagactgctggagcccctggtgacccaggtgaccaccctggtgaacaccagcaacaagggccccagcggcaagaagaagggcagaagcaagaaggcccacgtgctggccgccagcgtggagcaggccacccagaacttcctggagaagggcgagcagatcgccaaggagagccaggacctgaaggaggagctggtggccgccgtggaggacgtgagaaagcagggcgagaccatgagaatcgccagcagcgagttcgccgacgacccctgcagcagctag

SEQ ID NO: 63631 - DNA, 201 bp, Artificial Sequence
  derived and/or modified sequence
atgaccagcgccaccagccccatcatcctgaagtgggaccccaagagcctggagatcagaaccctgaccgtggagagactgctggagcccctggtgacccaggtgaccaccctggtgaacaccagcaacaagggccccagcggcaagaagaagggcagaagcaagaaggcccacgtgctggccgccagcgtggagcagtag

SEQ ID NO: 63632 - DNA, 2583 bp, Artificial Sequence
  derived and/or modified sequence
atgaccagcgccaccagccccatcatcctgaagtgggaccccaagagcctggagatcagaaccctgaccgtggagagactgctggagcccctggtgacccaggtgaccaccctggtgaacaccagcaacaagggccccagcggcaagaagaagggcagaagcaagaaggcccacgtgctggccgccagcgtggagcaggccacccagaacttcctggagaagggcgagcagatcgccaaggagagccaggacctgaaggaggagctggtggccgccgtggaggacgtgagaaagcagggcgagaccatgagaatcgccagcagcgagttcgccgacgacccctgcagcagcgtgaagagaggcaccatggtgagagccgccagagccctgctgagcgccgtgaccagactgctgatcctggccgacatggccgacgtgatgagactgctgagccacctgaagatcgtggaggaggccctggaggccgtgaagaacgccaccaacgagcaggacctggccaacagattcaaggagttcggcaaggagatggtgaagctgaactacgtggccgccagaagacagcaggagctgaaggacccccactgcagagacgagatggccgccgccagaggcgccctgaagaagaacgccaccatgctgtacaccgccagccaggccttcctgagacaccccgacgtggccgccaccagagccaacagagactacgtgttcaagcaggtgcaggaggccatcgccggcatcagcaacgccgcccaggccaccagccccaccgacgaggccaagggccacaccggcatcggcgagctggccgccgccctgaacgagttcgacaacaagatcatcctggaccccatgaccttcagcgaggccagattcagacccagcctggaggagagactggagagcatcatcagcggcgccgccctgatggccgacagcagctgcaccagagacgacagaagagagagaatcgtggccgagtgcaacgccgtgagacaggccctgcaggacctgctgagcgagtacatgaacaacaccggcagaaaggagaagggcgaccccctgaacatcgccatcgacaagatgaccaagaagaccagagacctgagaagacagctgagaaaggccgtgatggaccacatcagcgacagcttcctggagaccaacgtgcccctgctggtgctgatcgaggccgccaagagcggcaacgagaaggaggtgaaggagtacgcccaggtgttcagagagcacgccaacaagctggtggaggtggccaacctggcctgcagcatcagcaacaacgaggagggcgtgaagctggtgagaatggccgccacccagatcgacagcctgtgcccccaggtgatcaacgccgccctgaccctggccgccagaccccagagcaaggtggcccaggacaacatggacgtgttcaaggaccagtgggagaagcaggtgagagtgctgaccgaggccgtggacgacatcaccagcgtggacgacttcctgagcgtgagcgagaaccacatcctggaggacgtgaacaagtgcgtgatcgccctgcaggagggcgacgtggacaccctggacagaaccgccggcgccatcagaggcagagccgccagagtgatccacatcatcaacgccgagatggagaactacgaggccggcgtgtacaccgagaaggtgctggaggccaccaagctgctgagcgagaccgtgatgcccagattcgccgagcaggtggaggtggccatcgaggccctgagcgccaacgtgccccagcccttcgaggagaacgagttcatcgacgccagcagactggtgtacgacggcgtgagagacatcagaaaggccgtgctgatgatcagaacccccgaggagctggaggacgacagcgacttcgagcaggaggactacgacgtgagaagcagaaccagcgtgcagaccgaggacgaccagctgatcgccggccagagcgccagagccatcatggcccagctgccccaggaggagaaggccaagatcgccgagcaggtggagatcttccaccaggagaagagcaagctggacgccgaggtggccaagtgggacgacagcggcaacgacatcatcgtgctggccaagcagatgtgcatgatcatgatggagatgaccgacttcaccagaggcaagggccccctgaagaacaccagcgacgtgatcaacgccgccaagaagatcgccgaggccggcagcagaatggacaagctggccagagccgtggccgaccagctggacagcgccaccagcctgatccaggccgccaagaacctgatgaacgccgtggtgctgaccgtgaaggccagctacgtggccagcaccaagtaccagaaggtgtacggcaccgccgccgtgaacagccccgtggtgagctggaagatgaaggcccccgagaagaagcccctggtgaagagagagaagcccgaggagttccagaccagagtgagaagaggcagccagaagaagcacatcagccccgtgcaggccctgagcgagttcaaggccatggacagcttctag

SEQ ID NO: 63633 - protein, 162 aa, Artificial Sequence
  derived and/or modified sequence
MASQPPEDTAESQASDELECKICYNRYNLKQRKPKVLECCHRVCAKCLYKIIDFGDSPQGVIVCPFCRFETCLPDDEVSSLPDDNNILVNLTCGGKGKKCLPENPTELLLTPKRLASLVSPSHTSSNCLVITIMEVQRESSPSLSSTPVVEFYRPASFDSVT

SEQ ID NO: 63634 - protein, 82 aa, Artificial Sequence
  derived and/or modified sequence
MASQPPEDTAESQASDELECKICYNRYNLKQRKPKVLECCHRVCAKCLYKIIDFGDSPQGVIVCPFCRFETCLPDDEVSSLP

SEQ ID NO: 63635 - protein, 13 aa, Artificial Sequence
  derived and/or modified sequence
MASQPPEDTAESQ

SEQ ID NO: 63636 - protein, 247 aa, Artificial Sequence
  derived and/or modified sequence
MASQPPEDTAESQASDELECKICYNRYNLKQRKPKVLECCHRVCAKCLYKIIDFGDSPQGVIVCPFCRFETCLPDDEVSSLPDDNNILVNLTCGGKGKKCLPENPTELLLTPKRLASLVSPSHTSSNCLVITIMEVQRESSPSLSSTPVVEFYRPASFDSVTTVSHNWTVWNCTSLLFQTSIRVLVWLLGLLYFSSLPLGIYLLVSKKVTLGVVFVSLVPSSLVILMVYGFCQCVCHEFLDCMAPPS

SEQ ID NO: 63637 - protein, 51 aa, Artificial Sequence
  derived and/or modified sequence
MASQPPEDTAESQASDELECKICYNRYNLKQRKPKVLECCHRVCAKCLYKI

SEQ ID NO: 63638 - DNA, 489 bp, Artificial Sequence
  derived and/or modified sequence
atggccagccagccccccgaggacaccgccgagagccaggccagcgacgagctggagtgcaagatctgctacaacagatacaacctgaagcagagaaagcccaaggtgctggagtgctgccacagagtgtgcgccaagtgcctgtacaagatcatcgacttcggcgacagcccccagggcgtgatcgtgtgccccttctgcagattcgagacctgcctgcccgacgacgaggtgagcagcctgcccgacgacaacaacatcctggtgaacctgacctgcggcggcaagggcaagaagtgcctgcccgagaaccccaccgagctgctgctgacccccaagagactggccagcctggtgagccccagccacaccagcagcaactgcctggtgatcaccatcatggaggtgcagagagagagcagccccagcctgagcagcacccccgtggtggagttctacagacccgccagcttcgacagcgtgacctag

SEQ ID NO: 63639 - DNA, 249 bp, Artificial Sequence
  derived and/or modified sequence
atggccagccagccccccgaggacaccgccgagagccaggccagcgacgagctggagtgcaagatctgctacaacagatacaacctgaagcagagaaagcccaaggtgctggagtgctgccacagagtgtgcgccaagtgcctgtacaagatcatcgacttcggcgacagcccccagggcgtgatcgtgtgccccttctgcagattcgagacctgcctgcccgacgacgaggtgagcagcctgccctag

SEQ ID NO: 63640 - DNA, 42 bp, Artificial Sequence
  derived and/or modified sequence
atggccagccagccccccgaggacaccgccgagagccagtag

SEQ ID NO: 63641 - DNA, 744 bp, Artificial Sequence
  derived and/or modified sequence
atggccagccagccccccgaggacaccgccgagagccaggccagcgacgagctggagtgcaagatctgctacaacagatacaacctgaagcagagaaagcccaaggtgctggagtgctgccacagagtgtgcgccaagtgcctgtacaagatcatcgacttcggcgacagcccccagggcgtgatcgtgtgccccttctgcagattcgagacctgcctgcccgacgacgaggtgagcagcctgcccgacgacaacaacatcctggtgaacctgacctgcggcggcaagggcaagaagtgcctgcccgagaaccccaccgagctgctgctgacccccaagagactggccagcctggtgagccccagccacaccagcagcaactgcctggtgatcaccatcatggaggtgcagagagagagcagccccagcctgagcagcacccccgtggtggagttctacagacccgccagcttcgacagcgtgaccaccgtgagccacaactggaccgtgtggaactgcaccagcctgctgttccagaccagcatcagagtgctggtgtggctgctgggcctgctgtacttcagcagcctgcccctgggcatctacctgctggtgagcaagaaggtgaccctgggcgtggtgttcgtgagcctggtgcccagcagcctggtgatcctgatggtgtacggcttctgccagtgcgtgtgccacgagttcctggactgcatggccccccccagctag

SEQ ID NO: 63642 - DNA, 156 bp, Artificial Sequence
  derived and/or modified sequence
atggccagccagccccccgaggacaccgccgagagccaggccagcgacgagctggagtgcaagatctgctacaacagatacaacctgaagcagagaaagcccaaggtgctggagtgctgccacagagtgtgcgccaagtgcctgtacaagatctag

SEQ ID NO: 63643 - DNA, 489 bp, Artificial Sequence
  derived and/or modified sequence
atggccagtcaaccccctgaagacaccgcggaatcccaggcctccgacgagctggaatgtaagatctgttataatcggtacaatttgaaacagcgcaagccaaaagtgctcgagtgctgccacagagtgtgcgcaaagtgtttatataagattattgattttggcgattcacctcagggggtcatcgtgtgccccttttgtaggttcgaaacttgcttgcctgatgatgaggtcagctcactgcctgatgataataacattctggtgaacttgacttgtggtggaaaggggaaaaaatgtctgccagagaatcctacagagcttctgctgaccccaaagagactcgccagcctggtgtcaccctcccacacgagctcaaattgtctcgtcattaccattatggaagtgcagcgcgagtcaagtcccagtctgagttcaactccagtagtcgagttctaccgtccagctagcttcgattcagtgacttag

SEQ ID NO: 63644 - DNA, 249 bp, Artificial Sequence
  derived and/or modified sequence
atggcatcccagccccctgaagacacggccgagtctcaagcctcagacgaactggaatgcaagatttgctacaaccgctacaatctgaagcagagaaagcccaaagttctggaatgttgtcaccgcgtgtgtgccaaatgtctgtacaaaatcatcgacttcggcgatagcccccaaggtgtgatagtgtgtccattttgtcgcttcgagacatgccttcctgacgatgaagtctcctcgctgccgtag

SEQ ID NO: 63645 - DNA, 42 bp, Artificial Sequence
  derived and/or modified sequence
atggcatctcagccgcccgaggataccgccgagtctcaatag

SEQ ID NO: 63646 - DNA, 744 bp, Artificial Sequence
  derived and/or modified sequence
atggcgagccagccaccagaagatactgccgagagccaagcctcggatgaactggagtgcaaaatctgttacaacaggtacaacttaaaacagagaaaaccgaaggtgctggagtgttgccatcgagtatgtgccaaatgtttgtataagattattgactttggtgattctccacagggagtgatcgtgtgcccgttttgccgttttgagacctgcttgccagatgacgaggtgtcctcgctgccggacgacaacaacatcttggtgaacctcacttgtgggggtaaaggaaaaaagtgcctaccagagaaccctacagaattattactgactcctaaaaggctggcctctttggttagcccctcacacacctcttccaattgtctggtcattactatcatggaggtgcagcgcgagagttctcctagtctgtcatccaccccagtcgtcgagttctaccgcccagcgtcttttgatagcgtaactacagtgagtcataattggactgtgtggaattgtacatcacttctcttccagacctctattcgggtactggtatggctgcttggtctcctctacttttctagcctgcccctgggtatatacctcctggtgtccaaaaaggtgaccctcggcgtggtgttcgtgtctctcgtgccgagcagtcttgtcatattgatggtgtacgggttctgccaatgtgtatgccatgagtttttggattgtatggcccccccctcatag

SEQ ID NO: 63647 - DNA, 156 bp, Artificial Sequence
  derived and/or modified sequence
atggcttcgcagccacccgaggacacggctgaaagccaggcgagcgacgagttagaatgcaagatctgttacaaccgttacaatctcaagcagcgcaagccaaaggtcctggaatgctgtcatcgcgtttgcgccaaatgtttgtacaaaatctag

SEQ ID NO: 63648 - DNA, 744 bp, Artificial Sequence
  derived and/or modified sequence
atggcttctcagccacccgaagataccgccgaatctcaagcctcagatgagctggaatgcaagatctgttataatagatacaatctaaagcagcgaaagccaaaagtcctggagtgctgccaccgggtttgcgctaagtgcctttataagatcatcgactttggcgactccccacaaggtgtcatcgtatgtccgttttgccggttcgagacctgcttgcccgatgacgaagtgtcgtcccttcccgatgataacaatatcctcgtgaaccttacctgtgggggcaaagggaaaaaatgtctgccggaaaatccgactgaactgctccttaccccaaagcgactcgcgagccttgtgagcccctctcatacgtcatccaactgtctagtgattacgattatggaggtgcagagggagtcatctccatccctgtcttctacccctgttgtcgaattctacaggccagccagtttcgatagcgtcactacagtgtcccataactggacagtgtggaactgtacatcgctgctctttcaaacaagcatccgcgtgctggtgtggctgctgggattgctgtatttttcttcactgcccttggggatttacttgcttgtctcgaagaaggtgaccctgggggttgtcttcgtgtctctggtacccagttctctcgtcatattgatggtttatggtttttgccaatgcgtgtgccatgagttcttggactgtatggccccccccagttag

SEQ ID NO: 63649 - DNA, 744 bp, Artificial Sequence
  derived and/or modified sequence
atggccagccagccacctgaggatacggcggaatcacaagcgagtgacgagctcgagtgtaagatctgttataaccggtacaaccttaaacaacgcaagcctaaggtgctcgagtgctgccacagagtgtgtgccaaatgtctctacaagattattgattttggggacagcccccagggagtgatcgtgtgtcccttttgcaggtttgaaacttgtctgccagatgatgaggtctcaagcttaccggacgataacaacattctggtgaatcttacatgtggaggaaaaggcaaaaaatgtctgcctgaaaacccaaccgaactgctcctgaccccaaaaagactggcgtcactcgtcagcccctctcatacaagtagtaactgcttggtcattacgattatggaagtgcaaagggagtcttcaccttcgctgagttccactccagtcgttgagttttatcggcctgcaagtttcgactctgtgaccaccgtgagtcacaactggactgtctggaattgcactagcctcctgtttcagacctccattcgtgtgctggtctggctgttgggactgctctatttttctagcttgccgctgggtatatacctgttggtctctaagaaagttacccttggggtcgtctttgtttccctcgtcccctcgagtcttgtgatattaatggtatatgggttttgtcagtgcgtgtgccacgagtttcttgattgcatggcccctccgtcatag

SEQ ID NO: 63650 - DNA, 744 bp, Artificial Sequence
  derived and/or modified sequence
atggcttcccagccaccagaggacacagcagagtcccaagcatctgatgagcttgagtgcaaaatctgctataaccggtacaacctcaaacaacggaagccgaaagtgctggagtgctgtcacagggtctgtgcgaagtgtctgtacaaaattattgatttcggcgatagcccccaaggggtgattgtgtgtccattttgtaggttcgagacctgcctgcccgatgacgaagtgtccagtcttccagatgataataacatactcgtgaacttaacctgcggtggaaagggcaagaaatgcttaccagagaatccaaccgaactgcttttgacaccgaagagactggctagtttggtgagcccatctcacacttctagtaattgtctcgtgataaccatcatggaagtccagcgagaaagttccccttcgctgtcatcgactccagtcgtggaattctaccgacctgcctccttcgatagcgttacaacggtcagccataattggacagtgtggaattgtacaagccttctgttccagacatccatacgtgttctggtttggctcctcgggctcctgtatttctcgagtttgccactagggatctacctgctggtgtctaagaaggtgacactcggagttgtatttgtgtcccttgtgccaagcagtctggtcatactcatggtttatgggttttgccagtgcgtgtgtcacgagttcttggattgcatggcaccaccctcctag

SEQ ID NO: 63651 - DNA, 489 bp, Artificial Sequence
  derived and/or modified sequence
atggccagccagcccccagaggacacagctgagagccaggccagtgatgagctggagtgcaagatctgctacaaccgctacaacctgaagcagaggaagcccaaggtgctggagtgctgccaccgggtgtgtgccaagtgcctgtacaagatcatcgactttggagacagcccccagggcgtcatcgtgtgccccttctgccgctttgagacctgcctgcctgatgatgaggtgagcagcctgcctgatgacaacaacatcctggtgaacctgacctgtggcggcaagggcaagaagtgcctgcctgagaaccccacagagctgctgctgacccccaagaggctggccagcctggtgagccccagccacaccagcagcaactgcctggtgatcaccatcatggaggtgcagcgggagagcagccccagcctgagcagcacccctgtggtggagttctacagacctgccagctttgacagcgtgacctag

SEQ ID NO: 63652 - DNA, 249 bp, Artificial Sequence
  derived and/or modified sequence
atggccagccagcccccagaggacacagctgagagccaggccagtgatgagctggagtgcaagatctgctacaaccgctacaacctgaagcagaggaagcccaaggtgctggagtgctgccaccgggtgtgtgccaagtgcctgtacaagatcatcgactttggagacagcccccagggcgtcatcgtgtgccccttctgccgctttgagacctgcctgcctgatgatgaggtgagcagcctgccctag

SEQ ID NO: 63653 - DNA, 42 bp, Artificial Sequence
  derived and/or modified sequence
atggccagccagcccccagaggacacagctgagagccagtag

SEQ ID NO: 63654 - DNA, 744 bp, Artificial Sequence
  derived and/or modified sequence
atggccagccagcccccagaggacacagctgagagccaggccagtgatgagctggagtgcaagatctgctacaaccgctacaacctgaagcagaggaagcccaaggtgctggagtgctgccaccgggtgtgtgccaagtgcctgtacaagatcatcgactttggagacagcccccagggcgtcatcgtgtgccccttctgccgctttgagacctgcctgcctgatgatgaggtgagcagcctgcctgatgacaacaacatcctggtgaacctgacctgtggcggcaagggcaagaagtgcctgcctgagaaccccacagagctgctgctgacccccaagaggctggccagcctggtgagccccagccacaccagcagcaactgcctggtgatcaccatcatggaggtgcagcgggagagcagccccagcctgagcagcacccctgtggtggagttctacagacctgccagctttgacagcgtgaccaccgtgagccacaactggacagtgtggaactgcaccagcctgctcttccagaccagcatccgggtgctggtgtggctgctgggcctgctgtacttcagcagcctgcccctgggcatctacctgctggtgtccaagaaggtgaccctgggcgtggtgtttgtgtccctggtgcccagcagcctggtgatcctgatggtgtatggcttctgccagtgtgtgtgccacgagttcctggactgcatggccccacccagctag

SEQ ID NO: 63655 - DNA, 156 bp, Artificial Sequence
  derived and/or modified sequence
atggccagccagcccccagaggacacagctgagagccaggccagtgatgagctggagtgcaagatctgctacaaccgctacaacctgaagcagaggaagcccaaggtgctggagtgctgccaccgggtgtgtgccaagtgcctgtacaagatctag

SEQ ID NO: 63656 - DNA, 489 bp, Artificial Sequence
  derived and/or modified sequence
atggccagccagccccccgaggacaccgccgagagccaggccagcgacgagcttgagtgcaagatctgttacaacagatacaatcttaagcagcgtaaacccaaggtgttagagtgctgccacagggtgtgtgctaaatgcctttacaagatcattgattttggagactcgcctcagggggtcatcgtttgccctttctgccggtttgagacttgtctgccagatgacgaggttagctccctgcctgacgataacaatattcttgtgaatctgacgtgtgggggcaagggcaaaaaatgtctcccagaaaatccaactgagcttcttctcactccaaagaggctcgccagtctggtgtccccgagccacacatcaagtaactgccttgttatcactattatggaagtccaaagagagagcagtccaagcctttcatccaccccggtcgttgaattttacagacccgcctcttttgatagcgtaacctag

SEQ ID NO: 63657 - DNA, 249 bp, Artificial Sequence
  derived and/or modified sequence
atggccagccagccccccgaggacaccgccgagagccaggccagcgatgaactcgagtgtaaaatatgttataaccggtataatttgaaacagaggaaacctaaagtacttgagtgttgtcatcgcgtttgcgcgaagtgcctgtacaaaattattgactttggggattcaccgcagggcgtcattgtctgtcccttttgtaggttcgagacctgtctccctgatgatgaggtgtcatctctgccgtag

SEQ ID NO: 63658 - DNA, 744 bp, Artificial Sequence
  derived and/or modified sequence
atggccagccagccccccgaggacaccgccgagagccaggccagcgatgagctggagtgtaagatctgctataacaggtacaacctcaagcagagaaagcctaaggtgcttgaatgttgtcatcgggtgtgtgcaaagtgtctctataagatcatcgacttcggcgactcgccccagggagttattgtgtgcccattctgtcggttcgagacatgcctcccagatgacgaggtgtcctctctgcctgatgataacaacatcttagtaaatctgacctgtggcggaaaaggaaagaaatgtctacccgagaatcccacggagctgcttcttactccaaaacgcctggcatcgctcgtgtccccatctcacacgtccagtaactgtcttgtgatcacaataatggaagtccagcgtgagtccagccccagcctgtcctctacaccagtggttgaattttatagacccgccagctttgactctgtgactacagtgagccacaactggacagtgtggaattgcacatccctgttgtttcagacctccatcagggtgctggtgtggctcttaggactcctctatttcagttccctgcccctgggtatttaccttctcgtgtccaagaaagtcacattgggcgtggtgtttgtcagcctggtccccagcagcttagttatccttatggtttacggattttgtcagtgtgtctgccatgaatttctggattgtatggctccaccttcttag

SEQ ID NO: 63659 - DNA, 156 bp, Artificial Sequence
  derived and/or modified sequence
atggccagccagccccccgaggacaccgccgagagccaggccagcgacgaacttgagtgcaaaatttgctataaccgatacaacctcaagcagcgaaagcctaaagtcctggagtgctgccacagggtctgtgcgaagtgcctctataagatctag

SEQ ID NO: 63660 - DNA, 744 bp, Artificial Sequence
  derived and/or modified sequence
atggccagccagccccccgaggacaccgccgagagccaggccagcgacgaactggaatgtaagatctgttacaacaggtataaccttaaacagcgaaagccaaaggtgcttgaatgctgtcatcgagtgtgtgccaagtgtctgtacaaaataattgacttcggtgattcaccacagggagtgatcgtgtgtcctttttgcagattcgagacatgccttcctgacgatgaggtgagttccctacccgacgataacaatatcctcgttaacctcacgtgcggagggaaggggaagaaatgccttcccgaaaaccctacagagttactgctgacacccaaaaggctcgcatctcttgttagtcctagccacacgagctccaactgcttggtgattacgattatggaggtccagcgggagtcgagtccatccctgtcctcaacacccgtcgttgaattttatagaccggccagcttcgactccgtcactacggtgtctcacaactggacagtgtggaactgtacgtccctcctctttcagacctctatccgtgtacttgtttggctattgggcctgctttatttttccagcctgccactcggaatttatctcctggtctcaaaaaaggtcacgctgggggtggtcttcgtgtctttagtgcctagttccctcgttatcctgatggtgtacggcttctgccagtgcgtctgtcatgagtttctggactgcatggctcctccgtcgtag

SEQ ID NO: 63661 - DNA, 744 bp, Artificial Sequence
  derived and/or modified sequence
atggccagccagccccccgaggacaccgccgagagccaggccagcgacgagctggaatgcaaaatctgctataatcgctacaatctgaagcagaggaaacctaaggtcctggaatgttgccatagagtgtgtgccaagtgtctgtacaagataatcgacttcggagattcccctcagggagtgattgtgtgccccttctgcaggttcgagacttgtcttccagatgacgaagtgtctagcctgccagacgataataacattcttgtgaaccttacgtgcgggggcaagggcaaaaagtgtctgccggagaatcctacagagctgctgctgactccaaaacgcctggcctctttagtcagtccatcccacacgagctcaaattgcttagtgatcacaattatggaagtccaaagagagtcttcaccatcactgtcatctacacccgtggtggagttttaccggcctgcatcttttgactccgtgaccactgtttcgcacaattggactgtgtggaattgcaccagtttgctgttccagacctccattcgggttctggtgtggctcctgggactgctatatttttcctctctcccccttggtatttaccttctggtctccaagaaggtgactcttggagtggtcttcgtctcgttggttccaagctccctggtgatcctgatggtgtatggcttttgtcagtgtgtgtgtcatgaattcctggattgcatggcccccccatcttag

SEQ ID NO: 63662 - DNA, 744 bp, Artificial Sequence
  derived and/or modified sequence
atggccagccagccccccgaggacaccgccgagagccaggccagcgacgaactcgagtgtaaaatttgttataaccgctacaacctgaaacagcgtaagcccaaggtgttggagtgctgccaccgtgtgtgtgcaaagtgcctctataagatcatcgattttggggattcaccccagggtgtaatagtgtgtcccttttgtagatttgagacctgtctgccagatgacgaagtctccagtttgccagacgataataacattctggtcaatctaacttgtggcggaaaggggaaaaagtgcttgcccgaaaatcccaccgaattgctgctcaccccaaagagactggcctccctcgtgtccccttcccacaccagtagcaactgtcttgtgataacgattatggaggtgcagcgggagagcagcccttctttatccagtacccctgtggtggaattctatcgacccgcgtcattcgactctgttactaccgtgtcccataactggaccgtatggaactgcacttccctgctgtttcaaacctccatccgtgtcctggtatggctgctcggactgttatatttttcctccctgccattgggaatctaccttctggtgtctaagaaagtgacactgggagtcgtttttgtgtcactagtgccctcctccttagtgatcctgatggtttatggattttgccagtgcgtctgtcacgagttcctagattgcatggcacctccctcatag

SEQ ID NO: 63663 - DNA, 489 bp, Artificial Sequence
  derived and/or modified sequence
atggcatcacagccgccagaagatacagccgaatcccaggccagcgacgaattggagtgtaaaatctgctacaatagatacaatctcaaacagagaaagccaaaggtgcttgaatgctgtcatcgcgtgtgtgctaagtgcttgtataaaataatcgactttggagatagcccccagggggtgattgtgtgccccttctgcagatttgagacatgcctgcctgatgatgaggtgagcagcctccccgatgataacaatatcttggtgaatctaacttgcggagggaaaggaaaaaagtgcctgcccgagaaccctaccgagctgttgctgacccctaagcgactcgcctctttggtctccccctctcacacttccagtaactgtctggttattaccatcatggaagtccagagagagagtagtccttccctatccagcacccccgtggttgagttctacaggccagcgagcttcgacagtgtcacttag

SEQ ID NO: 63664 - DNA, 249 bp, Artificial Sequence
  derived and/or modified sequence
atggctagtcagccacccgaggatacagccgagagtcaggcaagcgacgagcttgagtgcaaaatctgctacaaccgctacaatctcaagcagagaaagcccaaggtgttggaatgctgtcacagagtttgtgctaagtgtctgtacaagatcattgattttggcgattcgcctcagggagtgattgtatgtcctttctgcagattcgaaacttgcctacccgatgacgaggtgtcatctttgccctag

SEQ ID NO: 63665 - DNA, 42 bp, Artificial Sequence
  derived and/or modified sequence
atggcatcccagccgcctgaagacaccgccgaaagccagtag

SEQ ID NO: 63666 - DNA, 744 bp, Artificial Sequence
  derived and/or modified sequence
atggcctcccaacctccagaggatacagcagagagccaggcctccgacgagctggagtgcaagatatgttataataggtataaccttaagcagcggaagccaaaagtgctggaatgctgccacagagtctgcgctaagtgtttatataaaattattgactttggtgacagcccacaaggcgtgatagtatgtccattctgtaggttcgagacctgcctcccggacgatgaagtctcgagtctccctgacgacaataacatcctggtcaacctgacatgcggcggaaaggggaagaaatgcctaccggagaatccaactgagttgctgctcacgccaaaacgactggcatcactggtgagcccgtcacacaccagctccaattgtttagtcattacaatcatggaggtgcagagggaatcctctccatcccttagctcaactcccgtagtggagttttatcgccctgcttcctttgatagcgtaaccaccgtttcacacaactggactgtctggaactgcacgtcattgctattccagacttccattagggtactcgtctggctcctgggattattgtacttcagctctttgcctttgggtatctatctgctggttagcaagaaggttactctgggcgtggtgtttgtgagtttggtgccaagttcactcgtcatcctgatggtttacggcttttgccagtgtgtctgtcacgaatttctggactgcatggcaccaccttcctag

SEQ ID NO: 63667 - DNA, 156 bp, Artificial Sequence
  derived and/or modified sequence
atggcctctcagccccctgaggacacagccgagtctcaggcatccgatgagctcgaatgtaagatctgctacaatagatacaatttgaagcagaggaaacctaaggttctggagtgttgtcacagagtctgtgcaaagtgcctgtacaaaatatag

SEQ ID NO: 63668 - DNA, 744 bp, Artificial Sequence
  derived and/or modified sequence
atggcttcccagccacccgaagacacagccgaatcccaggcttcagacgaactcgaatgtaaaatttgttacaataggtataacctgaagcagcggaagccgaaagtgttagagtgctgtcaccgggtatgcgccaaatgtctttataagattattgattttggtgattcccctcagggggtcatagtgtgtcctttttgtcggttcgaaacatgcttgcccgatgacgaggtttcgtcactgccagatgacaataacattctggtgaaccttacctgtggcggtaaaggaaagaagtgcttacccgagaacccaaccgaacttcttttgactccaaagcggcttgcgtcactggtcagcccttcccacactagctccaactgcctggtcataacaatcatggaggttcaacgtgagtcgtcaccaagcctgagttcaacaccggtggtcgaattctatcggcctgctagcttcgacagcgtcacaaccgtttcacacaattggactgtctggaactgcacctcactcctgttccagaccagtatccgggtgctggtgtggctgctcggattactgtacttttctagcctgccactaggcatatatctgcttgtttccaagaaggtaacactcggtgtcgtcttcgtgtcacttgtgccctctagcctggtaatcctgatggtctatggcttctgccagtgtgtatgccacgagtttctggattgcatggccccaccatcctag

SEQ ID NO: 63669 - DNA, 744 bp, Artificial Sequence
  derived and/or modified sequence
atggccagtcagccccctgaggatacagctgaatcccaggccagcgacgaactcgagtgtaagatttgctacaaccgatacaatctgaagcagcgtaagcccaaggtgctcgaatgctgccaccgggtttgcgctaaatgcttatacaagattattgactttggagactctcctcagggagtgatcgtctgtccgttctgtcgattcgagacctgcttaccagacgacgaagtaagctcacttccagacgataacaatatcttggttaacctgacctgtggaggtaaaggaaagaagtgtctgcccgagaaccccaccgagttactgctaacccccaagagactcgcctcactcgtgagcccgtcacataccagttcaaattgcctcgtgatcacaattatggaggtgcagcgcgaatccagtccatctttgagttctactcccgtcgtcgagttttacagacccgcttcatttgactccgtcacgacggtgtcccacaattggactgtctggaattgtacctctctgttgttccagacatcaattcgagtgctggtgtggctccttggcctgctgtacttcagtagcctgccacttggtatctatctcctggtttcaaaaaaggtgactctaggggtagtgttcgtgagcctggtgccatccagcctcgtgatccttatggtgtacggcttttgtcagtgtgtctgccatgagttcctggattgtatggccccaccaagctag

SEQ ID NO: 63670 - DNA, 744 bp, Artificial Sequence
  derived and/or modified sequence
atggcttctcagcccccagaagatacggctgaatcccaagcctccgacgagttggagtgcaaaatatgttacaatagatacaatctcaagcagaggaaacccaaggtgttagaatgttgccacagagtctgcgccaagtgcctgtacaaaataatcgactttggggactcgccacagggggtgatagtctgccctttttgccgatttgagacatgtttgccggatgacgaggtcagctctcttcccgacgacaataacatactggtgaacctgacgtgtgggggaaaaggcaagaagtgtctgccagagaatcctaccgagctcctcctgactcctaaacgcctggcctctctggtctccccttcccacacctcctccaactgtctggtgattactattatggaagtacagagggaaagcagcccttccctcagttctactcccgttgttgaattttatcggcctgcatctttcgacagcgtgacaactgtgtcacacaattggacggtgtggaattgcactagccttctctttcagaccagcattagagtgctggtctggctccttggactcctctattttagcagcctgccactgggaatctatctactcgtgtctaagaaagtcacattgggggttgtgttcgtttctctcgtgccttcaagcctggtaattctgatggtctatgggttctgtcagtgcgtctgccatgagtttctggattgcatggcaccgccatcctag

SEQ ID NO: 63671 - DNA, 826 bp, Artificial Sequence
  derived and/or modified sequence
agacaaagccgcccgcccgccagcccgctagctcctcgcgcgagctcctcctccacgggaacctccctcccctcccaggcgccgccgcagccggagcggctcccgggccctgggccgccgccggccagacccttcatgtggcctttataaatatgcgtttgagacagagttatatgcagaagttgaaaatgcctggaagatttctggtttctttcactacttatcctgcctttttgcatcgctgccagatttggatgatatgatattcagaggggcaccttaatcaaagccattcttcaacaagacccacctggcataagattgcacacataattcaagatggccagtcaacctcctgaagacactgcggagtctcaggcctctgatgagctggagtgcaaaatctgttacaatcgatacaatctgaaacagaggaaacccaaagtgctggagtgttgtcatagggtttgtgccaaatgcctctacaagatcatagactttggggactccccacaaggtgtcattgtctgtcctttctgcaggtttgagacgtgcctgccagatgatgaagttagtagcctgcccgatgacaacaacatccttgtaaacttgacttgtggaggcaaagggaagaagtgcctgccagagaaccctactgagctgctgctcacccccaagaggctggcctctctggtcagtccttctcacacgtcctccaactgcctggtcataaccatcatggaggtgcagagagagagctccccgtccctgagctccactcctgtggtagaattttataggcctgcgagtttcgactctgtcacca

SEQ ID NO: 63672 - DNA, 633 bp, Artificial Sequence
  derived and/or modified sequence
gtctccctccgggcaccacgggggccgccgtcctggcaccaacttgaggggctgtgcggcggagggcggctgcggagcgcccgcgcgggctgcacctgctcagggagctgcccctctgttgttgttgttattttccttcttggcgtgccatcgaggcttttgggggaaaaaaagacccttcatgtggcctttataaatatgcgtttgagacagagttatatgcagaagttgaaaatgcctggaagatttctggtttctttcactacttatcctgcctttttgcatcgctgccagatttggatgatatgatattcagaggggcaccttaatcaaagccattcttcaacaagacccacctggcataagattgcacacataattcaagatggccagtcaacctcctgaagacactgcggagtctcaggcctctgatgagctggagtgcaaaatctgttacaatcgatacaatctgaaacagaggaaacccaaagtgctggagtgttgtcatagggtttgtgccaaatgcctctacaagatcatagactttggggactccccacaaggtgtcattgtctgtcctttctgcaggtttgagacgtgcctgccagatgatgaagttagtagcctgcccga

SEQ ID NO: 63673 - DNA, 557 bp, Artificial Sequence
  derived and/or modified sequence
aacctccctcccctcccaggcgccgccgcagccggagcggctcccgggccctgggccgccgccggccagactgcctgcaagggatggtcatactcctggctgcacttccagagtcttgaagaagaaagcagatgtggatacctaaatatagggaagaaatacttgtgttggctgcatttccagggatgctaccagagctcaaggctgtcacctggtcttgcccagaagagccgttcttagaggcaggacttgatgaaggctttcctgctgatggaataggtttgctagagctggccttggaattagaacccttcatgtggcctttataaatatgcgtttgagacagagttatatgcagaagttgaaaatgcctggaagatttctggtttctttcactacttatcctgcctttttgcatcgctgccagatttggatgatatgatattcagaggggcaccttaatcaaagccattcttcaacaagacccacctggcataagattgcacacataattcaagatggccagtcaacctcctgaagacactgcggagtctcag

SEQ ID NO: 63674 - DNA, 3706 bp, Artificial Sequence
  derived and/or modified sequence
gacgcagggtcggcggctcagcgccgtagagacaaagccgcccgcccgccagcccgctagctcctcgcgcgagctcctcctccacgggaacctccctcccctcccaggcgccgccgcagccggagcggctcccgggccctgggccgccgccggccaggaagaaatacttgtgttggctgcatttccagggatgctaccagagctcaaggctgtcacctggtcttgcccagaagagccgttcttagaggcaggacttgatgaaggctttcctgctgatggaataggtttgctagagctggccttggaattagaacccttcatgtggcctttataaatatgcgtttgagacagagttatatgcagaagttgaaaatgcctggaagatttctggtttctttcactacttatcctgcctttttgcatcgctgccagatttggatgatatgatattcagaggggcaccttaatcaaagccattcttcaacaagacccacctggcataagattgcacacataattcaagatggccagtcaacctcctgaagacactgcggagtctcaggcctctgatgagctggagtgcaaaatctgttacaatcgatacaatctgaaacagaggaaacccaaagtgctggagtgttgtcatagggtttgtgccaaatgcctctacaagatcatagactttggggactccccacaaggtgtcattgtctgtcctttctgcaggtttgagacgtgcctgccagatgatgaagttagtagcctgcccgatgacaacaacatccttgtaaacttgacttgtggaggcaaagggaagaagtgcctgccagagaaccctactgagctgctgctcacccccaagaggctggcctctctggtcagtccttctcacacgtcctccaactgcctggtcataaccatcatggaggtgcagagagagagctccccgtccctgagctccactcctgtggtagaattttataggcctgcgagtttcgactctgtcaccactgtgtcacacaactggactgtgtggaactgcacgtccctgctgtttcagacatccatccgggtgttagtgtggttgctaggtttgctctacttcagctccttacccttaggaatctacttactggtgtctaagaaagtcacccttggggtcgtctttgtcagcctggtcccttcgagcctcgttattcttatggtgtatggtttttgccagtgtgtttgtcatgaatttctagactgtatggcacctccttcttaactgatatgcaaaataagaaattggacacacattgccctgtttgagtgtgaagttagataatttataatttattttcttttatgttctttatgattagtatccatgacattaacaaaacccttggccacatgttgacttgattggttttcctgtaggctggaagtaaaaatgttcatttctacttaggggttagcaaaattgtataagctcacacttcatggagcactgacagcagtgagtcttcccagagaaaggacagggtttctctcagcactgccagacagacggcaggggtgtggtgtgttatactatagggagagcatggatccctcctttcgtattcatggatgttctatgatggcagttggacacaagaggaaagttgctctgagacacaaagtgtgtactcctttcccaccccatacccctggtattggaacaccctagaattgtcttcaggtgttttctctcttaagtcactctctgtggtcggcgatcccattgagatacttgtttcctctgcccattctcccttgccaagaggaaactcggttccattcccttgggtagtttcaactgaataccagttttgccacattactaaggagaatgaaaagcactgaggaatttgcatcacagtcagcttcatggcagaatgtggccatttgtccttgagacacactctttcctccatgtctgttttcctctctcctcagtcttatctgagaagaatggaggagaaggaacttctcatacagcggttattattgatgaaaaccttcatttgagtctttccttataacatcttagttttggtttttttaaaccacattgcccaatcagcctcaccccttgtcctgaaaaggttccatttaaattagttgctataaattcatcaatactttttttccctattatatttttggttctattaggatttacttaactgaatcttataacaattcgaggtgaactgtggcaatgaaaaccagaaacagttaatgagatgcttcagctcacagtttgaagtgctgagaacctaagtattttgctgtacggtactgagctgtaccaaaatatgatggtttaggtttatgtgcaagactttgtgttgtagtctagacaaaggggtgggcaagagacatgcaaagctgaagccctgcttgaaaagacccttcaaggaagtaaaatggcaggggcagagtgcagcttaacatgttgctatccctgttgtttttgagttggttttggaatggattcaagttcttacacaatttattttgaatacaagcataatctaggtgatttgagttaatgaacttcttttcatgatgtagggaaagttgaatgtatatatttctaagaagaatttgtttagcagattacaagttggcaaaatagactgttcacagaaactaggcaaaaatttaaaaaaacattctagtctctaaaacccattactaatgattaacattaaaatatttgtaactcttagaaagggggcattactaagacgactttaacttgttatgaaatctttgttgtgtgatgcaggtacagtgcgcccattccaactggaatagcagtttgattttaattgtaaaactaaacttcgggaatatgtatgcccaaagtaagtaggatgagaatagtatacatgggatatggtccaatgaatttaagccccaagatacagctaaatacatttatgatttcataaaatctagtttagatagcattgtgatgcaatttccagaaatccatttgtgtttagagtaaataccatgtttagaagatgttttgtggtttggatttatatatttgtaaggtttttttaaaaaaatgttcgttttgtttgaaatgtaacattgagtaaattggtgagttatataatgagatttctagaaagctctggacatgggtacgatgtgttttgcttctctgtataatgtctacagtgataaacttgtgtctccgtgtattgtggcagtctttttttctagttaatttggctttagagagcaatctttgtatgacaccagaaaactcttcatgctattgaatgataaaaagataatgctttaatattttattcactgtgatactattttgtttgtctattaaattgttattatttccaaatttagaagtttgatttctctgacttatggttaaaattcagttatgactttgcacctctgttagctttagataacggcaaacatgaacattcagaaacgttggttcagctaatgcctttatcatgcccgtgaagacttcagaactttccaacaaaggggacctaacccatcacacttttaaaaggccttcatagtttttttattttattttattttattttattttattttattttatttatttattttaaagcaggggagaaaaattaggggagatgaaataaaaatatcgtcttta

SEQ ID NO: 63675 - DNA, 646 bp, Artificial Sequence
  derived and/or modified sequence
gtgcatgctgcggcagttgcaacaggagaaccgagtaccagttgctcaacactttatcactttgcattgctctttctcctcccttaagtgaatttccattttgagggtacagctccacaggagaaaggaagaaatacttgtgttggctgcatttccagggatgctaccagagctcaaggctgtcacctggtcttgcccagaagagccgttcttagaggcaggacttgatgaaggctttcctgctgatggaataggtttgctagagctggccttggaattagaacccttcatgtggcctttataaatatgcgtttgagacagagttatatgcagaagttgaaaatgcctggaagatttctggtttctttcactacttatcctgcctttttgcatcgctgccagatttggatgatatgatattcagaggggcaccttaatcaaagccattcttcaacaagacccacctggcataagattgcacacataattcaagatggccagtcaacctcctgaagacactgcggagtctcaggcctctgatgagctggagtgcaaaatctgttacaatcgatacaatctgaaacagaggaaacccaaagtgctggagtgttgtcatagggtttgtgccaaatgcctctacaagatc

SEQ ID NO: 63676 - DNA, 3274 bp, Artificial Sequence
  derived and/or modified sequence
gtctccctccgggcaccacgggggccgccgtcctggcaccaacttgaggggctgtgcggcggagggcggctgcggagcgcccgcgcgggctgcacctgctcagggagctgcccctctgttgttgttgttattttccttcttggcgtgccatcgaggcttttgggggaaaaaaagacccttcatgtggcctttataaatatgcgtttgagacagagttatatgcagaagttgaaaatgcctggaagatttctggtttctttcactacttatcctgcctttttgcatcgctgccagatttggatgatatgatattcagaggggcaccttaatcaaagccattcttcaacaagacccacctggcataagattgcacacataattcaagatggccagtcaacctcctgaagacactgcggagtctcaggcctctgatgagctggagtgcaaaatctgttacaatcgatacaatctgaaacagaggaaacccaaagtgctggagtgttgtcatagggtttgtgccaaatgcctctacaagatcatagactttggggactccccacaaggtgtcattgtctgtcctttctgcaggtttgagacgtgcctgccagatgatgaagttagtagcctgcccgatgacaacaacatccttgtaaacttgacttgtggaggcaaagggaagaagtgcctgccagagaaccctactgagctgctgctcacccccaagaggctggcctctctggtcagtccttctcacacgtcctccaactgcctggtcataaccatcatggaggtgcagagagagagctccccgtccctgagctccactcctgtggtagaattttataggcctgcgagtttcgactctgtcaccactgtgtcacacaactggactgtgtggaactgcacgtccctgctgtttcagacatccatccgggtgttagtgtggttgctaggtttgctctacttcagctccttacccttaggaatctacttactggtgtctaagaaagtcacccttggggtcgtctttgtcagcctggtcccttcgagcctcgttattcttatggtgtatggtttttgccagtgtgtttgtcatgaatttctagactgtatggcacctccttcttaactgatatgcaaaataagaaattggacacacattgccctgtttgagtgtgaagttagataatttataatttattttcttttatgttctttatgattagtatccatgacattaacaaaacccttggccacatgttgacttgattggttttcctgtaggctggaagtaaaaatgttcatttctacttaggggttagcaaaattgtataagctcacacttcatggagcactgacagcagtgagtcttcccagagaaaggacagggtttctctcagcactgccagacagacggcaggggtgtggtgtgttatactatagggagagcatggatccctcctttcgtattcatggatgttctatgatggcagttggacacaagaggaaagttgctctgagacacaaagtgtgtactcctttcccaccccatacccctggtattggaacaccctagaattgtcttcaggtgttttctctcttaagtcactctctgtggtcggcgatcccattgagatacttgtttcctctgcccattctcccttgccaagaggaaactcggttccattcccttgggtagtttcaactgaataccagttttgccacattactaaggagaatgaaaagcactgaggaatttgcatcacagtcagcttcatggcagaatgtggccatttgtccttgagacacactctttcctccatgtctgttttcctctctcctcagtcttatctgagaagaatggaggagaaggaacttctcatacagcggttattattgatgaaaaccttcatttgagtctttccttataacatcttagttttggtttttttaaaccacattgcccaatcagcctcaccccttgtcctgaaaaggttccatttaaattagttgctataaattcatcaatactttttttccctattatatttttggttctattaggatttacttaactgaatcttataacaattcgaggtgaactgtggcaatgaaaaccagaaacagttaatgagatgcttcagctcacagtttgaagtgctgagaacctaagtattttgctgtacggtactgagctgtaccaaaatatgatggtttaggtttatgtgcaagactttgtgttgtagtctagacaaaggggtgggcaagagacatgcaaagctgaagccctgcttgaaaagacccttcaaggaagtaaaatggcaggggcagagtgcagcttaacatgttgctatccctgttgtttttgagttggttttggaatggattcaagttcttacacaatttattttgaatacaagcataatctaggtgatttgagttaatgaacttcttttcatgatgtagggaaagttgaatgtatatatttctaagaagaatttgtttagcagattacaagttggcaaaatagactgttcacagaaactaggcaaaaatttaaaaaaacattctagtctctaaaacccattactaatgattaacattaaaatatttgtaactcttagaaagggggcattactaagacgactttaacttgttatgaaatctttgttgtgtgatgcaggtacagtgcgcccattccaactggaatagcagtttgattttaattgtaaaactaaacttcgggaatatgtatgcccaaagtaagtaggatgagaatagtatacatgggatatggtccaatgaatttaagccccaagatacagctaaatacatttatgatttcataaaatctagtttagatagcattgtgatgcaatttccagaaatccatttgtgtttagagtaaataccatgtttagaagatgttttgtggtttggatttatatatttgtaaggtttttttaaaaaaatgttcgttttgtttgaaatgtaacattgagtaaattggtgagttatataatgagatttctagaaagctctggacatgggtacgatgtgttttgcttctctgtataatgtctacagtgataaacttgtgtctccgtgtattgtggcagtctttttttctagttaatttggctttagagagcaatctttgtatgacaccagaaaactcttcatgctattgaatgataaaaagataatgctttaatattttattcactgtgatactattttgtttgtctattaaattgttattatttccaaattt

SEQ ID NO: 63677 - DNA, 3382 bp, Artificial Sequence
  derived and/or modified sequence
gtgcatgctgcggcagttgcaacaggagaaccgagtaccagttgctcaacactttatcactttgcattgctctttctcctcccttaagtgaatttccattttgagggtacagctccacaggagaaaggaagaaatacttgtgttggctgcatttccagggatgctaccagagctcaaggctgtcacctggtcttgcccagaagagccgttcttagaggcaggacttgatgaaggctttcctgctgatggaataggtttgctagagctggccttggaattagaacccttcatgtggcctttataaatatgcgtttgagacagagttatatgcagaagttgaaaatgcctggaagatttctggtttctttcactacttatcctgcctttttgcatcgctgccagatttggatgatatgatattcagaggggcaccttaatcaaagccattcttcaacaagacccacctggcataagattgcacacataattcaagatggccagtcaacctcctgaagacactgcggagtctcaggcctctgatgagctggagtgcaaaatctgttacaatcgatacaatctgaaacagaggaaacccaaagtgctggagtgttgtcatagggtttgtgccaaatgcctctacaagatcatagactttggggactccccacaaggtgtcattgtctgtcctttctgcaggtttgagacgtgcctgccagatgatgaagttagtagcctgcccgatgacaacaacatccttgtaaacttgacttgtggaggcaaagggaagaagtgcctgccagagaaccctactgagctgctgctcacccccaagaggctggcctctctggtcagtccttctcacacgtcctccaactgcctggtcataaccatcatggaggtgcagagagagagctccccgtccctgagctccactcctgtggtagaattttataggcctgcgagtttcgactctgtcaccactgtgtcacacaactggactgtgtggaactgcacgtccctgctgtttcagacatccatccgggtgttagtgtggttgctaggtttgctctacttcagctccttacccttaggaatctacttactggtgtctaagaaagtcacccttggggtcgtctttgtcagcctggtcccttcgagcctcgttattcttatggtgtatggtttttgccagtgtgtttgtcatgaatttctagactgtatggcacctccttcttaactgatatgcaaaataagaaattggacacacattgccctgtttgagtgtgaagttagataatttataatttattttcttttatgttctttatgattagtatccatgacattaacaaaacccttggccacatgttgacttgattggttttcctgtaggctggaagtaaaaatgttcatttctacttaggggttagcaaaattgtataagctcacacttcatggagcactgacagcagtgagtcttcccagagaaaggacagggtttctctcagcactgccagacagacggcaggggtgtggtgtgttatactatagggagagcatggatccctcctttcgtattcatggatgttctatgatggcagttggacacaagaggaaagttgctctgagacacaaagtgtgtactcctttcccaccccatacccctggtattggaacaccctagaattgtcttcaggtgttttctctcttaagtcactctctgtggtcggcgatcccattgagatacttgtttcctctgcccattctcccttgccaagaggaaactcggttccattcccttgggtagtttcaactgaataccagttttgccacattactaaggagaatgaaaagcactgaggaatttgcatcacagtcagcttcatggcagaatgtggccatttgtccttgagacacactctttcctccatgtctgttttcctctctcctcagtcttatctgagaagaatggaggagaaggaacttctcatacagcggttattattgatgaaaaccttcatttgagtctttccttataacatcttagttttggtttttttaaaccacattgcccaatcagcctcaccccttgtcctgaaaaggttccatttaaattagttgctataaattcatcaatactttttttccctattatatttttggttctattaggatttacttaactgaatcttataacaattcgaggtgaactgtggcaatgaaaaccagaaacagttaatgagatgcttcagctcacagtttgaagtgctgagaacctaagtattttgctgtacggtactgagctgtaccaaaatatgatggtttaggtttatgtgcaagactttgtgttgtagtctagacaaaggggtgggcaagagacatgcaaagctgaagccctgcttgaaaagacccttcaaggaagtaaaatggcaggggcagagtgcagcttaacatgttgctatccctgttgtttttgagttggttttggaatggattcaagttcttacacaatttattttgaatacaagcataatctaggtgatttgagttaatgaacttcttttcatgatgtagggaaagttgaatgtatatatttctaagaagaatttgtttagcagattacaagttggcaaaatagactgttcacagaaactaggcaaaaatttaaaaaaacattctagtctctaaaacccattactaatgattaacattaaaatatttgtaactcttagaaagggggcattactaagacgactttaacttgttatgaaatctttgttgtgtgatgcaggtacagtgcgcccattccaactggaatagcagtttgattttaattgtaaaactaaacttcgggaatatgtatgcccaaagtaagtaggatgagaatagtatacatgggatatggtccaatgaatttaagccccaagatacagctaaatacatttatgatttcataaaatctagtttagatagcattgtgatgcaatttccagaaatccatttgtgtttagagtaaataccatgtttagaagatgttttgtggtttggatttatatatttgtaaggtttttttaaaaaaatgttcgttttgtttgaaatgtaacattgagtaaattggtgagttatataatgagatttctagaaagctctggacatgggtacgatgtgttttgcttctctgtataatgtctacagtgataaacttgtgtctccgtgtattgtggcagtctttttttctagttaatttggctttagagagcaatctttgtatgacaccagaaaactcttcatgctattgaatgataaaaagataatgctttaatattttattcactgtgatactattttgtttgtctattaaattgttattatttccaaattt

SEQ ID NO: 63678 - DNA, 3495 bp, Artificial Sequence
  derived and/or modified sequence
gacgcagggtcggcggctcagcgccgtagagacaaagccgcccgcccgccagcccgctagctcctcgcgcgagctcctcctccacgggaacctccctcccctcccaggcgccgccgcagccggagcggctcccgggccctgggccgccgccggccagactgcctgcaagggatggtcatactcctggctgcacttccagagtcttgaagaagaaagcagatgtggatacctaaatatagggaagaaatacttgtgttggctgcatttccagggatgctaccagagctcaaggctgtcacctggtcttgcccagaagagccgttcttagaggcaggacttgatgaaggctttcctgctgatggaataggtttgctagagctggccttggaattagaacccttcatgtggcctttataaatatgcgtttgagacagagttatatgcagaagttgaaaatgcctggaagatttctggtttctttcactacttatcctgcctttttgcatcgctgccagatttggatgatatgatattcagaggggcaccttaatcaaagccattcttcaacaagacccacctggcataagattgcacacataattcaagatggccagtcaacctcctgaagacactgcggagtctcaggcctctgatgagctggagtgcaaaatctgttacaatcgatacaatctgaaacagaggaaacccaaagtgctggagtgttgtcatagggtttgtgccaaatgcctctacaagatcatagactttggggactccccacaaggtgtcattgtctgtcctttctgcaggtttgagacgtgcctgccagatgatgaagttagtagcctgcccgatgacaacaacatccttgtaaacttgacttgtggaggcaaagggaagaagtgcctgccagagaaccctactgagctgctgctcacccccaagaggctggcctctctggtcagtccttctcacacgtcctccaactgcctggtcataaccatcatggaggtgcagagagagagctccccgtccctgagctccactcctgtggtagaattttataggcctgcgagtttcgactctgtcaccactgtgtcacacaactggactgtgtggaactgcacgtccctgctgtttcagacatccatccgggtgttagtgtggttgctaggtttgctctacttcagctccttacccttaggaatctacttactggtgtctaagaaagtcacccttggggtcgtctttgtcagcctggtcccttcgagcctcgttattcttatggtgtatggtttttgccagtgtgtttgtcatgaatttctagactgtatggcacctccttcttaactgatatgcaaaataagaaattggacacacattgccctgtttgagtgtgaagttagataatttataatttattttcttttatgttctttatgattagtatccatgacattaacaaaacccttggccacatgttgacttgattggttttcctgtaggctggaagtaaaaatgttcatttctacttaggggttagcaaaattgtataagctcacacttcatggagcactgacagcagtgagtcttcccagagaaaggacagggtttctctcagcactgccagacagacggcaggggtgtggtgtgttatactatagggagagcatggatccctcctttcgtattcatggatgttctatgatggcagttggacacaagaggaaagttgctctgagacacaaagtgtgtactcctttcccaccccatacccctggtattggaacaccctagaattgtcttcaggtgttttctctcttaagtcactctctgtggtcggcgatcccattgagatacttgtttcctctgcccattctcccttgccaagaggaaactcggttccattcccttgggtagtttcaactgaataccagttttgccacattactaaggagaatgaaaagcactgaggaatttgcatcacagtcagcttcatggcagaatgtggccatttgtccttgagacacactctttcctccatgtctgttttcctctctcctcagtcttatctgagaagaatggaggagaaggaacttctcatacagcggttattattgatgaaaaccttcatttgagtctttccttataacatcttagttttggtttttttaaaccacattgcccaatcagcctcaccccttgtcctgaaaaggttccatttaaattagttgctataaattcatcaatactttttttccctattatatttttggttctattaggatttacttaactgaatcttataacaattcgaggtgaactgtggcaatgaaaaccagaaacagttaatgagatgcttcagctcacagtttgaagtgctgagaacctaagtattttgctgtacggtactgagctgtaccaaaatatgatggtttaggtttatgtgcaagactttgtgttgtagtctagacaaaggggtgggcaagagacatgcaaagctgaagccctgcttgaaaagacccttcaaggaagtaaaatggcaggggcagagtgcagcttaacatgttgctatccctgttgtttttgagttggttttggaatggattcaagttcttacacaatttattttgaatacaagcataatctaggtgatttgagttaatgaacttcttttcatgatgtagggaaagttgaatgtatatatttctaagaagaatttgtttagcagattacaagttggcaaaatagactgttcacagaaactaggcaaaaatttaaaaaaacattctagtctctaaaacccattactaatgattaacattaaaatatttgtaactcttagaaagggggcattactaagacgactttaacttgttatgaaatctttgttgtgtgatgcaggtacagtgcgcccattccaactggaatagcagtttgattttaattgtaaaactaaacttcgggaatatgtatgcccaaagtaagtaggatgagaatagtatacatgggatatggtccaatgaatttaagccccaagatacagctaaatacatttatgatttcataaaatctagtttagatagcattgtgatgcaatttccagaaatccatttgtgtttagagtaaataccatgtttagaagatgttttgtggtttggatttatatatttgtaaggtttttttaaaaaaatgttcgttttgtttgaaatgtaacattgagtaaattggtgagttatataatgagatttctagaaagctctggacatgggtacgatgtgttttgcttctctgtataatgtctacagtgataaacttgtgtctccgtgtattgtggcagtctttttttctagttaatttggctttagagagcaatctttgtatgacaccagaaaactcttcatgctattgaatgataaaaagataatgctttaatattttattcactgtgatactattttgtttgtctattaaattgttattatttccaaattt

SEQ ID NO: 63679 - protein, 1231 aa, Artificial Sequence
  derived and/or modified sequence
MVLLWEPAGAWLALGLALALGPSVAAAAPRQDCTGVECPPLENCIEEALEPGACCATCVQQGCACEGYQYYDCLQGGFVRGRVPAGQSYFVDFGSTECSCPPGGGKISCQFMLCPELPPNCIEAVVVADSCPQCGQVGCVHAGHKYAAGHTVHLPPCRACHCPDAGGELICYQLPGCHGNFSDAEEGDPERHYEDPYSYDQEVAEVEAATALGGEVQAGAVQAGAGGPPAALGGGSQPLSTIQAPPWPAVLPRPTAAAALGPPAPVQAKARRVTEDSEEEEEEEEEREEMAVTEQLAAGGHRGLDGLPTTAPAGPSLPIQEERAEAGARAEAGARPEENLILDAQATSRSTGPEGVTHAPSLGKAALVPTQAVPGSPRDPVKPSPHNILSTSLPDAAWIPPTREVPRKPQVLPHSHVEEDTDPNSVHSIPRSSPEGSTKDLIETCCAAGQQWAIDNDECLEIPESGTEDNVCRTAQRHCCVSYLQEKSCMAGVLGAKEGETCGAEDNDSCGISLYKQCCDCCGLGLRVRAEGQSCESNPNLGYPCNHVMLSCCEGEEPLIVPEVRRPPEPAAAPRRVSEAEMAGREALSLGTEAELPNSLPGDDQDECLLLPGELCQHLCINTVGSYHCACFPGFSLQDDGRTCRPEGHPPQPEAPQEPALKSEFSQVASNTIPLPLPQPNTCKDNGPCKQVCSTVGGSAICSCFPGYAIMADGVSCEDQDECLMGAHDCSRRQFCVNTLGSFYCVNHTVLCADGYILNAHRKCVDINECVTDLHTCSRGEHCVNTLGSFHCYKALTCEPGYALKDGECEDVDECAMGTHTCQPGFLCQNTKGSFYCQARQRCMDGFLQDPEGNCVDINECTSLSEPCRPGFSCINTVGSYTCQRNPLICARGYHASDDGTKCVDVNECETGVHRCGEGQVCHNLPGSYRCDCKAGFQRDAFGRGCIDVNECWASPGRLCQHTCENTLGSYRCSCASGFLLAADGKRCEDVNECEAQRCSQECANIYGSYQCYCRQGYQLAEDGHTCTDIDECAQGAGILCTFRCLNVPGSYQCACPEQGYTMTANGRSCKDVDECALGTHNCSEAETCHNIQGSFRCLRFECPPNYVQVSKTKCERTTCHDFLECQNSPARITHYQLNFQTGLLVPAHIFRIGPAPAFTGDTIALNIIKGNEEGYFGTRRLNAYTGVVYLQRAVLEPRDFALDVEMKLWRQGSVTTFLAKMHIFFTTFAL

SEQ ID NO: 63680 - protein, 159 aa, Artificial Sequence
  derived and/or modified sequence
MVLLWEPAGAWLALGLALALGPSVAAAAPRQDCTGVECPPLENCIEEALEPGACCATCVQQGCACEGYQYYDCLQGGFVRGRVPAGQSYFVDFGSTECSCPPGGGKISCQFMLCPELPPNCIEAVVVADSCPQCGQVGCVHAGHKYAAGHTVHLPPCRA

SEQ ID NO: 63681 - DNA, 4318 bp, Artificial Sequence
  derived and/or modified sequence
agccaggggccgcccgggctctcgacgcgccgacggccgggcggacggacggacggacgccgagcgcagtgccccgcgggtcttacaggagaggggaccgtcctgggctggcctggaccatggtgctgctctgggagcctgcaggagcctggcttgctctgggcctggccctggccctgggccccagcgtggccgcagctgcccctcggcaggactgcacgggcgtggagtgcccgccgctggagaactgcattgaggaggcgctggagccgggtgcctgctgtgccacgtgtgtgcagcagggctgcgcctgcgagggctaccagtactatgactgcctacagggtggcttcgtgcgcggccgcgtgcccgccggtcagtcctattttgtggacttcgggagcactgagtgctcctgcccaccaggcggcggcaagatcagctgccagttcatgctgtgcccggagctgccgcccaactgcatcgaggctgtagtggtggctgacagctgcccacagtgcggccaggtgggctgcgtccacgcgggccacaagtacgccgctggccacactgttcacctgccgccctgccgggcctgccactgccctgacgccggtggagagctcatctgctaccagctccccggttgccacgggaacttctcagatgccgaggagggtgaccccgagcgacactacgaagacccctacagctatgaccaggaggtggccgaggtggaagcagcaacagccctggggggtgaggtccaggcgggtgcagtccaggcaggcgcagggggccccccagctgctctgggaggtgggagtcagccactgtccaccatccaggcacccccctggccagctgtcctccccaggcccacagcggctgctgccctgggtcccccagccccagtgcaggccaaagctaggagagtgaccgaggacagtgaggaggaagaagaggaggaggaggagagagaggaaatggctgtcactgagcagctggcagcaggtggccacagggggctggatgggctgcccactacagccccagctggacccagtcttcctatccaggaggagagggcagaagctggggcaagggcagaagctggggcaaggcctgaagagaacctcatcctggatgcccaagccacgtcccgcagcactgggccggagggcgtgacgcatgcaccgagcctgggcaaggctgctctcgtcccaactcaggccgtgcctggctctcccagggacccagtcaagcccagcccccacaacatcctgtccacatcactgcctgatgcagcctggatcccacccacccgagaagtgcccaggaagccgcaagttctgccccattcccacgtggaggaggacacagaccccaactctgtccattctatccccagaagtagccctgaaggctccaccaaggacctgatcgagacttgctgcgcagccggacagcagtgggccattgacaatgacgagtgcctggagatccctgagagtggcactgaggacaacgtctgcaggacagcccagaggcactgctgtgtctcctacttgcaggagaagagctgcatggccggcgtcctgggagccaaggagggtgagacctgtggggctgaggacaacgacagctgcggcatctccctgtacaagcaatgctgtgactgctgtggcctgggcctccgcgtgcgggccgagggccagtcgtgtgagtccaatcctaacctgggctatccctgcaatcatgtcatgctctcctgctgtgagggtgaagagcctctcatagtacctgaggttcgccgacctccagagcccgcagctgcaccacggagagtttcagaggcagagatggcgggccgagaggccctgtcactgggcacagaggccgagctgccgaacagcctgccgggcgatgaccaggatgagtgccttctcctcccgggagagctgtgccagcacctttgcatcaatactgtgggttcttaccactgtgcctgctttcctggcttctcactgcaggacgatggccgcacttgccgcccagagggtcaccctccacagccggaagccccacaggagcctgcactgaagtcagaattttcccaggtggcctctaacaccatcccgctgccactgccgcagcccaatacctgcaaagacaatggaccctgcaagcaggtgtgcagcactgttgggggctcagccatatgctcctgttttcccggctatgccatcatggcggatggcgtgtcctgtgaagaccaagacgagtgcctgatgggtgctcacgattgtagccggcgacagttctgtgtgaacaccctgggatccttctactgtgtcaaccacacagtgctctgtgccgatggctatatcctcaatgcgcacaggaagtgcgtggacatcaacgagtgtgtgacggacctgcacacgtgcagccggggcgagcactgtgtgaacacactgggctccttccactgctacaaggcactcacctgtgagccaggctatgccctcaaggatggcgagtgcgaagacgtggatgagtgtgcgatgggcacgcacacctgccagccgggcttcttgtgccagaacaccaagggctccttctactgccaggccaggcagcgctgcatggatggcttcctgcaggatcctgaaggcaactgtgtggacatcaacgagtgcacgtcactgtccgagccatgtcggccaggcttcagctgcatcaacacggtgggctcctacacatgccagaggaacccgctgatctgcgcgcgcggctaccacgccagcgatgatgggaccaagtgtgtggacgtgaatgagtgtgagacaggtgtgcaccgctgcggtgagggccaagtgtgccacaacctccctggctcctaccgctgtgactgcaaagccggctttcagcgggatgcctttggccggggctgcatcgacgtgaatgagtgctgggcctcgccaggccgcctgtgccagcacacgtgtgagaacacactcggctcctaccgctgttcctgcgcctccgggttcctgctagcagcggacggcaagcgctgtgaagacgtgaatgagtgtgaggcccagcgctgcagccaggagtgtgccaacatctatggctcctaccagtgctactgccgccagggctaccagctggctgaggatgggcacacctgcacagacatcgacgagtgtgctcaaggcgccggcatcctctgcaccttccgctgtctcaacgtgccagggagctaccagtgtgcatgccctgagcagggctacaccatgacggccaacgggaggtcctgcaaggacgtggatgagtgtgcactgggtacccacaactgttccgaggctgagacctgccacaacatccagggtagcttccgctgcctgcgcttcgagtgtcctcccaactatgtccaagtctccaaaacgaagtgcgagcgcaccacgtgccatgacttcctggagtgccagaactcgccagcgcgcatcacgcactaccagctcaacttccagacgggcctcctggtgcctgcgcatatcttccgcattggccccgcgccagccttcacgggggacaccatcgccctgaacatcatcaagggcaatgaggagggctactttggcacgcgcaggctcaatgcctacacgggtgtggtctacctgcagcgggccgtgctggagccccgggactttgccctggacgtggagatgaagctctggaggcagggctccgtcaccaccttcctggccaagatgcacatcttcttcaccacctttgccctgtgaggtgccagcacgggccacctgcgggtgtggcgcagcccagggctcacactgcgtgggagggactgggtcactattgtggtttttactataactttgtaaattaacttaattttgctgacttgactcctgtggcttctggacccctcctctgccccgcaggaggaagttccacggcaggtggtgcgttcccacgcaggcaccaagtggaagcttgcacggtgggccacggccgtggcgggtgccctgtgggtgaggctgggtgatgacctgaggaccagagacacgcgaccatgttggggctcttggactcctctggatgacccgtccccaaagttgacattccatttcatgttccactgtgattaattcttttcttttttaaaaaatcattttaaagttttttgtttaactataaagtagtacatgtacattatataaaaaaaagttcaactagtatgaaagggttataaagtaacagaggaaaacgcctcttggtcccttta

SEQ ID NO: 63682 - DNA, 4193 bp, Artificial Sequence
  derived and/or modified sequence
gattcccttcatttatttcatcatggggctcatgcctgcctggcgttcagttctctacagatttgctcttgggtttattatctgcccctccacccctgagggtgtcagtgctgtgaggacgctgggaacctgtcttgctggctgataaacccctggttcctagaggggctgggtgcagaggaggcgttcctttagaaatggggcaggcttggggaccactgctgtggtaacgagtcctgctgtccctctgtcactgccctatggggctgcgctttaggctgggagtcggagaaggagctcttgcctgtgactttggggagcacgctgtctataagagtcagggtcttacaggagaggggaccgtcctgggctggcctggaccatggtgctgctctgggagcctgcaggagcctggcttgctctgggcctggccctggccctgggccccagcgtggccgcagctgcccctcggcaggactgcacgggcgtggagtgcccgccgctggagaactgcattgaggaggcgctggagccgggtgcctgctgtgccacgtgtgtgcagcagggctgcgcctgcgagggctaccagtactatgactgcctacagggtggcttcgtgcgcggccgcgtgcccgccggtcagtcctattttgtggacttcgggagcactgagtgctcctgcccaccaggcggcggcaagatcagctgccagttcatgctgtgcccggagctgccgcccaactgcatcgaggctgtagtggtggctgacagctgcccacagtgcggccaggtgggctgcgtccacgcgggccacaagtacgccgctggccacactgttcacctgccgccctgccgggcctgccactgccctgacgccggtggagagctcatctgctaccagctccccggttgccacgggaacttctcagatgccgaggagggtgaccccgagcgacactacgaagacccctacagctatgaccaggaggtggccgaggtggaagcagcaacagccctggggggtgaggtccaggcgggtgcagtccaggcaggcgcagggggccccccagctgctctgggaggtgggagtcagccactgtccaccatccaggcacccccctggccagctgtcctccccaggcccacagcggctgctgccctgggtcccccagccccagtgcaggccaaagctaggagagtgaccgaggacagtgaggaggaagaagaggaggaggaggagagagaggaaatggctgtcactgagcagctggcagcaggtggccacagggggctggatgggctgcccactacagccccagctggacccagtcttcctatccaggaggagagggcagaagctggggcaagggcagaagctggggcaaggcctgaagagaacctcatcctggatgcccaagccacgtcccgcagcactgggccggagggcgtgacgcatgcaccgagcctgggcaaggctgctctcgtcccaactcaggccgtgcctggctctcccagggacccagtcaagcccagcccccacaacatcctgtccacatcactgcctgatgcagcctggatcccacccacccgagaagtgcccaggaagccgcaagttctgccccattcccacgtggaggaggacacagaccccaactctgtccattctatccccagaagtagccctgaaggctccaccaaggacctgatcgagacttgctgcgcagccggacagcagtgggccattgacaatgacgagtgcctggagatccctgagagtggcactgaggacaacgtctgcaggacagcccagaggcactgctgtgtctcctacttgcaggagaagagctgcatggccggcgtcctgggagccaaggagggtgagacctgtggggctgaggacaacgacagctgcggcatctccctgtacaagcaatgctgtgactgctgtggcctgggcctccgcgtgcgggccgagggccagtcgtgtgagtccaatcctaacctgggctatccctgcaatcatgtcatgctctcctgctgtgagggtgaagagcctctcatagtacctgaggttcgccgacctccagagcccgcagctgcaccacggagagtttcagaggcagagatggcgggccgagaggccctgtcactgggcacagaggccgagctgccgaacagcctgccgggcgatgaccaggatgagtgccttctcctcccgggagagctgtgccagcacctttgcatcaatactgtgggttcttaccactgtgcctgctttcctggcttctcactgcaggacgatggccgcacttgccgcccagagggtcaccctccacagccggaagccccacaggagcctgcactgaagtcagaattttcccaggtggcctctaacaccatcccgctgccactgccgcagcccaatacctgcaaagacaatggaccctgcaagcaggtgtgcagcactgttgggggctcagccatatgctcctgttttcccggctatgccatcatggcggatggcgtgtcctgtgaagaccaagacgagtgcctgatgggtgctcacgattgtagccggcgacagttctgtgtgaacaccctgggatccttctactgtgtcaaccacacagtgctctgtgccgatggctatatcctcaatgcgcacaggaagtgcgtggacatcaacgagtgtgtgacggacctgcacacgtgcagccggggcgagcactgtgtgaacacactgggctccttccactgctacaaggcactcacctgtgagccaggctatgccctcaaggatggcgagtgcgaagacgtggatgagtgtgcgatgggcacgcacacctgccagccgggcttcttgtgccagaacaccaagggctccttctactgccaggccaggcagcgctgcatggatggcttcctgcaggatcctgaaggcaactgtgtggacatcaacgagtgcacgtcactgtccgagccatgtcggccaggcttcagctgcatcaacacggtgggctcctacacatgccagaggaacccgctgatctgcgcgcgcggctaccacgccagcgatgatgggaccaagtgtgtggacgtgaatgagtgtgagacaggtgtgcaccgctgcggtgagggccaagtgtgccacaacctccctggctcctaccgctgtgactgcaaagccggctttcagcgggatgcctttggccggggctgcatcgacgtgaatgagtgctgggcctcgccaggccgcctgtgccagcacacgtgtgagaacacactcggctcctaccgctgttcctgcgcctccgggttcctgctagcagcggacggcaagcgctgtgaagacgtgaatgagtgtgaggcccagcgctgcagccaggagtgtgccaacatctatggctcctaccagtgctactgccgccagggctaccagctggctgaggatgggcacacctgcacagacatcgacgagtgtgctcaaggcgccggcatcctctgcaccttccgctgtctcaacgtgccagggagctaccagtgtgcatgccctgagcagggctacaccatgacggccaacgggaggtcctgcaaggacgtggatgagtgtgcactgggtacccacaactgttccgaggctgagacctgccacaacatccagggtagcttccgctgcctgcgcttcgagtgtcctcccaactatgtccaagtctccaaaacgaagtgcgagcgcaccacgtgccatgacttcctggagtgccagaactcgccagcgcgcatcacgcactaccagctcaacttccagacgggcctcctggtgcctgcgcatatcttccgcattggccccgcgccagccttcacgggggacaccatcgccctgaacatcatcaagggcaatgaggagggctactttggcacgcgcaggctcaatgcctacacgggtgtggtctacctgcagcgggccgtgctggagccccgggactttgccctggacgtggagatgaagctctggaggcagggctccgtcaccaccttcctggccaagatgcacatcttcttcaccacctttgccctgtgaggtgccagcacgggccacctgcgggtgtggcgcagcccagggctcacactgcgtgggagggactgggtcactattgtggtttttactataactttgtaaattaacttaattttgc

SEQ ID NO: 63683 - DNA, 3696 bp, Artificial Sequence
  derived and/or modified sequence
atggtgctgttgtgggagcccgcgggcgcctggctcgctctgggtctcgccttagcccttggacctagtgtcgccgccgcagcgccccggcaagactgtacgggtgtcgaatgtccacccttagaaaattgcattgaggaggcgctcgagccgggggcttgttgtgccacctgcgttcagcagggatgcgcgtgcgaaggatatcagtattacgattgcctgcaaggaggcttcgtccgtggaagagtgccggcaggccagtcatactttgtggacttcgggtcaactgagtgtagttgtccccccgggggcggaaagatctcgtgtcaattcatgctgtgcccagaactcccccccaactgtattgaagccgtggtggtcgctgacagctgtccccagtgcggccaagtggggtgtgtgcacgcaggccacaagtacgccgcaggccacactgtccatctgcccccgtgtcgggcgtgtcactgtccggacgccggcggcgagctgatttgctatcagctgccgggctgccatgggaatttttccgacgctgaggaaggcgaccctgagagacattacgaggacccatatagttacgaccaggaggttgccgaagtggaagcagcaaccgctctcggcggtgaagtccaagcgggggctgttcaggcaggggcgggaggaccgccagccgccctcgggggtggcagccagccattgtccacaatccaggcacctccatggccggccgtactgccccggccaaccgcagccgccgctttgggcccacccgcgcctgtccaagctaaggcccgcagggtcaccgaagatagcgaggaagaagaagaagaggaagaggagcgggaagagatggcagtgaccgaacagcttgctgccggtgggcatcgtggcctggatggtctgccaacaaccgctccggctgggccatctctgcccattcaggaggagcgcgctgaagccggcgctcgtgccgaagccggggcacgtccagaggagaacctcatactcgatgcacaagctaccagccgatctacgggcccagagggcgtaacgcacgccccatccctcgggaaggcagctttggtgcccacgcaggccgtgcccggaagtcccagagatccagtgaagccatccccacataatatcctgagcaccagcttacccgatgcagcgtggatcccacccacacgcgaggtgcctaggaagccccaggtcctgcctcactctcacgtggaagaggatactgacccgaatagtgtccacagtattcccaggagttctcccgaggggtctactaaggacttgattgaaacctgctgcgccgcggggcaacagtgggcgatcgacaacgacgagtgcttagagatacctgagtcaggcaccgaggataacgtgtgcagaaccgcacaacggcactgctgcgtctcgtacctccaggaaaagtcttgcatggcaggagttcttggagctaaagagggagaaacctgtggggctgaagacaacgattcctgtgggatctccctgtacaaacagtgttgcgattgttgtgggctagggctgcgagtgcgggccgaaggccagtcatgtgagagcaaccccaacctcgggtacccatgcaatcatgtgatgctgtcctgttgcgaaggcgaagagcctctaatcgtgccggaggtgcgacgcccccctgagccagcagccgccccaaggagggtgtcagaggctgagatggctggccgcgaggcactttctctcggaaccgaagccgagctgccaaattccctgcccggtgacgaccaggatgaatgcttattactcccaggcgaattgtgtcagcacttgtgcatcaacaccgtgggcagttaccattgcgcatgttttcctgggtttagcctgcaagacgacgggcgcacatgcagacctgaaggccaccccccccaaccagaggccccccaagagcctgccctcaagtccgaattctcacaggtggcctccaatacaatccccttgcccctcccgcagccgaacacctgtaaagacaacggcccttgcaagcaagtatgctcaactgtaggtggctcagcaatctgtagctgctttcctgggtacgctattatggcagacggcgtctcttgcgaagaccaggatgaatgtctaatgggggcccacgattgtagtcgacggcagttctgtgtaaataccctgggctctttctactgcgtcaaccacaccgtgctgtgtgcggatggttacattctgaatgctcatagaaagtgcgtagatatcaatgagtgtgtgactgacctccacacatgctccagaggggaacactgtgttaacacgctcggatcattccactgctacaaggccctgacttgtgagcctggatacgctttaaaggacggtgaatgtgaggatgtcgacgaatgtgcgatggggacccacacatgtcagcccggcttcctatgtcagaacacgaaaggcagcttttactgtcaggctcgtcagcgttgcatggatgggtttctccaagaccccgaagggaactgtgtagacatcaacgagtgcacaagcctcagcgagccttgcaggcctgggttctcctgcattaataccgtgggatcctatacctgtcaacgcaacccactgatctgtgcccggggctaccacgcctctgatgatggcaccaagtgtgtcgacgtgaacgagtgcgagaccggtgtgcatagatgcggcgagggccaggtgtgtcacaacctgccaggatcctatagatgtgattgcaaggctggctttcaaagagatgcctttggtagaggctgcatcgatgtgaacgaatgctgggcctctccgggacggctttgtcagcacacctgtgagaacactctgggttcctatcgttgctcatgcgcatccgggttcctgctggctgccgatgggaagcggtgtgaagatgtcaacgagtgtgaagcacagcgctgtagccaggaatgtgcaaatatctacggcagctaccagtgctactgtcgacaggggtaccaattggcagaagatggccatacatgcacggacatcgacgagtgcgctcagggagctggcatcctgtgcaccttcagatgcctcaatgtccctgggtcttaccagtgtgcttgtcccgaacagggctacacaatgactgctaacgggagatcctgcaaggacgtggacgagtgtgccctcggaactcacaactgcagtgaggcagagacctgtcacaatattcaggggtccttcaggtgtctgaggttcgaatgccctccaaattatgtccaggttagtaagacaaaatgtgaacggactacctgccatgactttctcgaatgccaaaacagccccgcccggataacgcactatcagctgaattttcagacaggcttgttagttcctgcccacatattccggattggcccagcacccgcattcactggggatacaattgccttaaacatcataaagggcaatgaagagggttactttgggactagacgcctgaatgcctacacgggagtcgtgtacttacagcgcgcagtgctggagccgcgggacttcgcactggacgtcgaaatgaaactctggcggcagggctctgtaaccactttcttagcgaagatgcacatcttttttactaccttcgcgttatag

SEQ ID NO: 63684 - DNA, 3696 bp, Artificial Sequence
  derived and/or modified sequence
atggttctcctttgggaacctgctggcgcttggctggctttgggcctcgcattggcactggggccttccgtggccgcggcagctcccaggcaagactgtacaggcgtggaatgtcctccactggaaaactgcattgaagaagctctcgagcctggagcttgctgtgcaacctgtgtgcaacaggggtgcgcgtgcgagggctaccaatattatgattgtctccagggtggttttgtccggggtcgagtgccagcaggtcagagttatttcgtggattttggcagcactgaatgttcatgccctcccggcgggggtaagatatcctgtcagttcatgctttgcccagagttacctcccaattgtattgaagctgtggtggtcgcagacagctgtcctcagtgtgggcaggtcggctgcgtgcatgccggccacaaatacgctgcaggccatactgtacacctgcctccatgtagggcctgtcactgccccgacgccgggggagaattgatctgctatcaactaccgggctgccacggcaatttctcggatgcagaagagggagatcctgagcgacactatgaggacccctacagctacgatcaggaagtggcggaagtggaagccgcgactgcgctcggaggcgaggtgcaggccggcgccgtgcaagctggggccggaggtccacccgctgcgctcggaggtggttcacaaccactctcgacaatacaggcacctccctggcccgccgtgcttcccaggcctactgccgctgcagctctgggaccaccagccccagtgcaagcgaaagctcggcgcgttaccgaggactcggaggaggaagaggaagaggaagaagaaagagaagagatggccgttacagagcagttggccgctgggggccatagagggttggacgggctccctacaaccgcgcctgccggtccctctctgcctattcaggaggagcgagcggaggctggagcaagagcagaggctggcgcgcggcctgaagagaatcttattctggacgctcaggccacaagcagatcaactggacccgaaggagtgacacacgccccctcactaggaaaggccgccctggtgcccacccaggccgtgcccgggtcgcctcgggaccccgtgaagcctagtccccacaacattctttccacctcgctccccgacgccgcatggatccctcccactcgagaggtccctcggaaacctcaagtgctgccccattcccatgttgaagaggataccgaccccaactcggtacatagcattcctcgaagcagccctgagggaagtaccaaggaccttatcgagacctgctgcgccgctggccaacaatgggctatcgacaatgacgagtgcctcgagatacctgagtctggcaccgaggataatgtttgtcgcaccgcccaacgccattgctgcgtgagctatctacaagaaaaaagttgcatggccggagttctgggagcgaaggagggcgaaacttgtggagcggaggacaacgactcttgcggcatcagcctgtacaagcaatgctgtgattgttgtggtttgggtctgcgcgtgcgtgctgagggtcaaagctgcgagtcaaaccctaatcttggatatccctgcaaccatgtgatgctcagctgttgtgaaggcgaagaaccgctgatcgttcccgaggtgcgacgaccccccgagcccgccgcggccccaagacgcgtgagcgaggccgagatggctgggcgcgaggcgctgtccttaggcactgaggccgaactgccaaattccctccccggggatgaccaagacgaatgcttgcttctccccggggaactttgtcagcatctgtgcatcaataccgtcgggtcatatcattgcgcatgcttcccaggcttcagcctgcaggacgatggaagaacctgccgccctgaaggacatcccccgcagcccgaggcaccgcaggagcctgctctcaagtctgagtttagccaggttgcaagcaacaccataccattacctctgccacagcccaacacatgcaaggataatggaccatgtaagcaggtgtgtagcactgtaggcgggtccgcaatctgttcatgctttcccggatatgcgatcatggctgatggagtgtcctgcgaagaccaggatgagtgcctgatgggagctcacgattgttcacggcggcagttttgtgtgaatacactgggatccttctactgtgtcaaccacaccgtcctctgcgcagacggatatattctcaacgcccatcggaagtgtgtggatattaacgaatgtgtgacagaccttcatacctgtagtaggggagaacactgtgtgaacacccttggttctttccactgttacaaagctttgacctgtgagccaggctacgcactgaaagatggcgagtgcgaggatgtcgacgagtgcgctatgggcactcacacgtgtcagccgggattcctgtgtcaaaacactaagggttctttttactgccaagcgagacagaggtgtatggatggcttcctccaggatcctgaagggaattgtgtggacatcaacgaatgcacctcactttctgagccctgtcggcccggcttttcttgtattaacactgtagggagttatacctgtcagagaaaccccctgatatgtgccagaggataccacgccagtgatgacgggacaaagtgcgtggatgtcaacgagtgtgagactggcgtacacagatgtggagaaggtcaagtatgtcataatctgcctggttcttatcggtgtgattgtaaggctggatttcagcgggatgcctttggaagaggttgcatcgatgtgaacgagtgctgggccagccctggaaggctctgtcagcatacctgtgagaatacattagggtcctacagatgcagctgtgcttccggcttcctcctggcggctgacggcaagcgctgtgaagatgtcaatgagtgtgaagcacagaggtgctcacaggagtgcgcgaacatttatggcagttatcagtgctactgccgccaaggataccaattggcagaggacggacatacctgcacagatatcgacgaatgtgcccagggagctggaattttatgtacctttcggtgtcttaatgttccagggtcatatcagtgtgcctgcccagagcaggggtataccatgacggccaacggccgtagctgtaaggacgtcgacgaatgtgccctgggcactcacaattgctcagaagctgaaacatgccacaacatccagggcagttttcgttgtcttcggttcgagtgccccccaaattatgtgcaggtcagtaagactaagtgtgagcggaccacatgtcatgactttctggagtgtcagaattctccggctcgcatcacacactatcaactaaacttccagaccgggttactggtgcctgcccatatcttcagaattggaccagctccggcattcaccggcgatacaatcgcactgaacattattaaaggcaatgaggaaggctatttcgggacccgacgactgaacgcttacactggagtggtgtatttgcaaagggccgtgctggagccaagagacttcgccctcgacgttgaaatgaagctctggcggcagggaagtgtgaccacattcctagccaagatgcatattttcttcaccacatttgccctttag

SEQ ID NO: 63685 - DNA, 3696 bp, Artificial Sequence
  derived and/or modified sequence
atggtgctgctgtgggagcctgctggggcctggctggccctgggcctggccctggccctgggccccagcgtggccgctgctgccccccggcaggactgcaccggggtggagtgcccccccctggagaactgcatcgaggaggccctggagcccggggcctgctgtgccacctgtgtgcagcagggctgtgcctgtgagggctaccagtactatgactgcctgcagggcggctttgtgcggggccgggtgcctgctggccagagctactttgtggactttggcagcacagaatgtagctgccccccaggcggcggcaagatcagctgccagttcatgctgtgcccagagctgccccccaactgcatcgaggccgtggtggtggccgacagctgcccccagtgtggccaggtgggctgtgtgcacgccggccacaagtatgctgctggccacacagtgcacctgcccccctgccgggcctgccactgcccagatgctggaggagagctgatctgctaccagctgcccggctgccacggcaacttcagtgatgctgaggagggggaccctgagcggcactatgaggacccctacagctatgaccaggaggtggccgaggtggaggccgccacagccctgggcggggaggtgcaggccggggctgtgcaggccggggccggcggccccccagctgccctgggcggcggcagccagcccctgagcaccatccaggccccaccctggccagctgtgctgccccggcccacagctgctgctgccctgggccccccagcccctgtgcaggccaaggcccggcgggtgacagaagattctgaggaggaggaggaggaggaggaggagcgggaggagatggctgtgacagagcagctggccgccggcggccaccggggcctggatggcctgcccaccacagccccagctggccccagcctgcccatccaggaggagcgggcagaggccggggcccgggcagaggccggggcccggcctgaggagaacctgatcctggatgcccaggccaccagccgcagcactggacctgagggcgtgacccacgcccccagcctgggcaaggccgccctggtgcccacccaggccgtgcccggcagcccccgggaccctgtgaagcccagcccccacaacatcctgagcaccagcctgcctgatgctgcctggatcccccccacccgggaggtgcccaggaagccccaggtgctgccccacagccacgtggaggaggacacagaccccaacagcgtgcacagcatccccaggagcagccctgagggcagcaccaaggacctgattgagacctgctgtgccgccggccagcagtgggccatcgacaatgatgagtgcctggagatccctgagagcggcacagaggacaacgtgtgcaggacagcccagaggcactgctgcgtgtcctacctgcaggagaagagctgcatggccggcgtgctgggcgccaaggagggggagacctgtggggctgaagataatgacagctgtggcatcagcctgtacaagcagtgctgtgactgctgcggcctgggcctgcgggtgcgggcagagggccagagctgtgagagcaaccccaacctgggctacccctgcaaccacgtgatgctgagctgctgtgagggggaggagcccctcatcgtgcctgaggtgagaagacctcctgagcctgctgctgcccccaggagagtgtctgaggccgagatggccggccgggaggccctgagcctgggcacagaggccgagctgcccaacagcctgcctggagatgaccaggatgaatgtctgctgctgcccggggagctgtgccagcacctgtgcatcaacacagtgggcagctaccactgtgcctgcttccctggcttcagcctgcaggatgatggccgcacctgcaggcctgagggccaccccccccagcctgaggccccccaggagcccgccctgaagtctgagttcagccaggtggccagcaacaccatccccctgcccctgccccagcccaacacctgcaaggacaatggcccctgcaagcaggtgtgcagcacagtgggcggcagcgccatctgcagctgcttccctggctacgccatcatggctgatggagtgtcctgtgaggaccaggatgagtgcctgatgggcgcccatgactgcagccggcggcagttctgtgtgaacaccctgggcagcttctactgtgtgaaccacacagtgctgtgtgctgatggctacatcctgaatgcccacaggaaatgtgtggacatcaatgaatgtgtgacagacctgcacacctgcagcagaggagagcactgtgtgaacaccctgggcagcttccactgctacaaggccctgacctgtgagcccggctacgccctgaaggatggagaatgtgaagatgtggatgaatgtgccatgggcacccacacctgccagcccggcttcctgtgccagaacaccaagggcagcttctactgccaggcccggcagcgctgcatggatggcttcctgcaggaccctgagggcaactgtgtggacatcaatgaatgtaccagcctgtctgagccctgccggcccggcttcagctgcatcaacacagtgggcagctacacctgccagaggaaccccctcatctgtgcccggggctaccacgccagtgatgatggcaccaagtgtgtggatgtgaatgaatgtgaaacaggagtgcaccgctgtggggagggccaggtgtgccacaacctgcccggcagctaccgctgtgactgcaaggccggcttccagagagatgccttcggccggggctgcattgatgtgaatgaatgctgggccagccctggccgcctgtgccagcacacctgtgagaacaccctgggcagctaccgctgcagctgtgccagcggcttcctgctggccgcagatggcaagagatgtgaagatgtgaatgaatgtgaggcccagcgctgcagccaggagtgtgccaacatctacggcagctaccagtgctactgccggcagggctaccagctggccgaggatggccacacctgcacagacattgatgaatgtgcccagggcgccggcatcctgtgcaccttccgctgcctgaatgtgcccggcagctaccagtgtgcctgcccagagcagggctacaccatgacagccaacggccgcagctgcaaggatgtggatgaatgtgccctgggcacccacaactgcagcgaggccgagacctgccacaacatccagggcagcttccgctgcctgcgctttgagtgcccccccaactacgtgcaggtgtccaagaccaagtgtgagaggaccacctgccacgacttcctggagtgccagaacagccctgcccgcatcacccactaccagctgaacttccagacaggcctgctggtgcctgcccacatcttcagaattggccctgccccagccttcaccggggacaccatcgccctgaacatcatcaagggaaatgaggagggctacttcggcacccggcggctgaatgcctacacaggagtggtgtacctgcagagagctgtgctggagccccgggactttgccctggatgtggagatgaagctgtggaggcagggctctgtgaccaccttcctggccaagatgcacatcttcttcaccacctttgccctgtag

SEQ ID NO: 63686 - DNA, 3696 bp, Artificial Sequence
  derived and/or modified sequence
atggtgctgctgtgggagcccgccggcgcctggctggccctgggcctggctctcgccttgggaccgtccgtcgccgcagccgcgcctagacaggactgcactggtgtcgaatgtcccccgctcgagaactgcatcgaagaggcgctcgaaccgggcgcttgctgtgccacgtgcgttcagcagggctgcgcctgcgaaggataccagtactatgattgccttcagggagggttcgtacgcggaagagtgcctgctggtcagtcctattttgttgattttggctccaccgagtgtagctgcccaccaggaggtggaaagatctcatgccaattcatgctgtgccccgagcttccgcccaattgtatcgaagctgtggtcgtggcagattcttgccctcagtgtggccaggttggatgcgtccacgcggggcacaagtacgccgctggtcataccgtacatctgccaccatgcagggcatgtcattgtcctgatgccggaggcgagttgatttgctaccagctaccgggttgccacggcaacttttccgacgccgaagagggagatccggaacgacactacgaagacccttacagctacgatcaggaagtcgctgaggtcgaggcagctaccgccttggggggcgaagtgcaggctggtgccgtgcaggccggcgcaggaggcccacccgcggctctgggcgggggaagtcagccgctgagcaccattcaggcccccccatggccagccgttctgcctaggcccacggcggcagccgcgttgggaccgcctgcccccgtacaagccaaagcccgcagagttactgaagacagcgaagaggaagaggaagaggaagaagagagggaggaaatggcagtaacagaacagttagctgccggtggacacaggggtttggacggcctaccaactactgccccggccggacccagtcttcccatacaggaagaaagagccgaggccggcgccagggctgaggctggcgcccggcctgaggagaaccttatcttagatgcgcaggccacatctagatcaactgggccagaaggtgttactcacgccccatcactgggaaaagctgcactggtacctacacaagccgtgccaggtagcccaagagaccccgtgaaacccagtccacacaacattctgagcacatcactgcctgatgcagcatggatcccaccaactagggaagtccccaggaagcctcaggtgctgcctcactcacacgtcgaggaggataccgaccctaattcagtgcattctatcccaaggtcatctcctgagggctccacgaaagacctgatcgagacatgttgtgccgccggccagcagtgggctattgacaacgacgagtgcctggaaatcccggagagcggaactgaagataatgtctgccgcacggctcagaggcattgttgcgtatcttaccttcaggaaaaatcgtgcatggctggtgtgctgggggcaaaagagggtgaaacgtgtggtgctgaagacaacgatagttgtggcatttccttatataagcagtgctgtgattgctgtggcctggggctgcgcgtgagggcagagggacagtcttgcgagagcaacccaaacttgggctacccgtgtaatcatgttatgctaagctgttgcgaaggcgaagagccgctcattgtgcccgaggtccggagacctcccgaacccgccgccgcccctcggcgtgtttcggaggcagagatggccggacgagaggcattgtccttgggaacagaggccgaactgcccaacagtttgccgggcgatgaccaggacgaatgtcttcttctgcccggcgaactgtgtcagcatctgtgtataaacactgtggggtcctatcactgcgcgtgtttccctggtttcagcttacaggacgacggcaggacatgtaggccagaggggcaccccccgcaacccgaggcacctcaagagccagcactgaagtccgaatttagtcaggtggccagcaataccatccccctgccactcccacaacccaatacttgcaaggacaatggcccttgcaagcaggtgtgctcaacagtaggtgggagcgctatctgttcctgctttcctgggtatgcaattatggcggacggtgtctcttgcgaggaccaggacgaatgtttgatgggcgcgcatgactgcagccgccggcagttttgtgtgaacactctgggttcattctattgtgtgaatcacactgtgctgtgtgcagacggatacatcttgaacgcgcacaggaaatgcgtcgatattaatgagtgtgtgaccgacctacatacatgctctagaggagagcactgtgtcaataccctaggctctttccattgctataaagccctgacatgcgagccaggatatgcactcaaggatggcgagtgcgaagacgttgatgaatgtgccatgggaactcacacctgtcaacctggattcctctgtcagaataccaaaggttcgttttactgtcaagctaggcagaggtgtatggatgggtttctacaggaccccgagggcaactgtgtggatatcaacgaatgtacatccctgagcgagccttgtaggcctggattttcctgtattaacacagtgggctcctatacctgtcagcgcaacccccttatttgcgcccggggataccacgctagcgacgacggaactaagtgcgttgacgtgaatgaatgcgaaaccggtgtacatcggtgcggcgagggacaagtctgtcataatctgcccggctcatatcggtgtgattgcaaggcaggcttccagcgggatgctttcggtcggggctgtatcgatgttaacgagtgctgggcttctccaggaagattatgtcagcacacttgtgagaacacattaggatcttacagatgcagttgtgcctctggatttctgttggccgcagacggtaagcgatgtgaagacgtgaacgaatgcgaggcccagcggtgtagccaggagtgtgcaaacatctacgggagttaccagtgctattgtagacaggggtaccagctggctgaagacgggcacacttgcacagacattgacgaatgcgcccagggcgcgggaatcttatgcacctttcgttgtctgaacgtgcctgggtcctatcagtgcgcgtgccctgaacagggctatacaatgacagccaatggccgaagctgtaaggacgtggatgaatgcgctctgggtactcacaattgctctgaagctgaaacttgccacaatattcaaggtagctttaggtgcctcaggttcgaatgtcccccaaactacgtgcaggtgtcaaaaaccaaatgcgagaggaccacttgccacgatttcctggagtgccagaactcacccgctaggataacccattaccagctgaattttcagactgggctgttggtccctgcacacatcttcagaatcgggcctgcaccggcattcacaggcgacaccatcgctttaaacatcattaagggtaacgaagaaggctatttcggcactagaaggcttaacgcctataccggcgtggtttatctgcaaagggccgtgctcgagcctcgggactttgctttagatgtcgaaatgaagctatggagacagggatccgtcacgacctttctggcgaagatgcacattttctttacgacttttgccttgtag

SEQ ID NO: 63687 - DNA, 3696 bp, Artificial Sequence
  derived and/or modified sequence
atggtgctgctgtgggagcccgccggcgcctggctggccctgggcctggcactggcgctcggcccctcggtagcagcggcggcccctaggcaggattgcaccggggtcgaatgccctccccttgagaactgtattgaggaggccttggagcctggggcttgctgcgctacttgcgtccaacagggctgcgcctgcgagggctatcagtactacgattgcctccaggggggctttgttagaggtcgagtaccagccgggcaatcgtactttgtggactttggctccacagagtgttcctgccccccaggtggcggaaagatttcctgtcagttcatgctttgtcccgagcttccccccaactgtattgaggccgtggtggttgcagattcttgccctcaatgtggccaggtcgggtgcgtgcacgctggccacaagtacgccgcagggcatacagtccatctccccccttgccgggcttgtcactgcccagatgctggtggggagttgatttgttaccagcttcccggatgtcatggcaactttagcgatgctgaggagggggatccagaacgccactatgaggacccatattcctatgaccaggaggtagctgaagtggaagcggcgaccgctctcggaggtgaggttcaagcaggggccgtgcaggccggagctggaggtcccccggctgcactgggcggcggttcccaaccactgtctaccattcaagccccaccctggccagcagtgctccctagaccaactgctgccgccgctctaggaccaccagcacccgttcaggcgaaagctagacgcgtgaccgaggattcagaagaggaagaggaagaagaggaggaaagagaagagatggctgtgacggagcagttagcagctggaggccaccgcggcctggacggattgccaacaactgcccctgccggtcccagcctcccaatccaagaggaacgcgctgaggcaggtgcccgtgccgaggcaggtgctaggcctgaagaaaatttgatactggacgcccaggctacatcccgatcaacgggccctgagggagtcactcacgctcctagtctgggaaaagccgcccttgtcccaacacaagcggtgccagggtctccccgcgatccagttaaaccctccccgcacaacatactgagtacgtcactgccggacgccgcttggatcccacccacacgagaggtgccaaggaaaccgcaagtgcttccccattctcacgtcgaggaggacacagatcccaattccgttcactcgatacctcggtcttctcccgaggggtctaccaaagacctcattgagacctgctgtgcggcaggtcagcaatgggccatcgataacgatgagtgtctggaaattcccgagtcgggcactgaggataacgtgtgtcggaccgcccagcgtcactgctgtgttagttacttacaggagaaaagctgcatggctggcgttttaggggctaaagagggagagacttgcggggctgaggacaacgatagctgtggcatttcgctgtacaaacagtgctgcgactgctgtggtttgggtttacgagtgcgtgccgagggtcagagctgtgagtccaatccgaatctcggatatccatgtaaccatgttatgttgtcttgctgcgaaggtgaagagccattgattgtcccggaggtgagaaggccccccgagcccgctgcagctccaaggcgggttagtgaggcggagatggctggcagggaggcgctctcacttggcaccgaagcggagctccctaatagcttacctggggacgaccaggatgagtgcctgctattgcccggagagctctgccagcacttgtgtatcaacacggtggggtcctaccattgtgcatgcttccccggtttctccctgcaggatgacggaaggacctgccgaccagagggtcatccacctcagcccgaggcccctcaagaacctgctctaaaatctgagtttagtcaggtggcctctaacacaattcctctgccactgcctcaaccgaacacatgcaaagataacgggccctgcaagcaggtgtgcagcaccgtgggcggcagcgccatctgctcctgtttccccggttatgccattatggcggacggagtttcgtgtgaagaccaggacgaatgcctgatgggagcacacgactgttctaggcgacaattctgcgtgaacaccctggggagcttctactgcgtgaaccatactgttttgtgtgcggacgggtacatcctaaatgctcataggaaatgcgtggacatcaacgaatgcgtcacagatcttcacacctgttcacgcggagagcactgtgtgaacactttgggcagcttccattgctataaggccctgacctgcgagccagggtacgctctgaaggatggggaatgcgaagatgtcgatgagtgcgctatgggaacgcatacttgtcaacctgggtttctctgccagaacaccaaaggatcattctactgccaggctcgccaacgctgcatggatggattcctgcaggatccagagggcaactgtgtggacataaatgagtgtacaagcctgagcgagccatgccgccctgggttttcatgcattaacaccgttgggtcatacacatgtcagcgcaatcccctaatttgcgctaggggctaccacgcctccgacgacggaactaaatgcgtggatgttaacgagtgcgaaaccggggtccaccgctgtggggagggccaagtatgccataaccttccaggttcttacagatgtgactgcaaagccggtttccaaagggacgcgttcggccggggctgtatcgatgtaaacgaatgctgggcaagccccgggcgtctttgccagcatacctgcgagaatactctgggctcctatcgctgctcatgtgcatcaggcttcctcttagctgccgacggcaaacggtgtgaggacgtgaatgagtgcgaagctcagagatgttcccaggagtgtgcaaatatctatggaagttaccaatgctactgcaggcagggttatcaattggcagaggacggtcacacatgtacggacatcgatgagtgtgctcagggagccggtattctgtgcacattccggtgcctgaacgttcccggaagttaccaatgcgcttgcccggaacaggggtacactatgaccgccaacggcaggagctgtaaagacgtggacgaatgtgccctaggcacccacaactgcagcgaagccgagacttgtcacaatatccagggtagcttccgctgcctgcgtttcgagtgcccccctaactatgtgcaggtgagcaaaaccaaatgtgaacggacaacatgccacgattttttggagtgccagaattcccccgcgcggatcactcactatcaactcaacttccaaaccggactcctggtgcctgctcacatattccggataggacccgcaccagcttttactggcgacaccatcgctctgaatattattaaaggcaatgaagaaggatacttcgggacaaggcggctcaacgcttacactggggtggtctacctgcagcgtgccgtccttgaacctagagattttgctcttgacgtggagatgaaactttggagacaggggtccgtgactacattcctagccaaaatgcacattttcttcacaacttttgccttgtag

SEQ ID NO: 63688 - DNA, 3696 bp, Artificial Sequence
  derived and/or modified sequence
atggtgcttctgtgggagccagctggtgcctggctggctcttgggctcgctctggccctgggaccaagcgtcgccgctgctgcccctaggcaggattgtacaggcgtcgaatgccctccactagaaaactgtatcgaagaagccctggaaccgggtgcttgttgtgccacatgtgtccaacagggttgcgcttgtgaggggtatcagtactatgattgcctgcagggaggattcgtgcgtggaagggtgcccgctggtcagagctattttgtcgactttgggtctacggaatgttcttgccctccgggaggcggaaaaattagctgccagttcatgttgtgtccggagttacctcccaactgcattgaggcggtggtcgtggctgactcttgtccccagtgtggccaggtgggttgtgtccatgctgggcataagtatgctgctggacatacagtacaccttcctccgtgccgcgcatgtcactgcccagacgcagggggagaactgatctgttatcaactgccaggatgccatggaaatttctctgacgccgaggagggtgaccccgaaaggcactacgaggacccttatagttatgaccaagaggttgctgaggttgaggctgcaaccgctttggggggagaggtacaggcgggtgccgtccaggcaggggctggcggacctcctgctgcgttgggagggggatcccagcccctgtcaaccattcaggcccctccatggccagccgtgctacctcgtcccacagcggcagccgcactgggaccacctgcgccagtgcaagcaaaagccaggagagtgacagaagatagcgaggaggaagaggaagaagaagaagagcgagaggaaatggctgtaacagagcagctagcggctgggggacatagggggctggatggcctgccaactaccgcccctgccggtccttctctgcccattcaggaggagcgcgcagaggctggagcaagggccgaggctggtgcaagaccagaggagaatttgatcctggacgcccaggccacgtcgaggtccacaggacctgagggggtcacccacgccccaagcctgggcaaagcggcactggtgccaacccaagccgtgccgggaagcccacgggacccggtgaagccaagcccccacaatattttgagtacgagtctgccggatgctgcgtggatccctcctactcgggaagttccacggaaaccgcaggtcctgccacacagccacgttgaggaggacacagatccaaactccgttcatagtatccctcggagcagcccagaagggtctaccaaggatctcatcgagacctgttgtgcagcgggtcaacagtgggccattgataacgatgagtgtctcgaaatccctgagagcggcactgaggacaacgtatgccgcactgcacagcgacattgctgcgtttcgtacttgcaggaaaaatcatgtatggctggagtgttgggggctaaggagggggaaacctgtggggctgaggataacgattcttgcggcatctctctttataaacaatgctgtgactgttgtgggctgggattaagggtgagggctgaagggcagtcctgtgaatctaaccctaatctaggctacccctgtaaccacgtgatgctttcttgctgcgagggcgaagaacccctgattgtcccagaggtgcgcagaccacccgaacccgctgccgctcctcgtagggtgtcagaggccgaaatggcgggaagagaagccctgtcacttggcacggaagccgagctgccaaatagtctgcctggggacgatcaggacgaatgcttactcctgcccggtgaattgtgtcaacatttgtgcatcaataccgttgggagctaccattgcgcatgcttcccgggattcagcttacaggatgacggtcggacctgcagaccggaaggtcatcccccacaacccgaggctccccaagagccggcactcaagtccgaattttctcaggtcgcatctaacacgatcccactcccactgccccagccaaacacctgtaaggacaacggaccatgcaagcaggtttgttctactgtggggggttcagctatctgtagctgttttcccggatatgccattatggctgacggcgtgtcctgcgaagatcaggatgagtgtctcatgggcgcacacgactgcagcagaaggcaattctgcgtgaatacgctcggcagtttctattgtgtaaatcatactgtgctctgcgcggacggttacattctgaacgcccataggaagtgtgttgacatcaacgagtgcgttaccgatttacatacctgctctcgaggcgaacactgtgtgaacacactgggttccttccattgctacaaggcactcacctgcgaaccaggatatgctcttaaggatggtgaatgcgaggacgtagatgagtgcgcaatgggcacacatacgtgccaaccaggctttctgtgtcagaacaccaagggaagcttttactgtcaggccaggcagcgttgtatggatggcttcctgcaggatccagaaggcaactgtgtggatattaacgaatgcacatccctctctgagccctgtagacccggattcagctgcattaacacagtcggatcctacacctgtcaacggaaccccttaatatgtgcgaggggctaccacgcttcagacgatggcactaaatgcgtagacgtgaatgaatgtgaaactggggtacacaggtgtggcgaggggcaagtgtgtcataatcttccagggtcttacaggtgcgattgcaaagccggatttcaaagagatgccttcggcagaggctgtatcgacgtgaacgagtgctgggcttcacccggaaggctttgccaacatacatgtgagaacacccttggctcttatagatgcagttgcgcctcgggctttctgctggccgcagatgggaagaggtgtgaagatgttaatgagtgcgaggcgcagaggtgctcccaagagtgcgcaaatatttacggaagttaccagtgttattgccgccaggggtaccagcttgcggaggatgggcacacctgtactgacatcgacgaatgcgcacagggagccggaattttatgcaccttccgctgcttgaatgtaccagggagctaccagtgtgcatgtcctgaacagggatatacgatgactgccaacggacggtcttgtaaagacgtggatgagtgtgcgctcggtacacacaactgctcagaggctgagacatgccacaacatccagggctctttcagatgcctgcggttcgagtgtccccctaattacgtgcaggtgtctaaaacaaagtgtgaacggaccacgtgccatgatttccttgagtgtcagaactctcctgctaggattactcactaccagttgaatttccagacagggttgctagttccagcacacatttttcggatcggcccagcacctgcctttactggggacacaattgccctcaacatcataaaaggtaacgaggagggttacttcggcactaggagactcaacgcatacaccggggtcgtgtatctgcagcgggcagttctggagccacgggacttcgcactggacgttgaaatgaagctgtggaggcagggaagcgtcactacttttctcgccaagatgcatatttttttcactacattcgcgctgtag

SEQ ID NO: 63689 - DNA, 3696 bp, Artificial Sequence
  derived and/or modified sequence
atggtgctgttgtgggaacctgccggagcttggcttgcattgggattggccctggcgctcgggccatccgtggcagccgctgctcctcggcaggactgtactggggtggaatgcccgccacttgagaactgtattgaagaagcgctcgaaccaggcgcttgctgcgccacctgtgttcagcaaggctgcgcatgtgagggataccagtactatgattgtctccagggcggattcgtgcggggacgggtgcctgctgggcagtcgtactttgtcgactttggcagcactgaatgttcttgcccacctggcggtgggaaaatcagctgccagtttatgctgtgccccgagctgcccccaaattgcatcgaagcggttgttgtggcggatagctgtccacaatgtggacaggtgggatgcgtccacgccggacacaagtacgccgctggacacacagtccacctgcctccctgccgagcatgccactgtcctgacgcaggcggtgagcttatttgctaccaacttcctggctgccatggtaacttttctgacgcggaggagggcgatcccgagaggcactatgaagatccctattcttacgatcaggaggtggctgaagtcgaggctgctacagctctggggggtgaggtccaggctggggcagtgcaggccggagccggaggcccaccagcggctctgggcggtggatctcagcccctttctactatccaagcccctccctggcctgccgttctgcctaggcctactgctgcagccgcactgggacctccggctccggtgcaggctaaggccaggagagtgacggaggactcagaagaggaggaggaagaggaagaagagagggaggaaatggccgtgacagagcaactcgctgccggtggacatcgcggactcgatgggctcccaactacagcacccgcaggaccctctttgcctattcaggaagagcgggctgaagctggcgctagagccgaggcaggcgctaggccagaggaaaacctcatactggacgctcaggcaacaagccgcagtacaggaccggaaggagtgacgcatgcgccatcactcggtaaggctgccctggtgcccacccaggccgtacccggatccccacgagaccccgttaaaccatccccacataatatcctgagcacgtcccttccagacgccgcttggatcccacccacacgagaagtgccgagaaaaccacaagtgttaccacacagtcatgtggaggaggatacagatcccaacagtgtacactcaattcctcggtcttcacccgaaggtagcaccaaggatcttatagaaacatgttgtgctgccggtcaacagtgggccatcgacaatgacgagtgtctcgagattcccgagtcgggcacagaagataatgtatgtagaactgctcagcggcattgctgcgtgagctatttgcaggagaagagttgcatggctggcgtgctgggcgctaaggagggagaaacctgcggcgcagaagataatgactcctgcggaatcagtttatacaaacagtgctgtgactgctgcggactcggcctgagagtaagggccgaaggacagtcctgtgagtccaaccctaatcttggttacccctgtaaccacgtgatgttaagctgttgcgaaggggaggagccactcatcgtgccagaagttaggcggccaccggagcccgctgctgcccctaggagagtttccgaggccgagatggctgggcgtgaagctttaagtttgggtaccgaggctgagctgcccaactccctccctggggacgatcaggatgagtgcctgctgctacctggagagctctgccagcatctgtgtataaataccgtgggctcgtaccattgtgcttgcttcccaggtttctcactacaagacgatggaagaacctgcagaccagagggtcatcctcctcagcccgaagcgcctcaggaaccagccctaaagtccgaattctcccaagttgcctccaatactattcccctgccattgccacagccaaacacctgcaaagacaacgggccatgtaaacaggtgtgttctaccgtaggcggttctgccatctgttcttgcttccccggatacgctataatggctgacggggtttcttgcgaagaccaggacgaatgtctgatgggggctcatgattgctcccgtaggcagttctgtgtcaatactctggggagcttttattgtgtaaatcataccgtactgtgcgcagatggatatattttgaatgcccaccgcaagtgcgttgacatcaacgagtgtgtcacagatcttcatacctgctcacgcggagagcactgcgtcaatactctgggttccttccactgttataaggccctgacatgcgaaccgggatatgcgctgaaagatggcgagtgtgaagatgtcgacgagtgtgcgatgggaactcacacctgccaacctggatttctgtgccagaacacaaagggttctttctattgtcaggcccgacagcgctgcatggatggcttcttgcaggatcctgagggtaattgtgtggatataaacgagtgcactagcctgagcgagccttgcaggcctggcttttcatgtattaacaccgtgggatcatacacttgccaaaggaacccactgatatgcgcaagaggctaccacgcaagcgatgacggtaccaagtgtgtagacgtcaatgaatgcgagacaggcgttcaccggtgcggagagggacaggtctgtcacaatctcccaggtagttacagatgcgattgtaaggctggattccagcgcgatgctttcgggagaggatgtatcgacgttaatgagtgctgggctagcccaggccgactgtgccagcatacctgtgagaacacacttggcagttaccgatgttcctgcgctagcggattcttgcttgcagcagatggcaagcgctgtgaagatgtaaatgaatgcgaggctcagcggtgctcacaggagtgtgctaacatatatgggagctaccagtgttactgtcgccaagggtatcaactggctgaagatggtcacacttgcacagacatcgatgaatgtgcccagggtgcagggattctctgcacattccgatgtctgaacgtgcctggctcttaccaatgcgcctgtcccgagcagggctacaccatgacggctaatggacgatcctgtaaggatgtggatgagtgtgccctgggaactcataactgtagcgaggccgaaacctgtcacaacatccaaggctcttttcggtgtctccggttcgaatgtccacccaattatgtgcaggtgtctaagacaaaatgtgagcgcactacctgccatgatttcctagaatgtcagaattcgccggcaaggatcacccactatcagctcaactttcagacggggcttctggtgccggcacatattttccggatcggcccagccccagccttcacaggagatacgatcgctttgaatatcataaagggaaacgaagagggatatttcggcactagaagactcaatgcgtacaccggcgttgtgtatttacagcgcgctgtgctcgaacctcgagactttgccctcgacgtcgaaatgaaattgtggcgacagggttccgtgacaacgttcctcgccaaaatgcatatcttttttacaacatttgcactctag

SEQ ID NO: 63690 - DNA, 48 bp, Artificial Sequence
  derived and/or modified sequence
atgagaatgagcgtgggcctgagcctgctgctgcccctgagcggctag

SEQ ID NO: 63691 - DNA, 3696 bp, Artificial Sequence
  derived and/or modified sequence
atggtgctgctgtgggagcccgccggcgcctggctggccctgggcctggccctggccctgggccccagcgtggccgccgccgcccccagacaggactgcaccggcgtggagtgcccccccctggagaactgcatcgaggaggccctggagcccggcgcctgctgcgccacctgcgtgcagcagggctgcgcctgcgagggctaccagtactacgactgcctgcagggcggcttcgtgagaggcagagtgcccgccggccagagctacttcgtggacttcggcagcaccgagtgcagctgcccccccggcggcggcaagatcagctgccagttcatgctgtgccccgagctgccccccaactgcatcgaggccgtggtggtggccgacagctgcccccagtgcggccaggtgggctgcgtgcacgccggccacaagtacgccgccggccacaccgtgcacctgcccccctgcagagcctgccactgccccgacgccggcggcgagctgatctgctaccagctgcccggctgccacggcaacttcagcgacgccgaggagggcgaccccgagagacactacgaggacccctacagctacgaccaggaggtggccgaggtggaggccgccaccgccctgggcggcgaggtgcaggccggcgccgtgcaggccggcgccggcggcccccccgccgccctgggcggcggcagccagcccctgagcaccatccaggcccccccctggcccgccgtgctgcccagacccaccgccgccgccgccctgggcccccccgcccccgtgcaggccaaggccagaagagtgaccgaggacagcgaggaggaggaggaggaggaggaggagagagaggagatggccgtgaccgagcagctggccgccggcggccacagaggcctggacggcctgcccaccaccgcccccgccggccccagcctgcccatccaggaggagagagccgaggccggcgccagagccgaggccggcgccagacccgaggagaacctgatcctggacgcccaggccaccagcagaagcaccggccccgagggcgtgacccacgcccccagcctgggcaaggccgccctggtgcccacccaggccgtgcccggcagccccagagaccccgtgaagcccagcccccacaacatcctgagcaccagcctgcccgacgccgcctggatcccccccaccagagaggtgcccagaaagccccaggtgctgccccacagccacgtggaggaggacaccgaccccaacagcgtgcacagcatccccagaagcagccccgagggcagcaccaaggacctgatcgagacctgctgcgccgccggccagcagtgggccatcgacaacgacgagtgcctggagatccccgagagcggcaccgaggacaacgtgtgcagaaccgcccagagacactgctgcgtgagctacctgcaggagaagagctgcatggccggcgtgctgggcgccaaggagggcgagacctgcggcgccgaggacaacgacagctgcggcatcagcctgtacaagcagtgctgcgactgctgcggcctgggcctgagagtgagagccgagggccagagctgcgagagcaaccccaacctgggctacccctgcaaccacgtgatgctgagctgctgcgagggcgaggagcccctgatcgtgcccgaggtgagaagaccccccgagcccgccgccgcccccagaagagtgagcgaggccgagatggccggcagagaggccctgagcctgggcaccgaggccgagctgcccaacagcctgcccggcgacgaccaggacgagtgcctgctgctgcccggcgagctgtgccagcacctgtgcatcaacaccgtgggcagctaccactgcgcctgcttccccggcttcagcctgcaggacgacggcagaacctgcagacccgagggccaccccccccagcccgaggccccccaggagcccgccctgaagagcgagttcagccaggtggccagcaacaccatccccctgcccctgccccagcccaacacctgcaaggacaacggcccctgcaagcaggtgtgcagcaccgtgggcggcagcgccatctgcagctgcttccccggctacgccatcatggccgacggcgtgagctgcgaggaccaggacgagtgcctgatgggcgcccacgactgcagcagaagacagttctgcgtgaacaccctgggcagcttctactgcgtgaaccacaccgtgctgtgcgccgacggctacatcctgaacgcccacagaaagtgcgtggacatcaacgagtgcgtgaccgacctgcacacctgcagcagaggcgagcactgcgtgaacaccctgggcagcttccactgctacaaggccctgacctgcgagcccggctacgccctgaaggacggcgagtgcgaggacgtggacgagtgcgccatgggcacccacacctgccagcccggcttcctgtgccagaacaccaagggcagcttctactgccaggccagacagagatgcatggacggcttcctgcaggaccccgagggcaactgcgtggacatcaacgagtgcaccagcctgagcgagccctgcagacccggcttcagctgcatcaacaccgtgggcagctacacctgccagagaaaccccctgatctgcgccagaggctaccacgccagcgacgacggcaccaagtgcgtggacgtgaacgagtgcgagaccggcgtgcacagatgcggcgagggccaggtgtgccacaacctgcccggcagctacagatgcgactgcaaggccggcttccagagagacgccttcggcagaggctgcatcgacgtgaacgagtgctgggccagccccggcagactgtgccagcacacctgcgagaacaccctgggcagctacagatgcagctgcgccagcggcttcctgctggccgccgacggcaagagatgcgaggacgtgaacgagtgcgaggcccagagatgcagccaggagtgcgccaacatctacggcagctaccagtgctactgcagacagggctaccagctggccgaggacggccacacctgcaccgacatcgacgagtgcgcccagggcgccggcatcctgtgcaccttcagatgcctgaacgtgcccggcagctaccagtgcgcctgccccgagcagggctacaccatgaccgccaacggcagaagctgcaaggacgtggacgagtgcgccctgggcacccacaactgcagcgaggccgagacctgccacaacatccagggcagcttcagatgcctgagattcgagtgcccccccaactacgtgcaggtgagcaagaccaagtgcgagagaaccacctgccacgacttcctggagtgccagaacagccccgccagaatcacccactaccagctgaacttccagaccggcctgctggtgcccgcccacatcttcagaatcggccccgcccccgccttcaccggcgacaccatcgccctgaacatcatcaagggcaacgaggagggctacttcggcaccagaagactgaacgcctacaccggcgtggtgtacctgcagagagccgtgctggagcccagagacttcgccctggacgtggagatgaagctgtggagacagggcagcgtgaccaccttcctggccaagatgcacatcttcttcaccaccttcgccctgtag

SEQ ID NO: 63692 - protein, 1019 aa, Artificial Sequence
  derived and/or modified sequence
MFHLRTCAAKLRPLTASQTVKTFSQNRPAAARTFQQIRCYSAPVAAEPFLSGTSSNYVEEMYCAWLENPKSVHKSWDIFFRNTNAGAPPGTAYQSPLPLSRGSLAAVAHAQSLVEAQPNVDKLVEDHLAVQSLIRAYQVRGHHIAKLDPLGISCVNFDDAPVTVSSNVGFYGLDESDLDKVFHLPTTTFIGGQESALPLREIIRRLEMAYCQHIGVEFMFINDLEQCQWIRQKFETPGIMQFTNEEKRTLLARLVRSTRFEEFLQRKWSSEKRFGLEGCEVLIPALKTIIDKSSENGVDYVIMGMPHRGRLNVLANVIRKELEQIFCQFDSKLEAADEGSGDVKYHLGMYHRRINRVTDRNITLSLVANPSHLEAADPVVMGKTKAEQFYCGDTEGKKVMSILLHGDAAFAGQGIVYETFHLSDLPSYTTHGTVHVVVNNQIGFTTDPRMARSSPYPTDVARVVNAPIFHVNSDDPEAVMYVCKVAAEWRSTFHKDVVVDLVCYRRNGHNEMDEPMFTQPLMYKQIRKQKPVLQKYAELLVSQGVVNQPEYEEEISKYDKICEEAFARSKDEKILHIKHWLDSPWPGFFTLDGQPRSMSCPSTGLTEDILTHIGNVASSVPVENFTIHGGLSRILKTRGEMVKNRTVDWALAEYMAFGSLLKEGIHIRLSGQDVERGTFSHRHHVLHDQNVDKRTCIPMNHLWPNQAPYTVCNSSLSEYGVLGFELGFAMASPNALVLWEAQFGDFHNTAQCIIDQFICPGQAKWVRQNGIVLLLPHGMEGMGPEHSSARPERFLQMCNDDPDVLPDLKEANFDINQLYDCNWVVVNCSTPGNFFHVLRRQILLPFRKPLIIFTPKSLLRHPEARSSFDEMLPGTHFQRVIPEDGPAAQNPENVKRLLFCTGKVYYDLTRERKARDMVGQVAITRIEQLSPFPFDLLLKEVQKYPNAELAWCQEEHKNQGYYDYVKPRLRTTISRAKPVWYAGRDPAAAPATGNKKTHLTELQRLLDTAFDLDVFKNFS

SEQ ID NO: 63693 - DNA, 3060 bp, Artificial Sequence
  derived and/or modified sequence
atgtttcaccttagaacctgtgcagccaaacttcggcccctaaccgcatcccagacggtgaagactttctcccagaaccgaccagcagccgcccgtacttttcaacagatcaggtgctactctgcccctgtggctgccgagccctttctaagcggcacttctagtaactacgtcgaggaaatgtattgcgcctggttagagaatcctaagagtgttcataaatcttgggatattttctttaggaatactaatgcaggggcccctcccgggaccgcttaccagagcccactgcccctgtctagggggtccctggctgccgtggcacatgcccagagcctggttgaagctcaacctaatgtggacaagctggtggaggatcatctcgccgtacaatcgctgatacgagcgtatcaggttcgcggccaccatattgcaaagctcgatccgctggggattagctgcgtgaattttgacgatgccccagtcacagtctcctctaacgtgggtttttatggcctggatgaaagcgatcttgacaaggtatttcatctcccaacaaccaccttcatcgggggccaggagagcgctctccccctgagagagatcattcggagattggagatggcctactgccaacacattggcgtcgagtttatgttcattaatgatttagagcaatgccaatggattcgacagaaatttgagacccccggaattatgcagtttacaaatgaagagaagcgcaccctgctggcccgcctagtgcggagtactaggtttgaggaatttctgcagagaaaatggtccagcgagaagcgattcgggctggaggggtgcgaagttttgattccagcattgaaaacaatcattgataaaagcagcgaaaatggcgtggattacgtgatcatgggcatgcctcatcgtggacggcttaatgttctcgcaaacgtgatcaggaaggaactggaacagattttttgtcagttcgattctaagcttgaggcggccgacgagggctccggtgatgtgaagtatcacttagggatgtatcacaggcgcatcaatcgtgttacagaccggaatataacgttatctcttgtggcaaacccttcccatctggaggctgcagaccctgtggttatgggcaagacaaaggctgagcagttctattgtggcgatacagagggcaagaaagtcatgtcaatcctgctgcacggtgatgctgcttttgccggacaaggcatcgtgtatgaaacattccaccttagcgacctgccgagctacactacacacggcaccgtccacgtagttgttaataatcagatcggttttacgactgatccacggatggcccgttccagtccatatcccactgacgtcgccagggtcgtcaatgcaccaatcttccacgttaattctgatgacccggaagccgtaatgtacgtttgtaaagtggctgccgaatggcggagcacttttcacaaggatgtagtggtggacctggtgtgttataggagaaacggacataatgagatggacgaacccatgttcacgcaaccattaatgtacaaacaaattaggaaacagaagcctgttctgcagaagtacgcagagctcctggtgagtcagggtgttgttaatcagccagagtatgaggaggaaataagtaaatacgacaaaatctgtgaagaggcctttgcgcgctccaaagatgagaagatcttgcacattaaacattggctggattctccatggccaggtttctttaccctggacggacagccccgcagtatgagctgtccatctacaggcttgaccgaggacatcctgacacacattggcaacgtggcctcctcggttccggtggagaattttacgatccacggaggtctcagcagaattcttaagacgaggggagagatggtgaaaaacaggactgtggactgggcactcgccgagtacatggctttcggaagtttactcaaggagggaatccacatccgactcagtgggcaggacgttgagcgcgggaccttcagccatagacatcacgtcctgcacgatcagaatgtggacaaaagaacatgtataccgatgaatcacctgtggcctaatcaggccccctatacagtctgtaatagtagtctgtctgaatacggagttctcggcttcgagctgggctttgcaatggcaagccccaacgcactggtgctgtgggaagcacagtttggagatttccacaatacagcccagtgcataatagaccagtttatttgtcccggccaggccaaatgggtgaggcagaatgggatagttctcctgctgccacacggaatggaaggaatgggacctgagcactccagtgcaagaccagaaaggtttctgcaaatgtgtaacgatgatcctgacgttctgccagacctcaaggaagccaacttcgacatcaatcagttatatgactgcaactgggtggtcgtcaactgctccacacccggtaacttttttcatgtgcttagaagacaaatactcctacctttcaggaaacctctgatcatcttcacaccaaagagcctgctgcgccatccagaggccaggtcatctttcgacgaaatgctgcccggaacacatttccaacgggttattccagaggacggtcccgcggctcaaaatccagaaaacgtgaagaggttgctgttctgtacaggaaaggtctactatgacctcactcgggaaagaaaagcgagagatatggtcggacaggtcgccatcacacggatcgagcagctgtcaccttttccgttcgacctcctgcttaaagaagttcagaagtacccaaacgctgagctggcatggtgccaggaagaacacaaaaatcagggatattacgattacgtgaaaccgaggctgcgcaccaccatcagtagagccaaacctgtttggtatgcaggcagggacccggctgctgctccagcaactggtaataagaaaacacacctcaccgaactccaacggttgctcgacaccgcatttgatctcgatgtgtttaaaaatttctcctag

SEQ ID NO: 63694 - DNA, 3060 bp, Artificial Sequence
  derived and/or modified sequence
atgttccacctgcggacctgtgccgccaagctgcggcccctgacagccagccagacagtgaagaccttcagccagaacagacctgctgctgcccggaccttccagcagatccgctgctacagcgcccctgtggccgctgagcccttcctgagcggcaccagcagcaactacgtggaggagatgtactgtgcctggctggagaaccccaagtctgtgcacaagtcctgggacatcttcttcaggaacaccaatgctggggcccctcctggaacagcctaccagagccccctgcccctgagccggggcagcctggccgctgtggcccacgcccagagcctggtggaggcccagcccaacgtggacaagctggtggaggaccacctggccgtgcagagcctcatccgggcctaccaggtgcggggccaccacatcgccaagctggaccccctgggcatcagctgtgtgaactttgatgatgcccctgtgacagtgagcagcaatgtgggcttctacggcctggatgaaagtgacctggacaaggtgttccacctgcccaccaccaccttcatcggcggccaggagagcgccctgcccctgcgggagatcatccggcggctggagatggcctactgccagcacatcggcgtggagttcatgttcatcaatgacctggagcagtgccagtggatccggcagaagtttgagaccccaggcatcatgcagttcaccaatgaggagaagaggaccctgctggcccggctggtgcgcagcaccaggtttgaggagttcctgcagaggaagtggagcagcgagaagcgcttcggcctggagggctgtgaggtgctgatcccagccctgaagaccatcatcgacaagagcagtgaaaatggagtggactatgtgatcatgggcatgccccaccggggccgcctgaatgtgctggccaacgtcatcaggaaggagctggagcagatcttctgccagtttgacagcaagctggaggccgcagatgagggcagcggagatgtgaagtaccacctgggcatgtaccaccggcgcatcaacagagtgacagacaggaacatcaccctgagcctggtggccaaccccagccacctggaggccgctgaccctgtggtgatgggcaagaccaaggccgagcagttctactgtggggacacagagggcaagaaggtgatgagcatcctgctgcatggagatgctgcctttgctggccagggcatcgtgtatgagaccttccacctgagtgacctgcccagctacaccacccatggaacagtgcacgtggtggtgaacaaccagatcggcttcaccacagaccccaggatggcccggagcagcccctaccccacagatgtggcccgggtggtgaatgcccccatcttccacgtgaacagtgatgatcctgaggccgtgatgtatgtgtgcaaggtggccgctgagtggaggagcaccttccacaaggatgtggtggtggacctggtgtgctacagaagaaatggccacaatgagatggatgagcccatgttcacccagcccctgatgtacaagcagatcaggaagcagaagcctgtgctgcagaagtatgcagagctgctggtgtcccagggcgtggtgaaccagccagaatatgaggaggagatcagcaaatatgacaagatctgtgaggaggcctttgcccggagcaaggatgagaagatcctgcacatcaagcactggctggacagcccctggccaggcttcttcaccctggatggccagcccaggtccatgagctgccccagcacaggcctgacagaggacatcctgacccacatcggaaatgtggccagctctgtgcctgtggagaacttcaccatccacggcggcctgagccgcatcctgaagaccagaggagagatggtgaagaacagaacagtggactgggccctggccgagtacatggccttcggcagcctgctgaaggagggcatccacatccggctgagcggccaggatgtggagcggggcaccttcagccaccgccaccacgtgctgcatgaccagaatgtggacaagaggacctgcatccccatgaaccacctgtggcccaaccaggccccctacacagtgtgcaacagcagcctgtctgaatatggagtgctgggctttgagctgggctttgccatggccagccccaatgccctggtgctgtgggaggcccagtttggagacttccacaacacagcccagtgcatcatcgaccagttcatctgccccggccaggccaagtgggtgcggcagaatggaattgtgctgctgctgccccacggcatggagggcatgggccctgagcacagcagcgcccggcctgagcgcttcctgcagatgtgcaatgatgatcctgatgtgctgcctgacctgaaggaggccaactttgacatcaaccagctgtatgactgcaactgggtggtggtgaactgcagcaccccaggcaacttcttccacgtgctgcggcggcagatcctgctgcccttcaggaagcccctcatcatcttcacccccaagagcctgctgcggcaccctgaggcccggagcagctttgatgagatgctgcccggcacccacttccagagggtcatcccagaagatggccctgctgcccagaacccagaaaatgtgaagaggctgctcttctgcaccgggaaggtgtactatgacctgacccgggagaggaaggcccgggacatggtgggccaggtggccatcacccgcatcgagcagctgagccccttcccctttgacctgctgctgaaggaggtgcagaagtacccaaatgctgagctggcctggtgccaggaggagcacaagaaccagggctactatgactatgtgaagccccggctgcggaccaccatcagccgggccaagcctgtgtggtacgccggccgggaccctgctgctgccccagccaccggcaacaagaagacccacctgacagagctgcagaggctgctggacacagcctttgacctggatgtgttcaagaacttctcctag

SEQ ID NO: 63695 - DNA, 3060 bp, Artificial Sequence
  derived and/or modified sequence
atgttccacctgcggacctgcgccgccaagctgcggcccctgaccgcctcccagacagtcaaaacgttttcccaaaatagacctgctgcagccaggacattccagcaaatccgttgttactccgctccagtggcagcagagccctttttgtccggtacttccagcaactatgtcgaagaaatgtactgcgcctggctcgaaaaccctaaatcagtgcacaagagctgggacatctttttcaggaacacgaacgccggggccccccccggaacagcataccagtcccccctgcctctgagcagagggtccctggccgcagttgcccatgcccagtctttggtggaggcacagcccaatgtggataagctcgttgaggaccacctagcagtgcagtcacttattagagcttatcaggtgaggggccaccacatcgctaagctagaccctctgggtattagctgcgtgaacttcgacgacgcccccgtgaccgtgtctagtaacgtgggattttacggattggatgaatctgacctcgataaagtgtttcatctgcccacgaccactttcatcggggggcaggagagtgccctcccactgcgggagataataaggcgactcgaaatggcttactgtcaacacattggagtggaattcatgtttataaacgatttagagcagtgtcaatggatacgccaaaagttcgaaacccccggaattatgcaatttacaaatgaagagaaaaggaccctgctagcccggctggtcagaagtacacgattcgaggagttcctgcagcggaagtggtcatctgaaaaaaggttcgggttggagggttgcgaagtgctcatccccgcactaaagactatcatcgacaaatccagtgagaatggtgtagattatgtgattatgggaatgccacacagagggaggttaaatgttctggccaatgtgatccgcaaagagttggaacaaatcttttgtcagttcgattcaaaactggaggccgcagatgaaggctccggtgatgttaaatatcaccttgggatgtatcacagaaggataaatcgggttaccgacaggaacattacgctctccctcgtcgcgaaccctagccatctcgaggccgctgatccagtggtcatgggaaagacgaaggcagagcagttctactgcggggatactgaaggtaagaaagtgatgtccatcctgctgcatggggacgcagcctttgccggacaggggatcgtgtacgaaacatttcatttgtctgacctccctagttatacgacccacggcactgtccacgtcgtcgtgaacaaccagatagggttcactaccgacccgagaatggccagatcttccccgtatcctacggacgtcgcccgcgtggtcaatgcacctatctttcacgtcaattccgatgatcccgaggctgtgatgtacgtttgcaaagtggctgcagaatggcgatccacttttcataaagacgtcgtggttgatttagtgtgttacagacgcaatggacacaacgagatggacgaacccatgtttacacagccactgatgtacaaacaaataagaaagcagaaacctgtgcttcagaaatacgccgagctgttggtgtctcaaggtgtcgtaaatcagccagagtacgaggaggagatctctaagtacgacaaaatttgcgaggaagcttttgcaagatctaaggatgaaaagatcctgcatatcaaacactggttggactccccgtggcctgggttcttcaccctggatggccagccccgatctatgtcctgcccatcaacggggttgacagaagatatcctgacgcacattgggaatgttgcgtctagcgtgcccgtggagaattttacaatacacggcggtctgagccgcattttgaagactaggggtgagatggtaaagaataggactgtggattgggctttggccgagtacatggcctttggctcgctcctcaaggaggggatacatattcgcctttccggccaagatgttgagagaggtactttttcccacagacatcatgtactgcatgaccagaatgtggacaaaaggacatgtatcccgatgaaccatttgtggcccaaccaagccccctacaccgtatgtaactcttcactgtccgaatacggtgtgctgggattcgaactcgggttcgcgatggcgtcaccgaatgctctcgttctgtgggaagctcagtttggtgatttccacaacaccgcgcagtgcatcattgaccagttcatttgccctggtcaggctaaatgggtacggcagaatggtatagtgctgctcctcccacatggaatggagggcatgggccccgagcactctagtgcccgcccagaaagattcttacagatgtgcaatgacgaccccgatgtgctaccagacctgaaagaggcgaactttgacatcaatcagctgtacgattgtaattgggtagtggtcaactgctcaactccggggaatttcttccacgtcctgcgacgccagattctgctgcctttccgtaagccactcatcatcttcaccccaaagtctttacttcgccacccagaagccaggtcttctttcgacgagatgctcccaggaacgcatttccaacgcgtaatccctgaggacggccctgcagcccagaaccccgagaatgtgaaacggctgctcttctgcaccgggaaagtgtactatgacctgaccagggagaggaaggcgcgagacatggtcggacaggtcgcgattaccaggatcgagcagctctcaccttttcccttcgacctgctgctcaaggaggttcagaagtacccgaacgccgaattggcctggtgtcaagaggaacacaagaaccagggctattatgactatgtcaaacccaggctcagaactacaatctcccgtgctaagcctgtgtggtacgcaggccgcgacccggctgccgctcccgctactggaaacaagaaaactcacctaactgaattacagagactcctggatacagcgtttgatttggacgtgtttaagaacttctcttag

SEQ ID NO: 63696 - DNA, 3479 bp, Artificial Sequence
  derived and/or modified sequence
agagtttggagccccggagtggggtgtcggcgcctcattcgggtggagctgagccggagacaggcagttgtgaaaaacttcaggacaaaaatgtttcatttaaggacttgtgctgctaagttgaggccattgacggcttcccagactgttaagacattttcacaaaacagaccagcagcagctaggacatttcaacagattcggtgctattctgcacctgttgctgctgagccctttctcagtgggactagttcgaactatgtggaggagatgtactgtgcttggctggaaaaccccaaaagtgtacataagtcatgggacattttttttcgcaacacgaatgccggagccccaccgggcactgcctaccagagtccccttcccctgagccgaggctccctggctgctgtggcccatgcacagtccctggtagaagcacagcccaacgtggacaagctcgtggaggaccacctggcagtgcagtcgctcatcagggcatatcaggtcaggggtcaccacattgcaaaacttgatcctctcggaattagttgtgtaaattttgatgatgctccagtaactgtttcttcaaacgtggggttctatggcctggatgagtctgacctcgacaaggtcttccacttgcccaccaccactttcatcgggggacaggaatcagcacttcctctgcgggagatcatccgtcggctggagatggcctactgccagcatattggggtggagttcatgttcatcaatgacctggagcagtgccagtggatccggcagaagtttgagacccctgggatcatgcagttcacaaatgaggagaaacggaccctgctggccaggcttgtgcggtccaccaggtttgaggagttcctacagcggaagtggtcctctgagaagcgctttggtctagaaggctgcgaggtactgatccctgccctcaagaccatcattgacaagtctagtgagaatggcgtggactacgtgatcatgggcatgccacacagagggcggctgaacgtgcttgcaaatgtcatcaggaaggagctggaacagatcttctgtcaattcgattcaaagctggaggcagctgatgagggctccggagatgtgaagtaccacctgggcatgtatcaccgcaggatcaatcgtgtcaccgacaggaacattaccttgtccttggtggccaacccttcccaccttgaggccgctgaccccgtggtgatgggcaagaccaaagccgaacagttttactgtggcgacactgaagggaaaaaggtcatgtccatcctgttgcatggggatgctgcatttgctggccagggcattgtgtacgagaccttccacctcagcgacctgccatcctacacaactcatggcaccgtgcacgtggtcgtcaacaaccagatcggcttcaccaccgaccctcggatggcccgctcctccccctaccccactgacgtggcccgagtggtgaatgcccccattttccacgtgaactcagatgaccccgaggctgtcatgtacgtgtgcaaagtggcggccgagtggaggagcaccttccacaaggacgtggttgtcgatttggtgtgttaccggcgcaacggccacaacgagatggatgagcccatgttcacgcagccgctcatgtacaagcagatccgcaagcagaagcctgtgttacagaagtacgctgagctgctggtgtcgcagggtgtggtcaaccagcctgagtatgaggaggaaatttccaagtatgataagatctgtgaggaagcttttgccagatctaaagatgagaagatcttgcacattaagcactggctggactctccctggcctggcttcttcaccctggacgggcagcccaggagcatgtcctgcccctccacgggtctgacggaggatattctgacacacatcgggaatgtggctagttctgtgcctgtggaaaactttactattcatggagggctgagccggatcttgaagactcgtggggaaatggtgaagaaccggactgtggactgggctctagcggagtacatggcgtttggctcgctcctgaaggagggcatccacattcggctgagcggccaggacgtggagcggggcacattcagccaccgccaccatgtgctccatgaccagaatgtggacaagagaacctgcatccccatgaaccatctctggcccaatcaggccccctatactgtgtgcaacagctcactgtctgagtacggcgtgctgggctttgagctgggcttcgccatggccagtcctaatgccctggtcctctgggaagcccaatttggtgacttccacaacacggcccagtgtatcatcgaccagttcatctgcccgggacaagccaagtgggtgcggcagaatggcatcgtgttgctgctgccccatggcatggagggcatgggtccagaacattcctccgcccgcccagagcggttcttgcagatgtgcaacgatgacccagatgtcctgccagaccttaaagaagccaacttcgacatcaatcagctatatgactgcaattgggttgttgtcaactgctccactcctggcaacttcttccacgtgctacgacgccagatcctgctgccattccggaagccgttaattatcttcacccccaaatccctgttgcgccaccccgaggccagatccagctttgatgagatgcttccaggaacccacttccagcgggtgatcccagaagatggccctgcagctcagaacccagaaaatgtcaaaaggcttctcttctgcaccggcaaagtgtattatgacctcacccgggagcgcaaagcacgcgacatggtggggcaggtggccatcacaaggattgagcagctgtcgccattcccctttgacctcctgctgaaggaggtgcagaagtaccccaatgctgagctggcctggtgccaggaggagcacaagaaccaaggctactatgactacgtgaagccaagacttcggaccaccatcagccgcgccaagcccgtctggtatgccggccgggacccagcggctgctccagccaccggcaacaagaagacccacctgacggagctgcagcgcctcctggacacggccttcgacctggacgtcttcaagaacttctcgtagatgctgcctagggttgcttgggccactgccctctccacacccatgactgccccttgcttctcaactaaagaatagtgcctcagcgctgcccacaccaccgccctcctcgctgtgccaccacccctccctctgctctcataggagttaggctgtcgtccccctccagtgcttggctgccccacaggccacacgctgcccaggctctgctgacttctgagcagttttccaggaggccggggggagcaggaggaggaaaggtagcccccgagggatgtccttggggaggggtcagctctggccacaatcctccccaccagtctcacccacta

SEQ ID NO: 63697 - DNA, 3060 bp, Artificial Sequence
  derived and/or modified sequence
atgtttcacctaagaacctgtgcggcaaaactccgaccactaacagccagccagacagtcaaaacattcagtcagaaccgaccagctgctgcccgaacattccagcagatcagatgctactcagctcccgtggctgcagagccattcctctctggcacctcgtctaactatgtggaagaaatgtattgtgcctggttggaaaatccaaagagcgtccataaaagctgggatatcttttttcgtaacacaaacgccggagcccctccgggaaccgcttaccagtctccgcttccactttccagggggagccttgcagctgttgctcatgctcaaagcctggtcgaggcccagcccaacgtagataagctggtcgaagaccacttagccgtgcagagcttgattcgtgcctatcaggtacgtggtcaccacattgccaagctggatccccttgggatttcttgcgtgaactttgacgacgctcctgtgactgtgtcaagcaacgtcggtttctatgggctggacgaatctgacctggataaggttttccacctgcctaccacgacatttataggcggtcaggagtctgccctgccattgagggagatcattagacgcctggaaatggcgtattgtcagcacattggcgtggaattcatgttcatcaacgacctggagcagtgtcaatggattcgtcagaaatttgagacaccaggtattatgcagttcactaacgaggagaaacgcaccctcctcgcaaggctggttaggtccacaagatttgaggagttcctccagcgcaaatggtcatccgaaaagcgcttcggactcgaaggatgtgaagtcctaattccagctctgaaaaccatcattgataagtcttccgagaacggcgtcgattatgtcattatgggaatgccccaccgtgggaggctgaatgtactggccaacgtcatcaggaaggaactggaacagatcttctgccagttcgacagcaagttagaagccgctgacgaaggaagcggagacgtgaagtatcacctcgggatgtatcatagacgcatcaacagagtcacagaccgcaacatcaccctgtcactggttgctaatccctcccatctggaagctgcggacccagtggtgatgggaaagactaaggccgagcaattttattgcggcgataccgagggcaaaaaggtgatgtctattcttctgcacggcgatgccgcatttgctggacagggcatagtgtatgagactttccacttatccgatctcccttcctataccacacacggtaccgtgcacgtggtggttaacaaccaaattgggtttaccacagatcctcgaatggccaggagttcgccctacccaactgacgtcgcacgcgtcgtcaacgcccctatcttccacgttaactcagatgacccggaggcggttatgtacgtgtgtaaagtggccgctgagtggagaagcacctttcacaaagatgtcgtggtcgacctggtgtgctacagacgtaacgggcataacgagatggacgaaccaatgttcacacagccactcatgtataaacagatcagaaagcagaagcctgttctacagaaatatgcagagctgctggtatcccagggggttgttaatcagcccgaatacgaggaagaaatcagcaaatatgacaaaatctgtgaagaagcattcgcaaggtcaaaagatgaaaagattctgcacatcaagcactggctcgattctccatggcctggcttcttcacactcgacgggcagccacggagcatgtcctgcccaagtaccggtctgactgaggatatcctcactcatattggaaacgtggccagctccgtgcccgtagaaaatttcaccatccacggcggtctatctcggatcctgaagacacggggtgagatggtgaaaaatcgcaccgtggattgggcgttggccgaatacatggcctttggctcactactcaaggaaggaatccatataagactatctggtcaggatgtggagagaggtacgttctcccacaggcaccatgtgctgcatgaccaaaatgtggataaacggacttgtattccgatgaatcatctctggcctaaccaggctccttacaccgtttgcaatagtagcctgagtgagtatggcgttttgggtttcgaactgggatttgctatggccagtcccaacgctctcgtcctctgggaagctcagttcggtgacttccataacaccgcccagtgcatcatagaccaatttatctgtcctggacaggccaagtgggtaaggcaaaacggaatcgtgttactcttaccgcatggcatggaggggatgggcccagaacacagctccgccagaccagagcgatttttgcagatgtgcaacgacgatccagacgtgctgcctgacctgaaggaggcgaatttcgatatcaatcagctctacgactgcaactgggtggtggtaaactgcagtaccccgggaaatttcttccatgttctccggcgacagattcttctgccttttcgaaagccgttgataatctttactccaaagtctctcttgaggcaccccgaggcccgtagtagcttcgacgaaatgctgcccggaacacactttcagcgggtcataccagaagacgggccagctgcgcagaaccctgaaaatgtgaagaggttgcttttttgcactgggaaggtctattacgatttgacaagagaacgaaaggcccgagatatggtgggacaggtcgccattacgcgcatcgagcagctctccccattccctttcgatcttcttctgaaggaagttcagaaatatccaaatgcggaactcgcctggtgtcaggaggaacacaagaatcaaggctactatgattacgtgaagcctcggctgcggactacaataagccgcgctaagcccgtgtggtatgcgggtcgagaccccgcagctgctccagctaccggtaacaagaagacgcacctgaccgagttgcagcgcttgttggatacggcgttcgatttggatgtgttcaaaaactttagctag

SEQ ID NO: 63698 - DNA, 3060 bp, Artificial Sequence
  derived and/or modified sequence
atgttccacctgagaacctgcgccgccaagctgagacccctgaccgccagccagaccgtgaagaccttcagccagaacagacccgccgccgccagaaccttccagcagatcagatgctacagcgcccccgtggccgccgagcccttcctgagcggcaccagcagcaactacgtggaggagatgtactgcgcctggctggagaaccccaagagcgtgcacaagagctgggacatcttcttcagaaacaccaacgccggcgccccccccggcaccgcctaccagagccccctgcccctgagcagaggcagcctggccgccgtggcccacgcccagagcctggtggaggcccagcccaacgtggacaagctggtggaggaccacctggccgtgcagagcctgatcagagcctaccaggtgagaggccaccacatcgccaagctggaccccctgggcatcagctgcgtgaacttcgacgacgcccccgtgaccgtgagcagcaacgtgggcttctacggcctggacgagagcgacctggacaaggtgttccacctgcccaccaccaccttcatcggcggccaggagagcgccctgcccctgagagagatcatcagaagactggagatggcctactgccagcacatcggcgtggagttcatgttcatcaacgacctggagcagtgccagtggatcagacagaagttcgagacccccggcatcatgcagttcaccaacgaggagaagagaaccctgctggccagactggtgagaagcaccagattcgaggagttcctgcagagaaagtggagcagcgagaagagattcggcctggagggctgcgaggtgctgatccccgccctgaagaccatcatcgacaagagcagcgagaacggcgtggactacgtgatcatgggcatgccccacagaggcagactgaacgtgctggccaacgtgatcagaaaggagctggagcagatcttctgccagttcgacagcaagctggaggccgccgacgagggcagcggcgacgtgaagtaccacctgggcatgtaccacagaagaatcaacagagtgaccgacagaaacatcaccctgagcctggtggccaaccccagccacctggaggccgccgaccccgtggtgatgggcaagaccaaggccgagcagttctactgcggcgacaccgagggcaagaaggtgatgagcatcctgctgcacggcgacgccgccttcgccggccagggcatcgtgtacgagaccttccacctgagcgacctgcccagctacaccacccacggcaccgtgcacgtggtggtgaacaaccagatcggcttcaccaccgaccccagaatggccagaagcagcccctaccccaccgacgtggccagagtggtgaacgcccccatcttccacgtgaacagcgacgaccccgaggccgtgatgtacgtgtgcaaggtggccgccgagtggagaagcaccttccacaaggacgtggtggtggacctggtgtgctacagaagaaacggccacaacgagatggacgagcccatgttcacccagcccctgatgtacaagcagatcagaaagcagaagcccgtgctgcagaagtacgccgagctgctggtgagccagggcgtggtgaaccagcccgagtacgaggaggagatcagcaagtacgacaagatctgcgaggaggccttcgccagaagcaaggacgagaagatcctgcacatcaagcactggctggacagcccctggcccggcttcttcaccctggacggccagcccagaagcatgagctgccccagcaccggcctgaccgaggacatcctgacccacatcggcaacgtggccagcagcgtgcccgtggagaacttcaccatccacggcggcctgagcagaatcctgaagaccagaggcgagatggtgaagaacagaaccgtggactgggccctggccgagtacatggccttcggcagcctgctgaaggagggcatccacatcagactgagcggccaggacgtggagagaggcaccttcagccacagacaccacgtgctgcacgaccagaacgtggacaagagaacctgcatccccatgaaccacctgtggcccaaccaggccccctacaccgtgtgcaacagcagcctgagcgagtacggcgtgctgggcttcgagctgggcttcgccatggccagccccaacgccctggtgctgtgggaggcccagttcggcgacttccacaacaccgcccagtgcatcatcgaccagttcatctgccccggccaggccaagtgggtgagacagaacggcatcgtgctgctgctgccccacggcatggagggcatgggccccgagcacagcagcgccagacccgagagattcctgcagatgtgcaacgacgaccccgacgtgctgcccgacctgaaggaggccaacttcgacatcaaccagctgtacgactgcaactgggtggtggtgaactgcagcacccccggcaacttcttccacgtgctgagaagacagatcctgctgcccttcagaaagcccctgatcatcttcacccccaagagcctgctgagacaccccgaggccagaagcagcttcgacgagatgctgcccggcacccacttccagagagtgatccccgaggacggccccgccgcccagaaccccgagaacgtgaagagactgctgttctgcaccggcaaggtgtactacgacctgaccagagagagaaaggccagagacatggtgggccaggtggccatcaccagaatcgagcagctgagccccttccccttcgacctgctgctgaaggaggtgcagaagtaccccaacgccgagctggcctggtgccaggaggagcacaagaaccagggctactacgactacgtgaagcccagactgagaaccaccatcagcagagccaagcccgtgtggtacgccggcagagaccccgccgccgcccccgccaccggcaacaagaagacccacctgaccgagctgcagagactgctggacaccgccttcgacctggacgtgttcaagaacttcagctag

SEQ ID NO: 63699 - protein, 331 aa, Artificial Sequence
  derived and/or modified sequence
MILANVFCLFFFLGTGADPVVSAKSNHCLDAAKACNLNDNCKKLRSSYISICNREISPTERCNRRKCHKALRQFFDRVPSEYTYRMLFCSCQDQACAERRRQTILPSCSYEDKEKPNCLDLRGVCRTDHLCRSRLADFHANCRASYQTVTSCPADNYQACLGSYAGMIGFDMTPNYVDSSPTGIVVSPWCSCRGSGNMEEECEKFLRDFTENPCLRNAIQAFGNGTDVNVSPKGPSFQATQAPRVEKTPSLPDDLSDSTSLGTSVITTCTSVQEQGLKANNSKELSMCFTELTTNIIPGSNKVIKPNSGPSRARPSAALTVLSVLMLKLAL

SEQ ID NO: 63700 - DNA, 996 bp, Artificial Sequence
  derived and/or modified sequence
atgatacttgccaacgtgttctgcctcttcttttttcttgggacaggggcggatccagttgttagcgccaagtccaaccattgtctcgatgcggccaaggcttgtaacctcaatgacaattgcaagaagttgagatcatcatatatttctatctgtaatagagaaatctcacctacagaacgatgtaacaggagaaagtgccataaagctctgcgtcaattctttgatcgggtcccgtctgaatatacttatagaatgctcttctgcagctgccaggaccaggcttgcgctgagagacgtagacagaccatcctcccatcttgtagctacgaggataaagagaaacccaattgtctggacttaaggggtgtgtgccggaccgaccatctctgtcgctcgcgcttagctgattttcacgctaactgtcgcgcgtcttatcaaacagtgacgtcttgccccgcggataattaccaggcctgcctgggatcctacgcaggaatgatcggctttgatatgaccccgaattatgtggatagtagccccaccggaatagtagtgtccccttggtgctcgtgccggggctccgggaatatggaggaggaatgtgaaaaatttcttagagatttcacagaaaatccttgccttagaaatgctatccaagcttttgggaatgggacagacgtcaacgtatcccccaagggcccctccttccaagcaactcaggctccccgcgtggaaaaaacgccgagcctcccagacgacttatcagacagcacgtccctgggaacaagcgtgatcaccacgtgtacaagtgtgcaggagcagggtctgaaggctaacaactcaaaagaactttcaatgtgtttcactgaattaacaacaaatatcattccaggttctaataaggtgattaagcccaatagtgggccatctagggctaggccgtccgccgctcttaccgtgctgtctgtgctgatgttgaagctcgcactctag

SEQ ID NO: 63701 - DNA, 1503 bp, Artificial Sequence
  derived and/or modified sequence
gagaatcgcaggactcgggatcttcatcgggtggactagctgggatctccgcattggatttggggctgattaccactgcttgcctattattattgttgttgttactactattatttttttttacccaagggagaaagacaaaaaaacggtgggatttatttaacatgatcttggcaaacgtcttctgcctcttcttctttctagggacaggggcagacccggtggtcagcgccaagagcaaccattgcctggatgctgccaaggcctgcaacctgaatgacaactgcaagaagctgcgctcctcctacatctccatctgcaaccgcgagatctcgcccaccgagcgctgcaaccgccgcaagtgccacaaggccctgcgccagttcttcgaccgggtgcccagcgagtacacctaccgcatgctcttctgctcctgccaagaccaggcgtgcgctgagcgccgccggcaaaccatcctgcccagctgctcctatgaggacaaggagaagcccaactgcctggacctgcgtggcgtgtgccggactgaccacctgtgtcggtcccggctggccgacttccatgccaattgtcgagcctcctaccagacggtcaccagctgccctgcggacaattaccaggcgtgtctgggctcttatgctggcatgattgggtttgacatgacacctaactatgtggactccagccccactggcatcgtggtgtccccctggtgcagctgtcgtggcagcgggaacatggaggaggagtgtgagaagttcctcagggacttcaccgagaacccatgcctccggaacgccatccaggcctttggcaacggcacggacgtgaacgtgtccccaaaaggcccctcgttccaggccacccaggcccctcgggtggagaagacgccttctttgccagatgacctcagtgacagtaccagcttggggaccagtgtcatcaccacctgcacgtctgtccaggagcaggggctgaaggccaacaactccaaagagttaagcatgtgcttcacagagctcacgacaaatatcatcccagggagtaacaaggtgatcaaacctaactcaggccccagcagagccagaccgtcggctgccttgaccgtgctgtctgtcctgatgctgaaactggccttgtaggctgtgggaaccgagtcagaatatttttgaaagctacgcagacaagaacagccgcctgacgaaatggaaacacacacagacacacacacaccttgcaaaaaaaaaattgtttttcccaccttgtcgctgaacctgtctcctcccaggtttcttctctggagaagtttttgtaaaccaaacagacaagcaggcaggcagcctgagagctggcccaggggtcccctggcaggggaaactctggtgccggggagggcacgaggctctagaaatgcccttcactttctcctggtgtttttctctctggacccttctgaagcagagaccggacaagagcctgcagcgg

SEQ ID NO: 63702 - DNA, 996 bp, Artificial Sequence
  derived and/or modified sequence
atgatcctggccaacgtgttctgcctcttcttcttcctgggcactggagctgaccctgtggtgtctgccaagagcaaccactgcctggatgctgccaaggcctgcaacctgaatgacaactgcaagaagctgcggagcagctacatcagcatctgcaaccgggagatcagccccacagagcgctgcaacagaaggaagtgccacaaggccctgcggcagttctttgacagagtgcccagcgagtacacctacaggatgctgttctgcagctgccaggaccaggcctgtgccgagcggcggcggcagaccatcctgcccagctgcagctatgaggacaaggagaagcccaactgcctggacctgcggggcgtgtgcaggacagaccacctgtgccgcagccggctggccgacttccacgccaactgccgggccagctaccagacagtgaccagctgcccagctgacaactaccaggcctgcctgggcagctatgccggcatgattggatttgacatgacccccaactacgtggacagcagccccaccggcatcgtggtgagcccctggtgcagctgccggggcagcggcaacatggaggaggagtgtgagaagttcctgcgggacttcacagagaacccctgcctgagaaatgccatccaggcctttggaaatggaacagatgtgaatgtgagccccaagggccccagcttccaggccacccaggccccccgggtggagaagacccccagcctgcctgatgacctgagtgacagcaccagcctgggcaccagcgtcatcaccacctgcacctctgtgcaggagcagggcctgaaggccaacaacagcaaggagctgtccatgtgcttcacagagctgaccaccaacatcatccctggcagcaacaaggtgatcaagcccaacagcggccccagccgggcccggcccagcgctgccctgactgtgctgtctgtgctgatgctgaagctggccctgtag

SEQ ID NO: 63703 - DNA, 996 bp, Artificial Sequence
  derived and/or modified sequence
atgatcctggccaacgtgttctgcctgttcttcttcctgggcaccggcgctgatccagttgtgagcgctaagagtaaccactgcctggacgcagcaaaggcatgcaacttgaatgataactgtaaaaagctgaggtcctcctacattagcatatgcaaccgggagatctcccccaccgagaggtgcaaccggcgaaagtgccataaggccctgcgccagttctttgaccgtgtgccgtccgagtatacgtatagaatgctattctgttcgtgtcaggatcaagcatgtgcggaaaggaggagacagacaatcctgccttcatgttcttatgaagataaggagaaaccaaactgtctggacctacggggcgtgtgtaggactgaccacctgtgtagatccagactggcagattttcacgctaactgtcgagcatcctaccagacggtcaccagctgcccagccgacaactaccaagcatgcctgggcagttacgcaggtatgattggctttgatatgacccccaactatgttgattcctccccaaccggtatcgtcgtctctccctggtgtagctgccgcggaagcggcaatatggaggaagaatgcgagaaatttctccgcgactttactgagaacccttgtttacgaaacgcgattcaggcatttggcaacgggactgatgtcaacgtttctcccaaggggccgtcctttcaggccacccaggcccctcgcgtggaaaagaccccttctctgccagacgacctgtccgactccacctctctcggcacgtcagtgatcaccacttgcaccagcgtgcaggagcagggcctgaaggctaacaacagtaaagagctgagcatgtgtttcactgaattgaccaccaacattatccccggaagcaacaaggtaataaagcctaacagcggaccttctagggccaggccaagcgctgccctgaccgtgctaagtgttctcatgctaaaacttgcgctgtag

SEQ ID NO: 63704 - DNA, 996 bp, Artificial Sequence
  derived and/or modified sequence
atgattttggctaacgtgttctgcctgttcttcttcctgggcacaggtgccgatcctgttgtgagtgcaaagagcaatcactgtctggacgccgcaaaggcgtgcaatctcaatgacaactgcaaaaaactgcgaagtagctacatcagcatctgcaatagggagatatcccctaccgagagatgtaacaggaggaagtgtcataaagccttacgccaattttttgacagggttccgtccgagtacacatatcggatgctcttctgctcttgtcaggaccaggcatgtgccgagagacgtcgacaaaccatcctgccgtcttgctcatacgaggataaagaaaagcccaattgtctagatctcaggggtgtgtgtcgaacagaccacctctgccgcagcaggctggctgatttccatgccaactgcagagccagctatcagacggtgacatcttgtccggctgataattatcaggcctgccttggaagctacgccggaatgatcgggtttgacatgaccccaaattatgtggacagctcccccaccgggattgtggttagtccttggtgtagttgcagggggagcggcaacatggaggaagagtgcgaaaagttcctccgggattttacggagaacccatgcctgcgcaacgcgattcaggcttttggaaatgggaccgacgttaatgtctcaccaaaaggcccaagcttccaggctacacaagcgcctcgggtggagaagacgccctccctcccagacgacctgtccgacagcacttccttggggactagcgtgatcactacctgcacaagcgtgcaggaacagggcctcaaagccaataattccaaagagctgagtatgtgtttcacggagctgacaactaacatcattcctgggtcaaataaagtgataaaaccaaactctggccctagtagggcaagaccgagcgctgccctgaccgtgctgagcgtacttatgttaaagctggcgttatag

SEQ ID NO: 63705 - DNA, 996 bp, Artificial Sequence
  derived and/or modified sequence
atgatcctggccaacgtgttctgcctgttcttcttcctgggcaccggcgccgaccccgtggtgagcgccaagagcaaccactgcctggacgccgccaaggcctgcaacctgaacgacaactgcaagaagctgagaagcagctacatcagcatctgcaacagagagatcagccccaccgagagatgcaacagaagaaagtgccacaaggccctgagacagttcttcgacagagtgcccagcgagtacacctacagaatgctgttctgcagctgccaggaccaggcctgcgccgagagaagaagacagaccatcctgcccagctgcagctacgaggacaaggagaagcccaactgcctggacctgagaggcgtgtgcagaaccgaccacctgtgcagaagcagactggccgacttccacgccaactgcagagccagctaccagaccgtgaccagctgccccgccgacaactaccaggcctgcctgggcagctacgccggcatgatcggcttcgacatgacccccaactacgtggacagcagccccaccggcatcgtggtgagcccctggtgcagctgcagaggcagcggcaacatggaggaggagtgcgagaagttcctgagagacttcaccgagaacccctgcctgagaaacgccatccaggccttcggcaacggcaccgacgtgaacgtgagccccaagggccccagcttccaggccacccaggcccccagagtggagaagacccccagcctgcccgacgacctgagcgacagcaccagcctgggcaccagcgtgatcaccacctgcaccagcgtgcaggagcagggcctgaaggccaacaacagcaaggagctgagcatgtgcttcaccgagctgaccaccaacatcatccccggcagcaacaaggtgatcaagcccaacagcggccccagcagagccagacccagcgccgccctgaccgtgctgagcgtgctgatgctgaagctggccctgtag

SEQ ID NO: 63706 - protein, 986 aa, Artificial Sequence
  derived and/or modified sequence
MYFCWGADSRELQRRRTAGSPGAELLQAASGERHSLLLLTNHRVLSCGDNSRGQLGRRGAQRGELPEPIQALETLIVDLVSCGKEHSLAVCHKGRVFAWGAGSEGQLGIGEFKEISFTPKKIMTLNDIKIIQVSCGHYHSLALSKDSQVFSWGKNSHGQLGLGKEFPSQASPQRVRSLEGIPLAQVAAGGAHSFALSLCGTSFGWGSNSAGQLALSGRNVPVQSNKPLSVGALKNLGVVYISCGDAHTAVLTQDGKVFTFGDNRSGQLGYSPTPEKRGPQLVERIDGLVSQIDCGSYHTLAYVHTTGQVVSFGHGPSDTSKPTHPEALTENFDISCLISAEDFVDVQVKHIFAGTYANFVTTHQDTSSTRAPGKTLPEISRISQSMAEKWIAVKRRSTEHEMAKSEIRMIFSSPACLTASFLKKRGTGETTSIDVDLEMARDTFKKLTKKEWISSMITTCLEDDLLRALPCHSPHQEALSVFLLLPECPVMHDSKNWKNLVVPFAKAVCEMSKQSLQVLKKCWAFLQESSLNPLIQMLKAAIISQLLHQTKTEQDHCNVKALLGMMKELHKVNKANCRLPENTFNINELSNLLNFYIDRGRQLFRDNHLMSEKKAYMLMHETILQKKDEFPPSPRFILRVRRSRLVKDALRQLSQAEATDFCKVLVVEFINEICPESGGVSSEFFHCMFEEMTKPEYGMFMYPEMGSCMWFPAKPKPEKKRYFLFGMLCGLSLFNLNVANLPFPLALYKKLLDQKPSLEDLKELSPRLGKSLQEVLDDAADDIGDALCIRFSIHWDQNDVDLIPNGISIPVDQTNKRDYVSKYIDYIFNVSVKAVYEEFQRGFYRVCEKEILRHFYPEELMTAIIGNTDYDWKQFEQNSKYEQGYQKSHPTIQLFWKAFHKLTLDEKKKFLFFLTGRDRLHARGIQKMEIVFRCPETFSERDHPTSITCHNILSLPKYSTMERMEEALQVAINNNRGFVSPMLTQS

SEQ ID NO: 63707 - DNA, 2961 bp, Artificial Sequence
  derived and/or modified sequence
atgtacttctgctggggcgccgacagcagagagctgcagagaagaagaaccgccggcagccccggcgccgagctgctgcaggccgccagcggcgagagacacagcctgctgctgctgaccaaccacagagtgctgagctgcggcgacaacagcagaggccagctgggcagaagaggcgcccagagaggcgagctgcccgagcccatccaggccctggagaccctgatcgtggacctggtgagctgcggcaaggagcacagcctggccgtgtgccacaagggcagagtgttcgcctggggcgccggcagcgagggccagctgggcatcggcgagttcaaggagatcagcttcacccccaagaagatcatgaccctgaacgacatcaagatcatccaggtgagctgcggccactaccacagcctggccctgagcaaggacagccaggtgttcagctggggcaagaacagccacggccagctgggcctgggcaaggagttccccagccaggccagcccccagagagtgagaagcctggagggcatccccctggcccaggtggccgccggcggcgcccacagcttcgccctgagcctgtgcggcaccagcttcggctggggcagcaacagcgccggccagctggccctgagcggcagaaacgtgcccgtgcagagcaacaagcccctgagcgtgggcgccctgaagaacctgggcgtggtgtacatcagctgcggcgacgcccacaccgccgtgctgacccaggacggcaaggtgttcaccttcggcgacaacagaagcggccagctgggctacagccccacccccgagaagagaggcccccagctggtggagagaatcgacggcctggtgagccagatcgactgcggcagctaccacaccctggcctacgtgcacaccaccggccaggtggtgagcttcggccacggccccagcgacaccagcaagcccacccaccccgaggccctgaccgagaacttcgacatcagctgcctgatcagcgccgaggacttcgtggacgtgcaggtgaagcacatcttcgccggcacctacgccaacttcgtgaccacccaccaggacaccagcagcaccagagcccccggcaagaccctgcccgagatcagcagaatcagccagagcatggccgagaagtggatcgccgtgaagagaagaagcaccgagcacgagatggccaagagcgagatcagaatgatcttcagcagccccgcctgcctgaccgccagcttcctgaagaagagaggcaccggcgagaccaccagcatcgacgtggacctggagatggccagagacaccttcaagaagctgaccaagaaggagtggatcagcagcatgatcaccacctgcctggaggacgacctgctgagagccctgccctgccacagcccccaccaggaggccctgagcgtgttcctgctgctgcccgagtgccccgtgatgcacgacagcaagaactggaagaacctggtggtgcccttcgccaaggccgtgtgcgagatgagcaagcagagcctgcaggtgctgaagaagtgctgggccttcctgcaggagagcagcctgaaccccctgatccagatgctgaaggccgccatcatcagccagctgctgcaccagaccaagaccgagcaggaccactgcaacgtgaaggccctgctgggcatgatgaaggagctgcacaaggtgaacaaggccaactgcagactgcccgagaacaccttcaacatcaacgagctgagcaacctgctgaacttctacatcgacagaggcagacagctgttcagagacaaccacctgatgagcgagaagaaggcctacatgctgatgcacgagaccatcctgcagaagaaggacgagttcccccccagccccagattcatcctgagagtgagaagaagcagactggtgaaggacgccctgagacagctgagccaggccgaggccaccgacttctgcaaggtgctggtggtggagttcatcaacgagatctgccccgagagcggcggcgtgagcagcgagttcttccactgcatgttcgaggagatgaccaagcccgagtacggcatgttcatgtaccccgagatgggcagctgcatgtggttccccgccaagcccaagcccgagaagaagagatacttcctgttcggcatgctgtgcggcctgagcctgttcaacctgaacgtggccaacctgcccttccccctggccctgtacaagaagctgctggaccagaagcccagcctggaggacctgaaggagctgagccccagactgggcaagagcctgcaggaggtgctggacgacgccgccgacgacatcggcgacgccctgtgcatcagattcagcatccactgggaccagaacgacgtggacctgatccccaacggcatcagcatccccgtggaccagaccaacaagagagactacgtgagcaagtacatcgactacatcttcaacgtgagcgtgaaggccgtgtacgaggagttccagagaggcttctacagagtgtgcgagaaggagatcctgagacacttctaccccgaggagctgatgaccgccatcatcggcaacaccgactacgactggaagcagttcgagcagaacagcaagtacgagcagggctaccagaagagccaccccaccatccagctgttctggaaggccttccacaagctgaccctggacgagaagaagaagttcctgttcttcctgaccggcagagacagactgcacgccagaggcatccagaagatggagatcgtgttcagatgccccgagaccttcagcgagagagaccaccccaccagcatcacctgccacaacatcctgagcctgcccaagtacagcaccatggagagaatggaggaggccctgcaggtggccatcaacaacaacagaggcttcgtgagccccatgctgacccagagctag

SEQ ID NO: 63708 - DNA, 969 bp, Artificial Sequence
  derived and/or modified sequence
atgtacttctgctggggcgccgacagcagagagctgcagagaagaagaaccgccggcagccccggcgccgagctgctgcaggccgccagcggcgagagacacagcctgctgctgctgaccaaccacagagtgctgagctgcggcgacaacagcagaggccagctgggcagaagaggcgcccagagaggcgagctgcccgagcccatccaggccctggagaccctgatcgtggacctggtgagctgcggcaaggagcacagcctggccgtgtgccacaagggcagagtgttcgcctggggcgccggcagcgagggccagctgggcatcggcgagttcaaggagatcagcttcacccccaagaagatcatgaccctgaacgacatcaagatcatccaggtgagctgcggccactaccacagcctggccctgagcaaggacagccaggtgttcagctggggcaagaacagccacggccagctgggcctgggcaaggagttccccagccaggccagcccccagagagtgagaagcctggagggcatccccctggcccaggtggccgccggcggcgcccacagcttcgccctgagcctgtgcggcaccagcttcggctggggcagcaacagcgccggccagctggccctgagcggcagaaacgtgcccgtgcagagcaacaagcccctgagcgtgggcgccctgaagaacctgggcgtggtgtacatcagctgcggcgacgcccacaccgccgtgctgacccaggacggcaaggtgttcaccttcggcgacaacagaagcggccagctgggctacagccccacccccgagaagagaggcccccagctggtggagagaatcgacggcctggtgagccagatcgactgcggcagactgagaggctgcagcagccagacccacttctgctggaacatctgccagctgtgcgacaacagcagcgtgaagctggagtag

SEQ ID NO: 63709 - DNA, 1095 bp, Artificial Sequence
  derived and/or modified sequence
atgtacttctgctggggcgccgacagcagagagctgcagagaagaagaaccgccggcagccccggcgccgagctgctgcaggccgccagcggcgagagacacagcctgctgctgctgaccaaccacagagtgctgagctgcggcgacaacagcagaggccagctgggcagaagaggcgcccagagaggcgagctgcccgagcccatccaggccctggagaccctgatcgtggacctggtgagctgcggcaaggagcacagcctggccgtgtgccacaagggcagagtgttcgcctggggcgccggcagcgagggccagctgggcatcggcgagttcaaggagatcagcttcacccccaagaagatcatgaccctgaacgacatcaagatcatccaggtgagctgcggccactaccacagcctggccctgagcaaggacagccaggtgttcagctggggcaagaacagccacggccagctgggcctgggcaaggagttccccagccaggccagcccccagagagtgagaagcctggagggcatccccctggcccaggtggccgccggcggcgcccacagcttcgccctgagcctgtgcggcaccagcttcggctggggcagcaacagcgccggccagctggccctgagcggcagaaacgtgcccgtgcagagcaacaagcccctgagcgtgggcgccctgaagaacctgggcgtggtgtacatcagctgcggcgacgcccacaccgccgtgctgacccaggacggcaaggtgttcaccttcggcgacaacagaagcggccagctgggctacagccccacccccgagaagagaggcccccagctggtggagagaatcgacggcctggtgagccagatcgactgcggcagctaccacaccctggcctacgtgcacaccaccggccaggtggtgagcttcggccacggccccagcgacaccagcaagcccacccaccccgaggccctgaccgagaacttcgacatcagctgcctgatcagcgccgaggacttcgtggacgtgcaggtgaagcacatcttcgccggcacctacgccaacttcgtgaccacccaccagtag

SEQ ID NO: 63710 - DNA, 921 bp, Artificial Sequence
  derived and/or modified sequence
atgtacttttgttggggcgctgactctcgcgaactgcaacggaggcgtaccgccggctcacccggggcagagcttctgcaggccgcctccggtgagcgccactcactcctactgctgaccaaccatagagttctctcttgtggggataacagcagaggccaacttggaagacggggtgcgcaacgcggcgagttgccagaacccatccaggcgcttgagaccctgatcgtagatctcgtgtcctgcgggaaagaacattctctggcggtctgtcacaaggggcgcgtgttcgcatggggagctggaagcgaaggccaactaggaattggtgagttcaaagagatctcgtttaccccgaagaagattatgaccctcaacgacattaaaattatccaggtgagctgcggccactaccattctctggctctgagcaaggatagccaggtgtttagctgggggaagaattcacacgggcaattgggtctggggaaggagttcccatctcaggcatcacctcagcgagtgcgctcactggaagggattcctctggctcaggtcgccgcaggcggtgcacattcttttgcactttctctctgcggaacctcgttcggttggggctctaactctgcaggccagcttgccctttctggcaggaacgtgccagttcagagcaacaagcccctgtctgtgggggccctgaaaaatctgggcgtggtttatatttcatgcggtgatgcgcacacagccgtcctaacccaggacgggaaggtctttacgttcggggacaacagaagcgggcagctcgggtatagtccaactcctgaaaaaagaggtcctcagttggtggaacggatagatgggcttgtgtctcaaatcgattgtgggagaaattccaagcatgggttcatgacgttcttttag

SEQ ID NO: 63711 - DNA, 2961 bp, Artificial Sequence
  derived and/or modified sequence
atgtatttctgttggggcgccgacagtagggaacttcagagaaggagaaccgccggatccccaggcgcagaactgttgcaggctgctagcggcgagagacacagtttgctgctcctcacaaatcaccgcgtgctaagctgcggcgacaactctcgaggtcagctcggccgccgtggtgctcaacgtggcgagctgccagagcctatacaggctctggagacactgattgtggatctagtttcttgcggaaaggagcacagcctagctgtttgccacaaggggagggtgtttgcctggggcgccggctctgagggccagttggggatcggggaattcaaggaaattagcttcacgccaaaaaagatcatgactctcaacgacattaaaattatccaggtaagctgcggtcactaccattcattggcattatcaaaggacagccaagtattttcgtggggcaaaaattctcacggccagctgggactcggaaaagagttcccaagtcaggcctctccacaacgggttcgctcactcgaaggtattccactggcgcaagtagctgcaggcggcgcccacagcttcgccctgagcctgtgtggaacgagcttcggatggggttctaattcagctggtcaattggcactgagcgggcgcaacgtacccgtacagagcaacaaacccctcagtgttggggccctgaagaacctgggggtggtctacatctcatgtggtgacgctcatacagcagtgctgacacaggatggtaaggtgttcacattcggcgataaccgctccggtcagttgggatatagcccgacccccgagaagagaggaccccagctggtggagagaattgacggtctcgtgagtcagattgactgcggttcttatcacacactggcctatgtgcataccactggccaggtggtgtcctttggccacggcccctcggacacgtccaagccaacccaccccgaggccctcacagagaatttcgatatcagttgcctaatcagtgcagaggacttcgtggatgtgcaagtgaaacacattttcgcaggcacgtacgccaattttgtgacaacacatcaggacacctcctccactagagcacctggaaagacccttccagaaatctcccgcattagccagagtatggctgagaagtggattgctgtgaagaggagatccacagagcatgaaatggccaaatcagagatacgtatgattttttccagcccagcttgcctgacagcctcctttttgaagaagcggggcaccggggagaccacaagtattgatgttgatctcgagatggccagggataccttcaaaaaacttaccaaaaaggagtggatctcctctatgatcaccacatgtctggaggatgacctactacgcgcccttccatgtcatagtccccaccaagaggctctgagcgtgtttctcctgctgcctgaatgccccgttatgcacgactcaaaaaactggaagaacttggttgttccatttgccaaagccgtgtgcgagatgtcaaaacagtctcttcaagtgctcaaaaagtgttgggcgtttcttcaagaatcctctctgaacccgctgatccagatgttgaaagcagcgataatttcccagctactgcatcagactaaaactgaacaagatcactgcaatgttaaggctttgctcggcatgatgaaagaactccacaaagttaacaaggcaaattgccgattgccggagaatacgtttaacattaatgagcttagcaacctcctcaatttttatattgaccggggtagacaactgttcagggataaccacttgatgtcagagaaaaaagcctacatgctgatgcacgaaacgatccttcaaaaaaaggacgagttcccacccagtccgcgcttcatcttgagagtgaggcggtctaggctggtgaaggacgccctccgccagctcagtcaggccgaggcaaccgatttctgtaaagtgctcgtggtcgagtttataaatgaaatttgccccgagtcaggcggggtgtcatcagaatttttccactgtatgtttgaagagatgacgaagcctgagtacggtatgtttatgtaccctgagatgggatcttgcatgtggtttccggctaagcccaaacccgaaaagaaacgctactttctgtttggcatgctctgtggtcttagcttatttaaccttaacgtggctaacctaccttttcctctggccctttacaaaaagcttctcgatcagaagccgagcttggaggaccttaaggagttgagtcctcgacttgggaagtctttacaggaagtgctcgacgatgctgccgatgatataggagatgccctgtgcatcagattctctatccattgggaccagaacgacgttgacttgattcccaatggtataagtatacccgttgatcagacaaacaaaagggattacgtcagtaaatatattgactatatttttaatgtttctgttaaagccgtttacgaggagtttcagagggggttttaccgggtgtgtgaaaaagagatcctgcgccacttttaccctgaggaactgatgacagcaattatcggcaatacagattacgattggaaacagtttgagcaaaacagtaagtatgagcaggggtaccaaaagtctcacccaacaattcagctgttctggaaggcctttcacaaactgactttggatgagaagaaaaagtttctgttcttcctcacaggtcgggaccgcctccatgcccgaggtatccaaaaaatggaaatcgtgttcaggtgtccagagaccttttccgaaagggaccatcccacatcaataacttgccacaatatcttatctctgcctaaatatagtactatggagcgcatggaagaggccttgcaagtcgccatcaataacaatagggggtttgttagtcccatgcttacccagagttag

SEQ ID NO: 63712 - DNA, 969 bp, Artificial Sequence
  derived and/or modified sequence
atgtacttttgctggggggccgatagccgagagttacagcgccggcgtacagcgggctccccgggcgctgagttgctccaggcagcttcaggcgaacgtcactctctgctccttctgacgaatcatcgcgtgctcagctgtggagataacagccgcgggcagttaggccgtcgcggcgcgcagcggggcgagctccctgaacctatccaggcactggagacgctaatagtggatctggtgtcctgcggcaaggagcatagtctcgctgtttgtcacaagggccgggtgttcgcatggggcgcaggcagcgagggccagttaggtattggcgagtttaaggaaatctcatttacgccaaagaaaatcatgaccctgaatgacatcaaaattatccaggtgtcgtgtggccactaccatagtctggccctgtctaaagacagtcaggtgttctcatggggaaaaaactctcatggacagctcggtttaggaaaggaatttccttctcaggctagtccccagcgtgtcaggtctcttgagggcattcctttagcgcaagtcgcagcaggcggggcacatagttttgctctgagcctctgcgggacttcctttggatggggcagtaattctgccggtcagctagccctgagtggaagaaacgttccggttcaatctaataagccactcagtgttggagctctgaagaatttgggagtagtgtatatttcatgcggggatgcacacaccgctgttctgacccaggatgggaaggttttcacattcggggacaataggtccggccaactagggtattctcccacccccgagaagcgaggcccgcagttggtcgagcgcattgatgggcttgtgagccagatcgattgtggcaggcttcgcgggtgtagttctcagactcatttttgctggaacatctgtcagctgtgtgacaactccagcgtaaagctcgagtag

SEQ ID NO: 63713 - DNA, 1095 bp, Artificial Sequence
  derived and/or modified sequence
atgtacttttgttggggcgccgattcccgcgagctgcaaaggaggcgaacagctggaagtcccggcgctgagttactgcaggcagcatctggtgagcggcacagtttgttgctgctgactaatcatcgcgttctcagctgtggagacaatagcaggggtcagttgggcagaagaggggcacagagaggggagctccccgagccaatccaagccctagagactctcatcgttgacctcgtctcctgcgggaaggagcacagcttagctgtttgccacaagggccgagtttttgcctggggcgcaggatctgaaggccagcttggaattggcgaattcaaggagatctccttcacacctaagaagataatgacgctgaacgatataaagatcatccaggtgagctgtggacattatcacagtctcgcactgagtaaggactctcaggtgttcagctggggaaaaaactcccacgggcagctgggcctcggcaaagaattccccagtcaagcgtcgcctcagcgcgttcgcagcttagagggcattcctcttgctcaggtggctgccggtggggcccacagctttgctctgtcactatgtggtacctcatttggctggggttctaatagtgccggtcagctcgctctctctggtcggaacgtccctgtgcagtcaaacaagccgctgtcagtgggcgccttgaagaacctcggggttgtgtacatctcatgtggggatgcccatacggccgtcttgacacaggatgggaaagtcttcacgttcggtgataaccggtctggccaacttgggtattccccaacaccagagaaaagagggcctcaactcgtggaaagaatcgacggcttagtgagccagattgactgtgggtcttaccatacattagcttacgtgcataccaccggccaggtggtttcctttgggcatgggccgtccgacacatccaagccgacgcatccagaagccctcaccgaaaacttcgatatctcctgtctgatcagtgccgaggatttcgtcgacgtgcaggtgaaacacatctttgccggtacttatgccaactttgtcaccacgcaccaatag

SEQ ID NO: 63714 - DNA, 921 bp, Artificial Sequence
  derived and/or modified sequence
atgtacttctgctggggcgctgacagccgggagctgcagaggagaagaacagctggcagccctggagctgagctgctgcaggccgccagcggggagcggcacagcctgctgctgctgaccaaccaccgggtgctgagctgtggggacaacagccggggccagctgggcagaagaggagcccagagaggagagctgcctgagcccatccaggccctggagaccctcatcgtggacctggtgtcctgtgggaaggagcacagcctggccgtgtgccacaagggccgggtgtttgcctggggcgccggcagcgagggccagctgggcattggagagttcaaggagatctccttcacccccaagaagatcatgaccctgaatgacatcaagatcatccaggtgtcctgtggccactaccacagcctggccctgagcaaggacagccaggtgttctcctggggcaagaacagccacggccagctgggcctgggcaaggagttccccagccaggccagcccccagagggtgcgcagcctggagggcatccccctggcccaggtggccgccggcggggcccacagctttgccctgagcctgtgtggcaccagctttggctggggcagcaacagcgctggccagctggccctgagcggcagaaatgtgcctgtgcagagcaacaagcccctgtctgtgggcgccctgaagaacctgggcgtggtgtacatcagctgtggagatgcccacacagctgtgctgacccaggacggcaaggtgttcaccttcggggacaacagaagtggccagctgggctacagccccaccccagagaagaggggcccccagctggtggagagaattgatggcctggtgtcccagattgactgtggcaggaacagcaagcacggcttcatgaccttcttctag

SEQ ID NO: 63715 - DNA, 2961 bp, Artificial Sequence
  derived and/or modified sequence
atgtacttctgctggggcgctgacagccgggagctgcagaggagaagaacagctggcagccctggagctgagctgctgcaggccgccagcggggagcggcacagcctgctgctgctgaccaaccaccgggtgctgagctgtggggacaacagccggggccagctgggcagaagaggagcccagagaggagagctgcctgagcccatccaggccctggagaccctcatcgtggacctggtgtcctgtgggaaggagcacagcctggccgtgtgccacaagggccgggtgtttgcctggggcgccggcagcgagggccagctgggcattggagagttcaaggagatctccttcacccccaagaagatcatgaccctgaatgacatcaagatcatccaggtgtcctgtggccactaccacagcctggccctgagcaaggacagccaggtgttctcctggggcaagaacagccacggccagctgggcctgggcaaggagttccccagccaggccagcccccagagggtgcgcagcctggagggcatccccctggcccaggtggccgccggcggggcccacagctttgccctgagcctgtgtggcaccagctttggctggggcagcaacagcgctggccagctggccctgagcggcagaaatgtgcctgtgcagagcaacaagcccctgtctgtgggcgccctgaagaacctgggcgtggtgtacatcagctgtggagatgcccacacagctgtgctgacccaggacggcaaggtgttcaccttcggggacaacagaagtggccagctgggctacagccccaccccagagaagaggggcccccagctggtggagagaattgatggcctggtgtcccagattgactgtggcagctaccacaccctggcctacgtgcacaccaccggccaggtggtgtcctttggccacggccccagcgacaccagcaagcccacccaccctgaggccctgacagagaactttgacatcagctgcctgatctctgcagaagattttgtggatgtgcaggtgaagcacatctttgctggcacctacgccaactttgtgaccacccaccaggacaccagcagcacccgggcccctgggaagaccctgcctgagatcagccgcatcagccagagcatggccgagaagtggattgctgtgaagagaagaagcacagagcacgagatggccaagtctgagatccgcatgatcttcagcagccctgcctgcctgacagccagcttcctgaagaagaggggcactggagagaccaccagcattgatgtggacctggagatggcccgggacaccttcaagaagctgaccaagaaggagtggatcagctccatgatcaccacctgcctggaggatgacctgctgcgggccctgccctgccacagcccccaccaggaggccctgagcgtcttcctgctgctgcctgaatgtcctgtgatgcatgacagcaagaactggaagaacctggtggtgccctttgccaaggctgtgtgtgagatgagcaagcagagcctgcaggtgctgaagaagtgctgggccttcctgcaggagagcagcctgaaccccctcatccagatgctgaaggccgccatcatcagccagctgctgcaccagaccaagacagagcaggaccactgcaatgtgaaggccctgctgggcatgatgaaggagctgcacaaggtgaacaaggccaactgccgcctgcctgagaacaccttcaacatcaatgagctgagcaacctgctgaacttctacatcgaccggggccggcagctgttccgggacaaccacctgatgtctgagaagaaggcctacatgctgatgcatgagaccatcctgcagaagaaggatgagttcccccccagcccccgcttcatcctgcgggtgagaagaagccggctggtgaaggatgccctgcggcagctgagccaggccgaggccacagacttctgcaaggtgctggtggtggagttcatcaatgagatctgcccagagagcggaggagtgagcagcgagttcttccactgcatgtttgaggagatgaccaagccagaatatggcatgttcatgtacccagagatgggcagctgcatgtggttccctgccaagcccaagccagagaagaagcgctacttcctgtttggcatgctgtgtggcctgagcctcttcaacctgaatgtggccaacctgcccttccccctggccctgtacaagaagctgctggaccagaagcccagcctggaggacctgaaggagctgagcccccggctgggcaagagcctgcaggaggtgctggatgatgctgctgatgacattggagatgccctgtgcatccgcttcagcatccactgggaccagaatgatgtggacctgatccccaacggcatcagcatccctgtggaccagaccaacaagagggactatgtgtccaagtacatcgactacatcttcaacgtgtctgtgaaggctgtgtatgaggagttccagaggggcttctacagagtgtgtgagaaggagatcctgcggcacttctacccagaggagctgatgacagccatcatcggcaacacagattatgactggaagcagtttgagcagaacagcaaatatgagcagggctaccagaagagccaccccaccatccagctgttctggaaggccttccacaagctgaccctggatgagaagaagaagttcctgttcttcctgaccggccgggaccggctgcacgcccggggcatccagaagatggagatcgtgttccgctgcccagagaccttcagcgagcgggaccaccccaccagcatcacctgccacaacatcctgagcctgcccaagtacagcaccatggagaggatggaggaggccctgcaggtggccatcaacaacaacagaggatttgtgagccccatgctgacccagagctag

SEQ ID NO: 63716 - DNA, 3781 bp, Artificial Sequence
  derived and/or modified sequence
agcacttgaagttcaggcagcgagagttgacatggggccagggctgcgcccctggggcgggttgaagacagggtgagtctcttgatattcaggaaatcatcgcgcacccagtcaccagcgttcgggagcctgtcgcagcgggaccgacggaatccggagcaggcgacagggcgcagaagcgggatgtacttctgttggggcgccgactccagggagctgcagcgccggaggacggcgggcagccccggggctgagctactgcaggcggccagcggggagcgccactctctgctgctgctgaccaaccacagggtcctctcgtgcggagacaacagcaggggtcagctgggccgcaggggcgcgcagcgcggggagctgccagaaccaattcaggcattggaaaccctaattgttgatctcgtgagctgcgggaaggagcactccctggctgtgtgccacaaaggaagggtcttcgcatggggagctggttctgaagggcagctggggattggagaattcaaggaaataagtttcacacctaagaaaataatgactctgaatgatataaaaataatacaagtttcctgtggacactaccactccctggcattatcaaaagatagccaagtgttttcgtggggaaagaacagccatgggcagctgggcttggggaaggagttcccctcccaagccagcccgcagagggtgaggtccctggaggggatcccactggctcaggtggctgccggaggggctcacagctttgccctgtctctctgtgggacttcgtttggctggggaagtaacagtgccgggcagctggccctcagtgggcgtaatgtcccagtgcaaagcaacaagcctctctcagtcggtgcactgaagaatctaggtgtggtttatatcagctgtggtgatgcacacactgcggtgcttacccaggacgggaaagtgttcacatttggagacaatcgctctggacagctgggatacagccccactcctgagaagagaggtccacaacttgtggaaagaattgatggcctagtttcgcagatagattgtggaagttatcacaccctggcatatgtgcacaccactggtcaggtggtatcttttggtcatggaccaagtgacacaagcaagccaactcatccggaggccctgacagagaactttgacattagctgcctgatttctgctgaagacttcgtggatgttcaagtcaaacacatttttgctggaacatatgccaactttgtgacaactcatcaggatactagttccacacgtgctcccgggaaaaccctgccagaaataagccgaattagccagtccatggcagaaaaatggatagcagtgaaaagaagaagtactgaacatgaaatggctaaaagtgaaattagaatgatattttcatctcctgcttgtctgactgcaagttttttaaagaaaagaggaactggagaaacgacttccattgatgtggacttagaaatggcaagagataccttcaagaagttaacaaaaaaggaatggatttcttccatgataactacgtgtctcgaggatgatctgctcagagctcttccatgccattctccacaccaagaagctttatcagttttcctcctgctcccagaatgtcctgtgatgcatgattctaagaactggaagaacctggtggttccatttgcaaaggctgtgtgtgaaatgagtaaacaatctttgcaagtcctaaagaagtgttgggcatttttgcaagaatcttctctgaatccgctgatccagatgcttaaagcagccatcatctctcagctgcttcatcagactaaaaccgaacaggatcactgtaatgttaaagctcttttaggaatgatgaaagaactgcataaggtaaacaaagctaactgtcgactaccagaaaatactttcaacataaatgaactctccaacttattaaacttttatatagatagaggaagacagctctttcgggataaccacctgatgtcagaaaagaaagcatacatgcttatgcatgaaacaattctgcaaaaaaaggatgaatttcctccatcacccagatttatacttagagtcagacgaagtcgcctggttaaagatgctctgcgtcaattaagtcaagctgaagctactgacttctgcaaagtattagtggttgaatttattaatgaaatttgtcctgagtctggaggggttagttcagagttcttccactgtatgtttgaagagatgaccaagccagaatatggaatgttcatgtatcctgaaatgggttcctgcatgtggtttcctgccaagcctaaacctgagaagaaaagatatttcctctttggaatgctgtgtggactctccttattcaatttaaatgttgctaaccttcctttcccactggctctgtataaaaaacttctggaccaaaagccatcattggaagatttaaaagaactcagtcctcggttggggaagagtttgcaagaagttctagatgatgctgctgatgacattggagatgcgctctgcatacgcttttctatacactgggaccaaaatgatgttgacttaattccaaatgggatctccatacctgtggaccaaaccaacaagagagactatgtttctaagtatattgattacattttcaacgtctctgtaaaagcagtttatgaggaatttcagagaggattttatagagtctgtgagaaggagatacttagacatttctaccctgaagaactaatgacagcaatcattggaaatactgattatgactggaaacagtttgaacagaattcaaagtatgagcaaggataccaaaaatcacatcctactatacagttgttttggaaggctttccacaaactaaccttggatgaaaagaaaaaattcctctttttccttacaggacgtgataggctgcatgcaagaggcatacagaaaatggaaatagtatttcgctgtcctgaaactttcagtgaaagagatcacccaacatcaataacttgtcataatattctctccctccctaagtattctacaatggaaagaatggaggaagcacttcaagtagccatcaacaacaacagaggatttgtctcacccatgctcacacagtcataatcacctctgagagactcagggtgggctttctcacacttggatccttctgttcttccttacacctaaataatacaagagattaatgaatagtggttagaagtagttgagggagagattgggggaatggggagatgatgatgatggtcaaagggtgcaaaatctcacacaagactgaggcaggagaatagggtacagagatagggatctaaggatgacttggacacactccctggcactgaagagtctgaacactggcctgtgattggtccattccaggaccttcatttgcataaggtatcaaaccacatcagcctctgattggccatgggccagacctgcactctggccaatgattggttcattccaggacattcatttgcataaggagtcaaaccacaccagtcttggattggctgtgagccaattcacctcagtctctaattggctgtgagtcagtctttcatttacatagggtgtaaccatcaagaaacctctacagggtacttaagccccagaagattttgctaccagggctcttgagccacttgctctagcccactcccaccctgtggaatgtactttcacttttgctgcttcactgccttgtgctccaataaatccactccttcaccaccca

SEQ ID NO: 63717 - DNA, 969 bp, Artificial Sequence
  derived and/or modified sequence
atgtacttctgctggggcgctgacagccgggagctgcagaggagaagaacagctggcagccctggagctgagctgctgcaggccgccagcggggagcggcacagcctgctgctgctgaccaaccaccgggtgctgagctgtggggacaacagccggggccagctgggcagaagaggagcccagagaggagagctgcctgagcccatccaggccctggagaccctcatcgtggacctggtgtcctgtgggaaggagcacagcctggccgtgtgccacaagggccgggtgtttgcctggggcgccggcagcgagggccagctgggcattggagagttcaaggagatctccttcacccccaagaagatcatgaccctgaatgacatcaagatcatccaggtgtcctgtggccactaccacagcctggccctgagcaaggacagccaggtgttctcctggggcaagaacagccacggccagctgggcctgggcaaggagttccccagccaggccagcccccagagggtgcgcagcctggagggcatccccctggcccaggtggccgccggcggggcccacagctttgccctgagcctgtgtggcaccagctttggctggggcagcaacagcgctggccagctggccctgagcggcagaaatgtgcctgtgcagagcaacaagcccctgtctgtgggcgccctgaagaacctgggcgtggtgtacatcagctgtggagatgcccacacagctgtgctgacccaggacggcaaggtgttcaccttcggggacaacagaagtggccagctgggctacagccccaccccagagaagaggggcccccagctggtggagagaattgatggcctggtgtcccagattgactgtggccgcctgcggggctgcagcagccagacccacttctgctggaacatctgccagctgtgtgacaacagctctgtgaagctggagtag

SEQ ID NO: 63718 - DNA, 1095 bp, Artificial Sequence
  derived and/or modified sequence
atgtacttctgctggggcgctgacagccgggagctgcagaggagaagaacagctggcagccctggagctgagctgctgcaggccgccagcggggagcggcacagcctgctgctgctgaccaaccaccgggtgctgagctgtggggacaacagccggggccagctgggcagaagaggagcccagagaggagagctgcctgagcccatccaggccctggagaccctcatcgtggacctggtgtcctgtgggaaggagcacagcctggccgtgtgccacaagggccgggtgtttgcctggggcgccggcagcgagggccagctgggcattggagagttcaaggagatctccttcacccccaagaagatcatgaccctgaatgacatcaagatcatccaggtgtcctgtggccactaccacagcctggccctgagcaaggacagccaggtgttctcctggggcaagaacagccacggccagctgggcctgggcaaggagttccccagccaggccagcccccagagggtgcgcagcctggagggcatccccctggcccaggtggccgccggcggggcccacagctttgccctgagcctgtgtggcaccagctttggctggggcagcaacagcgctggccagctggccctgagcggcagaaatgtgcctgtgcagagcaacaagcccctgtctgtgggcgccctgaagaacctgggcgtggtgtacatcagctgtggagatgcccacacagctgtgctgacccaggacggcaaggtgttcaccttcggggacaacagaagtggccagctgggctacagccccaccccagagaagaggggcccccagctggtggagagaattgatggcctggtgtcccagattgactgtggcagctaccacaccctggcctacgtgcacaccaccggccaggtggtgtcctttggccacggccccagcgacaccagcaagcccacccaccctgaggccctgacagagaactttgacatcagctgcctgatctctgcagaagattttgtggatgtgcaggtgaagcacatctttgctggcacctacgccaactttgtgaccacccaccagtag

SEQ ID NO: 63719 - DNA, 921 bp, Artificial Sequence
  derived and/or modified sequence
atgtacttctgctggggcgccgacagccgggagctgcagcggcggcggacggccggttcacctggagctgagctgctgcaggctgcctcaggtgagcgacattcactgctgttactgactaatcaccgcgtgctgagctgtggcgataattccagagggcagttaggtcgcagaggcgctcagcgcggagaattgcccgaacctatccaggccctggagaccttgatagtagatcttgtctcgtgcggcaaggaacactctttggcagtgtgccataagggcagagttttcgcctggggcgccgggtctgagggacagttgggcatcggagagttcaaagaaatctcttttacccctaagaagatcatgacactcaatgatatcaagatcatccaggtgtcttgcgggcattatcactccttggctctgagtaaagattcccaagtcttctcctggggtaagaactcacacggtcagttaggattgggaaaagagttcccctctcaggcctctccacagcgtgtaagaagcttggaaggcatcccactcgcccaggtagctgctgggggagcccacagttttgcgctgtcactgtgcggcactagctttggatggggcagtaactctgcagggcagcttgccctcagcggccgcaacgtgcccgtccagtccaacaagccactgagcgttggggccttgaagaatctgggagtggtttatatctcttgcggagatgcccacaccgccgtgctcactcaggatggaaaagtctttacgtttggcgacaaccggtccgggcaactggggtactcaccaacacccgagaagagaggaccacagttggtggaaagaattgacggccttgtaagccagatagactgcggacgtaactcaaagcacgggttcatgacattcttctag

SEQ ID NO: 63720 - DNA, 2961 bp, Artificial Sequence
  derived and/or modified sequence
atgtacttctgctggggcgccgacagccgggagctgcagcggcggagaaccgccgggagccctggtgcagaactgctgcaggcagcctccggtgaaaggcacagcctccttcttttgaccaatcacagggtactcagttgtggcgacaactctcgcggccaactgggccgccggggagctcagagaggcgaattacctgagcctatccaggctcttgaaacgctgatagtagatctggtgagttgcggcaaagaacattcactggccgtttgccacaaaggccgcgtattcgcttggggggccggatctgaggggcagttaggcatcggggagttcaaagagatttccttcactcctaaaaaaatcatgacattaaacgatataaaaatcatacaggtctcctgcgggcactatcatagcttagcgctctccaaagattcacaagtcttctcctggggtaagaactcccacggacagttgggcttggggaaggagttcccttcacaagcttcaccacagagggtccgatccctggagggcattccccttgcccaggtggccgcaggtggagcgcacagcttcgctctcagcctctgtggaaccagtttcgggtggggtagtaactccgctggtcaattagccttatcagggagaaatgtgccagtgcagagcaacaagccactctccgtgggagcactgaaaaacctaggcgtggtctatatttcgtgtggagatgcccataccgctgttttaacacaagatggcaaagtgtttacttttggcgataatcggagcggacaactgggatacagccccactcccgaaaaacgaggtccccagctcgtggagagaattgatggactggtatcacagattgattgtggctcctatcatactctggcctatgtgcacactactggacaggtggtgtcctttggccatggcccatccgacacctctaagcctactcacccagaggcactgactgaaaacttcgacatctcttgcttgataagtgctgaggacttcgtggacgtccaggttaagcatatctttgccggcacatatgccaacttcgttactacacatcaggatacctcctcaacccgagcccctggaaagacattgccagaaatcagccggatatcccagtccatggccgagaagtggatcgccgtgaagagacgctcaacagagcacgagatggccaaatccgagattcggatgatcttctctagtcccgcgtgtctaaccgcgtcgttcctgaaaaaaagagggacgggtgagaccacctcaatcgatgtagacctcgagatggcaagagacacctttaagaaactgaccaaaaaggagtggatctcaagcatgattactacgtgccttgaggatgatctgttgcgcgctctgccgtgccacagtcctcaccaggaagcactctcggtgtttctcctattgccggagtgtccagtgatgcatgattcaaagaattggaaaaacctggtggttccttttgccaaagccgtctgcgagatgtccaaacagtcacttcaggtgcttaaaaagtgctgggcatttctgcaggagtcatctttgaaccctctcattcaaatgctgaaagcagctataatctctcaactgctccatcagacgaagactgagcaggatcactgcaatgttaaagccctgctcggtatgatgaaggagttgcacaaagtgaacaaagcgaattgtaggcttccagaaaatactttcaatattaatgagctgagcaaccttcttaacttttatattgacagggggcgccagctcttccgtgataatcacctcatgtccgagaaaaaagcatacatgctgatgcacgaaaccattctgcagaaaaaagatgaattccccccctccccccgtttcatcctccgggtacgcaggagccgcctcgtcaaagacgccctgcgtcagctctcccaggcagaggccactgatttttgtaaggtccttgtggtggaattcatcaatgagatctgcccggagagtggtggcgtctctagcgagtttttccattgtatgtttgaggagatgactaagccagaatacggcatgttcatgtatccggagatggggagttgcatgtggttccccgcaaagccaaagcccgagaagaagcgttattttttattcggaatgctttgcggactttctttgttcaaccttaacgtcgctaacctgccgttcccgctggccctttacaaaaaactgctcgaccagaaacccagcctggaggacttaaaagagctgtccccccggcttggaaagtcgcttcaggaggttctcgacgacgccgcagacgacatcggggatgcactgtgtattcgatttagcatccactgggaccaaaacgatgtggacttgatcccgaatggcatcagtatacccgtggatcagacgaataaacgggactacgtgtcgaagtacatagattacatcttcaacgtttctgtgaaagcggtgtatgaggaattccagaggggcttctaccgcgtctgtgagaaggagattctcagacacttttacccagaggagcttatgactgccattatcggcaacactgattacgactggaaacagttcgaacagaactcaaagtatgaacaaggctatcagaaatcacatccaaccatccagcttttctggaaggcatttcacaaacttaccttagacgaaaaaaagaaatttctgtttttcctcacaggtcgtgatagactccacgccagaggcatccaaaagatggaaattgtattccgctgccccgagacattctccgagcgtgatcatccaacttcgattacctgtcataacatccttagcctgccaaaatactccaccatggagcgcatggaagaggccctgcaagtggccattaataacaaccgcggatttgtgtctccaatgctgacacagtcgtag

SEQ ID NO: 63721 - DNA, 969 bp, Artificial Sequence
  derived and/or modified sequence
atgtacttctgctggggcgccgacagccgggagctgcagcggcggagaaccgctggctcaccaggcgcagaactcctgcaggccgccagcggtgagcgacattctctgctactgttgaccaatcacagagtactaagttgcggcgacaattccaggggccaacttggcaggcggggcgcccagagaggagagttaccagaaccaatccaggctttggagactctgatagtcgacctggtgtcgtgtggcaaagaacatagtctggccgtgtgccacaaaggacgggtttttgcttggggggccggatccgagggacaactgggtataggggaattcaaggagatctctttcaccccgaaaaaaatcatgactctgaatgatatcaagattatccaagttagttgcggccactaccattccctcgcactcagtaaagacagtcaagtcttcagctgggggaagaacagtcacggacagctggggctcgggaaagagtttccttcccaggcatctcctcaaagggtccggtcattggagggcatccccctcgcccaagtggctgccggaggggcccattcgttcgccttatctctctgcggtacatcgttcgggtggggctctaactcagctggccaactcgccctctccggacgaaacgtccccgtgcagtccaacaagcccttgtctgttggcgccctcaaaaatctgggagtggtgtatatcagttgcggtgatgctcatacagccgtgctgactcaggatggaaaagtgtttacattcggcgacaatcgctcggggcagctgggatacagtccaacccccgaaaaaagagggccccaactcgttgagaggatcgatggcctagtgagtcagatagactgcggacgtctccgcggttgttccagccagacgcacttctgctggaatatttgtcaactctgtgacaattcctctgtaaagcttgaatag

SEQ ID NO: 63722 - DNA, 1095 bp, Artificial Sequence
  derived and/or modified sequence
atgtacttctgctggggcgccgacagccgggagctgcagcggcggcgcacagcagggtctccaggtgctgagttgctgcaggctgcttccggagagcgacattccctgctcctgcttacaaaccaccgggtgctcagctgcggggacaactctcgcggtcagctgggaaggcgtggcgcccagcgtggcgagcttccggagcccatccaggcactggaaacactaattgtggatctcgttagctgtggcaaggaacacagtctggctgtttgccacaaaggacgcgtcttcgcctggggtgctggaagtgaagggcagttgggcataggggagttcaaagaaatttcatttacgcctaagaagattatgaccctgaatgatattaaaattattcaagtgtcctgcggccattatcacagcctagcactatctaaggacagccaagtgttctcatggggcaagaattcccatggtcagttaggactgggcaaagaatttccttcccaggctagccctcagcgcgtgcgttcactggaaggaataccacttgcacaggtggctgcaggaggtgcccattcttttgcactatctttgtgcgggaccagctttgggtggggttctaactctgccggtcagctcgccctgtcaggccgcaacgtcccagttcagtctaataagcccctgtcagttggagccctgaagaatctgggagtcgtttacatttcatgtggcgatgcccataccgctgtgcttacacaggacggtaaggtgttcacctttggcgacaaccgaagtgggcaactgggctactcccccacaccggagaagaggggccctcagctggttgaaagaatcgatggcctcgtcagtcagatcgactgcggctcttatcatacactcgcttatgtgcacacaacaggtcaagtggtgagcttcgggcatggcccaagtgacacttccaaacctacacacccagaggcattaacagagaactttgacataagctgcctaatttccgccgaagacttcgtggacgtacaagtgaaacacatcttcgccgggacttacgccaacttcgttaccacgcaccagtag

SEQ ID NO: 63723 - DNA, 921 bp, Artificial Sequence
  derived and/or modified sequence
atgtacttttgttggggggcagattcccgggagctgcagcgcagaagaacggctggcagtcccggtgcagaactgctgcaagcagcctctggagaacggcattccctgctccttttgacaaaccaccgagtgctgtcttgcggcgacaactctcgcggtcaactcggccgaagaggggctcaacgcggagagctccctgagccgattcaggcattggagacactcattgtggatctggtctcttgcgggaaagagcacagccttgctgtctgtcataaaggacgggtgttcgcctggggtgccggaagcgagggacagctgggtattggagaatttaaagagataagcttcacgcctaaaaaaatcatgacattaaacgatattaagattatacaggtcagttgtggacactatcacagcttggctctcagtaaagactcccaggtcttttcttgggggaagaattcccatggccagttagggctggggaaggagttcccgtctcaggctagcccacagcgcgtccggtccctagagggcatacccttggctcaggtcgctgccggtggagcacactccttcgctctgagtctgtgcggaacctcattcggctggggatccaactctgctggccagctggctttgtctgggaggaacgttccagtgcaaagtaacaagcccttgtctgtcggagcgcttaagaatttaggagtcgtgtatatctcctgtggcgacgcacacacagctgtgctgacccaggacggcaaggtatttaccttcggagataaccggtcgggacagcttggttacagcccaactccggaaaaaagaggcccacagttagtcgagcgaatcgacgggctggtgtcccagatcgactgtggcagaaatagcaagcatggatttatgacctttttttag

SEQ ID NO: 63724 - DNA, 2961 bp, Artificial Sequence
  derived and/or modified sequence
atgtatttttgctggggcgctgactctcgggagctccagcgtcgaagaaccgcaggctcacctggtgccgagctccttcaggccgcaagtggcgagagacactccctgttgctgctgacgaaccacagggtcctgtcctgcggagacaactcacgcggtcagctagggaggcgcggagctcaaaggggcgagctgcctgagcccattcaagctttggagacgcttattgtggacttggtgtcatgcgggaaggagcacagtctggctgtgtgtcataaggggagagtcttcgcttggggcgctggatctgagggccaactcgggatcggtgagttcaaagagatcagcttcacacctaaaaagatcatgactctgaatgacataaagattatccaggtttcctgtggccactaccactcacttgcattgtcgaaggatagccaggtatttagctgggggaagaattctcatggacaacttggtctggggaaggagtttccatctcaagcctcgccccagagggttagatctttggaggggatcccactagcacaggtcgccgctgggggagcccacagcttcgccctgtccctctgcggcacttctttcgggtgggggtccaactctgccggtcagcttgcactgtccggccgaaacgtgcccgtccagtctaacaagccattaagcgtaggcgcactaaaaaacctgggcgtggtgtatatctcctgcggggatgctcatacagccgtgctgacccaggatgggaaggttttcacctttggagataatcggagtggccagttaggctacagtcccacacctgagaagagaggccctcaactggtcgagcggattgatggtcttgtcagtcaaattgactgcgggtcataccacacgctggcctatgtacacacgaccgggcaggttgtaagttttgggcacggcccatctgatacctcaaagcccacgcaccctgaggctctgaccgaaaactttgacatttcttgcctaatcagcgccgaagattttgtcgacgtccaagtgaagcatatttttgctggaacgtacgccaatttcgtgactacacatcaggacacatcgagcacccgggctccgggtaaaaccctgcccgaaatcagccgcatctcacaatctatggcagaaaaatggatcgcggttaagaggagatccaccgagcatgagatggcaaaatctgagattaggatgatattctcttccccggcttgcctgacagccagctttttgaagaagcggggtaccggggagactacatccatcgacgtggaccttgaaatggcaagggatacctttaagaagctcacgaagaaggagtggatatcgagtatgataaccacatgcctagaggacgacttgcttagggcgctcccctgtcacagtcctcatcaagaagctctttccgtttttttactactacctgagtgtccagttatgcatgactctaagaactggaaaaaccttgtggtgccgttcgctaaggctgtgtgcgaaatgtctaagcagtccttgcaggttctcaagaagtgttgggcctttctgcaagaatcctcactcaaccctctaatccagatgctcaaagcagccattatcagccagctgctgcatcagacaaaaacagaacaagaccactgcaacgtgaaggctctgcttggcatgatgaaagaacttcacaaagtgaacaaagcgaactgccgtctaccagagaatacttttaacattaacgaactgtccaatttgttgaacttctacattgaccggggtagacaactgttccgtgataatcatttgatgtccgagaagaaggcttacatgcttatgcacgagaccatcttacagaaaaaagacgagtttcccccaagtccaagattcattctgcgcgttagacggtctcgacttgtgaaggatgctctacgacagcttagtcaggccgaagccacggatttctgtaaggtgcttgttgtcgaatttatcaacgaaatctgccctgagagcggcggtgtgtctagcgaattttttcattgtatgttcgaagaaatgacgaagcctgaatacggtatgttcatgtaccccgaaatgggatcctgtatgtggtttccagcgaaacctaaacctgagaagaaaaggtacttcttgttcggcatgctctgtggactgtctctatttaacctgaatgttgctaatctgcccttcccccttgctctgtataagaagctcctggaccagaagcccagtctggaggatttaaaagagctaagcccccgactggggaagtctctgcaggaggtcttggatgacgccgcagatgatatcggggacgcactctgtatccgcttttcgattcactgggaccaaaatgatgtggatcttatcccaaacggtatctccattcccgtggatcagacaaacaaacgcgactatgttagtaaatatattgactatatcttcaatgtgagcgtaaaggccgtatacgaggagtttcaacgaggcttctaccgcgtgtgcgagaaagagattcttcgacatttctaccctgaagagctgatgacagccattattggtaataccgattacgactggaaacaatttgagcagaattcaaaatacgagcagggataccagaaatctcatccgaccattcaattattttggaaggccttccataagctgactttggacgagaaaaagaaatttttatttttcctgacaggaagggatcgactccacgctagaggtatccaaaagatggagattgtgttccgatgtccggagaccttcagcgagcgcgatcaccccaccagcataacatgtcataacattctgtcccttccgaagtatagtaccatggagaggatggaggaagcgctccaggtagccattaacaataacagaggttttgttagtccaatgttgacccagagctag

SEQ ID NO: 63725 - DNA, 969 bp, Artificial Sequence
  derived and/or modified sequence
atgtacttctgttggggagctgactcccgtgaactgcaaagaagaagaaccgccggttcccccggagctgagctcttgcaggcagcctccggcgagagacactctctcctgctacttaccaaccaccgggtcctctcttgcggcgacaatagccgaggacagctgggcaggagaggcgctcagagaggcgagttgcccgagccgattcaggctcttgagaccctcatagtggatttagtgtcatgtggcaaagagcattcgctcgctgtttgtcacaagggtagggtgtttgcctggggggcaggctccgaaggacagctggggatcggagagtttaaggagatttcttttacgcccaaaaaaatcatgaccctgaatgatatcaagatcatccaggtgtcctgcggacattaccactctctggcgctgagcaaggattcgcaggttttctcatggggtaaaaactcccatggacagctcggcctaggtaaagaattccccagccaggcatcgccacagcgggtgagatctctggagggaattccccttgcccaggtggccgcaggcggagctcattcatttgccctttccttatgtggcacttcttttggttggggatctaattctgctggccagcttgctttaagtgggagaaatgtgccagttcagtcaaacaagcctttgagtgtgggagcgctgaagaatttgggggtcgtgtacatcagctgcggagacgcccataccgccgttctcactcaggatggtaaggtttttactttcggtgacaatcgatctggacagctcggatactcccccacacccgaaaagcggggtcctcagctggtcgagcgaatcgacgggcttgttagtcagatcgattgcgggcgtcttcgagggtgcagttctcagacacatttctgctggaatatctgccagctgtgcgacaattcatcagttaaattggagtag

SEQ ID NO: 63726 - DNA, 1095 bp, Artificial Sequence
  derived and/or modified sequence
atgtatttttgctggggggcagacagccgcgagttgcagagaaggagaactgcaggctcacctggcgcagaacttctacaggccgctagcggagagcggcactcccttttactcctcacgaaccatcgagtcctatcctgcggcgataactccaggggacaactcgggaggaggggagcacagagaggggaacttcccgagcccattcaggctcttgaaacactgatcgtcgacctggtgtcttgcggcaaagaacatagcctggctgtatgccataaggggcgtgtcttcgcctggggcgctggtagcgagggccagctgggaattggtgagtttaaagagatttcttttactccgaagaagattatgactcttaatgatataaagattatccaggtctcgtgcggacactatcacagccttgccctctcaaaagattctcaggtcttttcatgggggaagaactcccatgggcagctgggtcttgggaaagagttcccctcgcaggcctccccccagcgcgtccggagtttggaaggcattcctcttgctcaagtggccgctggcggagcacatagcttcgcactgtccctttgtgggacgtcgtttggatgggggagtaattccgcagggcagttggccctgagtggccgaaacgtacctgtgcaatccaataaacccctgtctgttggggctctgaagaacctcggggtggtttacatcagctgtggagacgcacatacagccgtgttgacccaggatggaaaggttttcacattcggggacaataggtctggccagctgggttactcacctacccctgaaaagcgtggaccacagttggtggagcggatagacgggctcgtcagtcagatcgactgcggctcctaccacacattagcctacgtccacaccaccgggcaggtggtgtccttcggtcatggaccaagcgatactagtaagcccacacacccggaagctcttactgagaacttcgatattagctgcctgatttctgccgaggacttcgtcgatgttcaggtgaagcacatcttcgctggaacctacgccaattttgtaactacacaccaatag

SEQ ID NO: 63727 - DNA, 1104 bp, Artificial Sequence
  derived and/or modified sequence
agcacttgaagttcaggcagcgagagttgacatggggccagggctgcgcccctggggcgggttgaagacagggtgagtctcttgatattcaggaaatcatcgcgcacccagtcaccagcgttcgggagcctgtcgcagcgggaccgacggaatccggagcaggcgacagggcgcagaagcgggatgtacttctgttggggcgccgactccagggagctgcagcgccggaggacggcgggcagccccggggctgagctactgcaggcggccagcggggagcgccactctctgctgctgctgaccaaccacagggtcctctcgtgcggagacaacagcaggggtcagctgggccgcaggggcgcgcagcgcggggagctgccagaaccaattcaggcattggaaaccctaattgttgatctcgtgagctgcgggaaggagcactccctggctgtgtgccacaaaggaagggtcttcgcatggggagctggttctgaagggcagctggggattggagaattcaaggaaataagtttcacacctaagaaaataatgactctgaatgatataaaaataatacaagtttcctgtggacactaccactccctggcattatcaaaagatagccaagtgttttcgtggggaaagaacagccatgggcagctgggcttggggaaggagttcccctcccaagccagcccgcagagggtgaggtccctggaggggatcccactggctcaggtggctgccggaggggctcacagctttgccctgtctctctgtgggacttcgtttggctggggaagtaacagtgccgggcagctggccctcagtgggcgtaatgtcccagtgcaaagcaacaagcctctctcagtcggtgcactgaagaatctaggtgtggtttatatcagctgtggtgatgcacacactgcggtgcttacccaggacgggaaagtgttcacatttggagacaatcgctctggacagctgggatacagccccactcctgagaagagaggtccacaacttgtggaaagaattgatggcctagtttcgcagatagattgtggaagaaactctaagcatggatttatgactttcttttag

SEQ ID NO: 63728 - DNA, 921 bp, Artificial Sequence
  derived and/or modified sequence
atgtacttctgctggggcgccgacagcagagagctgcagagaagaagaaccgccggcagccccggcgccgagctgctgcaggccgccagcggcgagagacacagcctgctgctgctgaccaaccacagagtgctgagctgcggcgacaacagcagaggccagctgggcagaagaggcgcccagagaggcgagctgcccgagcccatccaggccctggagaccctgatcgtggacctggtgagctgcggcaaggagcacagcctggccgtgtgccacaagggcagagtgttcgcctggggcgccggcagcgagggccagctgggcatcggcgagttcaaggagatcagcttcacccccaagaagatcatgaccctgaacgacatcaagatcatccaggtgagctgcggccactaccacagcctggccctgagcaaggacagccaggtgttcagctggggcaagaacagccacggccagctgggcctgggcaaggagttccccagccaggccagcccccagagagtgagaagcctggagggcatccccctggcccaggtggccgccggcggcgcccacagcttcgccctgagcctgtgcggcaccagcttcggctggggcagcaacagcgccggccagctggccctgagcggcagaaacgtgcccgtgcagagcaacaagcccctgagcgtgggcgccctgaagaacctgggcgtggtgtacatcagctgcggcgacgcccacaccgccgtgctgacccaggacggcaaggtgttcaccttcggcgacaacagaagcggccagctgggctacagccccacccccgagaagagaggcccccagctggtggagagaatcgacggcctggtgagccagatcgactgcggcagaaacagcaagcacggcttcatgaccttcttctag

SEQ ID NO: 63729 - protein, 189 aa, Artificial Sequence
  derived and/or modified sequence
MGGLSTVGACPGILGAQQAQAQSNLLGKCRRPRTAFTSQQLLELEHQFKLNKYLSRPKRFEVATSLMLTETQVKIWFQNRRMKWKRSKKAKEQAAQEAEKQKGGGGGAGKGGAEEPGAEELLGPPAPGDKGSGRRLRDLRDSDPEEDEDEDDEDHFPYSNGASVHAASSDCSSEDDSPPPRPSHQPAPQ

SEQ ID NO: 63730 - DNA, 570 bp, Artificial Sequence
  derived and/or modified sequence
atgggcggtctgagcactgtaggagcatgtcccggtatcctaggagcgcagcaggcccaggcccagagtaacctgttaggtaaatgccggaggcccaggaccgctttcacctctcagcagttattagaactggagcaccaatttaaattaaacaagtacctgtcccgccctaagcgtttcgaggttgccacaagtttgatgttgactgagacccaggtaaaaatttggttccagaataggcggatgaagtggaaaaggagcaaaaaagctaaggaacaggccgcacaagaagctgagaaacagaaaggcggcggcggaggcgctggcaaaggcggagcggaggaacctggtgccgaagaacttttgggccccccagcacctggtgataagggcagcgggcgacgtcttagggatctgcgcgattccgacccagaggaggacgaggatgaagacgatgaggaccatttcccttatagcaatggggcctcagtgcacgcggcgagttcggattgttccagcgaggatgactcccccccaccacgcccatctcatcagcccgcaccacagtag

SEQ ID NO: 63731 - DNA, 570 bp, Artificial Sequence
  derived and/or modified sequence
atgggcggcctgagcacagtgggcgcctgccccggcatcctgggcgcccagcaggcccaggcccagagcaacctgctgggcaagtgccggcggcccaggacagccttcaccagccagcagctgctggagctggagcaccagttcaagctgaacaagtacctgagccggcccaagagatttgaggtggccaccagcctgatgctgacagagacccaggtgaagatctggttccagaacagaaggatgaagtggaagaggagcaagaaggccaaggagcaggccgcccaggaggccgagaagcagaagggcggcggcggcggggccggcaagggcggcgctgaggagcccggggctgaggagctgctgggccccccagcccctggggacaagggcagcggccggcggctgcgggacctgcgggacagcgaccctgaggaggatgaagatgaagatgatgaggaccacttcccctacagcaatggagcctctgtgcacgccgccagcagtgactgcagcagtgaagatgacagccccccaccccggcccagccaccagcctgccccccagtag

SEQ ID NO: 63732 - DNA, 1620 bp, Artificial Sequence
  derived and/or modified sequence
tctcttaacgggaaggggcagttggaggtgtgagactgagatctaatgattaacccgaaggctgcaggagaaggaagtcgccgggggaaggcgagccgagagcgccctgaattaggcaggcccgggaatgggggtcagggcttatcaccggggaaaggaacttgggccaggtcccccactggggcgttagagagacccgcggcccctccagggagagggagtgcttcaggagcagcaaacaagagaaatgggcttcggaggcccggggaggcaaggccaaggcccagggaacccccggctcttaccagggcgctgccctcctctggaagggcgttggatccggggtgcgatggccgaggcaggtggcctggcttgaaccagctatggggggactctcaacagtaggtgcctgccctggaatcctgggcgcccaacaagcccaggcgcagtcgaacctcctggggaagtgccgccggccgcgcaccgccttcaccagccagcagctgctggagctggagcaccagttcaagctcaacaagtacctgtcgcggcccaagcgcttcgaggtggccacctcgctcatgctcaccgagacccaggtgaagatttggttccagaaccggcggatgaaatggaaacgcagcaaaaaggccaaagagcaggcggcgcaggaagcggagaaacagaagggcggcggcgggggcgcggggaagggcggcgcggaggagccgggagccgaggagctgctggggccgccagcgcccggagacaagggcagcggacgccgcctgcgggacttgagggacagtgaccccgaggaggacgaggacgaggacgacgaggaccatttcccctacagcaacggcgccagcgtccacgccgcctcctccgactgctcctcggaggacgactcgccgcccccgcggcccagccaccagcccgcgccccagtaggagccccgcggcccagcaggtgcggcgcgcacggagcgccccggccggcggcttctcccggaggccccggcgcccgcacccacccggcccggccccgagagcaggctcgaccgccgccccatggacccctcgcccaggccggggctggagggattcggccgcggctccggtcctgggcgcttcccttttaagcaagggcgcctcacctgctcttcaagaaacagcgagagggagacccagggggctgaaacttgaactctggttcttttaaaattaattttggttggtgttgggggaggcgcgagtgcgtgtgagaagaaccgacccaccccgcgcaaggggaagcctcctgtctcccctttccccgcgtccgagaaggcggaaacccacagtgttacctgacttatgaaacttgaaaccgcctctggagccgccattctgcagagtatttggaaaaagaaaaaagggtttatgcttacgtctctggggtcggggggattatgtcacgagcgttcaaactgctggaaatctcaaaactgtactgtctttatttttgtatattgtatttatatataaaaagaaacgtctacgtatgcatgctaaattattatttagcttctcccatcgcccacgatggaatgtaaaataaattggttttgtactggat

SEQ ID NO: 63733 - DNA, 570 bp, Artificial Sequence
  derived and/or modified sequence
atgggcggcctgagcaccgtgggcgcctgccccggcatcctgggcgcccagcaggcccaggctcagagcaacctcctggggaagtgtcgcagaccaagaaccgcattcacgtctcagcagctgttggaactcgaacatcaatttaaactcaataagtacctctctcgacccaagagatttgaagtggcgacatccctgatgttgacagagactcaagtgaagatctggtttcagaacagaagaatgaaatggaagcggagcaagaaagccaaggagcaggctgctcaggaggccgagaaacagaaaggcggagggggaggcgccgggaagggtggggccgaggaacctggagctgaagaactgctcggaccaccagcccccggagacaaggggagcgggagaagactgcgggatctccgcgactctgaccccgaggaggacgaggatgaggatgacgaggaccattttccttattccaacggtgcctccgtccacgctgcgtcctccgattgcagctctgaagatgatagccctccccccagaccatctcaccaaccagctccccaatag

SEQ ID NO: 63734 - DNA, 570 bp, Artificial Sequence
  derived and/or modified sequence
atgggcggtttgagtactgttggcgcttgtcctggcattcttggcgcacagcaggcccaagcccagtctaacctcctggggaagtgcaggagacccaggacagcctttacctcccagcagctgctagaactggagcatcagtttaagcttaataagtacctcagccggccaaagcgtttcgaagttgcgacttccttgatgctgaccgaaacccaggtgaaaatctggttccagaatcggagaatgaagtggaagcggtccaaaaaagccaaagagcaggctgcccaggaggcagagaagcaaaagggagggggagggggtgccggtaagggcggagccgaggaacccggagccgaagagctcctaggcccacccgctcccggagataaggggtctggacgcaggcttcgtgacttgagggatagtgacccggaggaagatgaagatgaggacgacgaagaccactttccctacagcaacggtgcaagcgtgcacgcagcctcaagcgattgtagctctgaggacgactcccctcctcccaggcccagtcaccagcctgcaccgcagtag

SEQ ID NO: 63735 - DNA, 570 bp, Artificial Sequence
  derived and/or modified sequence
atgggcggcctgagcaccgtgggcgcctgccccggcatcctgggcgcccagcaggcccaggcccagagcaacctgctgggcaagtgcagaagacccagaaccgccttcaccagccagcagctgctggagctggagcaccagttcaagctgaacaagtacctgagcagacccaagagattcgaggtggccaccagcctgatgctgaccgagacccaggtgaagatctggttccagaacagaagaatgaagtggaagagaagcaagaaggccaaggagcaggccgcccaggaggccgagaagcagaagggcggcggcggcggcgccggcaagggcggcgccgaggagcccggcgccgaggagctgctgggcccccccgcccccggcgacaagggcagcggcagaagactgagagacctgagagacagcgaccccgaggaggacgaggacgaggacgacgaggaccacttcccctacagcaacggcgccagcgtgcacgccgccagcagcgactgcagcagcgaggacgacagccccccccccagacccagccaccagcccgccccccagtag

SEQ ID NO: 63736 - protein, 236 aa, Artificial Sequence
  derived and/or modified sequence
MAAIQDGLAKGENDETVSNTLTLTNGLERRTKTYSEDNFEELQYFPNFYALLKSIDSEKEAKEKETLITIMKTLIDFVKMMVKYGTISPEEGVSYLENLDEMIALQTKNKLEKNATDNISKLFPAPSEKSHEETDSTKEEAAKMEKEYGSLKDSTKDDNSNPGGKTDEPKGKTEAYLEAIRKNIEWLKKHDKKGNKEDYDLSKMRDFINKQADAYVEKGILDKEEAEAIKRIYSSL

SEQ ID NO: 63737 - protein, 57 aa, Artificial Sequence
  derived and/or modified sequence
MAAIQDGLAKGENDETVSNTLTLTNGLERRTKTYSEDNFEELQYFPNFYALLKSIDS

SEQ ID NO: 63738 - DNA, 711 bp, Artificial Sequence
  derived and/or modified sequence
atggctgccattcaagatggtctcgcaaaaggggagaacgacgagactgttagtaatactttgaccctcactaacggactcgaacgccgtaccaagacatacagcgaggacaacttcgaggagctccagtatttccccaatttctacgctcttctgaagagtatcgatagtgagaaagaagctaaagaaaaggaaaccctgatcaccataatgaaaactctgattgacttcgtcaagatgatggttaagtatggtacaatctctcccgaggaaggcgtctcatacttagagaacttggacgaaatgatcgctctccaaacaaaaaataagctggagaaaaatgcaacggataatattagtaaattgtttcccgcccctagtgaaaaatcgcatgaggaaacagatagcaccaaggaggaggccgctaagatggagaaggaatacggaagtctcaaggactctacgaaagatgacaacagcaatcctggcgggaaaacagacgaacccaaaggtaaaacagaagcctacctcgaggctattcggaaaaacatcgaatggctgaagaaacatgacaaaaagggcaacaaagaagactacgatctgagcaagatgagggactttattaacaaacaggccgatgcctacgtggagaagggaatcttagataaagaagaagcggaagctataaagcggatttactcctctctctag

SEQ ID NO: 63739 - DNA, 174 bp, Artificial Sequence
  derived and/or modified sequence
atggccgccatccaggatggattggctaagggggagaacgacgagaccgtgagcaacactttgaccctcacaaatgggcttgagaggcgtaccaagacttattctgaggacaactttgaagagctgcagtattttcccaacttctatgcacttctgaaatccatagactcctag

SEQ ID NO: 63740 - DNA, 711 bp, Artificial Sequence
  derived and/or modified sequence
atggccgccatccaggacggcctggccaagggggagaatgatgagaccgtgagcaacaccctgaccctgaccaacggcctggagaggaggaccaagacctacagcgaggacaactttgaggagctgcagtacttccccaacttctacgccctgctgaagagcattgattctgagaaggaggccaaggagaaggagaccctcatcaccatcatgaagaccctgattgactttgtgaagatgatggtgaagtatggcaccatcagccctgaggagggcgtgtcctacctggagaacctggatgagatgattgccctgcagaccaagaacaagctggagaagaatgccacagacaacatcagcaagctgtttcctgcccccagcgagaagagccatgaggagacagacagcaccaaggaggaggccgccaagatggagaaggagtatggcagcctgaaggacagcaccaaggatgacaacagcaaccctgggggcaagacagatgagcccaagggcaagacagaggcctacctggaggccatcaggaagaacatcgagtggctgaagaagcatgacaagaagggcaacaaggaggactatgacctgagcaagatgagggacttcatcaacaagcaggctgatgcctacgtggagaagggcatcctggacaaggaggaggccgaggccatcaagaggatctacagcagcctgtag

SEQ ID NO: 63741 - DNA, 174 bp, Artificial Sequence
  derived and/or modified sequence
atggccgccatccaggacggcctggccaagggggagaatgatgagaccgtgagcaacaccctgaccctgaccaacggcctggagaggaggaccaagacctacagcgaggacaactttgaggagctgcagtacttccccaacttctacgccctgctgaagagcattgacagctag

SEQ ID NO: 63742 - DNA, 711 bp, Artificial Sequence
  derived and/or modified sequence
atggccgccatccaggacggcctggccaagggcgagaacgacgagactgtgtctaatacccttactctgactaacggtctcgagagaagaacgaaaacttactctgaggataattttgaagagttacagtacttccctaatttttacgctctgcttaagtcaatagactccgagaaggaggctaaagagaaggaaactttgataaccatcatgaagaccctgatagatttcgtaaaaatgatggtcaagtacgggacaatttcgccggaagaaggggtgtcatatcttgaaaatctagatgagatgattgccttgcagacgaaaaacaagctggaaaagaatgccacagacaacatttctaagctgttccccgcgccatccgaaaaatcacatgaagaaaccgatagtactaaggaggaagctgcaaagatggaaaaggaatatggctcattgaaggattctaccaaagacgataacagcaatcccggcggtaagacagacgagcctaagggaaaaactgaggcttatctggaagctatacgcaaaaacatagagtggctgaagaaacacgacaagaaaggaaacaaggaggactatgacttgtctaagatgcgagattttatcaacaaacaagccgacgcttatgtggagaagggaatactcgataaagaagaagctgaagccatcaagcggatctattcatccctttag

SEQ ID NO: 63743 - DNA, 174 bp, Artificial Sequence
  derived and/or modified sequence
atggccgccatccaggacggcctggccaagggcgagaacgacgagacggtgtccaacaccctgaccttaacaaacggcttagagcgccgaaccaagacatactctgaggataactttgaggaattgcagtattttccgaatttttacgcattactaaagtcaattgacagctag

SEQ ID NO: 63744 - DNA, 711 bp, Artificial Sequence
  derived and/or modified sequence
atggcggcaatccaggatggcctggcaaagggtgagaatgatgagaccgttagtaataccctcaccctgacgaatgggctggagcggcgtacaaagacttactccgaagacaacttcgaggaactgcagtactttcctaatttctacgctttgctgaagtccattgactcagaaaaagaggctaaggaaaaggaaaccctgatcacaatcatgaaaaccctgattgattttgtgaagatgatggtcaaatatgggactatttcgcctgaagagggggtctcctatctcgagaacttggatgaaatgatcgccctgcaaacgaagaacaaacttgaaaagaacgcaaccgataacatcagcaaactgtttccagcaccaagcgaaaagtcccacgaagaaaccgattcgaccaaagaagaggctgcgaagatggagaaggaatatgggagtctgaaggactctacaaaagatgacaactccaaccctggaggcaaaaccgacgagcctaaagggaagactgaagcctacttagaggcaattcggaagaacatcgagtggctgaagaagcacgacaaaaagggaaacaaggaagattacgacctctcgaaaatgcgggattttatcaacaagcaggcagacgcttatgtggagaaaggcatcctggacaaggaagaagccgaagcgattaagcgtatttatagttccctttag

SEQ ID NO: 63745 - DNA, 174 bp, Artificial Sequence
  derived and/or modified sequence
atggcagcaatccaagatggattggcaaaaggcgaaaacgacgaaactgtctccaacacactaactctgacaaatgggctggaacgcaggactaaaacttacagcgaagataacttcgaggaattgcagtatttcccaaacttttatgcactcctgaagtccatagacagttag

SEQ ID NO: 63746 - DNA, 711 bp, Artificial Sequence
  derived and/or modified sequence
atggccgccatccaggacggcctggccaagggcgagaacgacgagaccgtgagcaacaccctgaccctgaccaacggcctggagagaagaaccaagacctacagcgaggacaacttcgaggagctgcagtacttccccaacttctacgccctgctgaagagcatcgacagcgagaaggaggccaaggagaaggagaccctgatcaccatcatgaagaccctgatcgacttcgtgaagatgatggtgaagtacggcaccatcagccccgaggagggcgtgagctacctggagaacctggacgagatgatcgccctgcagaccaagaacaagctggagaagaacgccaccgacaacatcagcaagctgttccccgcccccagcgagaagagccacgaggagaccgacagcaccaaggaggaggccgccaagatggagaaggagtacggcagcctgaaggacagcaccaaggacgacaacagcaaccccggcggcaagaccgacgagcccaagggcaagaccgaggcctacctggaggccatcagaaagaacatcgagtggctgaagaagcacgacaagaagggcaacaaggaggactacgacctgagcaagatgagagacttcatcaacaagcaggccgacgcctacgtggagaagggcatcctggacaaggaggaggccgaggccatcaagagaatctacagcagcctgtag

SEQ ID NO: 63747 - DNA, 174 bp, Artificial Sequence
  derived and/or modified sequence
atggccgccatccaggacggcctggccaagggcgagaacgacgagaccgtgagcaacaccctgaccctgaccaacggcctggagagaagaaccaagacctacagcgaggacaacttcgaggagctgcagtacttccccaacttctacgccctgctgaagagcatcgacagctag

SEQ ID NO: 63748 - DNA, 2907 bp, Artificial Sequence
  derived and/or modified sequence
atggccgaggacgacccctacctgggcagacccgagcagatgttccacctggaccccagcctgacccacaccatcttcaaccccgaggtgttccagccccagatggccctgcccaccgacggcccctacctgcagatcctggagcagcccaagcagagaggcttcagattcagatacgtgtgcgagggccccagccacggcggcctgcccggcgccagcagcgagaagaacaagaagagctacccccaggtgaagatctgcaactacgtgggccccgccaaggtgatcgtgcagctggtgaccaacggcaagaacatccacctgcacgcccacagcctggtgggcaagcactgcgaggacggcatctgcaccgtgaccgccggccccaaggacatggtggtgggcttcgccaacctgggcatcctgcacgtgaccaagaagaaggtgttcgagaccctggaggccagaatgaccgaggcctgcatcagaggctacaaccccggcctgctggtgcaccccgacctggcctacctgcaggccgagggcggcggcgacagacagctgggcgacagagagaaggagctgatcagacaggccgccctgcagcagaccaaggagatggacctgagcgtggtgagactgatgttcaccgccttcctgcccgacagcaccggcagcttcaccagaagactggagcccgtggtgagcgacgccatctacgacagcaaggcccccaacgccagcaacctgaagatcgtgagaatggacagaaccgccggctgcgtgaccggcggcgaggagatctacctgctgtgcgacaaggtgcagaaggacgacatccagatcagattctacgaggaggaggagaacggcggcgtgtgggagggcttcggcgacttcagccccaccgacgtgcacagacagttcgccatcgtgttcaagacccccaagtacaaggacatcaacatcaccaagcccgccagcgtgttcgtgcagctgagaagaaagagcgacctggagaccagcgagcccaagcccttcctgtactaccccgagatcaaggacaaggaggaggtgcagagaaagagacagaagctgatgcccaacttcagcgacagcttcggcggcggcagcggcgccggcgccggcggcggcggcatgttcggcagcggcggcggcggcggcggcaccggcagcaccggccccggctacagcttcccccactacggcttccccacctacggcggcatcaccttccaccccggcaccaccaagagcaacgccggcatgaagcacggcaccatggacaccgagagcaagaaggaccccgagggctgcgacaagagcgacgacaagaacaccgtgaacctgttcggcaaggtgatcgagaccaccgagcaggaccaggagcccagcgaggccaccgtgggcaacggcgaggtgaccctgacctacgccaccggcaccaaggaggagagcgccggcgtgcaggacaacctgttcctggagaaggccatgcagctggccaagagacacgccaacgccctgttcgactacgccgtgaccggcgacgtgaagatgctgctggccgtgcagagacacctgaccgccgtgcaggacgagaacggcgacagcgtgctgcacctggccatcatccacctgcacagccagctggtgagagacctgctggaggtgaccagcggcctgatcagcgacgacatcatcaacatgagaaacgacctgtaccagacccccctgcacctggccgtgatcaccaagcaggaggacgtggtggaggacctgctgagagccggcgccgacctgagcctgctggacagactgggcaacagcgtgctgcacctggccgccaaggagggccacgacaaggtgctgagcatcctgctgaagcacaagaaggccgccctgctgctggaccaccccaacggcgacggcctgaacgccatccacctggccatgatgagcaacagcctgccctgcctgctgctgctggtggccgccggcgccgacgtgaacgcccaggagcagaagagcggcagaaccgccctgcacctggccgtggagcacgacaacatcagcctggccggctgcctgctgctggagggcgacgcccacgtggacagcaccacctacgacggcaccacccccctgcacatcgccgccggcagaggcagcaccagactggccgccctgctgaaggccgccggcgccgaccccctggtggagaacttcgagcccctgtacgacctggacgacagctgggagaacgccggcgaggacgagggcgtggtgcccggcaccacccccctggacatggccaccagctggcaggtgttcgacatcctgaacggcaagccctacgagcccgagttcaccagcgacgacctgctggcccagggcgacatgaagcagctggccgaggacgtgaagctgcagctgtacaagctgctggagatccccgaccccgacaagaactgggccaccctggcccagaagctgggcctgggcatcctgaacaacgccttcagactgagccccgcccccagcaagaccctgatggacaactacgaggtgagcggcggcaccgtgagagagctggtggaggccctgagacagatgggctacaccgaggccatcgaggtgatccaggccgccagcagccccgtgaagaccaccagccaggcccacagcctgcccctgagccccgccagcaccagacagcagatcgacgagctgagagacagcgacagcgtgtgcgacagcggcgtggagaccagcttcagaaagctgagcttcaccgagagcctgaccagcggcgccagcctgctgaccctgaacaagatgccccacgactacggccaggagggccccctggagggcaagatctag

SEQ ID NO: 63749 - DNA, 2907 bp, Artificial Sequence
  derived and/or modified sequence
atggctgaagatgatccatacctgggacgcccggaacagatgttccatttggaccccagcttgacgcacaccattttcaatcccgaggtcttccagccccagatggccctgcccactgacggcccctatctgcagatccttgagcagccgaaacaacgcggatttcgctttaggtacgtttgtgaagggcccagccacggtgggctacctggtgcatcttctgagaaaaacaaaaaaagctacccacaagtgaaaatctgcaactacgtcggcccggcaaaagtaatcgttcagctcgttactaatggaaagaatatccatcttcacgcccatagccttgttgggaagcactgtgaagacggtatatgtaccgttaccgcaggacctaaagacatggttgtgggcttcgcaaatcttggcatactgcacgtgacaaaaaagaaggtgttcgaaacactcgaggcccgaatgaccgaggcttgtatcagggggtataacccaggtctgctggtgcaccctgaccttgcctacctccaggccgaaggaggaggtgacagacagctgggggatcgcgaaaaagagttaatccggcaggcagctctccaacaaaccaaggagatggacctctcagtggtgcgactcatgtttacggcatttctaccagatagtacaggttcgtttacgaggcgactggaacctgtggtgagcgacgcaatctacgactcaaaagctcctaacgcttctaacttgaagattgtaaggatggacaggaccgcaggctgtgtcaccggtggcgaggagatctatctgctgtgcgataaagttcagaaagacgacatacaaatcaggttctacgaagaggaagagaacggaggagtctgggagggatttggcgacttcagtcccacagatgtacatagacaatttgccatcgttttcaaaacgccgaaatacaaagatatcaatatcactaaaccggcctctgtattcgtgcagctacgtaggaagtccgacctagaaacttcagagccaaagcctttcctctactaccccgaaattaaggataaggaggaggtacagcgcaaacgccagaagttaatgccgaatttctcagactcctttggcggcggttcaggtgcaggggccggaggtggcgggatgttcgggagcgggggcggggggggcggtactggcagtacaggccctggatattcctttcctcactatgggtttcccacatacggtgggattaccttccatccgggcactaccaagagcaatgcggggatgaagcacgggacaatggatacggagtcaaaaaaagaccccgagggatgcgataagtctgacgataaaaacaccgtgaatctgttcggcaaagtgattgaaacaaccgaacaggatcaggagccttctgaagctacagtaggtaatggagaggtgacgctgacctatgcaacgggtaccaaggaggagtccgccggcgtgcaagacaacctttttcttgagaaggcaatgcagcttgcaaagcgacatgctaatgcgttgttcgactatgcagtgactggcgatgttaagatgcttctggctgtccagcggcacctgaccgctgtgcaggatgagaacggagactccgtactgcacctggccatcattcatctgcattcccagctggttcgagatctgttggaagtgacttccgggctgatctccgacgatattataaacatgcggaatgacctctaccagacccctctgcacctggccgtaatcaccaaacaagaggatgtcgtggaggatttactccgagctggcgccgatctctcactcctcgaccgtcttggaaactccgtgctccatctggccgcgaaagaaggtcatgacaaggtcctcagtatcctgctgaaacacaagaaggctgccttgctcctggaccatcccaatggcgatggactaaatgctatccacctcgccatgatgagcaatagtctgccttgcctgctgctcttggtggccgctggggctgatgtgaacgctcaggagcagaagagtgggcgtaccgctcttcatctggccgttgaacacgataacatctcacttgctggatgcctgttattggagggggatgcacacgttgattcaacaacttacgacggaaccacacctctgcatatcgccgcaggcaggggcagcactaggctcgccgcactgctgaaggccgcgggcgctgacccgctcgtagaaaatttcgaaccactgtacgaccttgatgattcttgggagaatgcaggtgaggatgagggggtcgtgcccgggaccactcccctggacatggcaacatcctggcaagtgtttgacatcctgaatgggaagccttatgagccagaatttacctctgatgacctcctcgctcagggcgatatgaagcagttagctgaggacgtcaagttacagttatacaaactgctcgagatccctgacccagataaaaattgggccacactggcccagaaactgggtctgggtattctcaacaatgcctttcggctttctccagctccaagcaagacactaatggacaactacgaggtgagcggtgggactgtgagggaattagtggaggctctccgtcagatgggttataccgaagccatcgaggtgatacaggccgccagtagtcctgtcaaaaccactagtcaggcccactcactgcccctctctccagcatcaacccggcagcagattgatgagctccgagactcagactccgtttgcgattcaggggtggagacctcctttcggaagttaagctttacagagtcacttacttcaggcgcctctttgctgactttgaataagatgccacacgactatggccaggagggccccctcgaagggaaaatctag

SEQ ID NO: 63750 - DNA, 2907 bp, Artificial Sequence
  derived and/or modified sequence
atggccgaggacgatccttatcttggccggccagagcagatgtttcacctggatcctagcctcacacataccatcttcaacccagaggtgttccagccccagatggcactgccgacagacgggccatacctgcaaattctggaacagccaaaacaaaggggcttccggttcagatatgtgtgtgaagggccatcacatggcggactgcctggggctagctccgagaaaaacaaaaagtcctatccccaggtgaaaatatgcaactatgtcggacccgccaaggtgattgtacagcttgtaacgaatggaaaaaatatccatctgcacgcccattccctggttgggaagcactgtgaagatggaatttgcacagtcaccgcagggccaaaggacatggtagtagggttcgccaatttgggcatcttgcacgtgaccaagaagaaggtcttcgaaacgttggaggcaaggatgacagaagcgtgtattaggggctacaatcccggtttgctggtgcatcccgacctcgcctacctgcaggccgaaggcggaggggaccggcagctaggcgaccgcgagaaggagcttatacgccaggccgcactgcaacagaccaaagagatggacctgagcgtagtgcggttgatgttcacggcgttcctccccgactccactggtagctttactaggcggctcgagccagtggtctcagatgcaatctacgacagcaaagcacccaacgcatcaaacttgaagattgtgaggatggataggacagccgggtgcgtaacgggcggcgaagaaatatacctgctctgcgataaggtgcagaaggacgatattcagatccggttctacgaggaagaagagaatggtggggtctgggaggggttcggggattttagcccaacagatgtacatcgccagtttgccatcgtttttaaaacccctaaatataaagatatcaacataactaaacctgcttctgtttttgtgcagctcagaaggaagagtgatctcgaaacgagcgagccaaaacccttcttgtactatcctgagataaaggacaaagaagaggtccagcggaagcgccagaaacttatgcccaatttcagcgactccttcggcggagggtccggtgcgggcgccgggggaggcggaatgttcggcagtggaggtggcggcggcgggacgggatctacgggccccggctatagcttcccacactacggctttcctacttatggcggaattacattccatcccggcactacaaaatctaacgcgggtatgaagcatggtactatggataccgagtcgaaaaaggaccctgaaggatgcgataaaagcgacgataagaatacagtgaacctgtttggcaaggtgatcgaaaccacggagcaggatcaggaaccttctgaggccacggtgggaaacggagaggtgactcttacttatgcgacagggaccaaagaggagtcagcaggcgtgcaggataatctcttcctagaaaaggccatgcagctcgccaaacgccacgctaatgctctttttgactacgccgtcaccggggatgtgaaaatgctcctggccgtccagcggcacctaacagccgtacaggacgaaaatggtgattccgtccttcacttggccattattcatctgcacagtcagctcgtccgcgacctgctagaagtaacaagcgggctgatcagtgatgatattattaacatgcggaacgatttatatcaaacccccttgcatctggcggttattaccaaacaagaggacgtagtggaagacctactccgcgccggggcggatttgtctctccttgatcgcctgggcaacagcgtcctccatctcgctgccaaggagggtcacgacaaagtcctaagcatcctgctcaagcacaagaaggccgcccttctcctcgatcaccctaatggagacgggctgaatgccatccacctagctatgatgtcaaacagtctgccctgtctgttactgctggttgctgcgggagccgatgtgaacgctcaggagcaaaaaagcggccggacagccctccatctagcggtggagcacgataatatctccttggctgggtgccttctcctggagggggatgcacacgtggactccacaacatatgacggcactacacctctgcatattgcagcgggacgcggaagcacccggctcgcagccttgcttaaagcagctggtgcggacccccttgtcgagaacttcgaacctctctacgatttggacgatagttgggagaatgcaggagaggacgaaggggtggtgccaggaacaacccccctggacatggccacaagctggcaagtcttcgatattctgaatggtaaaccctatgagccggaatttacctccgatgacctcctcgctcaaggtgatatgaagcagctggcagaggacgtaaagctgcagctttacaaactgttggaaattccggaccccgataagaactgggccaccctggcccagaagctgggtctgggtatcctaaacaacgccttcaggctgtccccggcaccctcaaagactctcatggacaactacgaagtcagcggcgggacagtccgggagctggtcgaggcattgcgccagatgggctacactgaagcaatcgaggtgatccaggcggcttcaagcccagtgaagacaacctctcaggcccatagcctccccctctctcccgcctccacgcgccaacagatcgatgaactgagagatagtgatagcgtgtgcgattcgggcgtggagacgagttttagaaagctatcctttactgagtcccttacctccggcgcctccctccttaccttgaacaagatgccccacgactatggacaagaagggcctttagaagggaaaatatag

SEQ ID NO: 63751 - DNA, 2907 bp, Artificial Sequence
  derived and/or modified sequence
atggctgaagatgacccctacctgggccggcctgagcagatgttccacctggaccccagcctgacccacaccatcttcaaccctgaggtgttccagccccagatggccctgcccacagatggcccctacctgcagatcctggagcagcccaagcagaggggcttccgcttccgctacgtgtgtgagggccccagccacggcggcctgcccggggccagcagcgagaagaacaagaagagctacccccaggtgaagatctgcaactacgtgggccctgccaaggtgattgtgcagctggtgaccaacgggaagaacatccacctgcacgcccacagcctggtgggcaagcactgtgaagatggcatctgcaccgtgacagctggccccaaggacatggtggtgggctttgccaacctgggcatcctgcacgtgaccaagaagaaggtgtttgagaccctggaggccaggatgacagaggcctgcatccggggctacaaccctggcctgctggtgcacccagacctggcctacctgcaggccgagggcggcggggaccggcagctgggggaccgggagaaggagctgatccggcaggccgccctgcagcagaccaaggagatggacctgtctgtggtgcggctgatgttcaccgccttcctgcctgacagcacaggcagcttcacccggcggctggagcctgtggtgtctgatgccatctatgacagcaaggccccaaatgccagcaacctgaagatcgtgaggatggacagaacagctggctgtgtgactggaggagaggagatctacctgctgtgtgacaaggtgcagaaggatgacatccagatccgcttctatgaggaggaggagaatggaggagtgtgggagggctttggagacttcagccccacagatgtgcaccggcagtttgccatcgtgttcaagacccccaagtacaaggacatcaacatcaccaagccagcctctgtgtttgtgcagctgcggaggaagagtgacctggagaccagcgagcccaagcccttcctgtactacccagagatcaaggacaaggaggaggtgcagaggaagaggcagaagctgatgcccaacttcagtgacagctttggaggcggcagcggggccggggccggcggcggcggcatgtttggcagcggcggcggcggcggcggcaccggcagcacaggccctggctacagcttcccccactacggcttccccacctacggcggcatcaccttccaccctggcaccaccaagagcaatgccggcatgaagcacggcaccatggacacagagagcaagaaggaccctgagggctgtgacaagagtgatgacaagaacacagtgaacctgtttgggaaggtgattgagaccacagagcaggaccaggagcccagcgaggccaccgtgggcaatggagaggtgaccctgacctacgccaccggcaccaaggaggagagcgctggggtgcaggacaacctcttcctggagaaggccatgcagctggccaagagacatgccaatgccctgtttgattatgctgtgactggagatgtgaagatgctgctggccgtgcagaggcacctgacagctgtgcaggatgaaaatggagacagcgtgctgcacctggccatcatccacctgcacagccagctggtgcgggacctgctggaggtgaccagcggcctcatcagtgatgacatcatcaacatgagaaatgacctgtaccagacccccctgcacctggccgtcatcaccaagcaggaggatgtggtggaggacctgctgcgggccggggctgacctgagcctgctggaccggctgggcaacagcgtgctgcacctggccgccaaggagggccatgacaaggtgctgagcatcctgctgaagcacaagaaggccgccctgctgctggaccaccccaatggagatggcctgaatgccatccacctggccatgatgagcaacagcctgccctgcctgctgctgctggtggccgccggggctgatgtgaatgcccaggagcagaagagcggccgcacagccctgcacctggccgtggagcatgacaacatcagcctggccggctgcctgctgctggagggagatgcccacgtggacagcaccacctatgatggcaccacccccctgcacatcgctgctggccggggcagcacccggctggccgccctgctgaaggctgctggagctgaccccctggtggagaactttgagcccctgtatgacctggatgacagctgggagaatgctggagaagatgagggcgtggtgcccggcaccacccccctggacatggccacctcctggcaggtgtttgacatcctgaatggcaagccctatgagcctgagttcaccagtgatgacctgctggcccagggcgacatgaagcagctggctgaagatgtgaagctgcagctgtacaagctgctggagatcccagaccctgacaagaactgggccaccctggcccagaagctgggcctgggcatcctgaacaatgccttccggctgagccctgcccccagcaagaccctgatggacaactatgaggtgtctgggggcaccgtgcgggagctggtggaggccctgcggcagatgggctacacagaggccattgaagtcatccaggccgccagcagccctgtgaagaccaccagccaggcccacagcctgcccctgagccctgccagcacccggcagcagattgatgagctgcgggacagcgacagcgtgtgtgacagcggcgtggagaccagcttcaggaagctgtccttcacagagagcctgaccagcggggccagcctgctgaccctgaacaagatgcctcatgactatggccaggagggccccctggagggcaagatctag

SEQ ID NO: 63752 - DNA, 2907 bp, Artificial Sequence
  derived and/or modified sequence
atggccgaggacgacccctacctgggccggcccgagcagatgttccacctggatccctctctcacccatacaattttcaaccctgaggtgttccagccacaaatggcactgcccacagacggtccatatctccagatactggaacaacccaagcagcgcggttttagatttcgatatgtctgcgaagggcctagccacggtggtctgccaggcgctagctccgaaaaaaacaagaagtcatacccacaggtgaagatctgtaattacgtgggacccgctaaggtcatcgtgcagttagtgaccaatgggaaaaatatccaccttcacgcacattccttggtgggaaagcactgtgaagatgggatatgtacagttaccgcaggaccaaaagacatggttgtaggcttcgccaacctgggcatcctgcatgtcactaaaaaaaaggtgttcgagactctggaagctcgaatgaccgaagcctgcatacgaggttacaaccccggcctgctggtccatcccgacctggcttatctgcaggcagaagggggcggagaccgccagctgggcgaccgggagaaggaattaatccgacaggccgcactccagcagacgaaagagatggatctttctgtcgtcaggctgatgtttaccgcttttctccccgactcaaccggcagtttcacaagacggctcgagcctgtcgtgagtgatgccatctacgattcgaaggcccctaatgcatctaatctgaagattgtgcgcatggatcggaccgcaggctgcgttacagggggcgaggagatctacctgttatgcgataaagtgcagaaggatgatatccagatccgattttatgaagaagaagaaaacggcggcgtgtgggagggtttcggggatttctcaccaaccgatgttcaccgccagtttgcgatcgttttcaaaacgcctaagtataaagatattaacataaccaagccggcctcagtgtttgtccagctgcgaagaaaatcggacttggaaacctcagagcctaagcccttcctgtattatcccgaaatcaaggataaggaggaggtgcagaggaagcgccagaagttaatgccaaacttcagcgatagttttgggggaggcagcggcgcaggggctgggggcggaggtatgtttggatccggcggcggggggggggggacagggtctactggtccgggctattcatttccgcactatggatttcccacttatggaggaattaccttccatcccggaactacgaagagtaatgccggcatgaaacatggcacaatggacaccgaatccaaaaaagatcctgagggctgtgataagtcagatgataaaaataccgtgaatttatttggtaaagtgatagagacgaccgagcaggaccaggagcctagcgaagccaccgttgggaacggagaggtgaccctcacttacgcgacggggacaaaggaggaaagcgccggcgtgcaagacaacctgtttctggaaaaggctatgcagctggccaagcgtcacgcaaacgcattgtttgattacgccgtgaccggggacgtgaaaatgctcctggctgttcaacggcatctaactgctgtgcaggacgagaatggggatagcgtgctgcacctggccataatccatcttcatagccagctcgtacgcgatctgctggaggttacctctggtctgatctcagacgacatcatcaatatgcgcaatgacctctaccaaactcctctccacttagccgttattaccaagcaggaagacgtcgtggaggacttacttcgtgccggtgccgacctctcccttctagatcgactcggaaattccgtgcttcacctcgccgcgaaagagggccacgataaggttttgtctattcttctgaagcacaagaaagccgccctgctgttggaccatcccaacggtgatgggctgaatgccatccatctcgccatgatgtcaaatagcctcccatgcctactgctgctcgtggccgctggcgccgatgtgaacgcccaagagcaaaaatcaggaagaactgccctacatctagccgtggagcatgacaatattagtttggcaggttgccttcttctggagggggacgctcatgtggactccacaacctatgatggcacaaccccactccatatagcagctgggagggggtccacacgcctggcggctctgttgaaggcagcgggggccgacccactggttgagaactttgagccactatatgacttggatgattcctgggaaaacgcaggggaagatgaaggagtcgtgcccggaactacacctctagatatggcgacatcatggcaggtgtttgacattctcaatggaaagccctacgagccagagtttacttcagacgacctgctcgctcagggagacatgaagcagctcgccgaagacgtgaagttgcagctatataagctgctagagattcctgaccctgataaaaattgggctactctagcccagaagctgggcttgggcatcttgaataacgcctttagattatccccagcaccatccaaaactctgatggataattatgaggtttctgggggaaccgtgagggaattagtggaggcgctgcgccagatggggtacaccgaggccatcgaggtgatacaggccgcatcctctcccgtcaaaactacctcacaggcccactctctgcccctcagtcccgcatccaccaggcagcagatagatgagttaagagactctgattcagtgtgtgattctggggtagagacctcttttcgcaaactgtccttcactgaaagcctgacatcaggagctagtctcttgacactgaataaaatgcctcatgattatggtcaggagggacctctcgaaggcaagatctag

SEQ ID NO: 63753 - DNA, 2907 bp, Artificial Sequence
  derived and/or modified sequence
atggccgaggacgacccctacctgggccggcccgagcagatgttccatctcgacccgtctctcacacacacaatctttaatccagaggtgtttcagccacagatggcgctcccgaccgatgggccctatctgcaaattttagaacagcctaagcagcggggctttcgattcaggtatgtctgtgaaggcccaagccacggcggccttcctggcgcttcctctgaaaagaacaagaaaagctacccacaggtcaagatctgcaactacgtggggccagctaaagttatcgttcagctggtcactaatgggaagaatattcatctgcacgcacactctctggtggggaagcactgcgaggatggcatctgcactgtgaccgccggacccaaggatatggtggtgggattcgcgaatctggggattctgcacgtaaccaaaaagaaagtttttgaaacattagaagcgagaatgactgaggcttgcattagggggtataatcctggactccttgtacacccagacctggcatacctgcaggctgagggcgggggcgaccgccaactgggagatagggagaaagagctcatacgtcaggccgccctccagcaaaccaaggagatggatctctcggtcgtgaggctgatgttcaccgctttccttccagacagcaccggctcttttacacgacgcctggagcccgtcgttagtgatgcgatctatgactcaaaagctcccaatgcctccaacctaaaaatcgtgaggatggacaggaccgccggctgtgtgacaggtggagaagagatttacctactctgtgacaaggtgcagaaggatgatatacaaatcaggttctatgaagaagaagagaacggaggcgtttgggagggcttcggcgacttttccccaacggatgttcacaggcagttcgcaattgtgtttaagactcctaagtacaaagatattaatattaccaaacctgcaagtgtatttgtgcagctgagacggaaatccgatttggagacctccgaaccaaaaccttttctctattaccctgagattaaagacaaggaagaagtgcagagaaagcgtcagaagctcatgccaaatttcagcgattctttcggagggggatcaggtgctggggccggcggtggcggcatgtttggtagcggaggcggtggtggaggtacgggctccacgggacccgggtatagctttccccactatggtttccccacttacggaggcatcacattccatccaggtactactaagagcaatgccggaatgaagcatggaactatggatacagagtctaaaaaggaccctgagggttgtgataagtcagacgacaagaacaccgttaatctttttgggaaggtgatcgagactaccgagcaggaccaggaaccttctgaagccaccgtgggaaatggagaggtgaccttgacgtacgccaccggaaccaaagaagagagcgccggtgtacaggacaatctgtttcttgaaaaggccatgcagttggccaagcgccatgccaacgctctgttcgattatgccgtaaccggcgatgtgaaaatgctcctcgcagttcagcgccatctgactgccgtccaggacgaaaacggggattccgtgcttcacctggctattattcatcttcactctcagttagtgcgtgacttactggaagtgacatccggtctgattagtgatgatatcatcaatatgcgaaacgacctttatcagacaccactgcacctggctgttatcactaagcaggaagatgtcgtcgaggatctactgcgggcaggagccgatttgagcctgttggataggcttgggaactccgtccttcatctggcagcgaaagaggggcacgacaaggtcttaagcattctgctgaaacataagaaagcggccttgctccttgaccacccaaatggcgacggattgaacgccatacacctcgccatgatgtccaattcactcccttgccttttgcttttagtcgccgctggtgccgatgtcaacgcccaagagcagaagtcaggaagaacggcactccatctcgccgttgaacatgacaatatctcacttgccggctgccttttattggaaggggacgcccacgtagactctaccacttatgacggcacaaccccccttcacatcgccgctggtcgaggctcaactaggttagctgccctgctcaaggccgctggcgctgatccgctagtagagaactttgaacctctgtatgacctggacgactcctgggaaaacgccggggaggatgagggcgtcgtcccagggaccacgccactcgacatggctacaagctggcaggtcttcgacatccttaatgggaaaccttatgagccagaattcacgtccgacgaccttctggcacaaggggatatgaagcaactagcggaggacgtgaaacttcagctttacaagctgctggaaatccctgatcctgacaaaaattgggccacactcgcccagaaactcggactcggaatcctgaataacgctttcaggctcagtcctgccccatcaaaaaccctcatggataattacgaagtctctggggggaccgtgcgcgagctcgtggaagccctcagacagatggggtataccgaagcaatcgaagtgatacaggccgccagctccccagttaaaacaacaagccaagcccatagccttcccctgagcccagccagcacccggcaacagatcgacgagttacgagacagcgactctgtctgcgacagtggggtcgagacatctttccgcaaactcagttttacagagtcgctcaccagcggcgctagccttctcactctaaataagatgccccacgactacggacaggaggggcccctggagggaaaaatctag

SEQ ID NO: 63754 - DNA, 2907 bp, Artificial Sequence
  derived and/or modified sequence
atggcagaggatgacccttacctgggtaggcccgagcagatgttccatctcgatccttccctgacgcatacaatcttcaacccagaggtgttccagccgcagatggcgctgcccacggacggcccatatctgcagatcctcgaacagcctaaacagagaggctttagatttcggtacgtgtgtgaagggccatcccatgggggacttcccggtgcctcatccgaaaagaacaagaaaagctaccctcaagtcaagatctgcaactatgtcggtccagccaaagtgattgtgcagctggttaccaacggaaagaatatccaccttcacgcccattcgttagttggcaagcactgtgaggacgggatatgcacggttaccgcgggtcctaaggacatggttgttggatttgcaaatttgggcattcttcacgttaccaaaaaaaaggtgtttgaaactctggaggctcgtatgaccgaggcctgtattcgtggttacaatcctggactgctcgttcaccctgatctcgcctacttacaggccgaaggaggaggagatagacagctgggagaccgggagaaagaactgatcagacaggctgccctgcagcagactaaagagatggacttgagcgttgtacgcctgatgtttactgccttcctgcctgattccacggggagtttcactagaaggcttgagccagtggtctccgacgcgatctatgacagcaaagcacccaacgcatcaaatcttaagatcgtgcgcatggacagaaccgccggttgcgtaaccgggggagaagagatatatcttctctgtgacaaagtgcaaaaagacgacatccaaattaggttctatgaggaagaagagaatggtggagtgtgggaaggctttggtgatttctctcccacagatgtacacaggcaatttgccatagtgttcaagactccgaagtacaaggacattaatatcactaagcctgcctctgtttttgtgcagctgcgcagaaagtctgacttagagacttctgaacccaaaccctttctttactacccagagattaaggataaggaggaagtgcagaggaagcgacagaaactcatgccaaatttttcggactccttcggaggtgggagcggcgctggcgctggagggggagggatgtttggaagcgggggaggaggcggaggcactgggagcaccggcccaggttattctttcccccattatggctttcccacttacggaggcatcacatttcatccaggtacgacaaagtctaacgcgggaatgaagcacggcactatggacacagaatccaagaaagaccctgaaggctgcgataagagcgacgacaaaaacaccgtgaatctgtttgggaaggtcatcgaaactaccgaacaggatcaggaaccctctgaggcgacggtgggaaatggcgaggttacgttgacctatgccactgggaccaaagaagagtcggcaggagtacaggacaacttgttcctcgagaaagctatgcagctcgctaagaggcatgctaacgccctgttcgattatgccgtgaccggtgacgttaagatgctgctggcggtgcaacgacacttgaccgcagttcaggacgagaacggagattccgtgctgcaccttgctatcatacatctgcacagccagctcgtccgcgacctccttgaggtaacttcgggcctaatttctgacgacattatcaatatgcgcaatgacttgtaccaaaccccactgcatctggcagtgatcaccaaacaggaagacgtggtcgaggaccttctgcgtgccggtgcagacctgagtctgctcgatcgtctggggaatagcgtgctgcaccttgcggcaaaggagggccacgataaggtgctctcaatcctgctgaaacataaaaaggccgcacttctgctcgatcatcctaatggagatgggctcaacgctattcatctggccatgatgagcaactccctcccttgcctgttgctactggtggcggcaggggcagatgtaaatgcacaggaacaaaagtcagggaggacagccctgcacctggctgtcgaacatgacaacatttcactggcaggatgtctgctgcttgaaggagatgcccacgttgattccacgacatacgacgggacaactcccctgcacattgccgctggtagaggctccacccggctggctgcactcctgaaagccgctggtgccgaccccctggtggaaaattttgagcccttgtacgatttagatgattcttgggaaaacgcaggcgaggatgagggggtagtgccaggtactacccccctggacatggctacatcttggcaggttttcgatatcctcaatggaaaaccatatgagcctgagtttacctcggacgaccttctcgcgcaaggagatatgaagcagctggccgaagatgtaaagcttcagctctacaagctgcttgaaatccctgatcccgacaaaaactgggctactctggcccagaagcttggactgggcatattgaacaacgctttcaggctttcaccagctccttcaaagacgcttatggataactacgaagtgtcgggaggtacggtacgggaactagttgaagctctgaggcagatgggatacactgaagcaattgaagtgatacaggccgcttctagccctgtcaaaaccaccagccaggcccactcccttcccctctcacccgcttcgacacgtcaacagatcgatgagctgagagattcagactctgtgtgtgattctggcgttgaaacttcatttcggaaactcagtttcactgaatctctcaccagcggcgcaagcctgctgaccctgaacaaaatgcctcatgattatgggcaggagggcccactcgaagggaagatttag

SEQ ID NO: 63755 - DNA, 2907 bp, Artificial Sequence
  derived and/or modified sequence
atggccgaagacgatccgtacctaggtaggcccgaacaaatgttccatctggatccgtccctgacacacactatttttaatcctgaggtgttccagccgcagatggccttgcctactgacggcccttacctgcagatactggaacagccaaagcagcggggttttagatttagatatgtgtgcgaaggtccctctcacggcggactgccaggtgcctctagcgagaaaaataagaaatcctacccacaagtaaagatttgtaattacgtgggcccagccaaggtgatcgttcagcttgtcacgaatggaaaaaacatccacctgcacgcccactctctggtggggaagcattgtgaagatggcatctgcaccgtgactgccggaccaaaagacatggtggtcggttttgccaacctggggatactgcacgtgacaaaaaagaaagtgttcgaaactcttgaagccaggatgacggaggcgtgcatccgaggttataaccccggacttctcgtgcatcccgacctcgcttacctccaggcagaagggggaggcgaccggcagctcggcgaccgggagaaagagcttatcaggcaggctgctctgcagcaaacaaaggaaatggacctttcagtcgttcgactgatgttcaccgctttccttcccgattcaacagggagtttcacaaggagattggaacctgtggtgagcgacgctatctatgattccaaggccccaaacgcgagcaatctcaaaatcgttcgaatggaccgcactgccggatgcgtcaccggaggtgaggaaatctacctgctctgtgacaaggtgcagaaagatgacatacagatccggttctatgaggaagaggaaaacggaggcgtgtgggagggctttggggacttttcacccacagacgtccacaggcaatttgccatcgtctttaaaactccaaagtacaaggatatcaacattacgaaacctgcctccgtctttgtgcagctccgcagaaaatccgacttggaaacttctgaaccaaagccgtttctgtactatcctgagatcaaagacaaggaggaagtgcaaagaaagcgccagaagctcatgcccaattttagcgattcttttggcggagggtctggggctggtgctggcggaggcggaatgttcggctccgggggagggggtggcggaacgggcagcaccggccctggctacagcttcccacactacggcttccccacttacgggggtatcacatttcacccaggaaccacaaagtccaatgccggtatgaagcacggtaccatggacacggagagcaagaaagacccagaggggtgtgacaaatccgatgataaaaatacagtcaaccttttcggcaaagtcattgagactaccgaacaggaccaggaaccatctgaagctaccgtgggcaacggagaggtcaccttaacctacgctactggcaccaaggaggaatcggccggagttcaggacaatttgtttctggaaaaagccatgcaacttgccaagagacatgccaatgctttgtttgactacgcagtgaccggcgatgtgaagatgctgctggctgtacagaggcatttaactgccgttcaggacgaaaatggcgactcagtcctccacctcgcaatcattcacctacattctcaactggtgagggacctgttggaggtgacctcaggcttaattagtgacgatatcattaacatgcgcaatgacctgtatcagacacccttacatttagcagtaatcacaaagcaggaggacgtggtcgaggatctcctgcgcgctggggctgacctgtcccttctcgaccgtctcggaaacagtgtgttacaccttgcagctaaggagggtcacgacaaggtcctctctattctgcttaagcacaaaaaagccgcattactcctcgaccatcccaacggagacggcctcaacgccatccacctagctatgatgtccaattcactcccctgtctgctgcttctggtcgccgctggcgctgatgtaaacgcccaggagcaaaaaagcggacggaccgctcttcatctcgcagtagaacacgataacatttccctggctggctgcctgctgttagaaggagacgcccacgtggacagtacgacctacgatggaactacgcccctccatattgctgctggtagagggtccacacggctggccgctctgctcaaggccgcaggcgctgatcccctggtcgaaaacttcgaacccctatacgaccttgacgattcttgggaaaatgcgggtgaggatgagggagtcgttccgggaacaacaccactcgatatggccacctcatggcaggtctttgatatattgaatggaaaaccttacgagcctgagtttacttccgatgacttgttggctcagggggacatgaagcagctcgctgaggacgtcaagctgcagctgtataaattgttggagattccggatccagacaagaattgggccacgcttgcacagaaactgggtctcggaatcctgaataatgccttcaggctctctcctgccccttcaaaaaccctcatggacaactatgaggtgagcggaggcaccgtccgcgaattagtagaggccctgcgccaaatggggtatacagaggccatcgaagtgatccaggcagcatccagtccagtgaaaaccactagtcaggcccatagcctgcctttgtcacccgctagtacccgacaacagatcgacgaactgcgggattctgacagtgtgtgcgattctggagtggagacatccttcagaaaactttcattcaccgaatccttgactagcggcgcaagtctgcttacactcaacaaaatgccacacgattatgggcaggaaggcccactggagggcaaaatatag

SEQ ID NO: 63756 - protein, 114 aa, Artificial Sequence
  derived and/or modified sequence
MATLKDQLIYNLLKEEQTPQNKITVVGVGAVGMACAISILMKDLADELALVDVIEDKLKGEMMDLQHGSLFLRTPKIVSGKDYNVTANSKLVIITAGARQQEGESRLNLVQRNV

SEQ ID NO: 63757 - protein, 361 aa, Artificial Sequence
  derived and/or modified sequence
MGEPSGGYTYTQTSIFLFHAKIPFGSKSNMATLKDQLIYNLLKEEQTPQNKITVVGVGAVGMACAISILMKDLADELALVDVIEDKLKGEMMDLQHGSLFLRTPKIVSGKDYNVTANSKLVIITAGARQQEGESRLNLVQRNVNIFKFIIPNVVKYSPNCKLLIVSNPVDILTYVAWKISGFPKNRVIGSGCNLDSARFRYLMGERLGVHPLSCHGWVLGEHGDSSVPVWSGMNVAGVSLKTLHPDLGTDKDKEQWKEVHKQVVESAYEVIKLKGYTSWAIGLSVADLAESIMKNLRRVHPVSTMIKGLYGIKDDVFLSVPCILGQNGISDLVKVTLTSEEEARLKKSADTLWGIQKELQF

SEQ ID NO: 63758 - DNA, 1086 bp, Artificial Sequence
  derived and/or modified sequence
atgggcgagcccagcggcggctacacctacacccagaccagcatcttcctgttccacgccaagatccccttcggcagcaagagcaacatggccaccctgaaggaccagctgatctacaacctgctgaaggaggagcagaccccccagaacaagatcaccgtggtgggcgtgggcgccgtgggcatggcctgcgccatcagcatcctgatgaaggacctggccgacgagctggccctggtggacgtgatcgaggacaagctgaagggcgagatgatggacctgcagcacggcagcctgttcctgagaacccccaagatcgtgagcggcaaggactacaacgtgaccgccaacagcaagctggtgatcatcaccgccggcgccagacagcaggagggcgagagcagactgaacctggtgcagagaaacgtgaacatcttcaagttcatcatccccaacgtggtgaagtacagccccaactgcaagctgctgatcgtgagcaaccccgtggacatcctgacctacgtggcctggaagatcagcggcttccccaagaacagagtgatcggcagcggctgcaacctggacagcgccagattcagatacctgatgggcgagagactgggcgtgcaccccctgagctgccacggctgggtgctgggcgagcacggcgacagcagcgtgcccgtgtggagcggcatgaacgtggccggcgtgagcctgaagaccctgcaccccgacctgggcaccgacaaggacaaggagcagtggaaggaggtgcacaagcaggtggtggagagcgcctacgaggtgatcaagctgaagggctacaccagctgggccatcggcctgagcgtggccgacctggccgagagcatcatgaagaacctgagaagagtgcaccccgtgagcaccatgatcaagggcctgtacggcatcaaggacgacgtgttcctgagcgtgccctgcatcctgggccagaacggcatcagcgacctggtgaaggtgaccctgaccagcgaggaggaggccagactgaagaagagcgccgacaccctgtggggcatccagaaggagctgcagttctag

SEQ ID NO: 63759 - DNA, 1086 bp, Artificial Sequence
  derived and/or modified sequence
atgggggagcctagcggaggatatacgtatacccagacgagtatctttctatttcatgctaaaatcccctttggttctaaatctaacatggccaccttgaaagatcagctgatttataatttactgaaggaagaacaaacacctcagaataaaatcacagttgttggggtcggcgcagtcgggatggcatgcgctatcagcattctgatgaaagatctggcggacgaactggcactagtcgacgtgatcgaggataagctgaagggcgagatgatggacctccagcacggcagtctgtttcttcgtaccccaaagattgtgtctgggaaggactataatgttaccgccaattctaaattggtcattatcacggcgggcgcgagacaacaagagggagaaagcaggcttaacctggtgcagcggaatgtgaacatctttaaattcattattcccaatgtcgttaagtatagtcctaattgcaagctgttgatcgtgagtaatcctgtggacatcttgacctacgttgcctggaagattagcggcttccctaaaaaccgagtgattgggtcgggatgtaacctagactcagcaaggtttaggtacttaatgggcgagagactgggggtgcatccactgagctgccacggctgggtcctgggggaacatggcgactcaagtgtgcccgtatggtccggcatgaacgtggcaggagtatccttaaaaacacttcacccggatctggggactgataaggataaagaacagtggaaggaagttcacaagcaggtagtcgagagcgcttacgaggtgatcaagctgaaagggtacacaagttgggcaatcggactaagcgtggccgatttggccgaatcaattatgaagaacctgcggcgcgtgcaccctgtcagcactatgataaaaggtctgtacggtataaaagatgatgttttcctgtccgttccatgcatactggggcaaaacggcatttcggatctggtaaaggtgaccctcacttctgaagaggaggcacggctcaagaaatcggccgacaccctctggggaattcagaaggagcttcagttctag

SEQ ID NO: 63760 - DNA, 1086 bp, Artificial Sequence
  derived and/or modified sequence
atgggagagcccagcggcggctacacctacacccagaccagcatcttcctgttccacgccaagatccccttcggcagcaagagcaacatggccaccctgaaggaccagctgatctacaacctgctgaaggaggagcagaccccccagaacaagatcaccgtggtgggcgtgggcgctgtgggcatggcctgtgccatcagcatcctgatgaaggacctggctgatgagctggccctggtggatgtgattgaggacaagctgaagggggagatgatggacctgcagcacggcagcctcttcctgcggacccccaagatcgtgtctgggaaggactacaacgtgacagccaacagcaagctggtgatcatcacagctggggcccggcagcaggagggggagagccggctgaacctggtgcagagaaatgtgaacatcttcaagttcatcatccccaacgtggtgaagtacagccccaactgcaagctgctgattgtgagcaaccctgtggacatcctgacctacgtggcctggaagatcagcggcttccccaagaacagagtcatcggcagcggctgcaacctggacagcgcccgcttccgctacctgatgggagagcggctgggcgtgcaccccctgagctgccacggctgggtgctgggggagcacggggacagctctgtgcctgtgtggagcggcatgaatgtggccggcgtgtccctgaagaccctgcacccagacctgggcacagacaaggacaaggagcagtggaaggaggtgcacaagcaggtggtggagagcgcctatgaggtgatcaagctgaagggctacacctcctgggccatcggcctgtctgtggccgacctggccgagagcatcatgaagaacctgcggcgggtgcaccctgtgtccaccatgatcaagggcctgtatggcatcaaggatgatgtgttcctgtctgtgccctgcatcctgggccagaatggcatcagtgacctggtgaaggtgaccctgaccagcgaggaggaggcccggctgaagaagtctgctgacaccctgtggggcatccagaaggagctgcagttctag

SEQ ID NO: 63761 - DNA, 1922 bp, Artificial Sequence
  derived and/or modified sequence
taaaagccgggcgttcggaggacccagcaattagtctgatttccgcccacctttccgagcgggaaggagagccacaaagcgcgcatgcgcgcggatcaccgcaggctcctgtgccttgggcttgagctttgtggcagttaatggcttttctgcacgtatctctggtgtttacttgagaagcctggctgtgtccttgctgtaggagccggagtagctcagagtgatcttgtctgaggaaaggccagccccacttggggttaataaaccgcgatgggtgaaccctcaggaggctatacttacacccaaacgtcgatattccttttccacgctaagattccttttggttccaagtccaatatggcaactctaaaggatcagctgatttataatcttctaaaggaagaacagaccccccagaataagattacagttgttggggttggtgctgttggcatggcctgtgccatcagtatcttaatgaaggacttggcagatgaacttgctcttgttgatgtcatcgaagacaaattgaagggagagatgatggatctccaacatggcagccttttccttagaacaccaaagattgtctctggcaaagactataatgtaactgcaaactccaagctggtcattatcacggctggggcacgtcagcaagagggagaaagccgtcttaatttggtccagcgtaacgtgaacatctttaaattcatcattcctaatgttgtaaaatacagcccgaactgcaagttgcttattgtttcaaatccagtggatatcttgacctacgtggcttggaagataagtggttttcccaaaaaccgtgttattggaagcggttgcaatctggattcagcccgattccgttacctaatgggggaaaggctgggagttcacccattaagctgtcatgggtgggtccttggggaacatggagattccagtgtgcctgtatggagtggaatgaatgttgctggtgtctctctgaagactctgcacccagatttagggactgataaagataaggaacagtggaaagaggttcacaagcaggtggttgagagtgcttatgaggtgatcaaactcaaaggctacacatcctgggctattggactctctgtagcagatttggcagagagtataatgaagaatcttaggcgggtgcacccagtttccaccatgattaagggtctttacggaataaaggatgatgtcttccttagtgttccttgcattttgggacagaatggaatctcagaccttgtgaaggtgactctgacttctgaggaagaggcccgtttgaagaagagtgcagatacactttgggggatccaaaaggagctgcaattttaaagtcttctgatgtcatatcatttcactgtctaggctacaacaggattctaggtggaggttgtgcatgttgtcctttttatctgatctgtgattaaagcagtaatattttaagatggactgggaaaaacatcaactcctgaagttagaaataagaatggtttgtaaaatccacagctatatcctgatgctggatggtattaatcttgtgtagtcttcaactggttagtgtgaaatagttctgccacctctgacgcaccactgccaatgctgtacgtactgcatttgccccttgagccaggtggatgtttaccgtgtgttatataacttcctggctccttcactgaacatgcctagtccaacattttttcccagtgagtcacatcctgggatccagtgtataaatccaatatcatgtcttgtgcataattcttccaaaggatcttattttgtgaactatatcagtagtgtacattaccatataatgtaaaaagatctacatacaaacaatgcaaccaactatccaagtgttataccaactaaaacccccaataaaccttgaacagtga

SEQ ID NO: 63762 - DNA, 2416 bp, Artificial Sequence
  derived and/or modified sequence
agtctgccggtcggttgtctggctgcgcgcgccacccgggcctctccagtgccccgcctggctcggcatccacccccagcccgactcacacgtgggttcccgcacgtccgccggccccccccgctgacgtcagcatagctgttccacttaaggcccctcccgcgcccagctcagagtgctgcagccgctgccgccgattccggatctcattgccacgcgcccccgacgaccgcccgacgtgcattcccgattccttttggttccaagtccaatatggcaactctaaaggatcagctgatttataatcttctaaaggaagaacagaccccccagaataagattacagttgttggggttggtgctgttggcatggcctgtgccatcagtatcttaatgaaggacttggcagatgaacttgctcttgttgatgtcatcgaagacaaattgaagggagagatgatggatctccaacatggcagccttttccttagaacaccaaagattgtctctggcaaagactataatgtaactgcaaactccaagctggtcattatcacggctggggcacgtcagcaagagggagaaagccgtcttaatttggtccagcgtaacgtgaacatctttaaattcatcattcctaatgttgtaaaatacagcccgaactgcaagttgcttattgtttcaaatccagtggatatcttgacctacgtggcttggaagataagtggttttcccaaaaaccgtgttattggaagcggttgcaatctggattcagcccgattccgttacctaatgggggaaaggctgggagttcacccattaagctgtcatgggtgggtccttggggaacatggagattccagtgtgcctgtatggagtggaatgaatgttgctggtgtctctctgaagactctgcacccagatttagggactgataaagataaggaacagtggaaagaggttcacaagcaggtggttgagagtgcttatgaggtgatcaaactcaaaggctacacatcctgggctattggactctctgtagcagatttggcagagagtataatgaagaatcttaggcgggtgcacccagtttccaccatgattaagggtctttacggaataaaggatgatgtcttccttagtgttccttgcattttgggacagaatggaatctcagaccttgtgaaggtgactctgacttctgaggaagaggcccgtttgaagaagagtgcagatacactttgggggatccaaaaggagctgcaattttaaagtcttctgatgtcatatcatttcactgtctaggctacaacaggattctaggtggaggttgtgcatgttgtcctttttatctgatctgtgattaaagcagtaatattttaagatggactgggaaaaacatcaactcctgaagttagaaataagaatggtttgtaaaatccacagctatatcctgatgctggatggtattaatcttgtgtagtcttcaactggttagtgtgaaatagttctgccacctctgacgcaccactgccaatgctgtacgtactgcatttgccccttgagccaggtggatgtttaccgtgtgttatataacttcctggctccttcactgaacatgcctagtccaacattttttcccagtgagtcacatcctgggatccagtgtataaatccaatatcatgtcttgtgcataattcttccaaaggatcttattttgtgaactatatcagtagtgtacattaccatataatgtaaaaagatctacatacaaacaatgcaaccaactatccaagtgttataccaactaaaacccccaataaaccttgaacagtgactactttggttaattcattatattaagatataaagtcataaagctgctagttattatattaatttggaaatattaggctattcttgggcaaccctgcaacgattttttctaacagggatattattgactaatagcagaggatgtaatagtcaactgagttgtattggtaccacttccattgtaagtcccaaagtattatatatttgataataatgctaatcataattggaaagtaacattctatatgtaaatgtaaaatttatttgccaactgaatataggcaatgatagtgtgtcactatagggaacacagatttttgagatcttgtcctctggaagctggtaacaattaaaaacaatcttaaggcagggtgcagtggctcatgcctataatcccagcactttgggaagcccaggtgggctgatcactggaggccaggaattggggaccagcctggccaacacaacaaaaccccatctgttaaaaaaacaaaacaaaaccaaaaaaaacaagtaaccttggtggatgtctactcaagttttctgcacatttttctgaaaatacaactgtgaccctta

SEQ ID NO: 63763 - DNA, 1310 bp, Artificial Sequence
  derived and/or modified sequence
gtgctgcagccgctgccgccgattccggatctcattgccacgcgcccccgacgaccgcccgacgtgcattcccgattccttttggttccaagtccaatatggcaactctaaaggatcagctgatttataatcttctaaaggaagaacagaccccccagaataagattacagttgttggggttggtgctgttggcatggcctgtgccatcagtatcttaatgaaggacttggcagatgaacttgctattgtctctggcaaagactataatgtaactgcaaactccaagctggtcattatcacggctggggcacgtcagcaagagggagaaagccgtcttaatttggtccagcgtaacgtgaacatctttaaattcatcattcctaatgttgtaaaatacagcccgaactgcaagttgcttattgtttcaaatccagtggatatcttgacctacgtggcttggaagataagtggttttcccaaaaaccgtgttattggaagcggttgcaatctggattcagcccgattccgttacctaatgggggaaaggctgggagttcacccattaagctgtcatgggtgggtccttggggaacatggagattccagtgtgcctgtatggagtggaatgaatgttgctggtgtctctctgaagactctgcacccagatttagggactgataaagataaggaacagtggaaagaggttcacaagcaggtggttgagagtgcttatgaggtgatcaaactcaaaggctacacatcctgggctattggactctctgtagcagatttggcagagagtataatgaagaatcttaggcgggtgcacccagtttccaccatgattaagggtctttacggaataaaggatgatgtcttccttagtgttccttgcattttgggacagaatggaatctcagaccttgtgaaggtgactctgacttctgaggaagaggcccgtttgaagaagagtgcagatacactttgggggatccaaaaggagctgcaattttaaagtcttctgatgtcatatcatttcactgtctaggctacaacaggattctaggtggaggttgtgcatgttgtcctttttatctgatctgtgattaaagcagtaatattttaagatggactgggaaaaacatcaactcctgaagttagaaataagaatggtttgtaaaatccacagctatatcctgatgctggatggtattaatcttgtgtagtcttcaactggttagtgtgaaatagttctgccacctctgacgcaccactgccaatgctgtacgtactgcatttgccccttgag

SEQ ID NO: 63764 - DNA, 732 bp, Artificial Sequence
  derived and/or modified sequence
gacgaccgcccgacgtgcattcccggtacggtagggccctgcgcgcacggcgccagagggatgggcgggtagagccaactgcctctggttctgctggcctccgctgctcgcgaagggattcctgctcccgggaggtgtaggagccgctttccagaagcacagcccagagacgtctgggcggcggcccacacaacgcatgtgttcggagctcgccgcgctctgcttttgctctaagcgggaaccatggcttctggccacgctggggaaccgaggagattccttttggttccaagtccaatatggcaactctaaaggatcagctgatttataatcttctaaaggaagaacagaccccccagaataagattacagttgttggggttggtgctgttggcatggcctgtgccatcagtatcttaatgaaggacttggcagatgaacttgctcttgttgatgtcatcgaagacaaattgaagggagagatgatggatctccaacatggcagccttttccttagaacaccaaagattgtctctggcaaagactataatgtaactgcaaactccaagctggtcattatcacggctggggcacgtcagcaagagggagaaagccgtcttaatttggtccagcgtaacgtgaacatctttaaattcatcattcctaatgttgtaaaatacagcccgaactgcaagttgcttattgtttcaaatccaggtgaggcttttgact

SEQ ID NO: 63765 - DNA, 682 bp, Artificial Sequence
  derived and/or modified sequence
gctggcctccgctgctcgcgaagggattcctgctcccgggaggtgtaggagccgctttccagaagcacagcccagagacgtctgggcggcggcccacacaacgcatgtgttcggagctcgccgcgctctgcttttgctctaagcgggaaccatggcttctggccacgctggggaaccgaggaggagccggagtagctcagagtgatcttgtctgaggaaaggccagccccacttggggttaataaaccgcgatgggtgaaccctcaggaggctatacttacacccaaacgtcgatattccttttccacgctaagattccttttggttccaagtccaatatggcaactctaaaggatcagctgatttataatcttctaaaggaagaacagaccccccagaataagattacagttgttggggttggtgctgttggcatggcctgtgccatcagtatcttaatgaaggacttggcagatgaacttgctcttgttgatgtcatcgaagacaaattgaagggagagatgatggatctccaacatggcagccttttccttagaacaccaaagattgtctctggcaaagactataatgtaactgcaaactccaagctggtcattatcacggctggggcacgtcagcaagagggagaaagccgtcttaatttggtccagcgtaacgtgaa

SEQ ID NO: 63766 - DNA, 465 bp, Artificial Sequence
  derived and/or modified sequence
gtgctgcagccgctgccgccgattccggatctcattgccacgcgcccccgacgaccgcccgacgtgcattcccggtgggctccgtgagggcagctgctgcctgcagattatagggagccctttgcgcatttattaagaagctactggtgtatctcgggctgcgctaggcacggcgcatgcaaagatgaagcaggcagcatcccagcccttccgcacctcagacgattccttttggttccaagtccaatatggcaactctaaaggatcagctgatttataatcttctaaaggaagaacagaccccccagaataagattacagttgttggggttggtgctgttggcatggcctgtgccatcagtatcttaatgaaggacttggcagatgaacttgctcttgttgatgtcatcgaagacaaattgaagggagagatgatggatctccaacatggcagccttttcctta

SEQ ID NO: 63767 - DNA, 2305 bp, Artificial Sequence
  derived and/or modified sequence
ttgggcggggcgtaaaagccgggcgttcggaggacccagcaattagtctgatttccgcccacctttccgagcgggaaggagagccacaaagcgcgcatgcgcgcggatcaccgcaggctcctgtgccttgggcttgagctttgtggcagttaatggcttttctgcacgtatctctggtgtttacttgagaagcctggctgtgtccttgctgtaggagccggagtagctcagagtgatcttgtctgaggaaaggccagccccacttggggttaataaaccgcgatgggtgaaccctcaggaggctatacttacacccaaacgtcgatattccttttccacgctaagattccttttggttccaagtccaatatggcaactctaaaggatcagctgatttataatcttctaaaggaagaacagaccccccagaataagattacagttgttggggttggtgctgttggcatggcctgtgccatcagtatcttaatgaaggacttggcagatgaacttgctcttgttgatgtcatcgaagacaaattgaagggagagatgatggatctccaacatggcagccttttccttagaacaccaaagattgtctctggcaaagactataatgtaactgcaaactccaagctggtcattatcacggctggggcacgtcagcaagagggagaaagccgtcttaatttggtccagcgtaacgtgaacatctttaaattcatcattcctaatgttgtaaaatacagcccgaactgcaagttgcttattgtttcaaatccagtggatatcttgacctacgtggcttggaagataagtggttttcccaaaaaccgtgttattggaagcggttgcaatctggattcagcccgattccgttacctaatgggggaaaggctgggagttcacccattaagctgtcatgggtgggtccttggggaacatggagattccagtgtgcctgtatggagtggaatgaatgttgctggtgtctctctgaagactctgcacccagatttagggactgataaagataaggaacagtggaaagaggttcacaagcaggtggttgagagtgcttatgaggtgatcaaactcaaaggctacacatcctgggctattggactctctgtagcagatttggcagagagtataatgaagaatcttaggcgggtgcacccagtttccaccatgattaagggtctttacggaataaaggatgatgtcttccttagtgttccttgcattttgggacagaatggaatctcagaccttgtgaaggtgactctgacttctgaggaagaggcccgtttgaagaagagtgcagatacactttgggggatccaaaaggagctgcaattttaaagtcttctgatgtcatatcatttcactgtctaggctacaacaggattctaggtggaggttgtgcatgttgtcctttttatctgatctgtgattaaagcagtaatattttaagatggactgggaaaaacatcaactcctgaagttagaaataagaatggtttgtaaaatccacagctatatcctgatgctggatggtattaatcttgtgtagtcttcaactggttagtgtgaaatagttctgccacctctgacgcaccactgccaatgctgtacgtactgcatttgccccttgagccaggtggatgtttaccgtgtgttatataacttcctggctccttcactgaacatgcctagtccaacattttttcccagtgagtcacatcctgggatccagtgtataaatccaatatcatgtcttgtgcataattcttccaaaggatcttattttgtgaactatatcagtagtgtacattaccatataatgtaaaaagatctacatacaaacaatgcaaccaactatccaagtgttataccaactaaaacccccaataaaccttgaacagtgactactttggttaattcattatattaagatataaagtcataaagctgctagttattatattaatttggaaatattaggctattcttgggcaaccctgcaacgattttttctaacagggatattattgactaatagcagaggatgtaatagtcaactgagttgtattggtaccacttccattgtaagtcccaaagtattatatatttgataataatgctaatcataattggaaagtaacattctatatgtaaatgtaaaatttatttgccaactgaatataggcaatgatagtgtgtcactatagggaacacagatttttgagatcttgtcctctggaagctggtaacaattaaaaacaatcttaaggcaggg

SEQ ID NO: 63768 - DNA, 1288 bp, Artificial Sequence
  derived and/or modified sequence
gaaccctcaggaggctatacttacacccaaacgtcgatattccttttccacgctaaggtatgggccttcactcttcacagaccctgtcattaggcctttcaactctcttttggcaaccattaggttttttcccctccctttttagtcatctctagtgatttatagtggcaaatacccccaaaggaagtaaaatagcttaaaaaaatctcttggttaataaacattaaagaagctgtagtgacactaaatgtttttcctcctatagattccttttggttccaagtccaatatggcaactctaaaggatcagctgatttataatcttctaaaggaagaacagaccccccagaataagattacagttgttggggttggtgctgttggcatggcctgtgccatcagtatcttaatgaaggacttggcagatgaacttgctcttgttgatgtcatcgaagacaaattgaagggagagatgatggatctccaacatggcagccttttccttagaacaccaaagattgtctctggcaaagactataatgtaactgcaaactccaagctggtcattatcacggctggggcacgtcagcaagagggagaaagccgtcttaatttggtccagcgtaacgtgaacatctttaaattcatcattcctaatgttgtaaaatacagcccgaactgcaagttgcttattgtttcaaatccagtggatatcttgacctacgtggcttggaagataagtggttttcccaaaaaccgtgttattggaagcggttgcaatctggattcagcccgattccgttacctaatgggggaaaggctgggagttcacccattaagctgtcatgggtgggtccttggggaacatggagattccagtgtgcctgtatggagtggaatgaatgttgctggtgtctctctgaagactctgcacccagatttagggactgataaagataaggaacagtggaaagaggttcacaagcaggtggttgagagtgcttatgaggtgatcaaactcaaaggctacacatcctgggctattggactctctgtagcagatttggcagagagtataatgaagaatcttaggcgggtgcacccagtttccaccatgattaagggtctttacggaataaaggatgatgtcttccttagtgttccttgcattttgggacagaatggaatctcagaccttgtgaaggtgactctgacttctgaggaagaggcccgtttgaagaagagtgcagatacactttgggggatccaaaaggagctgcaattttaa

SEQ ID NO: 63769 - DNA, 576 bp, Artificial Sequence
  derived and/or modified sequence
agagtgctgcagccgctgccgccgattccggatctcattgccacgcgcccccgacgaccgcccgacgtgcattcccggtacgattccttttggttccaagtccaatatggcaactctaaaggatcagctgatttataatcttctaaaggaagaacagaccccccagaataagattacagttgttggggttggtgctgttggcatggcctgtgccatcagtatcttaatgaaggacttggcagatgaacttgctcttgttgatgtcatcgaagacaaattgaagggagagatgatggatctccaacatggcagccttttccttagaacaccaaagattgtctctggcaaagactataatgtaactgcaaactccaagctggtcattatcacggctggggcacgtcagcaagagggagaaagccgtcttaatttggtccagcgtaacgtgaacatctttaaattcatcattcctaatgttgtaaaatacagcccgaactgcaagttgcttattgtttcaaatccagtggatatcttgacctacgtggcttggaagataagtggttttcccaaaaaccg

SEQ ID NO: 63770 - DNA, 1887 bp, Artificial Sequence
  derived and/or modified sequence
tccggatctcattgccacgcgcccccgacgaccgcccgacgtgcattcccgattccttttggttccaagtccaatatggcaactctaaaggatcagctgatttataatcttctaaaggaagaacagaccccccagaataagattacagttgttggggttggtgctgttggcatggcctgtgccatcagtatcttaatgaaggacttggcagatgaacttgctcttgttgatgtcatcgaagacaaattgaagggagagatgatggatctccaacatggcagccttttccttagaacaccaaagattgtctctggcaaagactataatgtaactgcaaactccaagctggtcattatcacggctggggcacgtcagcaagagggagaaagccgtcttaatttggtccagcgtaacgtgaacatctttaaattcatcattcctaatgttgtaaaatacagcccgaactgcaagttgcttattgtttcaaatccagtggatatcttgacctacgtggcttggaagataagtggttttcccaaaaaccgtgttattggaagcggttgcaatctggattcagcccgattccgttacctaatgggggaaaggctgggagttcacccattaagctgtcatgggtgggtccttggggaacatggagattccagtgtgcctgtatggagtggaatgaatgttgctggtgtctctctgaagactctgcacccagatttagggactgataaagataaggaacagtggaaagaggttcacaagcaggtggttgagagggtctttacggaataaaggatgatgtcttccttagtgttccttgcattttgggacagaatggaatctcagaccttgtgaaggtgactctgacttctgaggaagaggcccgtttgaagaagagtgcagatacactttgggggatccaaaaggagctgcaattttaaagtcttctgatgtcatatcatttcactgtctaggctacaacaggattctaggtggaggttgtgcatgttgtcctttttatctgatctgtgattaaagcagtaatattttaagatggactgggaaaaacatcaactcctgaagttagaaataagaatggtttgtaaaatccacagctatatcctgatgctggatggtattaatcttgtgtagtcttcaactggttagtgtgaaatagttctgccacctctgacgcaccactgccaatgctgtacgtactgcatttgccccttgagccaggtggatgtttaccgtgtgttatataacttcctggctccttcactgaacatgcctagtccaacattttttcccagtgagtcacatcctgggatccagtgtataaatccaatatcatgtcttgtgcataattcttccaaaggatcttattttgtgaactatatcagtagtgtacattaccatataatgtaaaaagatctacatacaaacaatgcaaccaactatccaagtgttataccaactaaaacccccaataaaccttgaacagtgactactttggttaattcattatattaagatataaagtcataaagctgctagttattatattaatttggaaatattaggctattcttgggcaaccctgcaacgattttttctaacagggatattattgactaatagcagaggatgtaatagtcaactgagttgtattggtaccacttccattgtaagtcccaaagtattatatatttgataataatgctaatcataattggaaagtaacattctatatgtaaatgtaaaatttatttgccaactgaatataggcaatgatagtgtgtcactatagggaacacagatttttgagatcttgtcctctggaagctggtaacaattaaaaacaatcttaaggcaggg

SEQ ID NO: 63771 - DNA, 1086 bp, Artificial Sequence
  derived and/or modified sequence
atgggcgagcccagcggcggctacacctacacccagaccagcatctttttgtttcatgcaaagatccccttcggttccaaatctaacatggccaccctaaaggaccagctcatctacaatctgctcaaagaggaacagacacctcagaacaagattacagttgttggggttggcgccgtgggaatggcctgtgccatctccattctcatgaaggatcttgccgacgaattagcactggtcgatgtgatcgaagacaagctcaagggagaaatgatggacctgcagcatggaagtctgttcctgcggacacccaagatcgtgagtggcaaggactacaacgtcacggctaacagtaagctcgttatcatcaccgccggggccaggcagcaggagggcgaatcaaggcttaatttggtccagaggaacgtgaacatcttcaagttcattatacctaacgttgtgaagtacagcccaaactgtaagctcttgatcgtatctaatccagtggatatcttaacatatgtcgcctggaagatctccggattcccaaaaaacagagttatcggatctggatgcaaccttgactcagccagatttaggtatctcatgggggaacgtttgggagtgcacccactcagctgccacggctgggtgctgggagaacatggggactcaagtgtgcccgtgtggagtggaatgaatgtagcgggtgtttctctgaaaaccctccatccagacctaggcactgacaaggacaaggaacagtggaaggaggtgcacaaacaggttgtagagtcagcctacgaagtcatcaagttgaagggctacacaagctgggctattggactttctgtggcagacctggctgaatctatcatgaaaaacctgagacgcgtgcacccagtgtccactatgatcaaaggactgtatggcatcaaggatgacgtctttcttagtgtaccatgtatcctaggacagaacggcatttctgatctggtgaaggtcacacttacgagcgaagaggaagctcgcctgaagaaaagtgctgacacattgtggggaatccagaaagagttgcagttttag

SEQ ID NO: 63772 - DNA, 1086 bp, Artificial Sequence
  derived and/or modified sequence
atgggcgagccgtctgggggttacacctatacccagaccagtatctttctgttccacgccaaaatcccattcgggtccaaatccaacatggcaacactgaaagaccagctaatctacaatctcctgaaagaagaacagacaccacagaacaaaattactgtggtcggcgtcggagccgtgggcatggcgtgtgccattagcatcctgatgaaagatctggcggacgagctggcacttgtcgacgtgatagaggacaaactgaagggcgaaatgatggatttacagcatggatctctttttttgaggacccctaaaatcgtgtcaggaaaagattataacgtcacggctaatagcaaactggtgattataacagccggtgcgagacagcaggagggggaaagtcggttgaacctcgtgcagcgtaacgtgaacatcttcaagtttattattcctaacgttgtgaagtattcccctaattgcaagctgctcattgtgtcaaatccggtggacattttgacgtacgtggcttggaagatcagcggtttcccgaagaatcgagtgattgggtccgggtgcaacttggatagtgccaggtttcgctacctgatgggagagcgcttgggagtccacccgctgagttgccatggctgggttcttggcgagcatggcgactcatctgtgcccgtctggtcaggcatgaacgtggcaggcgtgagtctcaagactctgcatccggacctcggaacggataaggataaagagcagtggaaggaggtgcataaacaggtagtagagtccgcatacgaggtgatcaagctgaagggttacacgtcctgggcgatcgggctgagcgtagcggacctcgctgaatcaatcatgaagaacttgcggagagtgcacccagtgagcacgatgattaagggattatacggaatcaaggacgatgtgttcctctccgtcccatgtattctcggtcagaatggcatttctgacctcgtcaaagtcaccttgacctcagaagaggaagcccgtctcaagaagtccgccgataccctgtggggtatacagaaggaactgcaattctag

SEQ ID NO: 63773 - protein, 274 aa, Artificial Sequence
  derived and/or modified sequence
MATLKDQLIYNLLKEEQTPQNKITVVGVGAVGMACAISILMKDLADELALVDVIEDKLKGEMMDLQHGSLFLRTPKIVSGKDYNVTANSKLVIITAGARQQEGESRLNLVQRNVNIFKFIIPNVVKYSPNCKLLIVSNPVDILTYVAWKISGFPKNRVIGSGCNLDSARFRYLMGERLGVHPLSCHGWVLGEHGDSSVPVWSGMNVAGVSLKTLHPDLGTDKDKEQWKECRYTLGDPKGAAILKSSDVISFHCLGYNRILGGGCACCPFYLICD

SEQ ID NO: 63774 - protein, 72 aa, Artificial Sequence
  derived and/or modified sequence
MATLKDQLIYNLLKEEQTPQNKITVVGVGAVGMACAISILMKDLADELALVDVIEDKLKGEMMDLQHGSLFL

SEQ ID NO: 63775 - protein, 14 aa, Artificial Sequence
  derived and/or modified sequence
GEMMDLQHGSLFLR

SEQ ID NO: 63776 - DNA, 825 bp, Artificial Sequence
  derived and/or modified sequence
atggccaccctgaaggaccagctgatctacaacctgctgaaggaggagcagaccccccagaacaagatcaccgtggtgggcgtgggcgccgtgggcatggcctgcgccatcagcatcctgatgaaggacctggccgacgagctggccctggtggacgtgatcgaggacaagctgaagggcgagatgatggacctgcagcacggcagcctgttcctgagaacccccaagatcgtgagcggcaaggactacaacgtgaccgccaacagcaagctggtgatcatcaccgccggcgccagacagcaggagggcgagagcagactgaacctggtgcagagaaacgtgaacatcttcaagttcatcatccccaacgtggtgaagtacagccccaactgcaagctgctgatcgtgagcaaccccgtggacatcctgacctacgtggcctggaagatcagcggcttccccaagaacagagtgatcggcagcggctgcaacctggacagcgccagattcagatacctgatgggcgagagactgggcgtgcaccccctgagctgccacggctgggtgctgggcgagcacggcgacagcagcgtgcccgtgtggagcggcatgaacgtggccggcgtgagcctgaagaccctgcaccccgacctgggcaccgacaaggacaaggagcagtggaaggagtgcagatacaccctgggcgaccccaagggcgccgccatcctgaagagcagcgacgtgatcagcttccactgcctgggctacaacagaatcctgggcggcggctgcgcctgctgccccttctacctgatctgcgactag

SEQ ID NO: 63777 - DNA, 825 bp, Artificial Sequence
  derived and/or modified sequence
atggcaactctgaaggatcagttgatttacaacctcctaaaagaggagcagacaccacaaaataagattaccgttgtgggagtcggagccgtaggaatggcctgcgctatttcaattctcatgaaagaccttgccgatgagctcgccctagtggacgtaatcgaggataagctcaagggtgaaatgatggatctgcagcatggttcactgtttctccgaacacccaaaatcgttagcggcaaggactataacgtcaccgccaactccaagctggtgatcatcaccgccggagcgcgtcagcaggaaggtgaaagccggctcaatttggttcagcgtaacgtcaacattttcaaatttattattccaaatgtggtaaagtattcaccaaattgcaagttgctaattgtcagcaaccccgtggatatcctgacctatgttgcctggaaaataagcggtttccctaagaacagagtgattggatcaggatgcaacttagactctgccaggttccggtatctgatgggggaaagactgggtgttcaccctttaagttgccatggctgggtgctcggagagcacggtgacagctccgtgcccgtgtggtctgggatgaacgtagccggggttagcctgaaaacactccatcctgacctgggaacagacaaagataaggaacaatggaaggaatgtagatacaccctgggcgaccccaaaggggccgctatattaaagtccagcgacgttataagttttcactgcctgggctataatagaatcctgggtggggggtgtgcgtgctgcccattttacttgatctgcgactag

SEQ ID NO: 63778 - DNA, 825 bp, Artificial Sequence
  derived and/or modified sequence
atggccaccctgaaggaccagctgatctacaacctgctgaaggaggagcagaccccccagaacaagatcaccgtggtgggcgtgggcgctgtgggcatggcctgtgccatcagcatcctgatgaaggacctggctgatgagctggccctggtggatgtgattgaggacaagctgaagggggagatgatggacctgcagcacggcagcctcttcctgcggacccccaagatcgtgtctgggaaggactacaacgtgacagccaacagcaagctggtgatcatcacagctggggcccggcagcaggagggggagagccggctgaacctggtgcagagaaatgtgaacatcttcaagttcatcatccccaacgtggtgaagtacagccccaactgcaagctgctgattgtgagcaaccctgtggacatcctgacctacgtggcctggaagatcagcggcttccccaagaacagagtgattggcagcggctgcaacctggacagcgcccgcttccgctacctgatgggagagcggctgggcgtgcaccccctgagctgccacggctgggtgctgggggagcacggggacagctctgtgcctgtgtggagcggcatgaatgtggccggcgtgtccctgaagaccctgcacccagacctgggcacagacaaggacaaggagcagtggaaggaatgtcgctacaccctgggggaccccaagggggccgccatcctgaagagcagtgatgtgatctccttccactgcctgggctacaaccgcatcctgggcggcggctgtgcctgctgccccttctacctgatctgtgactag

SEQ ID NO: 63779 - DNA, 1766 bp, Artificial Sequence
  derived and/or modified sequence
agtgctgcagccgctgccgccgattccggatctcattgccacgcgcccccgacgaccgcccgacgtgcattcccgattccttttggttccaagtccaatatggcaactctaaaggatcagctgatttataatcttctaaaggaagaacagaccccccagaataagattacagttgttggggttggtgctgttggcatggcctgtgccatcagtatcttaatgaaggacttggcagatgaacttgctcttgttgatgtcatcgaagacaaattgaagggagagatgatggatctccaacatggcagccttttccttagaacaccaaagattgtctctggcaaagactataatgtaactgcaaactccaagctggtcattatcacggctggggcacgtcagcaagagggagaaagccgtcttaatttggtccagcgtaacgtgaacatctttaaattcatcattcctaatgttgtaaaatacagcccgaactgcaagttgcttattgtttcaaatccagtggatatcttgacctacgtggcttggaagataagtggttttcccaaaaaccgtgttattggaagcggttgcaatctggattcagcccgattccgttacctaatgggggaaaggctgggagttcacccattaagctgtcatgggtgggtccttggggaacatggagattccagtgtgcctgtatggagtggaatgaatgttgctggtgtctctctgaagactctgcacccagatttagggactgataaagataaggaacagtggaaagagtgcagatacactttgggggatccaaaaggagctgcaattttaaagtcttctgatgtcatatcatttcactgtctaggctacaacaggattctaggtggaggttgtgcatgttgtcctttttatctgatctgtgattaaagcagtaatattttaagatggactgggaaaaacatcaactcctgaagttagaaataagaatggtttgtaaaatccacagctatatcctgatgctggatggtattaatcttgtgtagtcttcaactggttagtgtgaaatagttctgccacctctgacgcaccactgccaatgctgtacgtactgcatttgccccttgagccaggtggatgtttaccgtgtgttatataacttcctggctccttcactgaacatgcctagtccaacattttttcccagtgagtcacatcctgggatccagtgtataaatccaatatcatgtcttgtgcataattcttccaaaggatcttattttgtgaactatatcagtagtgtacattaccatataatgtaaaaagatctacatacaaacaatgcaaccaactatccaagtgttataccaactaaaacccccaataaaccttgaacagtgactactttggttaattcattatattaagatataaagtcataaagctgctagttattatattaatttggaaatattaggctattcttgggcaaccctgcaacgattttttctaacagggatattattgactaatagcagaggatgtaatagtcaactgagttgtattggtaccacttccattgtaagtcccaaagtattatatatttgataataatgctaatcataattggaaagtaacattctatatgtaaatgtaaaatttatttgccaactgaatataggcaatgatagtgtgtcactatagggaacacagatttttgagatcttgtcctctggaagctggtaacaattaaaaacaatcttaaggcaggg

SEQ ID NO: 63780 - DNA, 825 bp, Artificial Sequence
  derived and/or modified sequence
atggccaccctgaaggaccagctgatctacaacctgctgaaggaggaacagacaccacagaacaaaatcacagtggtgggggttggggcagtggggatggcatgcgccatctccatcttaatgaaagacttagccgacgagcttgccctggtagatgtaattgaggacaaattgaagggggaaatgatggaccttcagcacgggtccttgtttctgaggaccccgaagattgtgtcaggtaaagactacaatgtgacagcgaacagcaagttagtaatcataacagcaggcgcacgacagcaggaaggggagtcgcgactcaatttggttcagcggaatgtcaatatttttaaattcataatccccaatgtggtgaagtattcccctaactgtaaactgctgatcgtgagtaaccctgtggacatcttaacttacgtggcctggaagatttctggctttcccaagaatcgagtgataggctccgggtgcaacttggacagcgccagatttcggtaccttatgggtgagcggcttggggtgcaccccctgtcttgtcacgggtgggttttaggagagcacggcgactccagcgtcccagtctggtctggaatgaatgtggcgggcgttagtctcaaaaccctgcatccggatctggggacagacaaagacaaggaacagtggaaggagtgtcggtatactcttggagaccctaaaggggcagccatacttaagtcatctgatgtgattagttttcattgtctggggtacaacagaatcctggggggcggttgcgcctgttgccctttctatctcatctgcgattag

SEQ ID NO: 63781 - DNA, 825 bp, Artificial Sequence
  derived and/or modified sequence
atggcaacactgaaggaccagttgatttacaacctactaaaggaagagcagaccccacagaacaaaatcaccgtcgtgggagttggcgcagttggaatggcctgtgctatctcaattctgatgaaagacttggccgatgaattagcattggtggacgtcattgaagataagcttaagggcgagatgatggacctccaacacgggtcactattcctgcggactcctaaaatcgtaagcggaaaagactacaacgtgactgctaattctaaactggtgattattaccgcaggcgcaagacagcaagaaggcgaaagccgattgaatctcgttcagaggaatgtaaacatcttcaagtttataatcccaaatgtggtgaagtattctcccaactgcaaactgctgattgtgtcgaaccccgtggatattctcacttacgtagcctggaaaatcagcggatttccgaagaatcgagtgattggatcaggctgtaatctagactctgcccgttttaggtatctgatgggagagaggcttggagttcaccccctatcctgtcacgggtgggtcctgggtgagcatggggatagttcggtccccgtgtggtccggcatgaacgtggcaggcgtatccctaaagactcttcaccccgatcttggcactgataaggataaggaacaatggaaagagtgtagatacacactgggggaccctaaaggcgcagccatactgaagtcgtcagacgtgattagttttcactgtcttgggtataatcggattctggggggagggtgcgcctgctgcccattctatctaatttgtgattag

SEQ ID NO: 63782 - protein, 241 aa, Artificial Sequence
  derived and/or modified sequence
MATLKDQLIYNLLKEEQTPQNKITVVGVGAVGMACAISILMKDLADELALVDVIEDKLKGEMMDLQHGSLFLRTPKIVSGKDYNVTANSKLVIITAGARQQEGESRLNLVQRNVNIFKFIIPNVVKYSPNCKLLIVSNPVDILTYVAWKISGFPKNRVIGSGCNLDSARFRYLMGERLGVHPLSCHGWVLGEHGDSSVPVWSGMNVAGVSLKTLHPDLGTDKDKEQWKEVHKQVVERVFTE

SEQ ID NO: 63783 - DNA, 435 bp, Artificial Sequence
  derived and/or modified sequence
atggccaccctgaaggaccagctgatctacaacctgctgaaggaggagcagaccccccagaacaagatcaccgtggtgggcgtgggcgccgtgggcatggcctgcgccatcagcatcctgatgaaggacctggccgacgagctggccctggtggacgtgatcgaggacaagctgaagggcgagatgatggacctgcagcacggcagcctgttcctgagaacccccaagatcgtgagcggcaaggactacaacgtgaccgccaacagcaagctggtgatcatcaccgccggcgccagacagcaggagggcgagagcagactgaacctggtgcagagaaacgtgaacatcttcaagttcatcatccccaacgtggtgaagtacagccccaactgcaagctgctgatcgtgagcaaccccggcgaggccttcgactag

SEQ ID NO: 63784 - DNA, 345 bp, Artificial Sequence
  derived and/or modified sequence
atggccaccctgaaggaccagctgatctacaacctgctgaaggaggagcagaccccccagaacaagatcaccgtggtgggcgtgggcgccgtgggcatggcctgcgccatcagcatcctgatgaaggacctggccgacgagctggccctggtggacgtgatcgaggacaagctgaagggcgagatgatggacctgcagcacggcagcctgttcctgagaacccccaagatcgtgagcggcaaggactacaacgtgaccgccaacagcaagctggtgatcatcaccgccggcgccagacagcaggagggcgagagcagactgaacctggtgcagagaaacgtgtag

SEQ ID NO: 63785 - DNA, 219 bp, Artificial Sequence
  derived and/or modified sequence
atggccaccctgaaggaccagctgatctacaacctgctgaaggaggagcagaccccccagaacaagatcaccgtggtgggcgtgggcgccgtgggcatggcctgcgccatcagcatcctgatgaaggacctggccgacgagctggccctggtggacgtgatcgaggacaagctgaagggcgagatgatggacctgcagcacggcagcctgttcctgtag

SEQ ID NO: 63786 - DNA, 474 bp, Artificial Sequence
  derived and/or modified sequence
atggccaccctgaaggaccagctgatctacaacctgctgaaggaggagcagaccccccagaacaagatcaccgtggtgggcgtgggcgccgtgggcatggcctgcgccatcagcatcctgatgaaggacctggccgacgagctggccctggtggacgtgatcgaggacaagctgaagggcgagatgatggacctgcagcacggcagcctgttcctgagaacccccaagatcgtgagcggcaaggactacaacgtgaccgccaacagcaagctggtgatcatcaccgccggcgccagacagcaggagggcgagagcagactgaacctggtgcagagaaacgtgaacatcttcaagttcatcatccccaacgtggtgaagtacagccccaactgcaagctgctgatcgtgagcaaccccgtggacatcctgacctacgtggcctggaagatcagcggcttccccaagaacagatag

SEQ ID NO: 63787 - DNA, 726 bp, Artificial Sequence
  derived and/or modified sequence
atggccaccctgaaggaccagctgatctacaacctgctgaaggaggagcagaccccccagaacaagatcaccgtggtgggcgtgggcgccgtgggcatggcctgcgccatcagcatcctgatgaaggacctggccgacgagctggccctggtggacgtgatcgaggacaagctgaagggcgagatgatggacctgcagcacggcagcctgttcctgagaacccccaagatcgtgagcggcaaggactacaacgtgaccgccaacagcaagctggtgatcatcaccgccggcgccagacagcaggagggcgagagcagactgaacctggtgcagagaaacgtgaacatcttcaagttcatcatccccaacgtggtgaagtacagccccaactgcaagctgctgatcgtgagcaaccccgtggacatcctgacctacgtggcctggaagatcagcggcttccccaagaacagagtgatcggcagcggctgcaacctggacagcgccagattcagatacctgatgggcgagagactgggcgtgcaccccctgagctgccacggctgggtgctgggcgagcacggcgacagcagcgtgcccgtgtggagcggcatgaacgtggccggcgtgagcctgaagaccctgcaccccgacctgggcaccgacaaggacaaggagcagtggaaggaggtgcacaagcaggtggtggagagagtgttcaccgagtag

SEQ ID NO: 63788 - DNA, 435 bp, Artificial Sequence
  derived and/or modified sequence
atggccaccctcaaagaccagctgatctacaatttacttaaggaagagcaaaccccgcagaacaagattacggtcgtaggggttggcgcagtcggcatggcatgtgccatatccatccttatgaaggatctcgccgatgaactagccctcgtggatgtgatagaggataagttaaaaggggagatgatggatctgcaacatggcagcctgttcctacggaccccgaaaatagttagcggaaaagattacaatgtcaccgcgaactccaaattggtgattattaccgctggggcccggcagcaagaaggagagtcccgtttaaatctggttcagcggaacgtgaatatcttcaagtttatcatccccaatgtggttaagtactcacccaactgcaagctgcttatcgtgtctaacccaggcgaagccttcgattag

SEQ ID NO: 63789 - DNA, 345 bp, Artificial Sequence
  derived and/or modified sequence
atggcgacattgaaggatcagctcatatacaacttgttaaaggaagaacagactccccagaacaaaattacagtcgtaggggtcggcgccgtgggcatggcttgcgccattagtatcctcatgaaagaccttgctgacgagctggcccttgtggatgtcatcgaggataagttaaaaggagagatgatggacttacaacacggctctctgttcctcaggacccccaagattgtgtctgggaaggactataatgtgactgctaactcaaaacttgttatcattaccgcgggggctcgccagcaggagggagaatcaaggctaaatttggtccagagaaatgtatag

SEQ ID NO: 63790 - DNA, 219 bp, Artificial Sequence
  derived and/or modified sequence
atggccacgcttaaagatcagctcatctacaacctgctgaaggaggagcaaaccccccagaacaagattaccgtggtaggggtgggggctgtaggtatggcctgtgctattagcatcctgatgaaagacctagctgacgaactggccctggtagatgttatcgaagacaagctgaagggagaaatgatggacctgcagcacggctccctgtttctgtag

SEQ ID NO: 63791 - DNA, 474 bp, Artificial Sequence
  derived and/or modified sequence
atggctaccctgaaagaccagttgatttacaatctgcttaaggaagagcagactccccagaacaagataactgtggtcggagtaggggcggtcggaatggcctgtgccatctccatcctcatgaaggacctcgcagacgaactagctctggtcgacgtaattgaggataagctgaagggggagatgatggacctccaacacggttctctgttcctgcgcacccctaagatcgtgtcaggcaaggactataatgtcaccgccaattccaaacttgtgattattacagcaggcgcaaggcaacaggagggagaaagcagactcaacctggtccagcgcaatgtgaatatcttcaagttcatcattccaaatgttgttaagtattcgcctaactgtaagctgctaatcgttagcaaccccgtcgacattctcacatacgtggcctggaagatcagtggtttccctaagaaccgctag

SEQ ID NO: 63792 - DNA, 726 bp, Artificial Sequence
  derived and/or modified sequence
atggcaaccctgaaagaccaattgatttataacctcctcaaggaggaacaaacgccccagaataagatcactgttgttggcgtaggggctgtcggcatggcctgcgctattagtatcctcatgaaggacctggcagacgaactggccctcgttgacgttatcgaagataagctgaagggggagatgatggatctgcaacacggctctctgttcttgagaacacctaagattgtaagtggcaaagactacaacgtgaccgctaacagtaagctggttatcattactgcaggcgcacggcaacaagaaggcgaatctagactgaacctagttcaacgaaatgtgaacatcttcaagttcatcatccctaacgtggtaaagtacagtcccaactgtaaactgctaatagtgtccaatcctgttgacattctgacatatgtggcatggaaaatcagtggtttccccaagaatcgggtcatcggtagtggttgcaacctcgactcagcacgcttcagataccttatgggtgaaagacttggggtgcacccactgtcctgccacggatgggtgctgggagagcacggggatagctccgtccccgtatggagcggaatgaatgtggccggcgtctcgctcaagacccttcacccagatctgggtacagataaggataaggagcagtggaaagaagtgcacaaacaggttgtcgagcgcgtgtttacagaatag

SEQ ID NO: 63793 - DNA, 435 bp, Artificial Sequence
  derived and/or modified sequence
atggccaccctgaaggaccagctgatctacaacctgctgaaggaggagcagaccccccagaacaagatcaccgtggtgggcgtgggcgctgtgggcatggcctgtgccatcagcatcctgatgaaggacctggctgatgagctggccctggtggatgtgattgaggacaagctgaagggggagatgatggacctgcagcacggcagcctcttcctgcggacccccaagatcgtgtctgggaaggactacaacgtgacagccaacagcaagctggtgatcatcacagctggggcccggcagcaggagggggagagccggctgaacctggtgcagagaaatgtgaacatcttcaagttcatcatccccaacgtggtgaagtacagccccaactgcaagctgctgattgtgagcaaccctggagaggcctttgattag

SEQ ID NO: 63794 - DNA, 345 bp, Artificial Sequence
  derived and/or modified sequence
atggccaccctgaaggaccagctgatctacaacctgctgaaggaggagcagaccccccagaacaagatcaccgtggtgggcgtgggcgctgtgggcatggcctgtgccatcagcatcctgatgaaggacctggctgatgagctggccctggtggatgtgattgaggacaagctgaagggggagatgatggacctgcagcacggcagcctcttcctgcggacccccaagatcgtgtctgggaaggactacaacgtgacagccaacagcaagctggtgatcatcacagctggggcccggcagcaggagggggagagccggctgaacctggtgcagagaaatgtgtag

SEQ ID NO: 63795 - DNA, 219 bp, Artificial Sequence
  derived and/or modified sequence
atggccaccctgaaggaccagctgatctacaacctgctgaaggaggagcagaccccccagaacaagatcaccgtggtgggcgtgggcgctgtgggcatggcctgtgccatcagcatcctgatgaaggacctggctgatgagctggccctggtggatgtgattgaggacaagctgaagggggagatgatggacctgcagcacggcagcctcttcctgtag

SEQ ID NO: 63796 - DNA, 474 bp, Artificial Sequence
  derived and/or modified sequence
atggccaccctgaaggaccagctgatctacaacctgctgaaggaggagcagaccccccagaacaagatcaccgtggtgggcgtgggcgctgtgggcatggcctgtgccatcagcatcctgatgaaggacctggctgatgagctggccctggtggatgtgattgaggacaagctgaagggggagatgatggacctgcagcacggcagcctcttcctgcggacccccaagatcgtgtctgggaaggactacaacgtgacagccaacagcaagctggtgatcatcacagctggggcccggcagcaggagggggagagccggctgaacctggtgcagagaaatgtgaacatcttcaagttcatcatccccaacgtggtgaagtacagccccaactgcaagctgctgattgtgagcaaccctgtggacatcctgacctacgtggcctggaagatcagcggcttccccaagaacagatag

SEQ ID NO: 63797 - DNA, 726 bp, Artificial Sequence
  derived and/or modified sequence
atggccaccctgaaggaccagctgatctacaacctgctgaaggaggagcagaccccccagaacaagatcaccgtggtgggcgtgggcgctgtgggcatggcctgtgccatcagcatcctgatgaaggacctggctgatgagctggccctggtggatgtgattgaggacaagctgaagggggagatgatggacctgcagcacggcagcctcttcctgcggacccccaagatcgtgtctgggaaggactacaacgtgacagccaacagcaagctggtgatcatcacagctggggcccggcagcaggagggggagagccggctgaacctggtgcagagaaatgtgaacatcttcaagttcatcatccccaacgtggtgaagtacagccccaactgcaagctgctgattgtgagcaaccctgtggacatcctgacctacgtggcctggaagatcagcggcttccccaagaacagagtgattggcagcggctgcaacctggacagcgcccgcttccgctacctgatgggagagcggctgggcgtgcaccccctgagctgccacggctgggtgctgggggagcacggggacagctctgtgcctgtgtggagcggcatgaatgtggccggcgtgtccctgaagaccctgcacccagacctgggcacagacaaggacaaggagcagtggaaggaggtgcacaagcaggtggtggagagggtcttcacagaatag

SEQ ID NO: 63798 - DNA, 435 bp, Artificial Sequence
  derived and/or modified sequence
atggccaccctgaaggaccagctgatctacaacctgctgaaggaggagcagaccccgcagaataaaatcactgtggtcggggttggggcagtgggaatggcgtgtgctatttctatactcatgaaggacctcgcagatgaactagcattagttgatgtgattgaagacaaactgaagggtgagatgatggacctccagcatggcagcttgtttcttaggacaccgaagattgtttcagggaaagactacaacgtgacagctaacagtaagctggtaataattacagccggcgctaggcaacaggagggcgaatcgcgattgaacttagtccaacgaaacgtcaatatcttcaagttcattatacccaatgtggtgaagtactcccctaactgcaagctcttgattgtgagtaatcccggggaagccttcgactag

SEQ ID NO: 63799 - DNA, 345 bp, Artificial Sequence
  derived and/or modified sequence
atggccaccctgaaggaccagctgatctacaacctgctgaaggaggaacaaactccacagaataaaatcactgtagtcggggtcggtgctgtgggcatggcttgcgctatatccattctgatgaaggacttggcggacgagttggcattggtggacgtgatcgaggacaagctgaagggtgaaatgatggacctgcagcatggctccttgttccttagaacacctaaaatcgtttccggaaaggattacaatgttacagcaaatagcaaactcgtcatcatcacagctggtgctagacagcaagagggagagtcacgcctaaatctggtccagcggaacgtgtag

SEQ ID NO: 63800 - DNA, 219 bp, Artificial Sequence
  derived and/or modified sequence
atggccaccctgaaggaccagctgatctacaacctgctgaaggaggagcaaacaccccaaaacaagattactgtggtcggcgtgggcgccgtcggcatggcctgcgctatctccattttaatgaaagacctggctgatgaactagccctcgttgacgttattgaggacaaacttaagggtgagatgatggatcttcagcatggttccctctttctgtag

SEQ ID NO: 63801 - DNA, 474 bp, Artificial Sequence
  derived and/or modified sequence
atggccaccctgaaggaccagctgatctacaacctgctgaaggaggaacaaaccccccaaaataaaatcactgtggtcggagtgggggcggttgggatggcctgcgctattagcattcttatgaaagatttggcagatgagctcgcactcgtggatgtgattgaggataagctcaagggggaaatgatggacctccagcacggctctttgtttctcaggacaccaaagatagtatcaggcaaggattataatgtaactgctaatagtaagttagttataatcaccgccggggcccgacaacaggaaggcgagtctcgccttaatctggtgcagcgcaatgtgaacatctttaaattcatcatcccaaacgtggtgaagtactctcccaattgtaagctcctgattgtaagcaatcccgtggacatcctcacgtatgtggcatggaaaatttccggcttccctaaaaacaggtag

SEQ ID NO: 63802 - DNA, 726 bp, Artificial Sequence
  derived and/or modified sequence
atggccaccctgaaggaccagctgatctacaacctgctgaaggaggagcagactcctcaaaataaaataactgtcgtgggtgtgggggctgtcggaatggcctgtgcgattagcattcttatgaaagacttagcagatgagctggccctggtagatgtcatcgaagataaactcaagggggagatgatggacctgcaacacgggtctttgttcctgaggacaccgaagatagtatcaggcaaggactataacgtgaccgctaacagcaagctcgtgattattaccgcaggcgctcgtcaacaagaaggggagtcgcgccttaacttagtgcagagaaacgttaatatctttaagtttatcatccccaacgtagtgaagtacagccccaactgtaagctgttaatcgtaagcaacccagtagacatcctgacatatgtcgcatggaagatctctgggttcccgaagaacagagtaatcggaagtggatgtaaccttgattcagctcgatttaggtacctgatgggcgaacggctgggcgtacaccccctgtcttgccacgggtgggtgctaggcgaacacggtgatagctcagtcccagtgtggtccggcatgaacgtggctggggtaagccttaaaaccttgcaccccgatctcggaacagacaaagataaagaacagtggaaggaggttcacaaacaggtggtggaacgcgtctttacagaatag

SEQ ID NO: 63803 - DNA, 435 bp, Artificial Sequence
  derived and/or modified sequence
atggccaccctgaaggaccagcttatctataacctgctcaaagaagagcagaccccccaaaacaaaataactgtggtaggtgttggggctgtgggcatggcctgcgccatatcaatccttatgaaggaccttgcagatgagctggctttggttgacgtgatcgaggacaagctgaagggagagatgatggatctgcagcacggaagcctctttctgcgtacgcctaaaattgtttctggcaaggactataatgtgacggccaactcgaaactcgtcatcattacggccggagctaggcagcaggagggcgagagcagattaaacctggtgcaaagaaacgttaacatttttaaatttatcattcctaatgtcgtgaaatactccccaaactgcaagttattaattgtgtccaaccccggtgaggcgtttgactag

SEQ ID NO: 63804 - DNA, 345 bp, Artificial Sequence
  derived and/or modified sequence
atggccactctgaaggatcagcttatttataacctgctgaaagaggagcaaacgccccagaacaaaatcacagtggtcggggtgggagccgtgggtatggcgtgtgcaatttctatcctcatgaaagacctggcggatgaattagctctggtagatgtcatcgaggataagctcaaaggcgagatgatggatttacagcacggtagcctatttctgcgcacaccaaagattgttagcgggaaagattataacgtgaccgccaactctaagttggtcatcattaccgccggtgccaggcaacaagaaggtgaatcccgcctgaacttagtacagcgcaatgtgtag

SEQ ID NO: 63805 - DNA, 219 bp, Artificial Sequence
  derived and/or modified sequence
atggccaccctgaaagaccagttaatttataacctgcttaaggaggagcagacaccacagaataaaataactgtggtaggcgtgggtgcggtgggaatggcttgcgctataagcatattaatgaaggacctggccgacgagcttgccctcgtggatgtgatcgaggataagctgaaaggggaaatgatggacttgcagcatggttccctattcttgtag

SEQ ID NO: 63806 - DNA, 474 bp, Artificial Sequence
  derived and/or modified sequence
atggcaacccttaaggatcagctcatctataatcttctgaaggaagagcagactccccaaaataagattaccgtggtgggtgtgggagctgttgggatggcctgcgcgattagcattctcatgaaggatctcgctgacgaactagcactcgtggacgttatcgaagataagctcaagggtgagatgatggatctccaacatgggtcactatttctgcgtactcccaagatcgtgtccgggaaagattacaatgtcaccgcgaacagcaagttggttattatcactgcaggagccaggcagcaagaaggcgagtcaaggctcaatctcgtgcagcgcaacgtgaatatttttaagtttattataccaaatgtggtcaagtactctcctaattgtaaactgctgatcgtgagcaacccagtggacatactgacttacgtagcctggaagatctctggattccctaagaacagatag

SEQ ID NO: 63807 - DNA, 726 bp, Artificial Sequence
  derived and/or modified sequence
atggctacactgaaagatcaactcatatacaatctgctgaaggaggaacaaacgccacagaataagattactgttgttggagttggggctgtgggcatggcttgcgccatctctatactgatgaaggatctggccgatgagctggccctggtggacgttatcgaagacaagctgaaaggggagatgatggaccttcagcacgggtcactattcctgaggactcctaagattgtttctgggaaagactataacgtgaccgccaattccaagcttgtgatcattaccgctggcgcacgccagcaggagggagagagtcgccttaatctggtgcaaaggaacgtgaacatttttaaatttataattccaaacgtggtgaaatattcccccaattgtaaactactgatagtttcaaaccccgtcgacattctgacctatgtcgcatggaagatctccggatttccaaagaaccgcgtcattggttcgggttgtaacctggattcagctagattccggtaccttatgggagaaagacttggcgtgcatcctctttcttgccacggctgggtgctgggcgaacacggtgatagctcagtccctgtctggtccggtatgaatgttgccggagtctccctgaagacactccaccctgatctggggactgacaaggataaagaacagtggaaggaagttcataaacaggtggtggaacgggttttcacagagtag

SEQ ID NO: 63808 - protein, 947 aa, Artificial Sequence
  derived and/or modified sequence
MATRVRTASIWVPPLQERNSSWDRIRKLQGQESILGQGTPGLQPLPGTPRQKQKSRRIEKVLEWLFISQEQPKITKSWGPLSFMDVFVDFTWEEWQLLDPAQKCLYRSVMLENYSNLVSLGYQHTKPDIIFKLEQGEELCMVQAQVPNQTCPNTVWKIDDLMDWHQENKDKLGSTAKSFECTTFGKLCLLSTKYLSRQKPHKCGTHGKSLKYIDFTSDYARNNPNGFQVHGKSFFHSKHEQTVIGIKYCESIESGKTVNKKSQLMCQQMYMGEKPFGCSCCEKAFSSKSYLLVHQQTHAEEKPYGCNECGKDFSSKSYLIVHQRIHTGEKLHECSECRKTFSFHSQLVIHQRIHTGENPYECCECGKVFSRKDQLVSHQKTHSGQKPYVCNECGKAFGLKSQLIIHERIHTGEKPYECNECQKAFNTKSNLMVHQRTHTGEKPYVCSDCGKAFTFKSQLIVHQGIHTGVKPYGCIQCGKGFSLKSQLIVHQRSHTGMKPYVCNECGKAFRSKSYLIIHTRTHTGEKLHECNNCGKAFSFKSQLIIHQRIHTGENPYECHECGKAFSRKYQLISHQRTHAGEKPYECTDCGKAFGLKSQLIIHQRTHTGEKPFECSECQKAFNTKSNLIVHQRTHTGEKPYSCNECGKAFTFKSQLIVHKGVHTGVKPYGCSQCAKTFSLKSQLIVHQRSHTGVKPYGCSECGKAFRSKSYLIIHMRTHTGEKPHECRECGKSFSFNSQLIVHQRIHTGENPYECSECGKAFNRKDQLISHQRTHAGEKPYGCSECGKAFSSKSYLIIHMRTHSGEKPYECNECGKAFIWKSLLIVHERTHAGVNPYKCSQCEKSFSGKLRLLVHQRMHTREKPYECSECGKAFIRNSQLIVHQRTHSGEKPYGCNECGKTFSQKSILSAHQRTHTGEKPCKCTECGKAFCWKSQLIMHQRTHVDDKH

SEQ ID NO: 63809 - protein, 786 aa, Artificial Sequence
  derived and/or modified sequence
MDWHQENKDKLGSTAKSFECTTFGKLCLLSTKYLSRQKPHKCGTHGKSLKYIDFTSDYARNNPNGFQVHGKSFFHSKHEQTVIGIKYCESIESGKTVNKKSQLMCQQMYMGEKPFGCSCCEKAFSSKSYLLVHQQTHAEEKPYGCNECGKDFSSKSYLIVHQRIHTGEKLHECSECRKTFSFHSQLVIHQRIHTGENPYECCECGKVFSRKDQLVSHQKTHSGQKPYVCNECGKAFGLKSQLIIHERIHTGEKPYECNECQKAFNTKSNLMVHQRTHTGEKPYVCSDCGKAFTFKSQLIVHQGIHTGVKPYGCIQCGKGFSLKSQLIVHQRSHTGMKPYVCNECGKAFRSKSYLIIHTRTHTGEKLHECNNCGKAFSFKSQLIIHQRIHTGENPYECHECGKAFSRKYQLISHQRTHAGEKPYECTDCGKAFGLKSQLIIHQRTHTGEKPFECSECQKAFNTKSNLIVHQRTHTGEKPYSCNECGKAFTFKSQLIVHKGVHTGVKPYGCSQCAKTFSLKSQLIVHQRSHTGVKPYGCSECGKAFRSKSYLIIHMRTHTGEKPHECRECGKSFSFNSQLIVHQRIHTGENPYECSECGKAFNRKDQLISHQRTHAGEKPYGCSECGKAFSSKSYLIIHMRTHSGEKPYECNECGKAFIWKSLLIVHERTHAGVNPYKCSQCEKSFSGKLRLLVHQRMHTREKPYECSECGKAFIRNSQLIVHQRTHSGEKPYGCNECGKTFSQKSILSAHQRTHTGEKPCKCTECGKAFCWKSQLIMHQRTHVDDKH

SEQ ID NO: 63810 - protein, 730 aa, Artificial Sequence
  derived and/or modified sequence
MDWHQENKDKLGSTAKSFECTTFGKLCLLSTKYLSRQKPHKCGTHGKSLKYIDFTSDYARNNPNGFQVHGKSFFHSKHEQTVIGIKYCESIESGKTVNKKSQLMCQQMYMGEKPFGCSCCEKAFSSKSYLLVHQQTHAEEKPYGCNECGKDFSSKSYLIVHQRIHTGEKLHECSECRKTFSFHSQLVIHQRIHTGENPYECCECGKVFSRKDQLVSHQKTHSGQKPYVCNECGKAFGLKSQLIIHERIHTGEKPYECNECQKAFNTKSNLMVHQRTHTGEKPYVCSDCGKAFTFKSQLIVHQGIHTGVKPYGCIQCGKGFSLKSQLIVHQRSHTGMKPYVCNECGKAFRSKSYLIIHTRTHTGEKLHECNNCGKAFSFKSQLIIHQRIHTGENPYECHECGKAFSRKYQLISHQRTHAGEKPYECTDCGKAFGLKSQLIIHQRTHTGEKPFECSECQKAFNTKSNLIVHQRTHTGEKPYSCNECGKAFTFKSQLIVHKGVHTGVKPYGCSQCAKTFSLKSQLIVHQRSHTGVKPYGCSECGKAFRSKSYLIIHMRTHTGEKPHECRECGKSFSFNSQLIVHQRIHTGENPYECSECGKAFNRKDQLISHQRTHAGEKPYGCSECGKAFSSKSYLIIHMRTHSGEKPYECNECGKAFIWKSLLIVHERTHAGVNPYKCSQCEKSFSGKLRLLVHQRMHTREKPYECTECGKAFCWKSQLIMHQRTHVDDKH

SEQ ID NO: 63811 - DNA, 3826 bp, Artificial Sequence
  derived and/or modified sequence
ccggcgcgggagtaactcctcgcagaggcctctgggagttgtagtttttttgcctttgcctctccatgacgcaattcctgtgcgacatacgtagcggccgccattgttccgcgccgatggcgagatccttgttcctcagatagcgttcatcgcccgtcgtggtcaacgggccagccgagtctggagtggttgcgaacccttctggctgcagatctggaggtggaggcagtaccctggactctattctgctgccccttcagggtttggaggagccggagcatccctcgcgtcctgtcacttccagcgaggcacacaaaactgaccgtagggatggccaccagggtccggacagcttctatttgggtcccacctctccaagaacgaaacagttcatgggataggatcagaaagctccaaggtcaggaatccatcttgggccaagggactcctggtctgcaacctctccctggaacacccaggcagaagcagaagagtcgcagaatagagaaagtcctagagtggctgtttatttcccaagagcagccaaaaatcaccaagtcctggggacctttgtcattcatggatgtgtttgtggattttacctgggaggagtggcagctgctagacccagcacagaagtgcctgtacaggagtgtgatgttggagaactatagcaacctggtgtccctagggtaccaacacaccaaacctgatatcatcttcaagttggaacaaggagaagagctgtgtatggtgcaggcccaagttccaaatcagacctgtccaaacacagtctggaaaattgatgatcttatggattggcatcaggaaaataaagacaagctgggaagtacggcaaaaagctttgaatgcactacatttggaaaactatgtcttcttagtacaaagtatctttcaagacaaaaacctcataaatgtggcacgcatggaaagagtttgaaatatatagatttcactagtgattatgctagaaataatcctaatgggtttcaggtacatggaaaatcattcttccattctaaacatgagcaaactgttattggaataaaatactgtgaaagtattgaatctggaaaaaccgtcaataagaaatcgcaacttatgtgccaacaaatgtatatgggcgaaaaaccctttggatgcagctgttgtgagaaagccttcagcagcaagtcataccttctagtgcatcagcaaactcatgccgaagagaaaccctatggttgtaatgaatgtgggaaagacttcagtagtaaatcatacctcattgtacatcagagaattcatacaggagagaaactacatgaatgcagtgaatgcaggaaaacattcagtttccattcacagcttgttatacatcagagaattcacacaggtgagaatccctatgagtgctgtgaatgtgggaaagtcttcagtaggaaagaccagcttgtttcacaccagaaaactcattcaggacagaaaccatatgtgtgtaatgaatgtgggaaagcttttggtttaaaatcacagctcattatacatgaaagaattcatacaggagagaaaccatatgaatgcaatgaatgtcagaaagcctttaatacaaagtcaaaccttatggtacatcagagaacccatacaggggagaaaccttatgtttgtagtgattgtggaaaagcctttacattcaagtcacagctcattgtacatcaggggattcacacaggagtaaagccctatgggtgtattcagtgtggtaaaggattcagtttgaaatcacagctcattgtacatcagagaagtcacacaggaatgaaaccttatgtatgcaatgaatgtggcaaagccttcaggagcaagtcataccttattatacatacaaggactcatacaggagaaaaactccatgaatgcaacaattgtgggaaagccttcagttttaaatcacagctcattatacatcagaggattcatacaggagagaacccctatgaatgccatgaatgtgggaaagccttcagtcggaaataccagcttatttcacaccagagaactcatgcaggagagaagccttatgaatgcaccgactgtggaaaggcttttggtttaaagtcacagcttattatacaccagagaactcatacaggggagaaaccatttgaatgtagtgagtgtcagaaagcctttaatacaaagtcaaacctgattgtacatcagagaactcatacaggagagaaaccctatagttgtaatgaatgtggaaaagcctttacgttcaaatcacagctcattgtacataaaggagtgcacactggagtaaaaccctatggatgcagtcaatgtgcaaaaacctttagtttgaagtcccagctcattgtacatcagagaagtcacacaggagtaaaaccatatggatgcagtgagtgtgggaaagccttcaggagcaagtcataccttattatacatatgagaactcatacaggagagaaaccacatgagtgcagggaatgcgggaaatcctttagtttcaattcacaactcattgtgcatcagagaattcacacaggagaaaatccctatgaatgcagtgaatgtgggaaagcctttaataggaaagaccagctcatttcacatcagcgaactcatgcaggggaaaagccttatgggtgcagtgaatgtgggaaagcttttagcagcaagtcatacctaattatacacatgagaactcattcaggtgaaaaaccatatgaatgtaatgaatgtgggaaagccttcatttggaaatcactactcattgtacatgagcgaactcatgcaggggtcaacccttataaatgcagtcaatgtgagaaatccttcagtgggaaattacgccttcttgtacaccagagaatgcacacaagagagaaaccatatgaatgcagtgagtgtggaaaagccttcattaggaattctcaactcattgtacatcaaagaactcattcaggagagaaaccctatgggtgcaatgaatgtgggaaaaccttctctcaaaaatcaattctcagtgcacatcagagaacacatacaggagagaagccttgtaagtgcactgaatgtgggaaagccttttgttggaagtcacagctcattatgcatcagagaactcatgtagatgacaaacattgataattttacgaaactctgaaaagtggattcacaagagatagaaacaatcatatataaagagaaactctgtaagtggaatcatcttgtcatcttccagaaaactcatactgaatagaactttatgaatgcacagcatatggaaaggcatccacagaaagctgttctttacatgcaaaaagatagtagacaatacacaggaaaactgaatttagtaaccactctgaaaatttttagcagcaagtcatacctttttttaaaaagttcatacaggtgaggaaccatgttaaacgttgtaaagtcattttactaacataagattcacaaagaggaaacttcatgaaccagatgaatatagaatagacttctttgaaattcatagtttacagaattttaatgagagaaattattgagctaatgaatggcagaattaacaaaattacaaacattttatgtatcggaagcatataccttggagggaccatgctatgagggaaagtgtaaatctagaaatgagaaacccctagggaaaaaatatatataggagtgaacatcttatgaatgtaccaaataaaccacagctggactgttaacctcaccttagaagcttctttctaaaaaaaaaaaaaaaaaaaaaaaaaaaaaaaaaaaaaaa

SEQ ID NO: 63812 - DNA, 2361 bp, Artificial Sequence
  derived and/or modified sequence
atggactggcaccaggagaacaaggacaagctgggcagcaccgccaagagcttcgagtgcaccaccttcggcaagctgtgcctgctgagcaccaagtacctgagcagacagaagccccacaagtgcggcacccacggcaagagcctgaagtacatcgacttcaccagcgactacgccagaaacaaccccaacggcttccaggtgcacggcaagagcttcttccacagcaagcacgagcagaccgtgatcggcatcaagtactgcgagagcatcgagagcggcaagaccgtgaacaagaagagccagctgatgtgccagcagatgtacatgggcgagaagcccttcggctgcagctgctgcgagaaggccttcagcagcaagagctacctgctggtgcaccagcagacccacgccgaggagaagccctacggctgcaacgagtgcggcaaggacttcagcagcaagagctacctgatcgtgcaccagagaatccacaccggcgagaagctgcacgagtgcagcgagtgcagaaagaccttcagcttccacagccagctggtgatccaccagagaatccacaccggcgagaacccctacgagtgctgcgagtgcggcaaggtgttcagcagaaaggaccagctggtgagccaccagaagacccacagcggccagaagccctacgtgtgcaacgagtgcggcaaggccttcggcctgaagagccagctgatcatccacgagagaatccacaccggcgagaagccctacgagtgcaacgagtgccagaaggccttcaacaccaagagcaacctgatggtgcaccagagaacccacaccggcgagaagccctacgtgtgcagcgactgcggcaaggccttcaccttcaagagccagctgatcgtgcaccagggcatccacaccggcgtgaagccctacggctgcatccagtgcggcaagggcttcagcctgaagagccagctgatcgtgcaccagagaagccacaccggcatgaagccctacgtgtgcaacgagtgcggcaaggccttcagaagcaagagctacctgatcatccacaccagaacccacaccggcgagaagctgcacgagtgcaacaactgcggcaaggccttcagcttcaagagccagctgatcatccaccagagaatccacaccggcgagaacccctacgagtgccacgagtgcggcaaggccttcagcagaaagtaccagctgatcagccaccagagaacccacgccggcgagaagccctacgagtgcaccgactgcggcaaggccttcggcctgaagagccagctgatcatccaccagagaacccacaccggcgagaagcccttcgagtgcagcgagtgccagaaggccttcaacaccaagagcaacctgatcgtgcaccagagaacccacaccggcgagaagccctacagctgcaacgagtgcggcaaggccttcaccttcaagagccagctgatcgtgcacaagggcgtgcacaccggcgtgaagccctacggctgcagccagtgcgccaagaccttcagcctgaagagccagctgatcgtgcaccagagaagccacaccggcgtgaagccctacggctgcagcgagtgcggcaaggccttcagaagcaagagctacctgatcatccacatgagaacccacaccggcgagaagccccacgagtgcagagagtgcggcaagagcttcagcttcaacagccagctgatcgtgcaccagagaatccacaccggcgagaacccctacgagtgcagcgagtgcggcaaggccttcaacagaaaggaccagctgatcagccaccagagaacccacgccggcgagaagccctacggctgcagcgagtgcggcaaggccttcagcagcaagagctacctgatcatccacatgagaacccacagcggcgagaagccctacgagtgcaacgagtgcggcaaggccttcatctggaagagcctgctgatcgtgcacgagagaacccacgccggcgtgaacccctacaagtgcagccagtgcgagaagagcttcagcggcaagctgagactgctggtgcaccagagaatgcacaccagagagaagccctacgagtgcagcgagtgcggcaaggccttcatcagaaacagccagctgatcgtgcaccagagaacccacagcggcgagaagccctacggctgcaacgagtgcggcaagaccttcagccagaagagcatcctgagcgcccaccagagaacccacaccggcgagaagccctgcaagtgcaccgagtgcggcaaggccttctgctggaagagccagctgatcatgcaccagagaacccacgtggacgacaagcactag

SEQ ID NO: 63813 - DNA, 2193 bp, Artificial Sequence
  derived and/or modified sequence
atggactggcaccaggagaacaaggacaagctgggcagcaccgccaagagcttcgagtgcaccaccttcggcaagctgtgcctgctgagcaccaagtacctgagcagacagaagccccacaagtgcggcacccacggcaagagcctgaagtacatcgacttcaccagcgactacgccagaaacaaccccaacggcttccaggtgcacggcaagagcttcttccacagcaagcacgagcagaccgtgatcggcatcaagtactgcgagagcatcgagagcggcaagaccgtgaacaagaagagccagctgatgtgccagcagatgtacatgggcgagaagcccttcggctgcagctgctgcgagaaggccttcagcagcaagagctacctgctggtgcaccagcagacccacgccgaggagaagccctacggctgcaacgagtgcggcaaggacttcagcagcaagagctacctgatcgtgcaccagagaatccacaccggcgagaagctgcacgagtgcagcgagtgcagaaagaccttcagcttccacagccagctggtgatccaccagagaatccacaccggcgagaacccctacgagtgctgcgagtgcggcaaggtgttcagcagaaaggaccagctggtgagccaccagaagacccacagcggccagaagccctacgtgtgcaacgagtgcggcaaggccttcggcctgaagagccagctgatcatccacgagagaatccacaccggcgagaagccctacgagtgcaacgagtgccagaaggccttcaacaccaagagcaacctgatggtgcaccagagaacccacaccggcgagaagccctacgtgtgcagcgactgcggcaaggccttcaccttcaagagccagctgatcgtgcaccagggcatccacaccggcgtgaagccctacggctgcatccagtgcggcaagggcttcagcctgaagagccagctgatcgtgcaccagagaagccacaccggcatgaagccctacgtgtgcaacgagtgcggcaaggccttcagaagcaagagctacctgatcatccacaccagaacccacaccggcgagaagctgcacgagtgcaacaactgcggcaaggccttcagcttcaagagccagctgatcatccaccagagaatccacaccggcgagaacccctacgagtgccacgagtgcggcaaggccttcagcagaaagtaccagctgatcagccaccagagaacccacgccggcgagaagccctacgagtgcaccgactgcggcaaggccttcggcctgaagagccagctgatcatccaccagagaacccacaccggcgagaagcccttcgagtgcagcgagtgccagaaggccttcaacaccaagagcaacctgatcgtgcaccagagaacccacaccggcgagaagccctacagctgcaacgagtgcggcaaggccttcaccttcaagagccagctgatcgtgcacaagggcgtgcacaccggcgtgaagccctacggctgcagccagtgcgccaagaccttcagcctgaagagccagctgatcgtgcaccagagaagccacaccggcgtgaagccctacggctgcagcgagtgcggcaaggccttcagaagcaagagctacctgatcatccacatgagaacccacaccggcgagaagccccacgagtgcagagagtgcggcaagagcttcagcttcaacagccagctgatcgtgcaccagagaatccacaccggcgagaacccctacgagtgcagcgagtgcggcaaggccttcaacagaaaggaccagctgatcagccaccagagaacccacgccggcgagaagccctacggctgcagcgagtgcggcaaggccttcagcagcaagagctacctgatcatccacatgagaacccacagcggcgagaagccctacgagtgcaacgagtgcggcaaggccttcatctggaagagcctgctgatcgtgcacgagagaacccacgccggcgtgaacccctacaagtgcagccagtgcgagaagagcttcagcggcaagctgagactgctggtgcaccagagaatgcacaccagagagaagccctacgagtgcaccgagtgcggcaaggccttctgctggaagagccagctgatcatgcaccagagaacccacgtggacgacaagcactag

SEQ ID NO: 63814 - DNA, 2844 bp, Artificial Sequence
  derived and/or modified sequence
atggcgacccgagttcgaaccgctagcatctgggtccccccgctccaggaacgtaactcttcctgggacagaatccgtaaactgcagggacaggagagcattttgggtcagggtacgccaggcctgcagccactgcccggtacccccagacagaagcaaaagagccgaaggatcgaaaaagtgttggagtggcttttcatctcccaggaacaacccaagatcaccaagtcctggggacctctgagcttcatggatgtgttcgtggactttacatgggaagagtggcagctgttggaccccgcacaaaaatgtctgtaccggagcgtaatgcttgagaattattcgaatctggtgagcctaggttatcagcacaccaagccagatatcatctttaaattggagcagggggaggagctgtgcatggtgcaggcacaggtacccaaccagacctgccctaacaccgtttggaaaatcgatgatcttatggattggcatcaggaaaataaagataagctgggtagtacagccaaaagtttcgagtgcacaacttttggtaaattgtgcctcttatcaacaaagtaccttagtcgccagaagccccataagtgtggtacccatgggaagtcgctgaaatatatcgacttcaccagcgactatgcccggaacaaccccaatggctttcaggtacacgggaagagtttcttccacagcaagcatgagcagaccgtcatcggaatcaaatactgtgaatccattgagtccgggaagacagtgaacaaaaagagtcagctgatgtgtcagcagatgtacatgggagagaagccctttggctgttcttgttgtgagaaagccttctcatccaagagctacctgctggttcaccaacagacccacgccgaagaaaaaccttacggatgtaatgagtgtggaaaggatttctccagcaaatcatacctgatagtccaccaacgtattcacacgggggagaaactgcacgagtgctccgaatgcagaaaaacattttctttccacagccagctggtcatccaccaaagaatccacactggcgagaatccttacgaatgttgcgagtgtggcaaagtcttttctaggaaagatcaattagtgtcgcaccaaaaaactcactcgggccaaaaaccatatgtctgtaatgagtgtgggaaggcctttgggctcaagtcccagcttataattcatgaacgcatccacaccggggagaaaccgtatgagtgtaatgaatgccagaaggcattcaacactaaaagcaaccttatggttcaccagcgtacacacaccggggaaaaaccttatgtatgtagtgattgtggcaaggcgttcaccttcaagtcacaactgatagtccaccagggaatccataccggtgttaagccatacggttgtatccagtgtggcaaaggcttcagcctaaaatcgcagttaatcgtgcaccaacgctcccataccggcatgaaaccgtatgtctgcaatgaatgtggcaaagcctttcgcagcaaatcctatctgatcatccataccaggacacacacaggtgagaagcttcatgaatgcaataactgtggcaaggcattctcctttaagagtcagcttatcatacaccagagaatacacacgggcgagaacccctatgagtgccacgagtgcggaaaagcatttagtaggaagtaccagctgatctcccatcaacgcactcacgccggtgagaaaccttacgagtgcacagactgcggaaaagcctttggacttaagagccagctcattattcaccagagaacccacactggagagaaaccattcgagtgttcagaatgccagaaggcatttaacacgaaaagtaatcttattgtgcatcagaggacccataccggcgagaagccctatagctgtaatgagtgtggcaaagcatttacttttaagtcccagctgatcgtccataaaggggtacataccggagttaagccatacggctgctcacaatgtgctaagacattctccctgaagagtcagctgattgtacaccagagatcgcatactggagtcaaaccctacggctgcagcgagtgtggaaaggcgtttcgcagtaagtcatatcttattatccacatgcgtacgcataccggcgagaagcctcatgagtgccgggaatgtggcaaatctttctcctttaatagccaacttattgtgcatcaacgcatccatactggtgagaacccatacgagtgctctgaatgtggaaaagctttcaaccgaaaggaccagcttatcagccaccaaagaacccacgcaggagagaagccttacggatgcagtgaatgtggcaaagcattttctagtaagagctacttaatcatccacatgagaactcattctggggagaaaccttacgaatgcaatgaatgtggtaaggctttcatttggaaaagcttgctgattgtgcacgaacgcactcatgcaggcgtcaacccttataagtgctcgcagtgcgagaagtccttttcagggaagttgaggctgctcgtgcaccaacgcatgcacacaagagagaagccttatgaatgctcagagtgcggaaaagcatttattaggaacagccagttgatcgttcaccagcgcactcactcaggggaaaagccttacggttgcaatgagtgtggcaaaactttcagccagaaatctatcctctcggcccaccagagaacacacaccggggaaaagccatgcaaatgtactgagtgcggaaaagccttttgttggaagagccagctcattatgcatcagcgcacgcacgtggacgataaacattag

SEQ ID NO: 63815 - DNA, 2361 bp, Artificial Sequence
  derived and/or modified sequence
atggactggcaccaggaaaataaggacaaactgggatccacagctaagagcttcgagtgtacaactttcggtaaactgtgtctgctaagcacaaagtatttgagtcggcaaaagccccataaatgtgggactcacggcaaatcccttaaatatatcgactttactagcgattatgctagaaacaatccaaatggatttcaggttcatggaaaaagtttctttcattccaaacatgagcagaccgtaataggtatcaaatactgcgagtccatcgaatccggtaagaccgtcaataagaaatcacagctgatgtgccagcaaatgtatatgggggaaaaacccttcggttgctcctgctgtgagaaagcattctctagtaaatcttacctgctggtccatcagcagacacacgccgaggagaagccgtacgggtgtaatgaatgcggaaaagacttctcatccaaaagctacctaatcgtccatcagcgaattcatacgggggagaagctacatgagtgtagtgaatgcagaaaaaccttctctttccattcccagctcgtcattcaccaaaggatccataccggtgagaatccctacgaatgttgcgaatgtgggaaagtgttttcgaggaaggaccagctcgttagccatcagaaaacgcattcaggccagaaaccctatgtctgcaacgaatgcgggaaggccttcggcttgaaaagtcagctgataatacacgaacgaatccacacaggagagaagccttacgaatgtaacgagtgccaaaaggcattcaacactaagtcaaacctgatggtgcaccaaagaacccatacaggagaaaaaccttacgtctgttctgactgtggtaaagcttttaccttcaaatcgcaactgatcgtacaccagggaattcacactggcgtgaagccctatggctgcatacaatgcggaaagggattctctcttaagagccagctcatagtccatcagcgctcccatacaggcatgaaaccgtacgtctgtaacgagtgtgggaaagcattcaggtctaaatcatatttaataattcacaccagaacccacacaggtgaaaagctgcacgaatgcaataactgcgggaaggcctttagctttaagagccaactgattattcatcagcgcatacacactggcgagaacccttatgagtgtcacgagtgtggtaaggctttcagccgaaaataccagctgattagtcatcagaggacccatgccggggagaaaccctatgagtgtactgattgcgggaaggcgttcgggctgaagagccagcttattatacaccagagaactcataccggtgaaaagcctttcgaatgctcagaatgccagaaggcttttaatacgaaaagcaatttgatcgtgcaccaacggactcacacaggcgaaaagccttactcttgcaatgaatgcgggaaggccttcacctttaagtcgcagttgatcgtacacaagggtgtccatacaggggtgaagccttacggctgcagccagtgcgctaaaacattcagcctgaaatcacagctcatcgttcaccagcggtcccacaccggcgtgaagccctacgggtgctctgaatgcggaaaggccttcaggagcaaatcttatctcatcatccatatgaggactcacacaggagagaaaccacatgaatgccgggagtgtggaaaatcattttcctttaatagccagctgatagtgcaccagagaattcataccggggaaaatccctacgagtgcagcgagtgcgggaaggctttcaacagaaaggaccagctcatctcgcatcaacgtactcacgctggggagaaaccatacggatgttcggagtgcggtaaagctttctccagcaagagttatttaatcatccacatgcgcacccactctggcgagaagccctacgagtgcaatgagtgtggaaaagcatttatttggaaaagcttactcatcgtgcatgaaagaacccatgctggagtgaatccctataaatgtagccagtgtgagaaaagttttagcgggaaactgcggctgctagtgcatcaacggatgcacaccagggagaagccttacgaatgtagcgagtgtgggaaggctttcatacgcaacagccagttaattgtacatcagcggacccacagtggagagaaaccatacggttgcaacgaatgtgggaagaccttctcgcagaagtccatacttagcgcacaccaaaggacacataccggagaaaaaccatgtaagtgtacagagtgcggcaaggccttctgttggaagtcacagctgatcatgcatcagcggactcacgtggacgacaagcactag

SEQ ID NO: 63816 - DNA, 2844 bp, Artificial Sequence
  derived and/or modified sequence
atggctacaagagtgcgtactgcatcaatctgggtgcctcctttacaggagcgaaactccagttgggatcgcatcaggaaattgcaggggcaggagagtattctgggacagggtactccaggactgcagcccctgcctgggaccccccggcagaaacagaagtcccgtaggatcgaaaaagtgcttgaatggctgtttattagccaggagcaaccgaagatcaccaaatcgtggggaccactgtcgtttatggacgtcttcgtggattttacatgggaagagtggcagctcctggatcctgcccaaaagtgtctgtaccgaagcgtcatgctagaaaactactccaacctggtctctctcggataccagcatacgaagcccgatattatttttaagctcgagcagggcgaggaactctgtatggtccaagcccaagtccctaatcagacctgtccaaacaccgtatggaagatcgacgacttgatggactggcaccaggagaataaagataaactgggcagcaccgccaaaagctttgagtgtaccacttttggtaagctgtgcctgttatcgactaagtatctgtctcggcagaagccacacaagtgcggtactcacggaaagagtttgaaatatattgacttcacctctgattatgcccggaacaatccaaatgggttccaagtccatggtaaatcgttttttcacagtaaacatgagcaaaccgtgatcgggatcaaatactgtgagagcatcgaatccggcaaaaccgtgaataaaaagagccagctcatgtgtcagcagatgtacatgggtgaaaaaccttttgggtgctcttgttgtgagaaagcgtttagtagtaagtcttaccttctcgtgcatcagcagacacacgctgaagaaaagccatacggatgtaacgagtgcggtaaggactttagcagcaaaagctacctcattgtgcaccagcgtattcatactggcgaaaaactgcacgagtgctccgagtgtaggaagacattttccttccactctcagctggtgattcatcaaagaatacataccggtgaaaatccttacgaatgttgcgaatgtggaaaggtgtttagtcgaaaggatcagctggtttcccatcagaaaactcattccgggcaaaagccatacgtgtgcaatgaatgtggcaaggcctttgggctgaagtctcagctaatcatacacgaacgcatacatacaggagaaaagccatatgaatgtaatgagtgccagaaggcttttaacaccaaaagcaatctgatggtgcatcagaggacacacaccggtgagaagccttatgtgtgcagcgactgcggcaaggctttcacgttcaagtcccagctgattgtccatcagggaatacacactggagtgaaaccctatggatgcatccagtgtggtaaaggcttcagcctgaaatcccagctgatcgtacatcagaggagccacaccggaatgaagccgtacgtctgcaatgaatgcggcaaagccttcagatctaagagctaccttatcatacatacacggacccacacaggtgagaagctccatgaatgcaacaactgtggcaaggctttcagcttcaagtctcaacttattatccaccagcggattcacacaggcgagaatccgtatgaatgccacgaatgtggcaaagcattctcccgcaaatatcagttgatctcacatcaacgaacccatgctggagagaaaccctacgagtgtacagattgcggtaaggcctttgggcttaaatctcagctcatcatacaccagaggacccatacgggtgaaaagcccttcgagtgttcagaatgccagaaggcttttaacactaagtccaatttgattgtccatcaaaggacacatactggtgagaaaccctactcttgcaacgagtgcggaaaagcctttacattcaagtcgcagttaattgtccataagggcgtgcatacaggcgtaaaaccgtacggatgcagtcagtgcgccaagacgttcagcttaaagtcccaactgatcgttcatcagcgcagccacacaggcgtgaagccctacggctgcagcgagtgtggtaaggcattcaggagcaaaagctacctcattatccatatgcgcacccacaccggggagaaaccccatgaatgccgcgaatgcggaaaaagtttctcattcaatagccagttaatcgtccaccagcgcattcacaccggcgaaaatccttacgagtgtagtgagtgcggcaaggcttttaatagaaaggatcaactgatctcccatcagaggacccacgctggcgaaaaaccctatggatgttcggaatgtgggaaggctttctcttcaaaatcttacttgataatacatatgcggacccacagtggggagaaaccttatgaatgtaacgagtgtggcaaggccttcatctggaaatctctcctgatcgttcatgaacgtacccacgcaggcgtgaacccttacaaatgctctcaatgtgagaagagtttctctggaaagcttcgcctgctcgtgcaccagcggatgcacacacgcgaaaagccttacgaatgctctgaatgcggaaaggcgttcatccgtaattctcagttgatagtgcaccaacgcacccattccggggagaaaccctacggatgcaacgagtgtggaaaaaccttctcacagaaatctatcctgtccgcccatcagcggactcatactggcgagaagccttgtaagtgcaccgaatgtggtaaagccttctgctggaaatcacaactgatcatgcaccagcgcacccacgttgatgataagcactag

SEQ ID NO: 63817 - DNA, 2193 bp, Artificial Sequence
  derived and/or modified sequence
atggattggcatcaggaaaacaaagacaagctgggcagtaccgccaaaagcttcgagtgcaccaccttcgggaagctgtgtctgctgtctaccaagtacctatcccggcagaaacctcacaagtgcgggacacacggcaagtccctcaagtatattgacttcacttctgattatgccagaaacaatccaaacggatttcaagtgcacggtaagtccttttttcactcaaagcacgaacagacggtcatcggcataaaatactgcgagtccatcgaaagtgggaagacagtcaataagaagtcccaactcatgtgccagcagatgtacatgggcgagaagccttttggctgcagttgctgcgagaaggccttttcttctaaatcctatctgctggtccatcagcagacccacgccgaggaaaagccatacggttgcaacgagtgtggcaaggatttcagctccaagtcatatttaattgtgcaccaacgcattcacaccggggagaagctccatgaatgctcagagtgtcgaaagacgttcagctttcattcgcaattagtcatccatcagcgtatacacacaggggagaacccttatgagtgctgtgagtgcggcaaggtgttttctcgcaaggatcagcttgtgtcccatcagaaaacccactctgggcagaaaccttatgtttgtaatgaatgtggcaaggcctttggtctaaaatcacagcttatcattcatgagaggattcacaccggagaaaagccgtacgaatgcaacgagtgtcagaaggcctttaacacaaaatcaaacctcatggtacaccagagaactcacacgggagagaagccttacgtctgctcagactgtggcaaggcctttacattcaagagccagttaattgtccaccaggggattcatacgggtgtgaaaccctacggttgcatccagtgtgggaaggggttctcgctgaagtctcagctgattgttcaccagcgatcacacacaggtatgaagccgtacgtatgtaatgagtgtggtaaagcttttagaagcaagagttacttaataattcacactcgcactcacacaggggagaagctgcatgagtgcaacaactgtggaaaagctttctctttcaaatcccaacttattatccaccagaggattcacacaggagagaatccttatgagtgccacgagtgcgggaaggctttttctaggaagtaccagctgatctcccaccagcgaacacacgccggcgaaaagccatatgagtgcacagattgcggcaaggctttcgggctgaagtctcagctgatcattcaccaaaggacccataccggcgagaaacccttcgagtgcagtgagtgtcagaaagcttttaacaccaagtccaacctcattgtccatcagagaacacacactggagagaagccatactcatgcaacgagtgcgggaaggctttcaccttcaagagccagctaatcgtccataagggggtgcacactggcgttaaaccctacggatgtagccagtgcgcaaaaacattttctctgaagagccaactgatagtgcaccaacgttcccatacaggggtaaagccatacggctgttccgaatgtgggaaggcctttcgttcaaagtcatatctcatcatccatatgcggacacacacgggcgagaagccacacgagtgcagagagtgcggtaagagcttctctttcaactcacagcttattgtgcaccaacggattcataccggtgagaacccatatgaatgcagtgaatgtggcaaggccttcaacaggaaagaccagctgatttcgcatcagagaacacatgcaggtgagaaaccatatggctgcagcgagtgtggcaaggccttctcatccaaatcatacttgataattcatatgagaacacacagcggtgagaagccttacgagtgcaacgaatgtggcaaagcgttcatctggaagagtcttctgatcgttcacgagcggacgcatgcaggagtcaatccctacaaatgttcacaatgcgaaaaatctttttctggtaagctgagactcctcgtacatcagagaatgcatacaagagagaagccgtacgaatgtacagaatgtggaaaagctttctgctggaaatcccagctgattatgcaccagagaacacacgtcgacgataaacattag

SEQ ID NO: 63818 - DNA, 2844 bp, Artificial Sequence
  derived and/or modified sequence
atggccaccagggtgaggacagccagcatctgggtgccccccctgcaggagaggaacagctcctgggaccgcatcaggaagctgcagggccaggagagcatcctgggccagggcaccccaggcctgcagcccctgcccggcaccccccggcagaagcagaagagccgccgcatcgagaaggtgctggagtggctgttcatcagccaggagcagcccaagatcaccaagtcctggggccccctgtccttcatggatgtgtttgtggacttcacctgggaggagtggcagctgctggaccctgcccagaagtgcctgtacagatctgtgatgctggagaactacagcaacctggtgtccctgggctaccagcacaccaagccagacatcatcttcaagctggagcagggcgaggagctgtgcatggtgcaggcccaggtgcccaaccagacctgccccaacacagtgtggaagattgatgacctgatggactggcaccaggagaacaaggacaagctgggcagcacagccaagagctttgagtgcaccaccttcggcaagctgtgcctgctgagcaccaagtacctgagccggcagaagccccacaagtgtggcacccacggcaagagcctgaagtacatcgacttcaccagtgactatgccaggaacaaccccaacggcttccaggtgcacggcaagagcttcttccacagcaagcatgagcagaccgtcatcggcatcaagtactgtgagagcattgagagcggcaagacagtgaacaagaagagccagctgatgtgccagcagatgtacatgggagagaagcccttcggctgcagctgctgtgagaaggccttcagcagcaagagctacctgctggtgcaccagcagacccatgctgaggagaagccctacggctgcaatgaatgtgggaaggacttcagcagcaagagctacctgattgtgcaccagaggatccacactggagagaagctgcatgaatgttctgagtgcaggaagaccttctccttccacagccagctggtgatccaccagaggatccacactggagagaacccctatgagtgctgtgaatgtgggaaggtgttcagcaggaaggaccagctggtgagccaccagaagacccacagcggccagaagccctacgtgtgcaatgaatgtgggaaggccttcggcctgaagagccagctgatcatccacgagcgcatccacactggagagaagccctatgaatgtaatgaatgccagaaggccttcaacaccaagagcaacctgatggtgcaccagaggacccacactggagagaagccctacgtgtgcagcgactgtgggaaggccttcaccttcaagagccagctgattgtgcaccagggcatccacactggagtgaagccctacggctgcatccagtgtgggaagggcttcagcctgaagagccagctgattgtgcaccagaggagccacacaggcatgaagccctacgtgtgcaatgaatgtgggaaggccttccgcagcaagagctacctgatcatccacaccaggacccacactggagagaagctgcacgagtgcaacaactgtgggaaggccttctccttcaagagccagctgatcatccaccagaggatccacactggagagaacccctatgaatgtcatgaatgtgggaaggccttcagcaggaagtaccagctgatcagccaccagaggacccatgctggggagaagccctatgaatgtacagactgtgggaaggccttcggcctgaagagccagctgatcatccaccagaggacccacactggagagaagccctttgaatgttctgagtgccagaaggccttcaacaccaagagcaacctgattgtgcaccagaggacccacactggagagaagccctacagctgcaatgaatgtgggaaggccttcaccttcaagagccagctgattgtgcacaagggcgtgcacactggagtgaagccctacggctgcagccagtgtgccaagaccttcagcctgaagagccagctgattgtgcaccagaggagccacactggagtgaagccctacggctgcagtgaatgtgggaaggccttccgcagcaagagctacctgatcatccacatgaggacccacactggagagaagccccatgaatgtcgggagtgtgggaagagcttctccttcaacagccagctgattgtgcaccagaggatccacactggagagaacccctatgaatgttctgaatgtgggaaggccttcaacaggaaggaccagctgatcagccaccagaggacccatgctggggagaagccctacggctgcagtgaatgtgggaaggccttcagcagcaagagctacctgatcatccacatgaggacccacagcggggagaagccctatgaatgtaatgaatgtgggaaggccttcatctggaagagcctgctgattgtgcatgagaggacccatgctggggtgaacccctacaagtgcagccagtgtgagaagagcttcagcggcaagctgcggctgctggtgcaccagaggatgcacacccgggagaagccctatgaatgttctgaatgtgggaaggccttcatccggaacagccagctgattgtgcaccagaggacccacagcggggagaagccctacggctgcaatgaatgtgggaagaccttcagccagaagagcatcctgagcgcccaccagaggacccacactggagagaagccctgcaagtgcacagaatgtgggaaggccttctgctggaagagccagctgatcatgcaccagaggacccacgtggatgacaagcactag

SEQ ID NO: 63819 - DNA, 2361 bp, Artificial Sequence
  derived and/or modified sequence
atggactggcaccaggagaacaaggacaagctgggcagcacagccaagagctttgaatgtaccaccttcggcaagctgtgcctgctgagcaccaagtacctgagccggcagaagccccacaagtgtggcacccacggcaagagcctgaagtacatcgacttcaccagtgactatgccaggaacaaccccaacggcttccaggtgcacggcaagagcttcttccacagcaagcatgagcagacagtgattggcatcaagtactgtgagagcattgaaagtggcaagacagtgaacaagaagagccagctgatgtgccagcagatgtacatgggagagaagcccttcggctgcagctgctgtgagaaggccttcagcagcaagagctacctgctggtgcaccagcagacccacgccgaggagaagccctacggctgcaatgaatgtgggaaggacttcagcagcaagagctacctgattgtgcaccagaggatccacactggagagaagctgcacgagtgcagtgaatgtaggaagaccttctccttccacagccagctggtgatccaccagaggatccacactggagagaacccctatgagtgctgtgaatgtgggaaggtgttcagcaggaaggaccagctggtgagccaccagaagacccacagcggccagaagccctacgtgtgcaatgaatgtgggaaggccttcggcctgaagagccagctgatcatccacgagcgcatccacactggagagaagccctatgagtgcaatgaatgccagaaggccttcaacaccaagagcaacctgatggtgcaccagaggacccacactggagagaagccctacgtgtgcagcgactgtgggaaggccttcaccttcaagagccagctgattgtgcaccagggcatccacactggagtgaagccctacggctgcatccagtgtgggaagggcttcagcctgaagagccagctgattgtgcaccagaggagccacacaggcatgaagccctacgtgtgcaatgaatgtgggaaggccttccgcagcaagagctacctgatcatccacaccaggacccacactggagagaagctgcacgagtgcaacaactgtgggaaggccttctccttcaagagccagctgatcatccaccagaggatccacactggagagaacccctatgagtgccatgaatgtgggaaggccttcagcaggaagtaccagctgatcagccaccagaggacccacgccggggagaagccctatgagtgcacagactgtgggaaggccttcggcctgaagagccagctgatcatccaccagaggacccacactggagagaagccctttgagtgcagcgagtgccagaaggccttcaacaccaagagcaacctgattgtgcaccagaggacccacactggagagaagccctacagctgcaatgaatgtgggaaggccttcaccttcaagagccagctgattgtgcacaagggcgtgcacactggagtgaagccctacggctgcagccagtgtgccaagaccttcagcctgaagagccagctgattgtgcaccagaggagccacactggagtgaagccctacggctgcagtgaatgtgggaaggccttccgcagcaagagctacctgatcatccacatgaggacccacactggagagaagccccatgagtgcagagaatgtgggaagagcttctccttcaacagccagctgattgtgcaccagaggatccacactggagagaacccctatgagtgcagtgaatgtgggaaggccttcaacaggaaggaccagctgatcagccaccagaggacccacgccggggagaagccctacggctgcagtgaatgtgggaaggccttcagcagcaagagctacctgatcatccacatgaggacccacagcggggagaagccctatgagtgcaatgaatgtgggaaggccttcatctggaagagcctgctgattgtgcatgagaggacccacgccggcgtgaacccctacaagtgcagccagtgtgagaagagcttcagcggcaagctgcggctgctggtgcaccagaggatgcacacccgggagaagccctatgagtgcagtgaatgtgggaaggccttcatccggaacagccagctgattgtgcaccagaggacccacagcggggagaagccctacggctgcaatgaatgtgggaagaccttcagccagaagagcatcctgagcgcccaccagaggacccacactggagagaagccctgcaagtgcacagaatgtgggaaggccttctgctggaagagccagctgatcatgcaccagaggacccacgtggatgacaagcactag

SEQ ID NO: 63820 - DNA, 2193 bp, Artificial Sequence
  derived and/or modified sequence
atggactggcaccaggagaacaaggacaagctgggcagcacagccaagagctttgaatgtaccaccttcggcaagctgtgcctgctgagcaccaagtacctgagccggcagaagccccacaagtgtggcacccacggcaagagcctgaagtacatcgacttcaccagtgactatgccaggaacaaccccaacggcttccaggtgcacggcaagagcttcttccacagcaagcatgagcagacagtgattggcatcaagtactgtgagagcattgaaagtggcaagacagtgaacaagaagagccagctgatgtgccagcagatgtacatgggagagaagcccttcggctgcagctgctgtgagaaggccttcagcagcaagagctacctgctggtgcaccagcagacccacgccgaggagaagccctacggctgcaatgaatgtgggaaggacttcagcagcaagagctacctgattgtgcaccagaggatccacactggagagaagctgcacgagtgcagtgaatgtaggaagaccttctccttccacagccagctggtgatccaccagaggatccacactggagagaacccctatgagtgctgtgaatgtgggaaggtgttcagcaggaaggaccagctggtgagccaccagaagacccacagcggccagaagccctacgtgtgcaatgaatgtgggaaggccttcggcctgaagagccagctgatcatccacgagcgcatccacactggagagaagccctatgagtgcaatgaatgccagaaggccttcaacaccaagagcaacctgatggtgcaccagaggacccacactggagagaagccctacgtgtgcagcgactgtgggaaggccttcaccttcaagagccagctgattgtgcaccagggcatccacactggagtgaagccctacggctgcatccagtgtgggaagggcttcagcctgaagagccagctgattgtgcaccagaggagccacacaggcatgaagccctacgtgtgcaatgaatgtgggaaggccttccgcagcaagagctacctgatcatccacaccaggacccacactggagagaagctgcacgagtgcaacaactgtgggaaggccttctccttcaagagccagctgatcatccaccagaggatccacactggagagaacccctatgagtgccatgaatgtgggaaggccttcagcaggaagtaccagctgatcagccaccagaggacccacgccggggagaagccctatgagtgcacagactgtgggaaggccttcggcctgaagagccagctgatcatccaccagaggacccacactggagagaagccctttgagtgcagcgagtgccagaaggccttcaacaccaagagcaacctgattgtgcaccagaggacccacactggagagaagccctacagctgcaatgaatgtgggaaggccttcaccttcaagagccagctgattgtgcacaagggcgtgcacactggagtgaagccctacggctgcagccagtgtgccaagaccttcagcctgaagagccagctgattgtgcaccagaggagccacactggagtgaagccctacggctgcagtgaatgtgggaaggccttccgcagcaagagctacctgatcatccacatgaggacccacactggagagaagccccatgagtgcagagaatgtgggaagagcttctccttcaacagccagctgattgtgcaccagaggatccacactggagagaacccctatgagtgcagtgaatgtgggaaggccttcaacaggaaggaccagctgatcagccaccagaggacccacgccggggagaagccctacggctgcagtgaatgtgggaaggccttcagcagcaagagctacctgatcatccacatgaggacccacagcggggagaagccctatgagtgcaatgaatgtgggaaggccttcatctggaagagcctgctgattgtgcatgagaggacccacgccggcgtgaacccctacaagtgcagccagtgtgagaagagcttcagcggcaagctgcggctgctggtgcaccagaggatgcacacccgggagaagccctatgagtgcacagaatgtgggaaggccttctgctggaagagccagctgatcatgcaccagaggacccacgtggatgacaagcactag

SEQ ID NO: 63821 - DNA, 2844 bp, Artificial Sequence
  derived and/or modified sequence
atggccacccgggtgcggaccgccagcatctgggtgccccccctgcaggagaggaactcctcgtgggataggattaggaagttacaaggacaggagagcatcctgggtcagggcacgccaggcctgcaacctctccccggaacacccaggcaaaagcagaaatctcggaggatcgagaaggtactggagtggctatttattagtcaggagcagccgaaaattacaaaatcctggggccctctgtcatttatggacgtcttcgtggactttacctgggaagagtggcaactgctggatccagcacagaagtgtctgtatcgttcggttatgctcgagaactactctaacttggtgtcactaggttaccagcacacaaagcccgacataatctttaaactggaacaaggagaggagctatgtatggtgcaggcccaggtgccgaaccagacatgtccaaacactgtgtggaagatcgatgacctaatggactggcatcaggaaaacaaagacaagctggggagtactgctaaatctttcgagtgtacaaccttcgggaaactctgcctcctgagcaccaaatacctctctcgtcagaagccccacaagtgcggaacccatggcaaaagtctcaaatacatagatttcacttccgattacgccagaaataacccgaatggctttcaggtccacggaaaatctttttttcacagtaagcacgagcaaaccgtgattggcatcaaatactgcgagtcaatcgaaagcgggaagaccgtgaacaagaagtcacagcttatgtgtcagcagatgtatatgggagaaaaaccctttggctgttcatgttgcgaaaaagcatttagttccaagagctacttgctcgttcaccagcagacacacgccgaggagaaaccttacggctgtaatgagtgtggcaaagacttctctagtaaaagttatttgatcgttcatcaaaggattcacactggagagaagctccatgagtgctctgagtgccgcaaaactttcagctttcattcgcagctagtgatacaccagagaatccacacaggggaaaacccctacgagtgttgtgaatgtggtaaagtttttagccggaaagaccagttggtgtcccaccaaaaaacccacagcgggcagaagccctacgtgtgtaacgagtgtggaaaggccttcggcctaaagagtcagctgataattcatgagaggatacacactggggagaaaccttatgagtgcaacgagtgtcaaaaagcgtttaataccaagtctaacctgatggtgcaccagcgcacccatacaggcgaaaagccctacgtctgtagcgattgcggcaaggcttttacttttaagtctcagttgatcgtccatcaggggatacacaccggcgtgaagccgtatggctgcatccagtgtggaaaaggttttagcctcaagtctcaattaatcgtccaccagagatcacatacagggatgaaaccatacgtatgcaacgagtgtggcaaggcctttcggagtaagagctacttgatcatccatacccggacgcacactggcgagaaactgcacgaatgtaacaactgcgggaaggcatttagctttaaatctcagttaattatacaccagcgaatccataccggagagaatccgtacgagtgtcacgagtgcgggaaggccttctctaggaaatatcagttaatcagccatcagcgtactcacgcaggcgaaaagccttacgagtgtactgactgcggaaaggcttttggcttgaaaagtcagttgattatccaccagcgcacccataccggcgagaagcctttcgaatgtagcgaatgccaaaaggcttttaacacgaaaagtaacctcattgtccatcagcgtacacacactggcgaaaagccttactcgtgcaacgagtgtggcaaggctttcacattcaaaagccaactcatcgttcacaaaggggtgcacaccggtgttaaaccatacggatgcagccagtgtgccaaaactttctcacttaaatcacaactgattgtacaccaacgaagccatactggggtcaaaccctatggctgcagtgaatgtggcaaggcttttcgctctaaatcttacctgatcattcacatgcgcacacacacgggagaaaagccccatgagtgtcgggagtgcggtaagtcctttagcttcaattcgcaactgatcgtccatcaacgcattcacacgggcgaaaacccatacgaatgctccgagtgcggcaaggcgtttaaccgcaaagatcagctcatctcacatcagaggactcacgccggagagaaaccctacggctgctctgagtgcggcaaagcctttagctcaaagagctatctgatcattcatatgagaacccatagcggagagaaaccctatgagtgcaatgaatgtggcaaagcctttatttggaagtccctgctgattgtccacgagcgcacccacgccggagtaaatccctataagtgttcccagtgcgagaaatcattctcaggaaagctaaggctgctggtgcatcagaggatgcatacacgcgagaaaccgtatgaatgcagtgaatgcggcaaagctttcatccgaaattcccaactgatcgtccaccagcgtacacactcaggggaaaaaccttacggctgtaacgagtgcggaaagactttctcacaaaaaagtatactttcagcgcaccaacgcacacatacgggggagaagccctgtaagtgtactgaatgcggaaaggccttctgctggaagagccagttaattatgcaccaaagaacacacgtggatgacaaacattag

SEQ ID NO: 63822 - DNA, 2361 bp, Artificial Sequence
  derived and/or modified sequence
atggactggcaccaggagaacaaggacaagctgggcagcaccgccaaatccttcgaatgtacaacgtttgggaagctctgcttgctgagcacaaagtacctgtcccggcagaagccacataagtgcggaacacatggcaaatctttgaaatacatcgacttcacttcggattatgccagaaataaccccaatggcttccaggtgcatgggaaatccttctttcacagcaaacacgaacagactgtgattggcattaaatactgcgagtcaattgaatctggcaagaccgtgaataagaagtctcagttgatgtgccagcagatgtacatgggggagaagccttttggatgctcgtgctgcgagaaagctttctcatcaaagtcatacctcctagttcaccaacagacccacgcggaggaaaagccctatggatgtaatgaatgtgggaaagatttctcttctaaaagctatctgatagtgcaccagcggatccatacaggcgagaagctgcatgagtgttcggaatgccggaagacattctccttccactcccagctggttatccaccagaggatacacacgggcgaaaacccctatgagtgttgtgagtgcgggaaagtcttcagtcgcaaggaccagcttgtcagccaccagaaaacccactcaggccaaaaaccatacgtctgtaatgaatgtggcaaagcctttggcctcaagtcccaactcatcatccatgaacgtatccacacgggtgagaagccctatgagtgtaatgaatgccagaaggcttttaacactaaaagtaatctcatggtccaccaacgcacccacaccggcgaaaaaccatacgtctgctccgactgcggaaaggcgttcacattcaaaagccaattgatcgtgcaccagggcatccacacaggagtgaagccgtatggctgcattcagtgcggaaaggggttctctcttaaatctcagttgattgtgcaccaaagaagtcacacaggaatgaagccctatgtgtgtaacgagtgcgggaaagcattccgctccaaatcatatcttatcatccacacccgcacacacacaggagagaaattacatgagtgcaataattgtggcaaagctttttcattcaagtctcagctcataatacatcagaggatccacacgggagaaaatccatacgagtgtcacgagtgtggcaaggctttcagtagaaagtaccaattaattagccaccagagaacccacgcaggagaaaagccctatgaatgcacagattgcggcaaagccttcggtctcaagtcccaactcatcattcatcaaaggactcatacaggtgagaagccctttgagtgtagcgaatgtcagaaggctttcaatacaaaaagcaatttgatagttcaccagagaacccatactggggagaaaccatatagctgcaatgagtgcggcaaagctttcacgttcaagtctcagctgatcgtgcacaaaggggtgcataccggcgtcaaaccgtatggctgttcacagtgcgcaaagaccttttccctgaagagtcagcttattgtacatcagcggagccatacaggggtaaaaccatacggctgtagcgagtgcggtaaggctttccggtctaagtcatacttaattattcatatgcgcacgcacacaggcgaaaaaccccacgaatgccgcgaatgcggcaaatctttcagcttcaatagccagctcattgtgcatcagcggatacataccggggaaaacccttatgaatgctctgagtgtggtaaagcttttaaccggaaggaccaactgattagccaccagcgcactcatgcaggagagaaaccatatgggtgttccgaatgtggcaaggctttcagtagcaaatcttacctaatcattcacatgcggacacactctggcgaaaagccttatgaatgcaacgagtgcgggaaggcctttatttggaagagtttgctgattgtacacgaaagaacacacgccggcgtgaacccctataaatgttctcagtgcgagaagtctttctcaggcaaacttcggttactcgttcaccagagaatgcatactcgagaaaagccctatgaatgtagtgagtgcggaaaagcctttataaggaactcccagctgatcgtccatcagaggactcactcaggtgaaaagccttacggctgtaatgagtgcggcaaaacttttagtcaaaagagtatcctgagcgcacatcagcgtactcataccggcgaaaaaccatgcaaatgcacagagtgcgggaaggccttttgctggaaatcccaactgatcatgcatcagagaacacatgtggatgacaaacactag

SEQ ID NO: 63823 - DNA, 2844 bp, Artificial Sequence
  derived and/or modified sequence
atggccacccgggtgcggaccgccagcatctgggtgccccccctgcaggagcggaactcctcttgggatcgaatccgtaaactgcagggacaggaaagcatcttggggcagggcaccccaggattacagcctttgcctgggactccaaggcaaaagcagaagagcaggcgcatcgagaaggtactggaatggctgttcatcagtcaggaacaaccgaaaattacgaagagttggggaccccttagctttatggacgtcttcgtggatttcacttgggaggaatggcagcttcttgaccccgctcaaaagtgcttgtaccggtctgtcatgctcgaaaactattccaatctggtgagcctgggctatcagcatacaaagcctgatatcattttcaagctggagcaaggcgaagagctgtgcatggtccaggcccaggttcccaaccagacatgtcccaatacagtttggaagatcgacgatctaatggattggcaccaggaaaataaggacaaactgggatccacggccaagagttttgaatgcacaactttcggtaaattatgtctcctgagtaccaagtatttatctcggcagaaaccacataaatgtggcacacacggtaagtcactaaaatatatcgactttaccagcgactatgccaggaacaaccccaacggcttccaggtgcacggcaaatcattctttcactcaaaacatgagcagacagtaatcgggatcaagtactgcgagagcatcgaatcaggcaaaaccgtgaacaaaaagtcccagctgatgtgccagcagatgtatatgggagagaagccattcggctgctcttgctgtgaaaaggcattttcctccaaaagttatttgctagtacaccagcagacccacgcagaagagaaaccatacgggtgcaacgaatgcggcaaggattttagcagcaaaagctacctgattgtccaccagcggatacacaccggcgaaaagctccatgagtgttcagaatgccgcaaaacttttagcttccattctcagctggtgattcatcagcgaatacacacaggcgaaaacccttatgagtgttgtgagtgcggcaaggttttctctagaaaggaccagctggtgtcacatcagaagacacattctggccagaaaccttacgtatgcaatgaatgtggcaaagctttcggactgaagtcacagttgattatccacgagcgaattcatactggtgagaagccatatgagtgtaacgaatgccagaaagcttttaatacaaagtcaaacctgatggtgcaccagaggacacatactggcgagaagccatatgtttgttcggactgtggaaaagctttcacattcaagtctcagctcatcgtacatcagggtattcacactggcgtgaagccttatgggtgtatccagtgtgggaagggcttctccttgaaatcccagctcatcgtccaccaacggtcccacacgggcatgaaaccctacgtgtgtaacgagtgtggcaaggctttccgctcaaagtcctacctcatcatccacacgagaacgcacaccggcgaaaagctacacgagtgtaataactgcggcaaggcctttagctttaaatcgcagctgattatccatcagcggatccacacgggcgagaacccgtatgagtgtcatgaatgtgggaaagctttttcccgaaagtatcagctcatctcacatcagagaactcacgccggagagaaaccttatgaatgcacggactgcggaaaagcatttggactaaaatcacagttgattatccatcaaagaacacacacaggagagaagccctttgaatgttctgaatgccagaaagcctttaatactaaaagtaaccttattgtccaccagaggactcacactggagaaaagccatactcatgtaacgagtgtggcaaagcgtttacattcaagtcgcaattaatcgtgcacaaaggagtgcataccggcgtgaagccctacggctgttctcagtgcgccaaaacattttcactgaagtcccaactcatcgtgcaccagagatcacacacaggcgtgaaaccctatgggtgcagcgagtgtgggaaggcctttcgcagcaaaagctacttgataatccatatgcggacccacactggcgaaaagcctcacgagtgtagggaatgcggaaaatcgttctcctttaactcgcaactcatcgttcaccaacgtatacataccggagagaacccgtacgaatgttccgagtgtggcaaggctttcaaccggaaggatcagctgatttcccaccagagaacccatgcaggagaaaaaccctacgggtgctctgagtgtggaaaagcattttcgagcaaaagttatctgatcatacatatgaggacccatagcggagagaagccctacgaatgcaatgagtgcgggaaagccttcatttggaagagcttgttgattgtccacgaacgcacccatgctggcgtgaatccgtacaaatgctcacagtgtgagaagtcctttagtggcaagctcaggctgctggtccatcaacggatgcatactcgagaaaaaccttatgagtgctctgaatgcggcaaggctttcattagaaactcccaactgatcgtgcatcagcgaacgcacagtggtgaaaaaccatacgggtgtaatgagtgtggcaaaaccttcagtcagaagtctatcctgtcagcccaccagcggacacacacgggggaaaagccttgcaaatgcactgaatgcggcaaggcattctgctggaaatctcagctgattatgcaccaacggacacacgtagacgataagcactag

SEQ ID NO: 63824 - DNA, 2193 bp, Artificial Sequence
  derived and/or modified sequence
atggactggcaccaggagaacaaggacaagctgggcagcaccgccaaatcatttgagtgcacaacttttggcaagctgtgtcttctaagcacaaaatatctctcccgccagaagccacataagtgtggaactcatggtaagagtctaaaatatatcgattttacctctgactacgcccggaacaatcctaatgggtttcaggttcatgggaaaagctttttccacagcaagcatgaacaaaccgtcataggaattaagtactgcgagagcattgagtctgggaaaactgtcaataagaagtctcaactgatgtgccagcagatgtatatgggtgaaaagccatttggatgctcatgctgtgaaaaggctttctcgagcaaaagttatctgttggtgcatcagcagacccatgccgaagagaagccctacggctgcaacgagtgcggaaaggatttctctagcaagtcttatcttatcgttcaccagcgcattcacaccggtgagaagctgcacgagtgcagcgaatgtcgtaaaactttctcattccatagccagctggtgattcaccaacggatacatactggtgagaacccatacgagtgctgcgaatgcggtaaagtgttttcccggaaggatcagctcgtatctcaccagaagacacattctgggcaaaagccttacgtttgcaatgagtgcggaaaagcattcggtcttaagtcccagttaattatacatgaacgcatccacacgggtgaaaaaccctacgaatgtaacgagtgccagaaggccttcaacaccaaaagtaacctgatggtgcaccagcgcacccatactggtgaaaaaccttacgtgtgcagtgactgtggaaaggccttcacttttaagtctcagctgatcgtgcaccaaggaattcatacaggcgtgaagccttacggttgtattcagtgcggtaagggattctcactgaaatcccagctgatcgttcaccagaggtcccacacaggtatgaaaccctacgtctgcaatgagtgtggtaaggcattcagatctaagtcctatcttatcattcatactaggacccatactggcgaaaaattgcatgaatgcaacaattgtggaaaggccttctcattcaagtcacaactcatcatccaccagcgcatccatacaggggagaatccctacgaatgtcatgagtgcgggaaagctttctccagaaagtatcagttgatctcacatcagcgcacgcatgcgggtgaaaagccctatgagtgtacagactgcggaaaggccttcggcctgaagagccagcttatcatccaccaaagaacacacacgggggagaaaccattcgagtgctcagagtgtcagaaggcctttaacacgaaaagtaatctcattgtgcaccagcggactcacactggcgagaagccctacagttgcaacgagtgcgggaaggccttcaccttcaagtcacagctaatcgtgcacaaaggcgtgcacacaggcgtgaaaccatacgggtgcagccagtgtgcaaaaaccttttccctcaaatctcagctgatagtacatcaacggtcccatactggggtcaaaccttatggctgcagtgagtgtggcaaggccttccgcagtaagtcatacctcataatacatatgcggacccacactggcgagaaaccgcatgaatgcagggaatgtggcaagagctttagttttaactctcagctgatcgtccaccaacggatccataccggcgaaaacccatacgagtgcagcgaatgcggcaaagcttttaatcgtaaggatcagcttattagtcaccagcgaacgcacgctggcgaaaagccatatggatgttcagagtgcgggaaggctttcagcagcaaaagctacctgattattcacatgcggacgcactccggggagaagccatacgagtgcaatgagtgcggcaaggcatttatctggaagtcactgctgattgtacacgaacgaacacacgctggcgtcaatccctacaagtgcagccaatgtgagaagtccttcagcgggaaactgaggctgcttgtacatcagcgaatgcatacacgtgagaaaccttacgaatgtacagaatgcgggaaagctttctgctggaagtcacaactgatcatgcaccagcgcacccatgtcgatgacaagcactag

SEQ ID NO: 63825 - DNA, 2844 bp, Artificial Sequence
  derived and/or modified sequence
atggccacaagggtgaggactgccagtatctgggtacctcccctgcaggagcggaactcatcatgggatcgcatacgtaagttacaagggcaagaatccatcctgggtcaggggaccccaggattgcaacctctacctggcactccacgccagaaacaaaaaagcaggcgcattgagaaggtcctggagtggctcttcattagccaggaacaacccaaaataaccaagtcttggggtcctcttagctttatggatgtgttcgtcgactttacatgggaagagtggcagctcctcgacccagcccaaaagtgtctgtacagatctgtgatgctcgaaaattattctaacctcgtcagtctgggttatcagcacaccaagccagacataatcttcaagctggaacaaggagaagagctttgcatggtacaggcgcaggtgcctaaccagacctgccccaacaccgtctggaaaattgacgacctgatggattggcatcaagagaataaagataagctcggtagcacggccaagtcctttgagtgtactacttttggaaaactctgcctcctcagcacgaagtatttgtcacggcaaaaacctcacaagtgtggaactcacggcaagagtctaaaatacatagatttcaccagcgactatgctcgaaataaccccaacggttttcaggtgcacggtaaatccttctttcacagtaaacatgagcagacggtgataggtattaaatattgtgagtcgatcgagtccggaaagacagtcaacaaaaagagtcagctaatgtgtcagcagatgtatatgggggagaagccctttggttgctcctgttgcgaaaaagccttttcaagcaaatcttatctcctggtccatcaacagacccatgccgaagagaaaccctacggctgtaacgagtgtggaaaagatttcagcagtaagtcatacctgatagtacatcagcgcattcacacaggggaaaagctgcacgaatgcagtgaatgtcggaagactttcagcttccacagtcagttggttattcaccagcggattcacaccggagaaaacccttatgagtgctgcgaatgtggcaaggtgttcagtcgtaaggatcagttggtctctcatcaaaaaacccacagcggccaaaagccctatgtatgcaatgaatgcggcaaagcgtttggcttgaagagccaattgatcattcacgagcggatccacactggcgagaagccgtacgaatgtaatgagtgtcagaaagcattcaacactaaatccaatctgatggtgcatcaaagaacacatacaggggagaaaccttacgtgtgctccgactgcggtaaagctttcacctttaaatctcaattaattgttcatcaaggcatccacaccggggtgaagccatatggatgtatacagtgcggtaagggtttctctctgaaatctcaactcatcgtccaccaacgctcccatactggcatgaaaccctacgtctgtaacgagtgcggcaaggcctttagatctaaatcctatttaattattcacacaaggacacacactggcgagaagctgcacgaatgtaataattgcgggaaggccttctcgttcaaatcccaattgataatccatcagaggatccatactggtgagaacccctacgaatgtcacgaatgtggcaaagccttttcgagaaaataccaattaatttctcaccaaaggactcatgcaggcgagaagccatatgagtgcaccgactgtgggaaagcgtttggtctgaaaagtcagctcattatacaccagagaacacacacaggcgaaaagccatttgagtgctccgaatgtcagaaagcttttaacaccaaatccaatttaatcgtgcatcagagaacgcacaccggagaaaagccttacagctgtaacgaatgtggcaaagccttcactttcaagtcccaactgatcgtgcataaaggtgtgcataccggagtgaagccttatggttgttcacaatgcgccaaaacttttagtctgaaatctcagctgattgtgcaccaacgatcacacactggagtaaagccctatggatgcagcgaatgtggcaaggcattcagatccaagagctatctgattatccatatgcgcactcacactggcgagaagcctcacgagtgcagagagtgcggcaaatcattcagttttaacagtcagttgatcgttcaccagaggattcataccggtgagaacccgtacgagtgcagcgaatgcggaaaagcattcaatcgaaaggatcaattgatctcacatcagcgaacccatgctggagagaagccatatggatgcagtgagtgtgggaaggcatttagttcaaaatcctatttgataatccacatgagaacacactcaggagagaagccgtatgaatgtaacgaatgtggtaaggcgtttatctggaagagcttgttgatcgtccacgagaggactcacgcaggcgtcaatccttacaaatgtagtcaatgcgagaagtccttctccggcaagttgaggctgcttgttcaccaacgcatgcatactcgcgagaaaccatacgagtgttcggaatgcggaaaagctttcatcagaaattcccagctgatcgtgcatcagaggacccattctggtgagaagccatacgggtgtaacgaatgtggcaagactttcagccagaaaagcatcctgtccgcccaccagcggacacatactggagagaagccctgcaagtgcaccgagtgcggcaaggccttctgctggaagagtcagctgatcatgcaccaaaggactcacgtggatgataagcattag

SEQ ID NO: 63826 - DNA, 2361 bp, Artificial Sequence
  derived and/or modified sequence
atggattggcatcaggagaataaggataaacttggctccacggctaagtcgttcgaatgcacaacgttcggcaagctgtgcctgctgtccaccaagtacctgagccgtcagaagccacataagtgcggcacccatggcaagtccctaaagtatattgactttacctcagattacgccagaaataacccaaacggctttcaagtgcatggtaagtctttttttcactccaagcatgaacagacagttatcgggatcaagtactgtgaaagcatcgagagtggcaagactgtgaacaaaaagagccagctcatgtgccagcaaatgtacatgggcgagaagccatttgggtgctcatgctgcgaaaaggctttctcctcaaagtcctacctactcgtccatcagcagacacacgccgaggagaagccctacgggtgcaatgaatgtggtaaagacttttccagcaagtcatacttaattgtgcatcagcgaattcacacaggggagaagctgcacgagtgttctgagtgcagaaaaaccttctctttccactctcagctcgttattcatcaacgcatccacacaggagagaacccctacgagtgttgtgaatgcggaaaggtcttcagccgcaaagatcagcttgtgagccaccagaagactcatagcggtcagaaaccttatgtgtgtaacgagtgtgggaaggcgtttgggctcaaatcccagctgattatccatgagcgaattcacacaggcgaaaaaccgtacgaatgcaatgagtgtcaaaaggccttcaacaccaaatctaatttaatggtgcaccaacggacccacacaggggagaagccttatgtgtgttctgactgtggcaaggccttcactttcaagtcccagctgattgtccatcagggcatccacacaggcgtgaagccatacgggtgtattcagtgcggcaagggtttcagtttaaagtcccagctcattgtccatcagagatcccataccgggatgaaaccctacgtgtgcaacgaatgtgggaaagcctttagatcgaagtcctatcttatcatccacacacgaacccacacaggcgagaagctacacgaatgcaataattgcggtaaagcgtttagcttcaagtcgcagcttatcatacaccagaggattcataccggtgagaacccatacgaatgtcatgagtgtggcaaagcatttagccggaagtaccagctgataagtcaccagcgcacccatgctggagaaaaaccatatgaatgcaccgactgtgggaaagcctttggcttaaaatctcagctgattatccaccagagaactcatacgggggaaaagccatttgagtgcagcgaatgccaaaaagccttcaatactaaaagcaatctgatcgttcatcagagaacccacaccggcgaaaaaccatactcatgcaatgaatgcggaaaggcatttacgtttaagtcacaactgatcgtgcataagggggtccacaccggcgtcaagccctatggatgttcacaatgcgctaagacattttcgctcaaatctcagctcattgtgcaccagagaagccacaccggagttaagccctatggatgtagtgagtgcggcaaggctttccgaagcaagtcctatctgattatacacatgcgtacccacacaggagagaaaccacacgagtgccgggaatgcggaaaaagcttctcatttaactcccagttaatcgtacaccagcgaatccacaccggagaaaacccctatgaatgctccgagtgtggaaaagcttttaaccgcaaagaccaactgattagccatcagcgaacccacgctggagagaaaccttacggctgctcagaatgtgggaaggctttctcaagtaagagttacttgatcatacatatgcgaacacatagcggcgagaaaccctacgagtgtaacgaatgcggaaaagctttcatctggaagtctctgctgatcgtccacgaaagaacccatgccggagtgaacccgtacaaatgctcacagtgtgagaaatcctttagtggcaagctaaggctgctggtccaccagaggatgcacacccgcgaaaagccatatgagtgcagtgagtgcgggaaggcatttattcgcaattcccagctgatagtacatcaaaggacacactccggggagaagccgtatggatgtaatgaatgcggcaagactttttcacagaagtctatcctgtcagcccatcaaagaacgcataccggagaaaaaccctgcaagtgtaccgaatgcggaaaagccttctgctggaagtctcagcttattatgcatcaacggacccatgtcgatgataagcactag

SEQ ID NO: 63827 - DNA, 2844 bp, Artificial Sequence
  derived and/or modified sequence
atggctacccgagtacgcaccgcatccatatgggtgcctccgctgcaagaacgaaacagtagctgggatagaattcgcaaattacagggacaagaaagcattctggggcaagggacccccggactgcaacctcttccgggtaccccacgtcagaagcagaaatcacgcagaatcgagaaagtcctcgagtggctattcatttctcaggagcagcccaaaattaccaaatcttggggcccattaagctttatggacgtgttcgttgacttcacctgggaagaatggcaactcctggaccccgcacagaaatgcctgtacaggtcggtcatgctggaaaactactcaaatctagtttccctcgggtaccagcacaccaaaccggatataatttttaaacttgagcaaggtgaggaactgtgcatggtacaagctcaagtgccaaatcaaacatgtcccaacaccgtctggaaaattgatgatctgatggattggcaccaagagaacaaagataagctgggttccacagctaaatcgttcgagtgcactaccttcggcaagttgtgcctgctgtctaccaaatacctctcgcgccagaagccacataagtgcggtacccacggtaagtccctgaaatacatcgactttactagtgattacgcgaggaataaccccaatgggtttcaggtgcacggcaagtcgttctttcattccaagcatgaacaaactgttatcggtattaaatactgcgagtctatcgaatccggaaaaaccgtgaacaaaaaatcacagttaatgtgccagcagatgtacatgggtgaaaagccatttgggtgtagctgctgtgagaaggccttttcatctaagagttatttgctggtgcatcaacaaacccacgctgaggagaagccttatggctgcaatgaatgtgggaaagattttagttccaaatcctacctaattgtgcatcagcgaattcataccggggaaaagcttcacgagtgcagcgaatgccgcaaaactttttcattccattcacagctggtcattcaccaacgaatccacaccggtgagaatccttacgagtgttgtgaatgtggtaaggtgtttagtcgtaaagaccagttagtgagccaccagaagacccacagcggacagaagccgtatgtttgcaacgaatgcggcaaggcgttcgggctgaaatcccagctgataattcacgaacgaatccataccggagagaagccttatgaatgcaatgagtgccagaaggcatttaacactaagtctaacctcatggtacatcagcggactcacaccggggaaaaaccctacgtgtgtagtgactgtggtaaggcatttacctttaagtcccagcttatcgtccaccaagggattcacacaggggtcaagccctatggatgtatacaatgtggcaagggtttcagcctcaaaagtcagctaatcgtccaccagcggtcccacaccggaatgaaaccctacgtgtgcaacgaatgcggaaaggcttttaggtccaagagctatctgattatccacaccaggacccatacaggcgagaaactccatgaatgtaacaattgcgggaaggccttcagttttaaatcccagctgattatccaccagcgcatccacaccggagagaacccctacgagtgtcacgagtgtggaaaggcattctctagaaaatatcagctaatcagccatcagcgtactcacgccggagagaagccctacgagtgcaccgattgcggaaaggcgttcggactgaaatcgcagctgatcattcaccagagaacacatactggagaaaaaccctttgagtgcagtgagtgccagaaggcatttaatacaaagtctaatctcatcgtgcatcagcgaactcatactggagagaagccctactcttgtaacgaatgcgggaaagcgttcacatttaagtcgcagctcattgtgcacaagggagtccatactggggtcaagccatatggatgcagccagtgcgccaagacttttagtctgaaatcacagctgatcgtgcaccaacgaagtcacaccggcgtgaagccttatgggtgcagcgaatgcggcaaagcttttcggagtaaatcttatctgatcattcatatgcggacacatacaggagagaaaccgcacgaatgtcgggagtgcgggaaatccttcagtttcaacagccagctcatcgtgcaccagagaattcataccggcgagaatccctacgagtgttctgaatgcggtaaggcgttcaacaggaaagatcagctgatcagccatcagcgcacacacgccggagagaagccatatgggtgcagcgaatgtggcaaggctttcagttccaagagttaccttattatacacatgagaacccacagcggggaaaagccatacgaatgcaacgagtgtgggaaagccttcatttggaaaagcttactaatcgtacacgagagaacccatgccggtgtgaacccgtacaaatgttctcagtgtgagaaatccttttccggtaaattgcgcctcctggttcaccaacggatgcatactcgtgagaaaccctacgagtgttccgaatgcggcaaggcctttatccgtaatagtcagttgattgttcaccagcggacccattcaggcgagaaaccctatgggtgtaacgaatgcggtaaaactttttctcagaaaagcattcttagtgcccaccagaggacacacaccggagaaaagccttgcaagtgcacagagtgcgggaaggccttctgttggaagtcccagctgatcatgcaccagcgcacccacgttgacgataagcattag

SEQ ID NO: 63828 - DNA, 2193 bp, Artificial Sequence
  derived and/or modified sequence
atggattggcatcaggaaaataaggacaagctcggctctactgctaagagcttcgagtgtaccacctttgggaagctgtgtcttctttccaccaagtatctcagtcgccaaaagccacacaaatgtggcacccacggaaagagccttaaatatatcgattttacaagtgactacgccaggaacaaccctaacggtttccaggtgcacggcaagagcttctttcattccaaacacgagcagacagtaatcggaattaaatattgcgagagtattgagtctggaaagacagtcaataaaaagtcccagctcatgtgccagcagatgtacatgggggagaaacccttcggatgttcatgttgtgagaaggcattctcctcaaagagctatcttttggtgcaccagcaaacccatgcggaagaaaaaccctatgggtgtaacgagtgtggcaaagatttcagctccaagtcataccttatcgttcaccagcggatccacacaggagaaaaactgcatgagtgcagcgaatgtcgcaagacattctcattccattcacagctggtcattcaccagaggattcatacaggagaaaacccatatgagtgttgcgaatgtgggaaggtgttttcgcgcaaggaccagttggtcagccaccagaagacccactccggtcaaaagccttacgtatgcaacgagtgtggcaaagcattcggcctgaagtcccagttaataatccatgaacgcattcacaccggtgagaagccatacgagtgcaacgagtgccaaaaggcattcaatacaaagtctaacctgatggtgcaccagcggacacatacgggtgaaaagccatacgtttgttctgattgtgggaaggctttcactttcaaaagccagctgattgtccaccaaggtatccatacaggagtcaaaccgtatggctgcatccagtgcggcaaggggttcagtttgaaatcccagttgatcgtccatcaacgctcacacacaggcatgaagccctacgtgtgcaacgagtgcggtaaagccttcagatccaaaagttatctcattattcacactaggactcatacaggagaaaaactgcacgaatgtaacaactgtgggaaggcattcagtttcaaatcccagctcatcatccatcagagaatccacacaggtgaaaatccatatgaatgccatgagtgcggtaaggccttctcacggaaataccaactgatttctcaccaacgaacccatgctggggagaagccttacgagtgtacggactgcgggaaggctttcggactgaaatcccaactcattattcatcaaaggacacacaccggtgaaaaaccctttgagtgtagcgaatgccagaaagcattcaacactaagtccaatctgatcgttcatcagagaacacatacaggcgagaagccttattcttgtaacgagtgtggaaaggcattcacctttaaatctcagctcattgtccacaaaggagtacacaccggagtgaagccatatggatgctctcagtgcgccaaaacatttagccttaaaagccagcttatcgtccatcaaaggtcccacacaggggtgaaaccgtatggctgctctgaatgcggaaaggcatttaggtctaaatcatatttgattatccatatgagaactcacacgggagagaagcctcacgaatgccgtgaatgcggaaagtcatttagttttaattcccagcttattgtacatcagagaatccatacgggggaaaatccttatgaatgctcagagtgtggtaaggcttttaaccgtaaggatcagttaatctcccatcagcgaactcacgccggagagaagccctatggctgctccgaatgcggcaaagccttctcctccaaatcatacctcattattcatatgcgtactcactctggagagaaaccttacgagtgcaatgagtgtggaaaggcttttatttggaaaagcttgctgatagtgcacgagcgaacacacgcaggggtgaacccttacaaatgctctcagtgcgaaaagagtttttctgggaagctgcgcctgttggtgcatcagagaatgcatacaagggagaaaccttatgagtgtacagagtgtgggaaggctttctgctggaagtcacagctgattatgcatcagcgcacccacgtggacgataaacattag

SEQ ID NO: 63829 - DNA, 3543 bp, Artificial Sequence
  derived and/or modified sequence
atgacgcaattcctgtgcgacatacgtagcggccgccattgttccgcgccgatggcgagatccttgttcctcagatagcgttcatcgcccgtcgtggtcaacgggccagccgagtctggagtggttgcgaacccttctggctgcagatctggagcatccctcgcgtcctgtcacttccagcgaggcacacaaaactgaccgtagggatggccaccagggtccggacagcttctatttgggtcccacctctccaagaacgaaacagttcatgggataggatcagaaagctccaaggtcaggaatccatcttgggccaagggactcctggtctgcaacctctccctggaacacccaggcagaagcagaagagtcgcagaatagagaaagtcctagagtggctgtttatttcccaagagcagccaaaaatcaccaagtcctggggacctttgtcattcatggatgtgtttgtggattttacctgggaggagtggcagctgctagacccagcacagaagtgcctgtacaggagtgtgatgttggagaactatagcaacctggtgtccctagggtaccaacacaccaaacctgatatcatcttcaagttggaacaaggagaagagctgtgtatggtgcaggcccaagttccaaatcagacctgtccaaacacagtctggaaaattgatgatcttatggattggcatcaggaaaataaagacaagctgggaagtacggcaaaaagctttgaatgcactacatttggaaaactatgtcttcttagtacaaagtatctttcaagacaaaaacctcataaatgtggcacgcatggaaagagtttgaaatatatagatttcactagtgattatgctagaaataatcctaatgggtttcaggtacatggaaaatcattcttccattctaaacatgagcaaactgttattggaataaaatactgtgaaagtattgaatctggaaaaaccgtcaataagaaatcgcaacttatgtgccaacaaatgtatatgggcgaaaaaccctttggatgcagctgttgtgagaaagccttcagcagcaagtcataccttctagtgcatcagcaaactcatgccgaagagaaaccctatggttgtaatgaatgtgggaaagacttcagtagtaaatcatacctcattgtacatcagagaattcatacaggagagaaactacatgaatgcagtgaatgcaggaaaacattcagtttccattcacagcttgttatacatcagagaattcacacaggtgagaatccctatgagtgctgtgaatgtgggaaagtcttcagtaggaaagaccagcttgtttcacaccagaaaactcattcaggacagaaaccatatgtgtgtaatgaatgtgggaaagcttttggtttaaaatcacagctcattatacatgaaagaattcatacaggagagaaaccatatgaatgcaatgaatgtcagaaagcctttaatacaaagtcaaaccttatggtacatcagagaacccatacaggggagaaaccttatgtttgtagtgattgtggaaaagcctttacattcaagtcacagctcattgtacatcaggggattcacacaggagtaaagccctatgggtgtattcagtgtggtaaaggattcagtttgaaatcacagctcattgtacatcagagaagtcacacaggaatgaaaccttatgtatgcaatgaatgtggcaaagccttcaggagcaagtcataccttattatacatacaaggactcatacaggagaaaaactccatgaatgcaacaattgtgggaaagccttcagttttaaatcacagctcattatacatcagaggattcatacaggagagaacccctatgaatgccatgaatgtgggaaagccttcagtcggaaataccagcttatttcacaccagagaactcatgcaggagagaagccttatgaatgcaccgactgtggaaaggcttttggtttaaagtcacagcttattatacaccagagaactcatacaggggagaaaccatttgaatgtagtgagtgtcagaaagcctttaatacaaagtcaaacctgattgtacatcagagaactcatacaggagagaaaccctatagttgtaatgaatgtggaaaagcctttacgttcaaatcacagctcattgtacataaaggagtgcacactggagtaaaaccctatggatgcagtcaatgtgcaaaaacctttagtttgaagtcccagctcattgtacatcagagaagtcacacaggagtaaaaccatatggatgcagtgagtgtgggaaagccttcaggagcaagtcataccttattatacatatgagaactcatacaggagagaaaccacatgagtgcagggaatgcgggaaatcctttagtttcaattcacaactcattgtgcatcagagaattcacacaggagaaaatccctatgaatgcagtgaatgtgggaaagcctttaataggaaagaccagctcatttcacatcagcgaactcatgcaggggaaaagccttatgggtgcagtgaatgtgggaaagcttttagcagcaagtcatacctaattatacacatgagaactcattcaggtgaaaaaccatatgaatgtaatgaatgtgggaaagccttcatttggaaatcactactcattgtacatgagcgaactcatgcaggggtcaacccttataaatgcagtcaatgtgagaaatccttcagtgggaaattacgccttcttgtacaccagagaatgcacacaagagagaaaccatatgaatgcagtgagtgtggaaaagccttcattaggaattctcaactcattgtacatcaaagaactcattcaggagagaaaccctatgggtgcaatgaatgtgggaaaaccttctctcaaaaatcaattctcagtgcacatcagagaacacatacaggagagaagccttgtaagtgcactgaatgtgggaaagccttttgttggaagtcacagctcattatgcatcagagaactcatgtagatgacaaacattgataattttacgaaactctgaaaagtggattcacaagagatagaaacaatcatatataaagagaaactctgtaagtggaatcatcttgtcatcttccagaaaactcatactgaatagaaactttatgaatgcacagcatatggaaaggcatccacagaaagctgttctttacatgcaaaaagatagtagacaatacacaggaaaactgaatttagtaaccactctgaaaatttttagcagcaagtcatacctttttttaaaaagttcatacaggtgaggaaccatgttaaacgttgtaaagtcattttactaaaataagattcacaaagaggaaacttcatgaaccagatgaatatagaatagacttctttgaaattcatagtttacagaattttaatgagagaaattattgagctaatgaatggcagaattaacaaaattacaaacattttatgtatcggaagcatataccttggagggaccatgctataaggg

SEQ ID NO: 63830 - DNA, 5629 bp, Artificial Sequence
  derived and/or modified sequence
ccggcgcgggagtaactcctcgcagaggcctctgggagttgtagtttttttgcctttgcctctccatgacgcaattcctgtgcgacatacgtagcggccgccattgttccgcgccgatggcgagatccttgttcctcagatagcgttcatcgcccgtcgtggtcaacgggccagccgagtctggagtggttgcgaacccttctggctgcagatctggaggtggaggcagtaccctggactctattctgctgccccttcagggtttggaggagccggagcatccctcgcgtcctgtcacttccagcgaggcacacaaaactgaccgtagggatggccaccagggtccggacagcttctatttgggtcccacctctccaagaacgaaacagttcatgggataggatcagaaagctccaaggtcaggaatccatcttgggccaagggactcctggtctgcaacctctccctggaacacccaggcagaagcagaagagtcgcagaatagagaaagtcctagagtggctgtttatttcccaagagcagccaaaaatcaccaagtcctggggtaccaacacaccaaacctgatatcatcttcaagttggaacaaggagaagagctgtgtatggtgcaggcccaagttccaaatcagacctgtccaaacacagtctggaaaattgatgatcttatggattggcatcaggaaaataaagacaagctgggaagtacggcaaaaagctttgaatgcactacatttggaaaactatgtcttcttagtacaaagtatctttcaagacaaaaacctcataaatgtggcacgcatggaaagagtttgaaatatatagatttcactagtgattatgctagaaataatcctaatgggtttcaggtacatggaaaatcattcttccattctaaacatgagcaaactgttattggaataaaatactgtgaaagtattgaatctggaaaaaccgtcaataagaaatcgcaacttatgtgccaacaaatgtatatgggcgaaaaaccctttggatgcagctgttgtgagaaagccttcagcagcaagtcataccttctagtgcatcagcaaactcatgccgaagagaaaccctatggttgtaatgaatgtgggaaagacttcagtagtaaatcatacctcattgtacatcagagaattcatacaggagagaaactacatgaatgcagtgaatgcaggaaaacattcagtttccattcacagcttgttatacatcagagaattcacacaggtgagaatccctatgagtgctgtgaatgtgggaaagtcttcagtaggaaagaccagcttgtttcacaccagaaaactcattcaggacagaaaccatatgtgtgtaatgaatgtgggaaagcttttggtttaaaatcacagctcattatacatgaaagaattcatacaggagagaaaccatatgaatgcaatgaatgtcagaaagcctttaatacaaagtcaaaccttatggtacatcagagaacccatacaggggagaaaccttatgtttgtagtgattgtggaaaagcctttacattcaagtcacagctcattgtacatcaggggattcacacaggagtaaagccctatgggtgtattcagtgtggtaaaggattcagtttgaaatcacagctcattgtacatcagagaagtcacacaggaatgaaaccttatgtatgcaatgaatgtggcaaagccttcaggagcaagtcataccttattatacatacaaggactcatacaggagaaaaactccatgaatgcaacaattgtgggaaagccttcagttttaaatcacagctcattatacatcagaggattcatacaggagagaacccctatgaatgccatgaatgtgggaaagccttcagtcggaaataccagcttatttcacaccagagaactcatgcaggagagaagccttatgaatgcaccgactgtggaaaggcttttggtttaaagtcacagcttattatacaccagagaactcatacaggggagaaaccatttgaatgtagtgagtgtcagaaagcctttaatacaaagtcaaacctgattgtacatcagagaactcatacaggagagaaaccctatagttgtaatgaatgtggaaaagcctttacgttcaaatcacagctcattgtacataaaggagtgcacactggagtaaaaccctatggatgcagtcaatgtgcaaaaacctttagtttgaagtcccagctcattgtacatcagagaagtcacacaggagtaaaaccatatggatgcagtgagtgtgggaaagccttcaggagcaagtcataccttattatacatatgagaactcatacaggagagaaaccacatgagtgcagggaatgcgggaaatcctttagtttcaattcacaactcattgtgcatcagagaattcacacaggagaaaatccctatgaatgcagtgaatgtgggaaagcctttaataggaaagaccagctcatttcacatcagcgaactcatgcaggggaaaagccttatgggtgcagtgaatgtgggaaagcttttagcagcaagtcatacctaattatacacatgagaactcattcaggtgaaaaaccatatgaatgtaatgaatgtgggaaagccttcatttggaaatcactactcattgtacatgagcgaactcatgcaggggtcaacccttataaatgcagtcaatgtgagaaatccttcagtgggaaattacgccttcttgtacaccagagaatgcacacaagagagaaaccatatgaatgcagtgagtgtggaaaagccttcattaggaattctcaactcattgtacatcaaagaactcattcaggagagaaaccctatgggtgcaatgaatgtgggaaaaccttctctcaaaaatcaattctcagtgcacatcagagaacacatacaggagagaagccttgtaagtgcactgaatgtgggaaagccttttgttggaagtcacagctcattatgcatcagagaactcatgtagatgacaaacattgataattttacgaaactctgaaaagtggattcacaagagatagaaacaatcatatataaagagaaactctgtaagtggaatcatcttgtcatcttccagaaaactcatactgaatagaaactttatgaatgcacagcatatggaaaggcatccacagaaagctgttctttacatgcaaaaagatagtagacaatacacaggaaaactgaatttagtaaccactctgaaaatttttagcagcaagtcatacctttttttaaaaagttcatacaggtgaggaaccatgttaaacgttgtaaagtcattttactaaaataagattcacaaagaggaaacttcatgaaccagatgaatatagaatagacttctttgaaattcatagtttacagaattttaatgagagaaattattgagctaatgaatggcagaattaacaaaattacaaacattttatgtatcggaagcatataccttggagggaccatgctataagggaaagtgtaaatctagaaatgagaaacccctagggaaaaaatatatataggagtgaacatcttatgaatgtaccaaataaaccacagctggactgttaacctcaccttagaagcttcattctaaaaaaaaaaaaaaaaaaaaaaaaaaaaaccaacctgttattatatcttaatattaattttgaagaattatttcttttaggaatcattttaagaaattttattccaggtgttccaaaatttcaggaaaaggtttgagaaaattctcaattataaataataagatacagattatttcattgtacaagtgaatctagtaaggaggttaagaataagaaataacatcccagagcctacagggatatttagatatcttcctatgtgtactacataatatgaattttgcagtttggcattttacttgcgaatgccatatgtgagacaaaaatcatcttccagagatttcagtatctctgatactgacaatatctctgatatgacaatatcatcttccagagatttctactctgcataccaacattgtttctttgtgtcttaccaaatgcaacttgttactagaatatgacttactaaaaatgcatttccacactgcaaacattttttagggctatcttctgccctttggaagcagtcttggcagcaacctctttagtaatcaatataaggcacacttcatgtgtttgtgtagcctggaatctattctaccttcacaggttagaacatcttgatttcctcttaacgaaacattccctaacggtgtatgtagtcatgagggaaccaccattcaagatgccctgctcaggacttggcatgagcactatggtcagctgaggctcagaactgtacattgttaatgggtttttcaagttcagaaaagcaacatgagcttttgttctgtggtagcatgttgatgtaataagtagctatttcaatagaggttcccagaacagcttttgttactgtcattttcttaactttgttcacttgtcttttattttgagctattgggtgtgcttttaatacattccttgtttgattgcattagccattgtgtatcttttgcatacagcttactaaatcagatggcttcagaaatgggtggtagaggagtaggcagaaacttgcaaggatatgtggatatttggaaatggttgtttcccaagacaggatggaagtcttttaagcaagaaacttggcccatgctatgaagtcatgaaatgaattgttggcatcatgtgctcactgaggctttggggaaatggataagttgtcattgaaaaattttaaacagaattctggagtggtcaagaggggaatgcttttgatacccatgtataacatggagaataatgatcttaaaacttcaatttaagattatgtgtcagtgatactacttagttacatgtagctatagagtcacagtggtgaaaaactctgccagttgcttactcacaaagttagttttcttcactacctcatcaggtttgttatgtgagtgggcattaatctgggaagagtgggaccctgccagttagattagggctatcttggaggaatatgcggattcaatactgcaaatatttctgaaacaccttctgctttgtactctattagatacccaaagaaattttcatccttgaagcggaggaatttaatgatacctgaatgcctaactgttgtattctgcttatacagaatccaatctcaagatacttggggtgaagaatgatgattcacagaagggaagggacatcttacataaacaaataatcgcagatacttgctaaagtgtatcccccaatctgggaaatactgtaaaggtgtatattattattgatgtaccaaagaagacagaataaattcataagagaaagtttatattcagtttactactacctagggttagattttagtttgttgttttttcagatgcaaatctacatgcagccttgcctggtagaagccagaagtgttgacagtattgaggacagcactcacatactgtgggaaagaataatacttgattaggacttattatttaatgaaatgaaaattttacaaaacagaaa

SEQ ID NO: 63831 - DNA, 3236 bp, Artificial Sequence
  derived and/or modified sequence
gttccgcgccgatggcgagatccttgttcctcagatagcgttcatcgcccgtcgtggtcaacgggccagccgagtctggagtggttgcgaacccttctggctgcagatctggaggtggaggcagtaccctggactctattctgctgccccttcagggtttggaggagccggagcatccctcgcgtcctgtcacttccagcgaggcacacaaaactgaccgtagggatggccaccagggtccggacagcttctatttggacacagtctggaaaattgatgatcttatggattggcatcaggaaaataaagacaagctgggaagtacggcaaaaagctttgaatgcactacatttggaaaactatgtcttcttagtacaaagtatctttcaagacaaaaacctcataaatgtggcacgcatggaaagagtttgaaatatatagatttcactagtgattatgctagaaataatcctaatgggtttcaggtacatggaaaatcattcttccattctaaacatgagcaaactgttattggaataaaatactgtgaaagtattgaatctggaaaaaccgtcaataagaaatcgcaacttatgtgccaacaaatgtatatgggcgaaaaaccctttggatgcagctgttgtgagaaagccttcagcagcaagtcataccttctagtgcatcagcaaactcatgccgaagagaaaccctatggttgtaatgaatgtgggaaagacttcagtagtaaatcatacctcattgtacatcagagaattcatacaggagagaaactacatgaatgcagtgaatgcaggaaaacattcagtttccattcacagcttgttatacatcagagaattcacacaggtgagaatccctatgagtgctgtgaatgtgggaaagtcttcagtaggaaagaccagcttgtttcacaccagaaaactcattcaggacagaaaccatatgtgtgtaatgaatgtgggaaagcttttggtttaaaatcacagctcattatacatgaaagaattcatacaggagagaaaccatatgaatgcaatgaatgtcagaaagcctttaatacaaagtcaaaccttatggtacatcagagaacccatacaggggagaaaccttatgtttgtagtgattgtggaaaagcctttacattcaagtcacagctcattgtacatcaggggattcacacaggagtaaagccctatgggtgtattcagtgtggtaaaggattcagtttgaaatcacagctcattgtacatcagagaagtcacacaggaatgaaaccttatgtatgcaatgaatgtggcaaagccttcaggagcaagtcataccttattatacatacaaggactcatacaggagaaaaactccatgaatgcaacaattgtgggaaagccttcagttttaaatcacagctcattatacatcagaggattcatacaggagagaacccctatgaatgccatgaatgtgggaaagccttcagtcggaaataccagcttatttcacaccagagaactcatgcaggagagaagccttatgaatgcaccgactgtggaaaggcttttggtttaaagtcacagcttattatacaccagagaactcatacaggggagaaaccatttgaatgtagtgagtgtcagaaagcctttaatacaaagtcaaacctgattgtacatcagagaactcatacaggagagaaaccctatagttgtaatgaatgtggaaaagcctttacgttcaaatcacagctcattgtacataaaggagtgcacactggagtaaaaccctatggatgcagtcaatgtgcaaaaacctttagtttgaagtcccagctcattgtacatcagagaagtcacacaggagtaaaaccatatggatgcagtgagtgtgggaaagccttcaggagcaagtcataccttattatacatatgagaactcatacaggagagaaaccacatgagtgcagggaatgcgggaaatcctttagtttcaattcacaactcattgtgcatcagagaattcacacaggagaaaatccctatgaatgcagtgaatgtgggaaagcctttaataggaaagaccagctcatttcacatcagcgaactcatgcaggggaaaagccttatgggtgcagtgaatgtgggaaagcttttagcagcaagtcatacctaattatacacatgagaactcattcaggtgaaaaaccatatgaatgtaatgaatgtgggaaagccttcatttggaaatcactactcattgtacatgagcgaactcatgcaggggtcaacccttataaatgcagtcaatgtgagaaatccttcagtgggaaattacgccttcttgtacaccagagaatgcacacaagagagaaaccatatgaatgcagtgagtgtggaaaagccttcattaggaattctcaactcattgtacatcaaagaactcattcaggagagaaaccctatgggtgcaatgaatgtgggaaaaccttctctcaaaaatcaattctcagtgcacatcagagaacacatacaggagagaagccttgtaagtgcactgaatgtgggaaagccttttgttggaagtcacagctcattatgcatcagagaactcatgtagatgacaaacattgataattttacgaaactctgaaaagtggattcacaagagatagaaacaatcatatataaagagaaactctgtaagtggaatcatcttgtcatcttccagaaaactcatactgaatagaaactttatgaatgcacagcatatggaaaggcatccacagaaagctgttctttacatgcaaaaagatagtagacaatacacaggaaaactgaatttagtaaccactctgaaaatttttagcagcaagtcatacctttttttaaaaagttcatacaggtgaggaaccatgttaaacgttgtaaagtcattttactaaaataagattcacaaagaggaaacttcatgaaccagatgaatatagaatagacttctttgaaattcatagtttacagaattttaatgagagaaattattgagctaatgaatggcagaattaacaaaattacaaacattttatgtatcggaagcatataccttggagggaccatgctataagggaaagtgtaaatctagaaatgagaaacccctagggaaaaaatatatataggagtgaacatcttatgaatgtaccaaataaaccacagctggactgttaa

SEQ ID NO: 63832 - DNA, 4721 bp, Artificial Sequence
  derived and/or modified sequence
ccggcgcgggagtaactcctcgcagaggcctctgggagttgtagtttttttgcctttgcctctccatgacgcaattcctgtgcgacatacgtagcggccgccattgttccgcgccgatggcgagatccttgttcctcagatagcgttcatcgcccgtcgtggtcaacgggccagccgagtctggagtggttgcgaacccttctggctgcagatctggaggtggaggcagtaccctggactctattctgctgccccttcagggtttggaggagccggagcatccctcgcgtcctgtcacttccagcgaggcacacaaaactgaccgtagggatggccaccagggtccggacagcttctatttgggtcccacctctccaagaacgaaacagttcatgggataggatcagaaagctccaaggtcaggaatccatcttgggccaagggactcctggtctgcaacctctccctggaacacccaggcagaagcagaagagtcgcagaatagagaaagtcctagagtggctgtttatttcccaagagcagccaaaaatcaccaagtcctggggacctttgtcattcatggatgtgtttgtggattttacctgggaggagtggcagctgctagacccagcacagaagtgcctgtacaggagtgtgatgttggagaactatagcaacctggtgtccctagggtaccaacacaccaaacctgatatcatcttcaagttggaacaaggagaagagctgtgtatggtgcaggcccaagttccaaatcagacctgtccaaacacagtctggaaaattgatgatcttatggattggcatcaggaaaataaagacaagctgggaagtacggcaaaaagctttgaatgcactacatttggaaaactatgtcttcttagtacaaagtatctttcaagacaaaaacctcataaatgtggcacgcatggaaagagtttgaaatatatagatttcactagtgattatgctagaaataatcctaatgggtttcaggtacatggaaaatcattcttccattctaaacatgagcaaactgttattggaataaaatactgtgaaagtattgaatctggaaaaaccgtcaataagaaatcgcaacttatgtgccaacaaatgtatatgggcgaaaaaccctttggatgcagctgttgtgagaaagccttcagcagcaagtcataccttctagtgcatcagcaaactcatgccgaagagaaaccctatggttgtaatgaatgtgggaaagacttcagtagtaaatcatacctcattgtacatcagagaattcatacaggagagaaactacatgaatgcagtgaatgcaggaaaacattcagtttccattcacagcttgttatacatcagagaattcacacaggtgagaatccctatgagtgctgtgaatgtgggaaagtcttcagtaggaaagaccagcttgtttcacaccagaaaactcattcaggacagaaaccatatgtgtgtaatgaatgtgggaaagcttttggtttaaaatcacagctcattatacatgaaagaattcatacaggagagaaaccatatgaatgcaatgaatgtcagaaagcctttaatacaaagtcaaaccttatggtacatcagagaacccatacaggggagaaaccttatgtttgtagtgattgtggaaaagcctttacattcaagtcacagctcattgtacatcaggggattcacacaggagtaaagccctatgggtgtattcagtgtggtaaaggattcagtttgaaatcacagctcattgtacatcagagaagtcacacaggaatgaaaccttatgtatgcaatgaatgtggcaaagccttcaggagcaagtcataccttattatacatacaaggactcatacaggagaaaaactccatgaatgcaacaattgtgggaaagccttcagttttaaatcacagctcattatacatcagaggattcatacaggagagaacccctatgaatgccatgaatgtgggaaagccttcagtcggaaataccagcttatttcacaccagagaactcatgcaggagagaagccttatgaatgcaccgactgtggaaaggcttttggtttaaagtcacagcttattatacaccagagaactcatacaggggagaaaccatttgaatgtagtgagtgtcagaaagcctttaatacaaagtcaaacctgattgtacatcagagaactcatacaggagagaaaccctatagttgtaatgaatgtggaaaagcctttacgttcaaatcacagctcattgtacataaaggagtgcacactggagtaaaaccctatggatgcagtcaatgtgcaaaaacctttagtttgaagtcccagctcattgtacatcagagaagtcacacaggagtaaaaccatatggatgcagtgagtgtgggaaagccttcaggagcaagtcataccttattatacatatgagaactcatacaggagagaaaccacatgagtgcagggaatgcgggaaatcctttagtttcaattcacaactcattgtgcatcagagaattcacacaggagaaaatccctatgaatgcagtgaatgtgggaaagcctttaataggaaagaccagctcatttcacatcagcgaactcatgcaggggaaaagccttatgggtgcagtgaatgtgggaaagcttttagcagcaagtcatacctaattatacacatgagaactcattcaggtgaaaaaccatatgaatgtaatgaatgtgggaaagccttcatttggaaatcactactcattgtacatgagcgaactcatgcaggggtcaacccttataaatgcagtcaatgtgagaaatccttcagtgggaaattacgccttcttgtacaccagagaatgcacacaagagagaaaccatatgaatgcagtgagtgtggaaaagccttcattaggaattctcaactcattgtacatcaaagaactcattcaggagagaaaccctatgggtgcaatgaatgtgggaaaaccttctctcaaaaatcaattctcagtgcacatcagagaacacatacaggagagaagccttgtaagtgcactgaatgtgggaaagccttttgttggaagtcacagctcattatgcatcagagaactcatgtagatgacaaacattgataattttacgaaactctgaaaagtggattcacaagagatagaaacaatcatatataaagagaaactctgtaagtggaatcatcttgtcatcttccagaaaactcatactgaatagaaactttatgaatgcacagcatatggaaaggcatccacagaaagctgttctttacatgcaaaaagatagtagacaatacacaggaaaactgaatttagtaaccactctgaaaatttttagcagcaagtcatacctttttttaaaaagttcatacaggtgaggaaccatgttaaacgttgtaaagtcattttactaaaataagattcacaaagaggaaacttcatgaaccagatgaatatagaatagacttctttgaaattcatagtttacagaattttaatgagagaaattattgagctaatgaatggcagaattaacaaaattacaaacattttatgtatcggaagcatataccttggagggaccatgctataagggaaagtgtaaatctagaaatgagaaacccctagggaaaaaatatatataggagtgaacatcttatgaatgtaccaaataaaccacagctggactgttaacctcaccttagaagcttcattctaaaaaaaaaaaaaaaaaaaaaaaaaaaaaccaacctgttattatatcttaatattaattttgaagaattatttcttttaggaatcattttaagaaattttattccaggtgttccaaaatttcaggaaaaggtttgagaaaattctcaattataaataataagatacagattatttcattgtacaagtgaatctagtaaggaggttaagaataagaaataacatcccagagcctacagggatatttagatatcttcctatgtgtactacataatatgaattttgcagtttggcattttacttgcgaatgccatatgtgagacaaaaatcatcttccagagatttcagtatctctgatactgacaatatctctgatatgacaatatcatcttccagagatttctactctgcataccaacattgtttctttgtgtcttaccaaatgcaacttgttactagaatatgacttactaaaaatgcatttccacactgcaaacattttttagggctatcttctgccctttggaagcagtcttggcagcaacctctttagtaatcaatataaggcacacttcatgtgtttgtgtagcctggaatctattctaccttcacaggttagaacatcttgatttcctcttaacgaaacattccctaacggtgtatgtagtcatgagggaaccaccattcaagatgccctgctcaggacttggcatgagcactatggtcagctgaggctcagaactgtacattgttaatgggtttttcaagttcagaaaagcaacatgagcttttgttctgtggtagcatgttgatgtaataagtagctatttcaatagaggttcccagaacagcttttgttactgtcattttcttaactttgttcacttgtcttttattttgagctattgggtgtgcttttaatacattccttgttt

SEQ ID NO: 63833 - DNA, 2193 bp, Artificial Sequence
  derived and/or modified sequence
atggattggcatcaggaaaataaagacaagctgggaagtacggcaaaaagctttgaatgcactacatttggaaaactatgtcttcttagtacaaagtatctttcaagacaaaaacctcataaatgtggcacgcatggaaagagtttgaaatatatagatttcactagtgattatgctagaaataatcctaatgggtttcaggtacatggaaaatcattcttccattctaaacatgagcaaactgttattggaataaaatactgtgaaagtattgaatctggaaaaaccgtcaataagaaatcgcaacttatgtgccaacaaatgtatatgggcgaaaaaccctttggatgcagctgttgtgagaaagccttcagcagcaagtcataccttctagtgcatcagcaaactcatgccgaagagaaaccctatggttgtaatgaatgtgggaaagacttcagtagtaaatcatacctcattgtacatcagagaattcatacaggagagaaactacatgaatgcagtgaatgcaggaaaacattcagtttccattcacagcttgttatacatcagagaattcacacaggtgagaatccctatgagtgctgtgaatgtgggaaagtcttcagtaggaaagaccagcttgtttcacaccagaaaactcattcaggacagaaaccatatgtgtgtaatgaatgtgggaaagcttttggtttaaaatcacagctcattatacatgaaagaattcatacaggagagaaaccatatgaatgcaatgaatgtcagaaagcctttaatacaaagtcaaaccttatggtacatcagagaacccatacaggggagaaaccttatgtttgtagtgattgtggaaaagcctttacattcaagtcacagctcattgtacatcaggggattcacacaggagtaaagccctatgggtgtattcagtgtggtaaaggattcagtttgaaatcacagctcattgtacatcagagaagtcacacaggaatgaaaccttatgtatgcaatgaatgtggcaaagccttcaggagcaagtcataccttattatacatacaaggactcatacaggagaaaaactccatgaatgcaacaattgtgggaaagccttcagttttaaatcacagctcattatacatcagaggattcatacaggagagaacccctatgaatgccatgaatgtgggaaagccttcagtcggaaataccagcttatttcacaccagagaactcatgcaggagagaagccttatgaatgcaccgactgtggaaaggcttttggtttaaagtcacagcttattatacaccagagaactcatacaggggagaaaccatttgaatgtagtgagtgtcagaaagcctttaatacaaagtcaaacctgattgtacatcagagaactcatacaggagagaaaccctatagttgtaatgaatgtggaaaagcctttacgttcaaatcacagctcattgtacataaaggagtgcacactggagtaaaaccctatggatgcagtcaatgtgcaaaaacctttagtttgaagtcccagctcattgtacatcagagaagtcacacaggagtaaaaccatatggatgcagtgagtgtgggaaagccttcaggagcaagtcataccttattatacatatgagaactcatacaggagagaaaccacatgagtgcagggaatgcgggaaatcctttagtttcaattcacaactcattgtgcatcagagaattcacacaggagaaaatccctatgaatgcagtgaatgtgggaaagcctttaataggaaagaccagctcatttcacatcagcgaactcatgcaggggaaaagccttatgggtgcagtgaatgtgggaaagcttttagcagcaagtcatacctaattatacacatgagaactcattcaggtgaaaaaccatatgaatgtaatgaatgtgggaaagccttcatttggaaatcactactcattgtacatgagcgaactcatgcaggggtcaacccttataaatgcagtcaatgtgagaaatccttcagtgggaaattacgccttcttgtacaccagagaatgcacacaagagagaaaccatatgaatgcactgaatgtgggaaagccttttgttggaagtcacagctcattatgcatcagagaactcatgtagatgacaaacattga

SEQ ID NO: 63834 - DNA, 5428 bp, Artificial Sequence
  derived and/or modified sequence
ccggcgcgggagtaactcctcgcagaggcctctgggagttgtagtttttttgcctttgcctctccatgacgcaattcctgtgcgacatacgtagcggccgccattgttccgcgccgatggcgagatccttgttcctcagatagcgttcatcgcccgtcgtggtcaacgggccagccgagtctggagtggttgcgaacccttctggctgcagatctggaggtggaggcagtaccctggactctattctgctgccccttcagggtttggaggagccggagcatccctcgcgtcctgtcacttccagcgaggcacacaaaactgaccgtagggatggccaccagggtccggacagcttctatttggggtaccaacacaccaaacctgatatcatcttcaagttggaacaaggagaagagctgtgtatggtgcaggcccaagttccaaatcagacctgtccaaacacagtctggaaaattgatgatcttatggattggcatcaggaaaataaagacaagctgggaagtacggcaaaaagctttgaatgcactacatttggaaaactatgtcttcttagtacaaagtatctttcaagacaaaaacctcataaatgtggcacgcatggaaagagtttgaaatatatagatttcactagtgattatgctagaaataatcctaatgggtttcaggtacatggaaaatcattcttccattctaaacatgagcaaactgttattggaataaaatactgtgaaagtattgaatctggaaaaaccgtcaataagaaatcgcaacttatgtgccaacaaatgtatatgggcgaaaaaccctttggatgcagctgttgtgagaaagccttcagcagcaagtcataccttctagtgcatcagcaaactcatgccgaagagaaaccctatggttgtaatgaatgtgggaaagacttcagtagtaaatcatacctcattgtacatcagagaattcatacaggagagaaactacatgaatgcagtgaatgcaggaaaacattcagtttccattcacagcttgttatacatcagagaattcacacaggtgagaatccctatgagtgctgtgaatgtgggaaagtcttcagtaggaaagaccagcttgtttcacaccagaaaactcattcaggacagaaaccatatgtgtgtaatgaatgtgggaaagcttttggtttaaaatcacagctcattatacatgaaagaattcatacaggagagaaaccatatgaatgcaatgaatgtcagaaagcctttaatacaaagtcaaaccttatggtacatcagagaacccatacaggggagaaaccttatgtttgtagtgattgtggaaaagcctttacattcaagtcacagctcattgtacatcaggggattcacacaggagtaaagccctatgggtgtattcagtgtggtaaaggattcagtttgaaatcacagctcattgtacatcagagaagtcacacaggaatgaaaccttatgtatgcaatgaatgtggcaaagccttcaggagcaagtcataccttattatacatacaaggactcatacaggagaaaaactccatgaatgcaacaattgtgggaaagccttcagttttaaatcacagctcattatacatcagaggattcatacaggagagaacccctatgaatgccatgaatgtgggaaagccttcagtcggaaataccagcttatttcacaccagagaactcatgcaggagagaagccttatgaatgcaccgactgtggaaaggcttttggtttaaagtcacagcttattatacaccagagaactcatacaggggagaaaccatttgaatgtagtgagtgtcagaaagcctttaatacaaagtcaaacctgattgtacatcagagaactcatacaggagagaaaccctatagttgtaatgaatgtggaaaagcctttacgttcaaatcacagctcattgtacataaaggagtgcacactggagtaaaaccctatggatgcagtcaatgtgcaaaaacctttagtttgaagtcccagctcattgtacatcagagaagtcacacaggagtaaaaccatatggatgcagtgagtgtgggaaagccttcaggagcaagtcataccttattatacatatgagaactcatacaggagagaaaccacatgagtgcagggaatgcgggaaatcctttagtttcaattcacaactcattgtgcatcagagaattcacacaggagaaaatccctatgaatgcagtgaatgtgggaaagcctttaataggaaagaccagctcatttcacatcagcgaactcatgcaggggaaaagccttatgggtgcagtgaatgtgggaaagcttttagcagcaagtcatacctaattatacacatgagaactcattcaggtgaaaaaccatatgaatgtaatgaatgtgggaaagccttcatttggaaatcactactcattgtacatgagcgaactcatgcaggggtcaacccttataaatgcagtcaatgtgagaaatccttcagtgggaaattacgccttcttgtacaccagagaatgcacacaagagagaaaccatatgaatgcagtgagtgtggaaaagccttcattaggaattctcaactcattgtacatcaaagaactcattcaggagagaaaccctatgggtgcaatgaatgtgggaaaaccttctctcaaaaatcaattctcagtgcacatcagagaacacatacaggagagaagccttgtaagtgcactgaatgtgggaaagccttttgttggaagtcacagctcattatgcatcagagaactcatgtagatgacaaacattgataattttacgaaactctgaaaagtggattcacaagagatagaaacaatcatatataaagagaaactctgtaagtggaatcatcttgtcatcttccagaaaactcatactgaatagaaactttatgaatgcacagcatatggaaaggcatccacagaaagctgttctttacatgcaaaaagatagtagacaatacacaggaaaactgaatttagtaaccactctgaaaatttttagcagcaagtcatacctttttttaaaaagttcatacaggtgaggaaccatgttaaacgttgtaaagtcattttactaaaataagattcacaaagaggaaacttcatgaaccagatgaatatagaatagacttctttgaaattcatagtttacagaattttaatgagagaaattattgagctaatgaatggcagaattaacaaaattacaaacattttatgtatcggaagcatataccttggagggaccatgctataagggaaagtgtaaatctagaaatgagaaacccctagggaaaaaatatatataggagtgaacatcttatgaatgtaccaaataaaccacagctggactgttaacctcaccttagaagcttcattctaaaaaaaaaaaaaaaaaaaaaaaaaaaaaccaacctgttattatatcttaatattaattttgaagaattatttcttttaggaatcattttaagaaattttattccaggtgttccaaaatttcaggaaaaggtttgagaaaattctcaattataaataataagatacagattatttcattgtacaagtgaatctagtaaggaggttaagaataagaaataacatcccagagcctacagggatatttagatatcttcctatgtgtactacataatatgaattttgcagtttggcattttacttgcgaatgccatatgtgagacaaaaatcatcttccagagatttcagtatctctgatactgacaatatctctgatatgacaatatcatcttccagagatttctactctgcataccaacattgtttctttgtgtcttaccaaatgcaacttgttactagaatatgacttactaaaaatgcatttccacactgcaaacattttttagggctatcttctgccctttggaagcagtcttggcagcaacctctttagtaatcaatataaggcacacttcatgtgtttgtgtagcctggaatctattctaccttcacaggttagaacatcttgatttcctcttaacgaaacattccctaacggtgtatgtagtcatgagggaaccaccattcaagatgccctgctcaggacttggcatgagcactatggtcagctgaggctcagaactgtacattgttaatgggtttttcaagttcagaaaagcaacatgagcttttgttctgtggtagcatgttgatgtaataagtagctatttcaatagaggttcccagaacagcttttgttactgtcattttcttaactttgttcacttgtcttttattttgagctattgggtgtgcttttaatacattccttgtttgattgcattagccattgtgtatcttttgcatacagcttactaaatcagatggcttcagaaatgggtggtagaggagtaggcagaaacttgcaaggatatgtggatatttggaaatggttgtttcccaagacaggatggaagtcttttaagcaagaaacttggcccatgctatgaagtcatgaaatgaattgttggcatcatgtgctcactgaggctttggggaaatggataagttgtcattgaaaaattttaaacagaattctggagtggtcaagaggggaatgcttttgatacccatgtataacatggagaataatgatcttaaaacttcaatttaagattatgtgtcagtgatactacttagttacatgtagctatagagtcacagtggtgaaaaactctgccagttgcttactcacaaagttagttttcttcactacctcatcaggtttgttatgtgagtgggcattaatctgggaagagtgggaccctgccagttagattagggctatcttggaggaatatgcggattcaatactgcaaatatttctgaaacaccttctgctttgtactctattagatacccaaagaaattttcatccttgaagcggaggaatttaatgatacctgaatgcctaactgttgtattctgcttatacagaatccaatctcaagatacttggggtgaagaatgatgattcacagaagggaagggacatcttacataaacaaataatcgcagatacttgctaaagtgtatcccccaatctgggaaatactgtaaaggtgtatattattattgatgtaccaaagaagacagaataaattcataagagaaagtttatattcagtttactactacctagggttagattttagtttgttgttttttcagatgcaaatctacatgcagccttgcctggtagaagccagaagtgttgacagtattgaggacagcactcacatactgtgggaaagaataatacttgattaggacttattatttaatgaaatgaaaattttacaaaacagaaa

SEQ ID NO: 63835 - DNA, 5661 bp, Artificial Sequence
  derived and/or modified sequence
ccggcgcgggagtaactcctcgcagaggcctctgggagttgtagtttttttgcctttgcctctccatgacgcaattcctgtgcgacatacgtagcggccgccattgttccgcgccgatggcgagatccttgttcctcagatagcgttcatcgcccgtcgtggtcaacgggccagccgagtctggagtggttgcgaacccttctggctgcagatctggaggtggaggcagtaccctggactctattctgctgccccttcagggtttggaggagccggagcatccctcgcgtcctgtcacttccagcgaggcacacaaaactgaccgtagggatggccaccagggtccggacagcttctatttggggacctttgtcattcatggatgtgtttgtggattttacctgggaggagtggcagctgctagacccagcacagaagtgcctgtacaggagtgtgatgttggagaactatagcaacctggtgtccctagggtaccaacacaccaaacctgatatcatcttcaagttggaacaaggagaagagctgtgtatggtgcaggcccaagttccaaatcagacctgtccaattttgaaggctggaaagtccaaagccaaggtgctggcaggtttggtgtctggtgagggcctgctctgtgcttccaagatgacgccttgttgctgcatcctctggagacacagtctggaaaattgatgatcttatggattggcatcaggaaaataaagacaagctgggaagtacggcaaaaagctttgaatgcactacatttggaaaactatgtcttcttagtacaaagtatctttcaagacaaaaacctcataaatgtggcacgcatggaaagagtttgaaatatatagatttcactagtgattatgctagaaataatcctaatgggtttcaggtacatggaaaatcattcttccattctaaacatgagcaaactgttattggaataaaatactgtgaaagtattgaatctggaaaaaccgtcaataagaaatcgcaacttatgtgccaacaaatgtatatgggcgaaaaaccctttggatgcagctgttgtgagaaagccttcagcagcaagtcataccttctagtgcatcagcaaactcatgccgaagagaaaccctatggttgtaatgaatgtgggaaagacttcagtagtaaatcatacctcattgtacatcagagaattcatacaggagagaaactacatgaatgcagtgaatgcaggaaaacattcagtttccattcacagcttgttatacatcagagaattcacacaggtgagaatccctatgagtgctgtgaatgtgggaaagtcttcagtaggaaagaccagcttgtttcacaccagaaaactcattcaggacagaaaccatatgtgtgtaatgaatgtgggaaagcttttggtttaaaatcacagctcattatacatgaaagaattcatacaggagagaaaccatatgaatgcaatgaatgtcagaaagcctttaatacaaagtcaaaccttatggtacatcagagaacccatacaggggagaaaccttatgtttgtagtgattgtggaaaagcctttacattcaagtcacagctcattgtacatcaggggattcacacaggagtaaagccctatgggtgtattcagtgtggtaaaggattcagtttgaaatcacagctcattgtacatcagagaagtcacacaggaatgaaaccttatgtatgcaatgaatgtggcaaagccttcaggagcaagtcataccttattatacatacaaggactcatacaggagaaaaactccatgaatgcaacaattgtgggaaagccttcagttttaaatcacagctcattatacatcagaggattcatacaggagagaacccctatgaatgccatgaatgtgggaaagccttcagtcggaaataccagcttatttcacaccagagaactcatgcaggagagaagccttatgaatgcaccgactgtggaaaggcttttggtttaaagtcacagcttattatacaccagagaactcatacaggggagaaaccatttgaatgtagtgagtgtcagaaagcctttaatacaaagtcaaacctgattgtacatcagagaactcatacaggagagaaaccctatagttgtaatgaatgtggaaaagcctttacgttcaaatcacagctcattgtacataaaggagtgcacactggagtaaaaccctatggatgcagtcaatgtgcaaaaacctttagtttgaagtcccagctcattgtacatcagagaagtcacacaggagtaaaaccatatggatgcagtgagtgtgggaaagccttcaggagcaagtcataccttattatacatatgagaactcatacaggagagaaaccacatgagtgcagggaatgcgggaaatcctttagtttcaattcacaactcattgtgcatcagagaattcacacaggagaaaatccctatgaatgcagtgaatgtgggaaagcctttaataggaaagaccagctcatttcacatcagcgaactcatgcaggggaaaagccttatgggtgcagtgaatgtgggaaagcttttagcagcaagtcatacctaattatacacatgagaactcattcaggtgaaaaaccatatgaatgtaatgaatgtgggaaagccttcatttggaaatcactactcattgtacatgagcgaactcatgcaggggtcaacccttataaatgcagtcaatgtgagaaatccttcagtgggaaattacgccttcttgtacaccagagaatgcacacaagagagaaaccatatgaatgcagtgagtgtggaaaagccttcattaggaattctcaactcattgtacatcaaagaactcattcaggagagaaaccctatgggtgcaatgaatgtgggaaaaccttctctcaaaaatcaattctcagtgcacatcagagaacacatacaggagagaagccttgtaagtgcactgaatgtgggaaagccttttgttggaagtcacagctcattatgcatcagagaactcatgtagatgacaaacattgataattttacgaaactctgaaaagtggattcacaagagatagaaacaatcatatataaagagaaactctgtaagtggaatcatcttgtcatcttccagaaaactcatactgaatagaaactttatgaatgcacagcatatggaaaggcatccacagaaagctgttctttacatgcaaaaagatagtagacaatacacaggaaaactgaatttagtaaccactctgaaaatttttagcagcaagtcatacctttttttaaaaagttcatacaggtgaggaaccatgttaaacgttgtaaagtcattttactaaaataagattcacaaagaggaaacttcatgaaccagatgaatatagaatagacttctttgaaattcatagtttacagaattttaatgagagaaattattgagctaatgaatggcagaattaacaaaattacaaacattttatgtatcggaagcatataccttggagggaccatgctataagggaaagtgtaaatctagaaatgagaaacccctagggaaaaaatatatataggagtgaacatcttatgaatgtaccaaataaaccacagctggactgttaacctcaccttagaagcttcattctaaaaaaaaaaaaaaaaaaaaaaaaaaaaaccaacctgttattatatcttaatattaattttgaagaattatttcttttaggaatcattttaagaaattttattccaggtgttccaaaatttcaggaaaaggtttgagaaaattctcaattataaataataagatacagattatttcattgtacaagtgaatctagtaaggaggttaagaataagaaataacatcccagagcctacagggatatttagatatcttcctatgtgtactacataatatgaattttgcagtttggcattttacttgcgaatgccatatgtgagacaaaaatcatcttccagagatttcagtatctctgatactgacaatatctctgatatgacaatatcatcttccagagatttctactctgcataccaacattgtttctttgtgtcttaccaaatgcaacttgttactagaatatgacttactaaaaatgcatttccacactgcaaacattttttagggctatcttctgccctttggaagcagtcttggcagcaacctctttagtaatcaatataaggcacacttcatgtgtttgtgtagcctggaatctattctaccttcacaggttagaacatcttgatttcctcttaacgaaacattccctaacggtgtatgtagtcatgagggaaccaccattcaagatgccctgctcaggacttggcatgagcactatggtcagctgaggctcagaactgtacattgttaatgggtttttcaagttcagaaaagcaacatgagcttttgttctgtggtagcatgttgatgtaataagtagctatttcaatagaggttcccagaacagcttttgttactgtcattttcttaactttgttcacttgtcttttattttgagctattgggtgtgcttttaatacattccttgtttgattgcattagccattgtgtatcttttgcatacagcttactaaatcagatggcttcagaaatgggtggtagaggagtaggcagaaacttgcaaggatatgtggatatttggaaatggttgtttcccaagacaggatggaagtcttttaagcaagaaacttggcccatgctatgaagtcatgaaatgaattgttggcatcatgtgctcactgaggctttggggaaatggataagttgtcattgaaaaattttaaacagaattctggagtggtcaagaggggaatgcttttgatacccatgtataacatggagaataatgatcttaaaacttcaatttaagattatgtgtcagtgatactacttagttacatgtagctatagagtcacagtggtgaaaaactctgccagttgcttactcacaaagttagttttcttcactacctcatcaggtttgttatgtgagtgggcattaatctgggaagagtgggaccctgccagttagattagggctatcttggaggaatatgcggattcaatactgcaaatatttctgaaacaccttctgctttgtactctattagatacccaaagaaattttcatccttgaagcggaggaatttaatgatacctgaatgcctaactgttgtattctgcttatacagaatccaatctcaagatacttggggtgaagaatgatgattcacagaagggaagggacatcttacataaacaaataatcgcagatacttgctaaagtgtatcccccaatctgggaaatactgtaaaggtgtatattattattgatgtaccaaagaagacagaataaattcataagagaaagtttatattcagtttactactacctagggttagattttagtttgttgttttttcagatgcaaatctacatgcagccttgcctggtagaagccagaagtgttgacagtattgaggacagcactcacatactgtgggaaagaataatacttgattaggacttattatttaatgaaatgaaaattttacaaaacagaaa

SEQ ID NO: 63836 - DNA, 2844 bp, Artificial Sequence
  derived and/or modified sequence
atggccaccagagtgagaaccgccagcatctgggtgccccccctgcaggagagaaacagcagctgggacagaatcagaaagctgcagggccaggagagcatcctgggccagggcacccccggcctgcagcccctgcccggcacccccagacagaagcagaagagcagaagaatcgagaaggtgctggagtggctgttcatcagccaggagcagcccaagatcaccaagagctggggccccctgagcttcatggacgtgttcgtggacttcacctgggaggagtggcagctgctggaccccgcccagaagtgcctgtacagaagcgtgatgctggagaactacagcaacctggtgagcctgggctaccagcacaccaagcccgacatcatcttcaagctggagcagggcgaggagctgtgcatggtgcaggcccaggtgcccaaccagacctgccccaacaccgtgtggaagatcgacgacctgatggactggcaccaggagaacaaggacaagctgggcagcaccgccaagagcttcgagtgcaccaccttcggcaagctgtgcctgctgagcaccaagtacctgagcagacagaagccccacaagtgcggcacccacggcaagagcctgaagtacatcgacttcaccagcgactacgccagaaacaaccccaacggcttccaggtgcacggcaagagcttcttccacagcaagcacgagcagaccgtgatcggcatcaagtactgcgagagcatcgagagcggcaagaccgtgaacaagaagagccagctgatgtgccagcagatgtacatgggcgagaagcccttcggctgcagctgctgcgagaaggccttcagcagcaagagctacctgctggtgcaccagcagacccacgccgaggagaagccctacggctgcaacgagtgcggcaaggacttcagcagcaagagctacctgatcgtgcaccagagaatccacaccggcgagaagctgcacgagtgcagcgagtgcagaaagaccttcagcttccacagccagctggtgatccaccagagaatccacaccggcgagaacccctacgagtgctgcgagtgcggcaaggtgttcagcagaaaggaccagctggtgagccaccagaagacccacagcggccagaagccctacgtgtgcaacgagtgcggcaaggccttcggcctgaagagccagctgatcatccacgagagaatccacaccggcgagaagccctacgagtgcaacgagtgccagaaggccttcaacaccaagagcaacctgatggtgcaccagagaacccacaccggcgagaagccctacgtgtgcagcgactgcggcaaggccttcaccttcaagagccagctgatcgtgcaccagggcatccacaccggcgtgaagccctacggctgcatccagtgcggcaagggcttcagcctgaagagccagctgatcgtgcaccagagaagccacaccggcatgaagccctacgtgtgcaacgagtgcggcaaggccttcagaagcaagagctacctgatcatccacaccagaacccacaccggcgagaagctgcacgagtgcaacaactgcggcaaggccttcagcttcaagagccagctgatcatccaccagagaatccacaccggcgagaacccctacgagtgccacgagtgcggcaaggccttcagcagaaagtaccagctgatcagccaccagagaacccacgccggcgagaagccctacgagtgcaccgactgcggcaaggccttcggcctgaagagccagctgatcatccaccagagaacccacaccggcgagaagcccttcgagtgcagcgagtgccagaaggccttcaacaccaagagcaacctgatcgtgcaccagagaacccacaccggcgagaagccctacagctgcaacgagtgcggcaaggccttcaccttcaagagccagctgatcgtgcacaagggcgtgcacaccggcgtgaagccctacggctgcagccagtgcgccaagaccttcagcctgaagagccagctgatcgtgcaccagagaagccacaccggcgtgaagccctacggctgcagcgagtgcggcaaggccttcagaagcaagagctacctgatcatccacatgagaacccacaccggcgagaagccccacgagtgcagagagtgcggcaagagcttcagcttcaacagccagctgatcgtgcaccagagaatccacaccggcgagaacccctacgagtgcagcgagtgcggcaaggccttcaacagaaaggaccagctgatcagccaccagagaacccacgccggcgagaagccctacggctgcagcgagtgcggcaaggccttcagcagcaagagctacctgatcatccacatgagaacccacagcggcgagaagccctacgagtgcaacgagtgcggcaaggccttcatctggaagagcctgctgatcgtgcacgagagaacccacgccggcgtgaacccctacaagtgcagccagtgcgagaagagcttcagcggcaagctgagactgctggtgcaccagagaatgcacaccagagagaagccctacgagtgcagcgagtgcggcaaggccttcatcagaaacagccagctgatcgtgcaccagagaacccacagcggcgagaagccctacggctgcaacgagtgcggcaagaccttcagccagaagagcatcctgagcgcccaccagagaacccacaccggcgagaagccctgcaagtgcaccgagtgcggcaaggccttctgctggaagagccagctgatcatgcaccagagaacccacgtggacgacaagcactag

SEQ ID NO: 63837 - protein, 68 aa, Artificial Sequence
  derived and/or modified sequence
MATRVRTASIWTQSGKLMILWIGIRKIKTSWEVRQKALNALHLENYVFLVQSIFQDKNLINVARMERV

SEQ ID NO: 63838 - DNA, 207 bp, Artificial Sequence
  derived and/or modified sequence
atggccaccagagtgagaaccgccagcatctggacccagagcggcaagctgatgatcctgtggatcggcatcagaaagatcaagaccagctgggaggtgagacagaaggccctgaacgccctgcacctggagaactacgtgttcctggtgcagagcatcttccaggacaagaacctgatcaacgtggccagaatggagagagtgtag

SEQ ID NO: 63839 - DNA, 207 bp, Artificial Sequence
  derived and/or modified sequence
atggccaccagggtcagaaccgcaagcatatggactcagagtggcaaactgatgattttatggattgggatccgcaagatcaagacaagttgggaggtgcgccagaaggccttgaacgccctgcacctggagaactacgtcttcctcgtgcagagcattttccaggacaagaatctaattaatgtggcccggatggaacgcgtgtag

SEQ ID NO: 63840 - DNA, 207 bp, Artificial Sequence
  derived and/or modified sequence
atggccaccagggtgaggacagccagcatctggacccagagcggcaagctgatgatcctgtggattggcatcaggaagatcaagacctcctgggaggtgcggcagaaggccctgaatgccctgcacctggagaactacgtgttcctggtgcagagcatcttccaggacaagaacctgatcaacgtggccaggatggagcgggtgtag

SEQ ID NO: 63841 - DNA, 207 bp, Artificial Sequence
  derived and/or modified sequence
atggccacccgggtgcggaccgccagcatctggacccagagcggcaagctcatgatcctgtggattggcatcagaaagattaagaccagctgggaggtgaggcagaaggctttgaacgcacttcatctggaaaactacgtgttcttggttcaatctattttccaagacaagaatctcataaatgtcgcccggatggaacgagtgtag

SEQ ID NO: 63842 - DNA, 207 bp, Artificial Sequence
  derived and/or modified sequence
atggccacgagagttcgcaccgctagtatctggactcaatcaggtaagttaatgatcctctggattggcatcagaaaaattaagacatcctgggaagtcaggcaaaaggccctcaacgccctccacttggagaactatgtgttcctcgttcagtcaattttccaagataagaacctgatcaatgtcgcaaggatggaaagagtatag

SEQ ID NO: 63843 - protein, 167 aa, Artificial Sequence
  derived and/or modified sequence
MATRVRTASIWVPPLQERNSSWDRIRKLQGQESILGQGTPGLQPLPGTPRQKQKSRRIEKVLEWLFISQEQPKITKSWGTNTPNLISSSSWNKEKSCVWCRPKFQIRPVQTQSGKLMILWIGIRKIKTSWEVRQKALNALHLENYVFLVQSIFQDKNLINVARMERV

SEQ ID NO: 63844 - DNA, 504 bp, Artificial Sequence
  derived and/or modified sequence
atggccaccagagtgagaaccgccagcatctgggtgccccccctgcaggagagaaacagcagctgggacagaatcagaaagctgcagggccaggagagcatcctgggccagggcacccccggcctgcagcccctgcccggcacccccagacagaagcagaagagcagaagaatcgagaaggtgctggagtggctgttcatcagccaggagcagcccaagatcaccaagagctggggcaccaacacccccaacctgatcagcagcagcagctggaacaaggagaagagctgcgtgtggtgcagacccaagttccagatcagacccgtgcagacccagagcggcaagctgatgatcctgtggatcggcatcagaaagatcaagaccagctgggaggtgagacagaaggccctgaacgccctgcacctggagaactacgtgttcctggtgcagagcatcttccaggacaagaacctgatcaacgtggccagaatggagagagtgtag

SEQ ID NO: 63845 - DNA, 504 bp, Artificial Sequence
  derived and/or modified sequence
atggctacccgagtccggactgcgagtatatgggtgccaccattacaggaacgcaattcctcctgggaccgcatccggaagctgcagggacaggagtccatcttaggacaaggcacccccggcttgcagcctctgcccgggacgcctcggcaaaagcagaagtctagaagaattgagaaagtcctggagtggttgttcatctctcaggagcagccaaagatcacaaagtcctgggggacaaatactccgaacctgatatcgtcctcaagctggaacaaagaaaagtcatgcgtatggtgcaggccaaagtttcaaatcagaccagtccaaacccaaagcggcaaactaatgatactctggatcggcatccgcaagataaagaccagttgggaggttcgccaaaaagcgctgaacgccctccatttagaaaattacgtttttctggtgcagagcatcttccaagacaaaaacttgatcaatgtggccaggatggaacgggtgtag

SEQ ID NO: 63846 - DNA, 504 bp, Artificial Sequence
  derived and/or modified sequence
atggctacgagggtgcggacggcctcaatctgggtccctcccctgcaggagaggaactcatcgtgggaccggatccggaaactccagggccaggaaagcatactgggacagggaaccccgggcctccagccattgccaggtacccctcgtcagaagcagaagtcaaggaggattgagaaagtcttagagtggctcttcattagccaggagcaacccaaaatcacaaagtcttgggggactaatactccaaacttgatttccagctcttcttggaataaggagaagtcatgcgtatggtgccgacctaaatttcaaatacggccagtgcagacccagagtggcaagttaatgattctctggattggcatccggaagatcaagacatcctgggaggttcgtcaaaaggcactgaatgcgctgcatcttgagaactatgtcttccttgtgcagtcgatctttcaggacaagaatctgatcaatgtcgcccggatggagagagtgtag

SEQ ID NO: 63847 - DNA, 504 bp, Artificial Sequence
  derived and/or modified sequence
atggccaccagggtgaggacagccagcatctgggtgccccccctgcaggagaggaacagctcctgggaccgcatcaggaagctgcagggccaggagagcatcctgggccagggcaccccaggcctgcagcccctgcccggcaccccccggcagaagcagaagagccgccgcatcgagaaggtgctggagtggctgttcatcagccaggagcagcccaagatcaccaagtcctggggcaccaacacccccaacctgatcagcagcagctcctggaacaaggagaagagctgtgtgtggtgccggcccaagttccagatccggcctgtgcagacccagagcggcaagctgatgatcctgtggattggcatcaggaagatcaagacctcctgggaggtgcggcagaaggccctgaatgccctgcacctggagaactacgtgttcctggtgcagagcatcttccaggacaagaacctgatcaacgtggccaggatggagcgggtgtag

SEQ ID NO: 63848 - DNA, 504 bp, Artificial Sequence
  derived and/or modified sequence
atggccacccgggtgcggaccgccagcatctgggtgccccccctgcaagaacgaaatagcagctgggaccgaataagaaaactgcagggacaggaatctattcttggccagggcactcctggtttgcagccacttcccggaacccccagacaaaaacaaaaatcacgacgtatcgagaaggtcctggagtggttatttatctcacaagagcagcctaaaatcacaaaatcctgggggactaacacccctaacctgattagcagtagcagttggaacaaggaaaaaagctgtgtatggtgtcgacccaaattccagatccgacctgttcaaacacagtcaggcaaattaatgattctgtggatcggaatcagaaaaattaagacttcctgggaagtgcgccagaaagctctcaacgcgcttcacttagaaaactacgtgttcctggtgcagtcaattttccaggacaagaacctgataaacgttgcacggatggagcgtgtttag

SEQ ID NO: 63849 - DNA, 504 bp, Artificial Sequence
  derived and/or modified sequence
atggccacccgggtgcggaccgccagcatctgggtgccccccctgcaagagaggaatagttcatgggatagaattagaaaactgcagggccaggaaagtatcctgggtcagggcactcctggcctacaacctttgccgggaacaccaaggcagaaacagaaatctcggcgtatcgaaaaggtgctagaatggctcttcattagccaggagcagcccaagattactaagtcgtggggcacgaacactccaaacctgataagttcatctagttggaacaaggagaagagctgtgtgtggtgtaggccaaaattccagatccgccctgtgcaaacccagagtgggaaactcatgattttatggatcggtatacgcaaaataaagaccagctgggaagtgcgacagaaagcccttaacgcccttcatctggagaactacgtgtttctggtccagtctatcttccaggataaaaacctcattaatgtggcgcggatggaaagagtctag

SEQ ID NO: 63850 - DNA, 504 bp, Artificial Sequence
  derived and/or modified sequence
atggcaacacgcgtacggacggcctcaatttgggtgcccccactccaggaacgcaattccagttgggacagaattaggaaactgcagggacaagagagcattctcggacagggcacgccaggtcttcagccattacctggtaccccaaggcaaaaacagaaatcaagacgaattgaaaaggttctggagtggttgtttattagccaggagcaacccaagataacaaagtcctggggcaccaatacccctaacttaatctcttcctcaagctggaataaggaaaagtcttgtgtgtggtgccggcctaaattccagatcaggcctgtgcaaacacagagcgggaaattaatgattctctggattggcattaggaagattaagacctcctgggaggttcgacagaaagccctgaacgccctgcatctggagaactatgtgttcctggtacagtctatttttcaggataagaacctcatcaatgtggccagaatggagagggtgtag

SEQ ID NO: 63851 - DNA, 504 bp, Artificial Sequence
  derived and/or modified sequence
atggctaccagagtgcgaacagccagtatttgggtaccacctctgcaggaaagaaacagcagctgggacaggattcggaaactgcagggccaggagagcatactgggtcaggggacaccaggtctgcagcccttgccgggaacccctaggcagaagcagaaatcacgtaggattgagaaggtcctggagtggttattcatcagccaagagcagcctaaaataacaaaatcttggggtactaacaccccaaacctgatcagttcaagcagctggaataaagagaagtcctgtgtgtggtgcagacccaaatttcagattcggcctgtgcagacccagagtggaaaactaatgatcctatggatcggtatcaggaaaatcaagacatcttgggaggttcgacaaaaagcgctgaacgctttgcacctggaaaactatgtcttcttggttcagtccatttttcaggacaaaaatctgataaacgtcgctcgcatggaacgagtctag

SEQ ID NO: 63852 - DNA, 781 bp, Artificial Sequence
  derived and/or modified sequence
atacgtagcggccgccattgttccgcgccgatggcgagatccttgttcctcagatagcgttcatcgcccgtcgtggtcaacgggccagccgagtctggagtggttgcgaacccttctggctgcagatctggaggtggaggcagtaccctggactctattctgctgccccttcagggtttggaggagccggagcatccctcgcgtcctgtcacttccagcgaggcacacaaaactgaccgtagggatggccaccagggtccggacagcttctatttgggtcccacctctccaagaacgaaacagttcatgggataggatcagaaagctccaaggtcaggaatccatcttgggccaagggactcctggtctgcaacctctccctggaacacccaggcagaagcagaagagtcgcagaatagagaaagtcctagagtggctgtttatttcccaagagcagccaaaaatcaccaagtcctggggtaccaacacaccaaacctgatatcatcttcaagttggaacaaggagaagagctgtgtatggtgcaggcccaagttccaaatcagacctgtccaaacacagtctggaaaattgatgatcttatggattggcatcaggaaaataaagacaagctgggaagtacggcaaaaagctttgaatgcactacatttggaaaactatgtcttcttagtacaaagtatctttcaagacaaaaacctcataaatgtggcacgcatggaaagagtttgaaatatatagatttcactagtgattatgctagaa

SEQ ID NO: 63853 - protein, 100 aa, Artificial Sequence
  derived and/or modified sequence
MATRVRTASIWGTNTPNLISSSSWNKEKSCVWCRPKFQIRPVQTQSGKLMILWIGIRKIKTSWEVRQKALNALHLENYVFLVQSIFQDKNLINVARMERV

SEQ ID NO: 63854 - DNA, 303 bp, Artificial Sequence
  derived and/or modified sequence
atggccaccagagtgagaaccgccagcatctggggcaccaacacccccaacctgatcagcagcagcagctggaacaaggagaagagctgcgtgtggtgcagacccaagttccagatcagacccgtgcagacccagagcggcaagctgatgatcctgtggatcggcatcagaaagatcaagaccagctgggaggtgagacagaaggccctgaacgccctgcacctggagaactacgtgttcctggtgcagagcatcttccaggacaagaacctgatcaacgtggccagaatggagagagtgtag

SEQ ID NO: 63855 - DNA, 303 bp, Artificial Sequence
  derived and/or modified sequence
atggcaacccgagttcggactgcttccatctggggtacgaatacaccaaacttaatttctagctcctcttggaataaagaaaagtcatgtgtgtggtgtcggccaaagtttcagattaggccagtgcaaactcagagtggaaaactgatgatcctgtggattggaatccgcaaaatcaagacctcatgggaggtgcgccaaaaagctctgaatgctcttcacctcgagaactatgttttcctggtacagtctatattccaggacaaaaatctgatcaacgtggcaaggatggagagggtttag

SEQ ID NO: 63856 - DNA, 303 bp, Artificial Sequence
  derived and/or modified sequence
atggccaccagggtgaggacagccagcatctggggcaccaacacccccaacctgatcagcagcagctcctggaacaaggagaagagctgtgtgtggtgccggcccaagttccagatccggcctgtgcagacccagagcggcaagctgatgatcctgtggattggcatcaggaagatcaagacctcctgggaggtgcggcagaaggccctgaatgccctgcacctggagaactacgtgttcctggtgcagagcatcttccaggacaagaacctgatcaacgtggccaggatggagcgggtgtag

SEQ ID NO: 63857 - DNA, 303 bp, Artificial Sequence
  derived and/or modified sequence
atggccacccgggtgcggaccgccagcatctggggcaccaacaccccaaatctgatcagtagcagttcatggaacaaggaaaaatcctgcgtgtggtgtcgacctaaatttcagataagacctgtgcagacacagtctggcaagctgatgattctgtggattggcatccgaaaaattaaaaccagctgggaagtgcgacagaaagctctaaatgcgttgcacctggagaactatgtcttcctggtgcagtcaattttccaggacaagaatctgataaacgtggctcgcatggagcgcgtgtag

SEQ ID NO: 63858 - DNA, 303 bp, Artificial Sequence
  derived and/or modified sequence
atggccacacgggtgagaaccgccagcatttggggaaccaatacccctaacttgatatcgtcctccagttggaacaaggagaaatcctgtgtctggtgtcggccaaaatttcaaatccggccagtacaaacccagagtggtaaactaatgatcctgtggattggaatccgcaaaattaaaactagttgggaagtccggcagaaagccttgaacgccctgcatttagagaattacgtattcctggtgcaaagcatattccaggataaaaacctgataaatgttgctagaatggaacgtgtgtag

SEQ ID NO: 63859 - protein, 126 aa, Artificial Sequence
  derived and/or modified sequence
MATRVRTASIWGPLSFMDVFVDFTWEEWQLLDPAQKCLYRSVMLENYSNLVSLGYQHTKPDIIFKLEQGEELCMVQAQVPNQTCPILKAGKSKAKVLAGLVSGEGLLCASKMTPCCCILWRHSLEN

SEQ ID NO: 63860 - DNA, 381 bp, Artificial Sequence
  derived and/or modified sequence
atggccaccagagtgagaaccgccagcatctggggccccctgagcttcatggacgtgttcgtggacttcacctgggaggagtggcagctgctggaccccgcccagaagtgcctgtacagaagcgtgatgctggagaactacagcaacctggtgagcctgggctaccagcacaccaagcccgacatcatcttcaagctggagcagggcgaggagctgtgcatggtgcaggcccaggtgcccaaccagacctgccccatcctgaaggccggcaagagcaaggccaaggtgctggccggcctggtgagcggcgagggcctgctgtgcgccagcaagatgaccccctgctgctgcatcctgtggagacacagcctggagaactag

SEQ ID NO: 63861 - DNA, 381 bp, Artificial Sequence
  derived and/or modified sequence
atggccaccagagtgcgcacagcctccatctgggggcccctgagcttcatggacgtgttcgtcgatttcacatgggaagagtggcagctgcttgaccctgcccaaaaatgcctgtataggagcgtgatgcttgaaaactactcaaacctcgtcagcctgggatatcagcatacgaagcctgacattattttcaagctagagcaaggggaggagctttgtatggtgcaggcccaagttcctaatcagacctgccccattttgaaagcaggcaaatctaaagccaaagtgctcgcagggctggtcagcggggagggccttctgtgtgcctcaaaaatgactccatgctgctgcatcttatggaggcattcccttgaaaactag

SEQ ID NO: 63862 - DNA, 381 bp, Artificial Sequence
  derived and/or modified sequence
atggccacacgcgtgaggaccgcttcaatatggggaccccttagtttcatggatgtgtttgtggactttacctgggaagaatggcaactgttggatcccgcccagaagtgcttataccgctctgtgatgctggagaattatagcaatcttgtgagcctagggtaccagcatacaaagcccgacatcatcttcaagctcgagcagggtgaggagctttgtatggttcaggcacaggtacctaatcagacctgcccaattctcaaagctggtaaaagtaaggccaaagtcttggccggtctggtgagcggggaagggctcctttgtgcgtctaagatgaccccctgctgctgcattctgtggcggcattccctggagaactag

SEQ ID NO: 63863 - DNA, 381 bp, Artificial Sequence
  derived and/or modified sequence
atggccaccagggtgaggacagccagcatctggggccccctgtccttcatggatgtgtttgtggacttcacctgggaggagtggcagctgctggaccctgcccagaagtgcctgtacagatctgtgatgctggagaactacagcaacctggtgtccctgggctaccagcacaccaagccagacatcatcttcaagctggagcagggcgaggagctgtgcatggtgcaggcccaggtgcccaaccagacctgccccatcctgaaggccggcaagagcaaggccaaggtgctggccggcctggtgtctggagagggcctgctgtgtgccagcaagatgaccccctgctgctgcatcctgtggaggcacagcctggagaactag

SEQ ID NO: 63864 - DNA, 381 bp, Artificial Sequence
  derived and/or modified sequence
atggccacccgggtgcggaccgccagcatctggggccccctgagcttcatggacgtgtttgtggattttacatgggaagaatggcagttgttagacccggctcaaaaatgcctgtacaggtctgtgatgctggagaattatagtaatctggtatctcttggctaccagcacaccaagcctgacattatctttaagctagagcaaggcgaggaactgtgtatggttcaggcacaagtgccgaatcagacatgtcctattctgaaggcaggcaaatctaaggcaaaggttctggccggcctcgtctctggcgagggccttttgtgtgcctcaaagatgaccccctgttgctgcatcttgtggcgtcactctcttgaaaactag

SEQ ID NO: 63865 - DNA, 381 bp, Artificial Sequence
  derived and/or modified sequence
atggccacccgggtgcggaccgccagcatctggggccccctgagctttatggacgtcttcgtggacttcacatgggaggagtggcaattgctggaccctgcacagaagtgtctgtacaggagtgtgatgcttgaaaactactcgaacctggtttcactggggtatcagcacaccaaaccagacattatttttaagctcgaacaaggggaggagctttgcatggtgcaggcgcaggttcccaaccagacttgtcctattctgaaggcaggaaaatctaaggcaaaagtcctagcaggtctggttagcggggagggattgttgtgtgcttcgaaaatgaccccctgctgttgcattttgtggcgccattcgcttgaaaactag

SEQ ID NO: 63866 - DNA, 381 bp, Artificial Sequence
  derived and/or modified sequence
atggccactagagttcggaccgccagcatctggggtcctctgtcatttatggatgtgttcgtggatttcacttgggaagagtggcagctgttagaccccgctcaaaagtgtctgtatcgaagcgttatgctcgagaattacagcaacttggtgtcgctggggtaccaacataccaagcctgacatcattttcaaactggagcagggtgaggagctatgtatggtgcaggcccaggttcccaatcagacttgcccaatacttaaagccggaaagagcaaggcgaaggtcctagcaggcttggtctccggcgaaggcttactctgcgcatccaaaatgaccccctgctgttgtatcctctggcggcattccttagagaattag

SEQ ID NO: 63867 - DNA, 381 bp, Artificial Sequence
  derived and/or modified sequence
atggccacaagagtgaggactgccagtatttggggcccactcagcttcatggatgtttttgtcgattttacgtgggaggaatggcagctgctggatcctgcgcagaagtgtctttacaggtccgttatgttagaaaattacagcaatctggtgtccctcggatatcagcataccaaacccgacatcatttttaaactcgaacagggtgaggagttatgcatggtgcaggcacaggtcccaaaccagacttgccccatccttaaggccggaaaatctaaggctaaagtgctcgctggcctcgtttcaggggaggggctcctgtgcgcttctaaaatgacaccatgctgttgcatactgtggcggcacagtctggaaaactag

SEQ ID NO: 63868 - DNA, 686 bp, Artificial Sequence
  derived and/or modified sequence
atctggaggtggaggcagtaccctggactctattctgctgccccttcagggtttggaggagccggagcatccctcgcgtcctgtcacttccagcgaggcacacaaaactgaccgtagggatggccaccagggtccggacagcttctatttggggacctttgtcattcatggatgtgtttgtggattttacctgggaggagtggcagctgctagacccagcacagaagtgcctgtacaggagtgtgatgttggagaactatagcaacctggtgtccctagggtaccaacacaccaaacctgatatcatcttcaagttggaacaaggagaagagctgtgtatggtgcaggcccaagttccaaatcagacctgtccaattttgaaggctggaaagtccaaagccaaggtgctggcaggtttggtgtctggtgagggcctgctctgtgcttccaagatgacgccttgttgctgcatcctctggagacacagtctggaaaattgatgatcttatggattggcatcaggaaaataaagacaagctgggaagtacggcaaaaagctttgaatgcactacatttggaaaactatgtcttcttagtacaaagtatctttcaagacaaaaacctcataaatgtggcacgcatggaaagagtttgaaatatatagatttcactagtgattatgctag

SEQ ID NO: 63869 - protein, 903 aa, Artificial Sequence
  derived and/or modified sequence
MAPTKPSFQQDPSRRERLQALRKEKSRDAARSRRGKENFEFYELAKLLPLPAAITSQLDKASIIRLTISYLKMRDFANQGDPPWNLRMEGPPPNTSVKVIGAQRRRSPSALAIEVFEAHLGSHILQSLDGFVFALNQEGKFLYISETVSIYLGLSQVELTGSSVFDYVHPGDHVEMAEQLGMKLPPGRGLLSQGTAEDGASSASSSSQSETPEPVESTSPSLLTTDNTLERSFFIRMKSTLTKRGVHIKSSGYKVIHITGRLRLRVSLSHGRTVPSQIMGLVVVAHALPPPTINEVRIDCHMFVTRVNMDLNIIYCENRISDYMDLTPVDIVGKRCYHFIHAEDVEGIRHSHLDLLNKGQCVTKYYRWMQKNGGYIWIQSSATIAINAKNANEKNIIWVNYLLSNPEYKDTPMDIAQLPHLPEKTSESSETSDSESDSKDTSGITEDNENSKSDEKGNQSENSEDPEPDRKKSGNACDNDMNCNDDGHSSSNPDSRDSDDSFEHSDFENPKAGEDGFGALGAMQIKVERYVESESDLRLQNCESLTSDSAKDSDSAGEAGAQASSKHQKRKKRRKRQKGGSASRRRLSSASSPGGLDAGLVEPPRLLSSPNSASVLKIKTEISEPINFDNDSSIWNYPPNREISRNESPYSMTKPPSSEHFPSPQGGGGGGGGGGGLHVAIPDSVLTPPGADGAAARKTQFGASATAALAPVASDPLSPPLSASPRDKHPGNGGGGGGGGGGAGGGGPSASNSLLYTGDLEALQRLQAGNVVLPLVHRVTGTLAATSTAAQRVYTTGTIRYAPAEVTLAMQSNLLPNAHAVNFVDVNSPGFGLDPKTPMEMLYHHVHRLNMSGPFGGAVSAASLTQMPAGNVFTTAEGLFSTLPFPVYSNGIHAAQTLERKED

SEQ ID NO: 63870 - DNA, 2712 bp, Artificial Sequence
  derived and/or modified sequence
atggcgccaactaaaccgtctttccagcaggatccttcaaggagggagcggctgcaggccttgcggaaagaaaagtcacgcgacgctgctcgatcaagacgcggaaaagagaatttcgagttttacgagctcgccaaattgttacctttacctgccgcgattacctctcaacttgacaaggcatccatcattcgactcacaattagctatctgaagatgagagacttcgccaatcagggggatcccccatggaacctgcgaatggagggacccccacccaacacttcagtgaaagtgattggagcgcagagaaggagatctcccagcgccctggcaatagaggtcttcgaggctcacctggggagtcacattctccagagccttgacggatttgtctttgcacttaatcaagaggggaaatttttgtacattagtgaaactgtgtcaatttacctaggcctgagtcaagtggagctgacaggctctagcgtattcgactatgtccatcctggcgatcacgtggagatggccgaacagttgggtatgaaactgccacccggccgcggcctgctttctcagggcacggccgaggatggagcaagctcggccagcagctcatcacagtcagaaacccctgagcctgtagagtccacatcgccctcgctactgacaacagataatactttagagcggtctttcttcatcaggatgaaatccacacttacaaaacgaggtgtccatatcaaaagcagcggatacaaagtcatccacataacgggacggctgagacttagggtgtcactgtcccacggcagaacagtcccctctcagataatgggtctcgtggtcgtcgctcatgctttgcccccgcccacgattaatgaggtacggatcgattgtcatatgttcgtgactcgagtgaatatggacctgaacattatctactgcgaaaataggatcagtgattacatggacctgacacctgtagacattgtcggaaaaagatgctatcacttcatacacgccgaggatgtggagggaatacggcacagccatctagacttgctaaacaaaggccagtgcgtgactaaatattaccgctggatgcagaaaaacggtgggtatatctggattcagtccagcgctactatcgcaattaacgccaagaacgcaaacgaaaagaacatcatctgggtgaactatctgctttccaaccctgagtacaaagacactcccatggacattgcccaactgcctcacttgccagagaaaacctcggaaagctctgaaaccagtgactccgagtcggattctaaagacactagcggtatcacagaagacaatgagaattccaaatccgatgaaaagggcaaccagtcggagaatagcgaggatcctgagcccgaccgtaagaagtcaggcaatgcctgcgataacgacatgaattgtaacgacgacggccactccagttccaaccccgacagcagagactcagacgacagcttcgaacattccgattttgaaaaccctaaagctggcgaggacggttttggggctctaggagcgatgcagatcaaggtcgagagatatgtggagtctgagtcagaccttagattgcagaattgcgagtcgctgacaagtgattctgccaaggattccgatagcgccggggaggccggcgcgcaggcttcgtctaagcaccagaagagaaaaaaacggagaaagagacagaaaggaggatccgcaagcaggagacgtctttcctccgcgtccagccctggagggctagacgcggggctcgtggagccacctagacttttatcgtcccccaattcagctagcgtgctaaaaattaaaaccgagatcagcgagcctattaactttgataatgactccagcatctggaactacccaccaaacagggaaatctcccgaaatgagtccccctacagcatgactaaacccccctcctctgaacacttcccaagtccccagggaggcggcggcggagggggtggggggggtggtctgcatgtggccatccctgacagtgtgctgactccacctggtgcagacggcgctgctgcaagaaagacccaattcggggcctccgcgaccgcagcccttgcacctgttgctagcgacccactgtccccccctctgtctgcctcccctcgagataaacaccccggtaacgggggcggagggggcggcgggggtggaggcgccgggggaggcggcccaagtgcaagtaattctctcttatataccggggatctggaagcacttcagaggttacaggccggtaacgtggtattgcccctggttcaccgcgtgaccggaaccctggccgcaacctccaccgccgctcagcgggtttatactacaggtaccattaggtacgcccccgctgaagtgacgctcgccatgcagagtaacctcctgccaaatgctcacgcagtgaattttgtggatgttaactcacctggctttggtctcgacccaaagacaccaatggagatgttgtaccatcatgtgcaccggttaaacatgagcgggcccttcggtggagcagtgtctgccgcttcccttacccaaatgcctgctggtaacgtgttcactacagcagagggtttattctccaccctgccattcccagtttattccaatggtatccatgccgcccaaaccttagaacgtaaggaggactag

SEQ ID NO: 63871 - DNA, 2712 bp, Artificial Sequence
  derived and/or modified sequence
atggcccccaccaagcccagcttccagcaggaccccagccggcgggagcggctgcaggccctgaggaaggagaagagcagagatgctgcccggagcagaagaggcaaggaaaattttgagttctatgagctggccaagctgctgcccctgcctgctgccatcaccagccagctggacaaggccagcatcatccggctgaccatctcctacctgaagatgagggactttgccaaccagggcgaccccccctggaacctgaggatggagggccccccacccaacacctctgtgaaggtgattggagcccagaggagaagaagccccagcgccctggccatcgaggtgtttgaggcccacctgggcagccacatcctgcagagcctggatggctttgtgtttgccctgaaccaggagggcaagttcctgtacatcagcgagaccgtgtccatctacctgggcctgagccaggtggagctgaccggcagctctgtgtttgattatgtgcaccctggggaccacgtggagatggccgagcagctgggcatgaagctgcccccaggccggggcctgctgagccagggcacagcagaagatggagccagcagcgccagcagcagcagccagagcgagaccccagagcctgtggagagcaccagccccagcctgctgaccacagacaacaccctggagaggagcttcttcatccgcatgaagagcaccctgaccaagaggggcgtgcacatcaagagcagcggctacaaggtgatccacatcaccggccgcctgcggctgcgggtgtccctgagccacggccgcacagtgcccagccagatcatgggcctggtggtggtggcccacgccctgcccccacccaccatcaatgaggtgagaattgactgccacatgtttgtgaccagggtgaacatggacctgaacatcatctactgtgaaaatcgcatcagtgactacatggacctgacccctgtggacatcgtgggcaagcgctgctaccacttcatccacgcagaagatgtggagggcatccgccacagccacctggacctgctgaacaagggccagtgtgtgaccaagtactaccgctggatgcagaagaatggaggctacatctggatccagagcagcgccaccatcgccatcaatgccaagaatgccaatgagaagaacatcatctgggtgaactacctgctgagcaaccctgagtacaaggacacccccatggacatcgcccagctgccccacctgcctgagaagaccagcgagagcagcgagaccagtgacagcgagagtgacagcaaggacaccagcggcatcacagaggacaatgaaaacagcaagagtgatgagaagggcaaccagagtgaaaattctgaggaccctgagccagacaggaagaagtctggaaatgcctgtgacaatgacatgaactgcaatgatgatggccacagcagcagcaacccagacagccgggacagtgatgacagctttgagcacagcgactttgagaaccccaaggccggggaggatggctttggagccctgggcgccatgcagatcaaggtggagcgctacgtggagagcgagagtgacctgcggctgcagaactgtgagagcctgaccagtgacagcgccaaggacagcgacagcgctggggaggccggggcccaggccagcagcaagcaccagaagaggaagaagaggaggaagaggcagaagggcggcagcgccagcagaagaaggctgagcagcgccagcagccctgggggcctggatgctggcctggtggagcccccccggctgctgagcagccccaacagcgcctctgtgctgaagatcaagacagagatcagcgagcccatcaactttgacaatgacagcagcatctggaactacccacccaaccgggagatcagcagaaatgaaagcccctacagcatgaccaagccacccagcagcgagcacttccccagcccccagggcggcggcggcggcggcggcggcggcggcggcctgcacgtggccatcccagacagcgtgctgaccccacctggagcagatggagctgctgccaggaagacccagtttggagccagcgccacagctgccctggcccctgtggccagtgaccccctgagcccccccctgagcgccagcccccgggacaagcaccctggaaatggaggcggcggcggcggcggcggcggcggggccggcggcggcggccccagcgccagcaacagcctgctgtacacaggagacctggaggccctgcagaggctgcaggccggaaatgtggtgctgcccctggtgcaccgggtgacaggcaccctggccgccaccagcacagctgcccagagggtgtacaccaccggcaccatccgctatgccccagctgaggtgaccctggccatgcagagcaacctgctgcccaatgcccatgctgtgaactttgtggatgtgaacagccctggcttcggcctggaccccaagacccccatggagatgctgtaccaccacgtgcaccggctgaacatgagcggcccctttggaggagctgtgtctgctgccagcctgacccagatgcctgctggaaatgtgttcaccacagctgagggcctcttcagcaccctgcccttccctgtgtacagcaatggcatccacgccgcccagaccctggagaggaaggaggactag

SEQ ID NO: 63872 - DNA, 2712 bp, Artificial Sequence
  derived and/or modified sequence
atggcccccaccaagcccagcttccagcaggaccccagccggcgggaacgcctccaagctcttcggaaagagaaatcacgggacgccgcgcgatctcggagaggcaaagagaacttcgaattctacgaactggctaaactactgcccctccccgccgctatcacctcccagttagacaaggcatctatcatacgtctaactatttcctacctgaagatgagggatttcgcaaaccagggggaccccccttggaatctgaggatggaggggccgccccctaataccagtgttaaagtcatcggagcgcagcgtcgaaggtcacctagcgctctcgctattgaggtgttcgaagcccacctgggctcccacatcctgcagtccctggatgggttcgtgtttgccttgaatcaggaaggcaagttcttgtacatctctgaaacagtgtcaatctacctcggactctcacaggttgaactcacaggaagttctgtgttcgattatgtgcacccaggcgaccacgtagaaatggccgagcagttaggaatgaaactgcctccgggcaggggactgcttagtcagggcaccgccgaggatggagcaagttctgcttcttcctcctctcagagtgagacaccagaacccgtcgaatcaacatctccaagcctattgactactgataatactcttgagaggtcttttttcatcagaatgaagtccaccctcacgaaaagaggagtccacataaagtcgagcggctataaagtaatccatatcaccggaagattgcggctgagagtcagcctgtctcatggaaggactgtccctagccagattatgggccttgtggtggtggcgcacgccctgcctcctcccaccattaacgaggtaaggattgactgtcacatgttcgtcacccgggtgaacatggacctcaacatcatttattgcgaaaatcgaatttcagactacatggatctgactcccgtggacatcgttggcaaacgctgctaccattttattcacgccgaagatgtcgaaggtataaggcatagtcaccttgatctgttgaacaagggccagtgcgttaccaagtactataggtggatgcagaagaacggaggctacatttggatacagagttccgcaaccatcgctatcaacgccaaaaacgcaaatgagaagaacatcatctgggtcaattacctgttatcgaaccccgagtataaggataccccaatggacattgctcagctcccccatctacctgagaaaacctctgagtccagtgaaacaagtgactcggagagtgatagtaaagacacctcggggataacagaggacaacgaaaatagtaaatccgacgaaaagggcaaccaatccgagaactctgaagatccagaaccggatcgcaagaagtcaggcaacgcctgtgacaatgacatgaactgtaacgatgacggccatagctcctcgaatcccgattcacgagactctgacgactcattcgagcatagtgattttgaaaatcctaaggcaggcgaagacggtttcggagctctgggcgctatgcaaatcaaagttgagcgatacgtggagagtgaatccgaccttcgtctgcaaaattgtgagagcctgacatcagattcagcaaaagattcagattctgccggcgaggccggtgcgcaggccagctccaagcaccagaaacgtaaaaagcggagaaagagacagaagggtggttctgcctcgagacgaaggctgagttccgcctcctcccctgggggactggatgccggcctggtggaaccccccaggttactctcctcccccaactcagccagtgttctgaaaattaaaacggaaatttctgagcctatcaattttgacaacgattcttccatctggaattatccccctaacagagagatctcgcgaaacgagtccccttactctatgaccaaacctccgagtagtgaacatttcccttcgccacaaggcggaggtggtggtggagggggcgggggggggttgcatgtggccattccagacagtgtgctcacaccccccggagcagacggagctgcggccaggaaaacgcaattcggcgccagcgccacggctgccttggcgccagtcgcctctgatcctctatctcctcctctgtcagcatctccgagggataagcaccccgggaatggggggggggggggaggcggaggcggcggagcagggggaggaggtccaagcgcaagcaactctcttctgtacacgggggacctcgaggcacttcagaggctgcaggctggaaatgttgtattgcccttagtccatcgcgtgacaggtacgctggcggccacatctactgctgctcagcgagtctacaccaccgggactatccggtatgccccggcagaagtaacactggcaatgcaatccaacctcttgccaaacgcccacgcagtcaattttgtggacgtaaacagtccgggtttcgggctcgatcctaagactccaatggaaatgctgtaccatcacgttcacagactcaacatgagtgggcctttcgggggtgcggtgtccgccgcctccctgacccagatgccagccgggaacgtgtttactaccgcagaggggttgttttcaactctgcccttccccgtgtactcaaatggaattcatgccgcccaaacgctggagcgtaaagaagattag

SEQ ID NO: 63873 - DNA, 2926 bp, Artificial Sequence
  derived and/or modified sequence
ggggagagaggcaaaaagtaagagaggaaaaaaaatagcaggaagatggcgcccaccaagcccagctttcagcaggatccttccaggcgagaacgtttacaagcattgagaaaggagaaatcccgagatgctgctcgctcccgccggggaaaagaaaactttgagttctatgaattggccaagttgttgcctcttcctgcagccattaccagccagctcgacaaggcatccatcattcgacttacaattagctatctgaaaatgagggactttgctaaccagggggaccctccgtggaacttgcgaatggaaggccctccacctaacacatcagtaaaagttataggtgcacagcgaaggagaagccccagtgcactagccattgaagtatttgaagcacatttgggaagccacattttgcagtccctggatggctttgtatttgcactaaatcaggaaggaaaatttttgtacatttccgaaacagtctccatctacctaggcctctcacaagtggagctgacaggcagcagtgtctttgactatgtccaccccggagatcacgtggagatggctgagcagctgggcatgaagctcccccctgggcggggtctcctgtcacagggcactgctgaggacggagccagctcagcatcttcctcctctcagtcggagacccccgagccagtggagtcaaccagccccagtctgctaaccactgacaacactcttgagcgttcctttttcatccgaatgaaatctactctgaccaaacgcggtgtgcacatcaaatcatcaggatataaggtgattcacataacaggccggctacgcctgagagtgtcgctgtcccacgggaggaccgtccccagccaaatcatgggtctcgtggttgttgcgcatgccttgcctccccctacgatcaatgaagtcagaattgactgccatatgttcgtcactcgagtaaatatggacctcaatatcatttactgtgaaaataggattagtgattatatggatctgacccctgtagatatcgtagggaagagatgctaccacttcatccatgctgaagacgtggagggcatcaggcacagtcacttggacttgctgaataagggtcagtgtgtgacaaagtactatcgctggatgcagaagaacggaggatatatttggatacagtccagtgccaccatagctattaatgccaagaatgcaaatgaaaagaatatcatctgggtgaattaccttcttagcaatcctgagtacaaggacacacccatggacatcgcacagctcccccatctgccggagaaaacttccgaatcctcggagacatccgactctgagtcagactctaaagacacctcaggtattacagaggacaacgagaactccaagtccgacgagaaggggaaccagtccgagaacagcgaagacccggagcccgaccggaagaagtcgggcaacgcgtgtgacaacgacatgaactgcaacgacgacggccacagctccagtaacccggacagccgcgacagcgacgacagcttcgagcactcggactttgagaaccccaaggcgggcgaggacggcttcggtgctctgggcgcgatgcagatcaaggtggagcgctacgtggagagcgagtcggacctgcggctgcagaactgcgagtcactcacgtccgacagcgccaaggactcggacagcgcaggcgaggcgggcgcgcaggcctccagcaagcaccagaagcgcaagaaaaggcggaaacggcaaaagggcggcagcgccagccgccggcgcctgtccagcgcgtcgagcccaggcggcctggacgcgggcctggtggagcccccgcggctgctgtcctcccccaacagtgcctcggtgctcaagatcaagacggagatctcagaacccatcaatttcgacaatgacagcagcatctggaactacccgcccaaccgggagatctccaggaacgagtccccctacagcatgaccaagccccccagctctgagcacttcccgtccccgcagggcggcggcggtgggggtggcggtggcggggggctgcacgtggccattcccgactcggtcctcaccccgcccggcgccgacggcgcggccgcccgcaagactcagttcggcgcctcggccaccgcggccctggcccccgtcgcctccgacccgctgtcacccccgctctcggcgtccccgcgggacaagcaccccgggaacggcggcgggggcgggggcgggggcggcggcgcggggggcggcggccccagcgcgtccaactccttgctgtacactggggacctggaggcgctgcagaggttgcaggcgggcaacgtcgtgctcccgctggtgcacagggtgaccgggaccctggccgccaccagcacggccgcgcagagggtctacaccacgggcaccatccgctacgcgcccgccgaggtgaccctggccatgcagagcaacctgctgcccaacgcgcacgctgttaacttcgtggacgttaacagccccggctttggcctcgaccccaagacgcccatggagatgctctaccaccacgtgcaccggctcaacatgtcaggaccgttcggcggcgcagtgagcgcagctagcctgacgcagatgcccgccggcaacgtgttcaccacggccgagggactcttctccacgctgcccttccccgtctacagcaacggcatccacgcggcacagactctggagcgcaaggaggactgaggcgccgcccgtcctgggcccggccaggccccgcttggaggaggcatcgtcggcattttcgtttagacctttaattctagcactttgaattcgagcaggtcagcgtcttctctcgccacgacggtccccattccaccccctctttctttcacctgacttattctttcgt

SEQ ID NO: 63874 - DNA, 2712 bp, Artificial Sequence
  derived and/or modified sequence
atggccccaaccaagccttccttccagcaggatccttcccggagggaacgtctgcaggcactgaggaaggagaagtctagagacgctgcccgttctcgccgaggaaaggagaatttcgagttttacgagctggctaagctgctgcccctccccgcagccatcacgagtcagctggacaaggctagtattatcaggcttacaattagctatcttaaaatgcgtgactttgccaatcagggtgaccctccatggaatctgaggatggaaggaccgcctcccaatacgtcagtgaaggtcattggagcacagaggcggcgatccccgtctgctctggccatcgaagtttttgaggcgcacctaggctcacacatcttacagagtttggacggctttgtattcgccctgaaccaggagggcaagtttctctatatctcagaaacagtgtcaatctacctgggactctctcaggtggaacttacaggctcctccgtgttcgactacgtccaccctggcgaccatgtcgagatggcagagcaacttggcatgaaactgccacctggcagagggctgcttagtcaaggaacagctgaagacggtgcgtcgtctgcctccagtagtagccagagtgaaacaccagagcctgtcgaaagcaccagtccatccctcctgacaacagacaataccctggagagaagcttttttatacgcatgaagagcaccctgaccaagagaggagtccacattaagtcctctggctataaagtgatccacatcacagggcgtctacgccttcgagtttccctgtcccatggaaggaccgtgccaagccagattatgggcctcgtagtggtggcacatgcacttcctcccccaacgatcaatgaggtcaggattgattgccacatgttcgtcacccgagtaaatatggacctaaacataatctactgcgagaatagaatatctgactacatggatctgaccccggtggacattgtgggtaagaggtgctaccacttcatccacgccgaggacgttgaaggaattaggcattctcatctcgacttattgaacaagggacagtgtgtgactaaatattatcggtggatgcaaaagaacgggggttacatttggatccagagcagcgctaccatcgctatcaatgccaagaacgccaacgagaaaaatatcatctgggttaactacttactttctaatccagagtacaaggacacgcccatggacatagcccagttgcctcatctgcccgagaagactagcgagagcagcgaaacgtccgactccgagtccgatagcaaggatacaagcgggatcaccgaagataacgagaactctaaaagtgatgaaaaaggcaaccagtccgaaaactccgaggatccggagccagaccgcaagaagtcaggaaacgcttgcgacaatgacatgaactgtaacgacgatggccacagttcttcaaaccctgattctcgcgactctgatgatagctttgaacattcggacttcgagaacccaaaggccggagaggatggcttcggtgcccttggagctatgcagatcaaagtggaaagatacgttgaaagcgagagcgatctccgccttcaaaactgcgagtcgctcacttctgattccgccaaagactccgattctgctggagaagcgggtgcgcaggcgtcctctaaacaccaaaaaaggaagaaacgcaggaagcgtcagaagggcggttcggctagccggagaaggctgtcatctgcctctagccctggcggtctcgatgccggactagtggaaccaccgagactgctctccagtcctaactcggcgtctgttctcaaaataaagacggagatctccgaaccaatcaactttgataacgactcatccatttggaattaccccccaaaccgggagatctcccgcaacgagtccccatactccatgacaaaacctcccagcagcgagcacttcccatctccacagggcggtggcggaggaggaggcggtggtggagggctccacgtggctatccctgacagcgtcctgacaccgccaggagcagatggggcagccgcaagaaaaacacagtttggggcttccgccacagcggctctcgctcccgtggcaagtgatcctttaagccccccattgagcgcgagcccaagggacaaacatccaggaaatgggggtggcggaggcggaggcggaggtggagctggaggaggcggacctagtgcatccaactctttgctctatactggagaccttgaagccctgcagcgactgcaggccggtaatgtagtgctgccactggtgcaccgtgtaacgggcacacttgccgcaacatccaccgcggcacagcgggtgtacactacaggaaccatcagatatgccccagctgaagtaactctggccatgcagtcgaatttgctcccaaacgcccatgccgttaatttcgtagacgtgaacagccctggcttcggcctggatcctaaaacacccatggagatgttgtatcaccatgtgcacaggctgaatatgtccggaccgtttgggggtgctgtgtcggcagccagcctgacgcagatgccagccggtaacgtgttcacaactgctgagggtctttttagtacactgcctttcccagtctattctaacggtatccacgccgcacagaccttggagcgtaaggaggattag

SEQ ID NO: 63875 - DNA, 2712 bp, Artificial Sequence
  derived and/or modified sequence
atggcccccaccaagcccagcttccagcaggaccccagcagaagagagagactgcaggccctgagaaaggagaagagcagagacgccgccagaagcagaagaggcaaggagaacttcgagttctacgagctggccaagctgctgcccctgcccgccgccatcaccagccagctggacaaggccagcatcatcagactgaccatcagctacctgaagatgagagacttcgccaaccagggcgaccccccctggaacctgagaatggagggccccccccccaacaccagcgtgaaggtgatcggcgcccagagaagaagaagccccagcgccctggccatcgaggtgttcgaggcccacctgggcagccacatcctgcagagcctggacggcttcgtgttcgccctgaaccaggagggcaagttcctgtacatcagcgagaccgtgagcatctacctgggcctgagccaggtggagctgaccggcagcagcgtgttcgactacgtgcaccccggcgaccacgtggagatggccgagcagctgggcatgaagctgccccccggcagaggcctgctgagccagggcaccgccgaggacggcgccagcagcgccagcagcagcagccagagcgagacccccgagcccgtggagagcaccagccccagcctgctgaccaccgacaacaccctggagagaagcttcttcatcagaatgaagagcaccctgaccaagagaggcgtgcacatcaagagcagcggctacaaggtgatccacatcaccggcagactgagactgagagtgagcctgagccacggcagaaccgtgcccagccagatcatgggcctggtggtggtggcccacgccctgcccccccccaccatcaacgaggtgagaatcgactgccacatgttcgtgaccagagtgaacatggacctgaacatcatctactgcgagaacagaatcagcgactacatggacctgacccccgtggacatcgtgggcaagagatgctaccacttcatccacgccgaggacgtggagggcatcagacacagccacctggacctgctgaacaagggccagtgcgtgaccaagtactacagatggatgcagaagaacggcggctacatctggatccagagcagcgccaccatcgccatcaacgccaagaacgccaacgagaagaacatcatctgggtgaactacctgctgagcaaccccgagtacaaggacacccccatggacatcgcccagctgccccacctgcccgagaagaccagcgagagcagcgagaccagcgacagcgagagcgacagcaaggacaccagcggcatcaccgaggacaacgagaacagcaagagcgacgagaagggcaaccagagcgagaacagcgaggaccccgagcccgacagaaagaagagcggcaacgcctgcgacaacgacatgaactgcaacgacgacggccacagcagcagcaaccccgacagcagagacagcgacgacagcttcgagcacagcgacttcgagaaccccaaggccggcgaggacggcttcggcgccctgggcgccatgcagatcaaggtggagagatacgtggagagcgagagcgacctgagactgcagaactgcgagagcctgaccagcgacagcgccaaggacagcgacagcgccggcgaggccggcgcccaggccagcagcaagcaccagaagagaaagaagagaagaaagagacagaagggcggcagcgccagcagaagaagactgagcagcgccagcagccccggcggcctggacgccggcctggtggagccccccagactgctgagcagccccaacagcgccagcgtgctgaagatcaagaccgagatcagcgagcccatcaacttcgacaacgacagcagcatctggaactacccccccaacagagagatcagcagaaacgagagcccctacagcatgaccaagccccccagcagcgagcacttccccagcccccagggcggcggcggcggcggcggcggcggcggcggcctgcacgtggccatccccgacagcgtgctgaccccccccggcgccgacggcgccgccgccagaaagacccagttcggcgccagcgccaccgccgccctggcccccgtggccagcgaccccctgagcccccccctgagcgccagccccagagacaagcaccccggcaacggcggcggcggcggcggcggcggcggcggcgccggcggcggcggccccagcgccagcaacagcctgctgtacaccggcgacctggaggccctgcagagactgcaggccggcaacgtggtgctgcccctggtgcacagagtgaccggcaccctggccgccaccagcaccgccgcccagagagtgtacaccaccggcaccatcagatacgcccccgccgaggtgaccctggccatgcagagcaacctgctgcccaacgcccacgccgtgaacttcgtggacgtgaacagccccggcttcggcctggaccccaagacccccatggagatgctgtaccaccacgtgcacagactgaacatgagcggccccttcggcggcgccgtgagcgccgccagcctgacccagatgcccgccggcaacgtgttcaccaccgccgagggcctgttcagcaccctgcccttccccgtgtacagcaacggcatccacgccgcccagaccctggagagaaaggaggactag

SEQ ID NO: 63876 - protein, 240 aa, Artificial Sequence
  derived and/or modified sequence
MSGGWMAQVGAWRTGALGLALLLLLGLGLGLEAAASPLSTPTSAQAAGIEPCTQKGQCPPPPGLPCPCTGVSDCSGGTDKKLRNCSRLACLAGELRCTLSDDCIPLTWRCDGHPDCPDSSDELGCGTNEILPEGDATTMGPPVTLESVTSLRNATTMGPPVTLESVPSVGNATSSSAGDQSGSPTAYGVIAAAAVLSASLVTATLLLLSWLRAQERLRPLGLLVAMKESLLLSEQKTSLP

SEQ ID NO: 63877 - DNA, 606 bp, Artificial Sequence
  derived and/or modified sequence
aatgaaatcctgccagaaggcgatgctacaacaatggggccccccgtgacccttgagtcagtaacctctctgaggaacgccaccacaatgggaccgccggtgactcttgagagcgttcccagcgtcgggaatgctatactgctatgcaggcgtccggtgtggaagcccaactgcctgtgggggtactgttcctgctgtggtgcacaatgcaaacccggccaccggcaccctccacccttcgtactcgcaccttcccctggtgctccaccccccactggggtaaccggagggcatgagggagtccctgctgccgtgcgcacagaggacttggcggcattgcgcacgtcaacctgccatcatagacacagcgctcttggtgtggcaggacaggaagagagcagcgacgccgatggctaccccggaacgccggccttacgggacctctctagctctgggcacgtagagccgcgcactagggcacctgctgaggtcgccctggagattgagggtccctggaccctgccaatggaaatcagaggggccagaatgggcaaccttccccaacctgaactgcgtggttggccacaggccgcacctcgcggctag

SEQ ID NO: 63878 - DNA, 723 bp, Artificial Sequence
  derived and/or modified sequence
atgtcaggtgggtggatggcccaggttggcgcatggcggacaggtgcactgggccttgcacttctactgctactgggcctaggactggggttggaggctgctgctagcccgctgtcaacaccaacatctgcccaagcagcaggaattgagccttgtactcagaaaggacagtgccctcctccaccggggctgccctgtccctgcacaggagtgagcgactgctctggtggcaccgacaaaaaattgaggaactgttctagactcgcctgcttggctggcgaacttcgatgcaccctgagcgacgactgtattccactcacttggcggtgtgacggtcaccccgactgccctgattccagcgatgaactcggctgcggcaccaacgaaattttgcccgagggggatgctactactatggggcctccggtcactcttgaatctgtcacctctctaaggaatgctaccaccatgggcccacctgtgaccttagagtccgtgcctagcgtcggaaatgccacctcgtctagcgccggggatcagtcgggttcccccacagcttatggcgtaatcgccgcagccgcggtactttctgccagcttggtcaccgcgaccctattgctcctcagctggctcagggcccaggaacgtctgcgcccactcggacttttagtggccatgaaagagagcctgctgctgtccgagcaaaagacgtctcttccttag

SEQ ID NO: 63879 - DNA, 606 bp, Artificial Sequence
  derived and/or modified sequence
aatgagatcctgcctgaaggagatgccaccaccatgggcccccctgtgaccctggagagcgtgaccagcctgagaaatgccaccaccatgggcccccctgtgaccctggagagcgtgcccagcgtgggcaatgccatcctgctgtgccggcggcctgtgtggaagcccaactgcctgtggggctactgcagctgctgcggggcccagtgcaagccaggccaccgccaccccccaccatttgtgctggcccccagccctggggcccccccacccaccggggtgactggaggccacgagggcgtgcctgctgctgtgaggacagaggacctggccgccctgcggaccagcacctgccaccaccgccacagcgccctgggcgtggccggccaggaggagagcagtgatgctgatggctacccaggcaccccagccctgcgggacctgagcagcagcggccacgtggagcccaggacccgggccccagctgaggtggccctggagattgagggcccctggaccctgcccatggagatccggggggccaggatgggcaacctgccccagcctgagctgcggggctggccccaggccgccccccggggctag

SEQ ID NO: 63880 - DNA, 723 bp, Artificial Sequence
  derived and/or modified sequence
atgtctgggggctggatggcccaggtgggcgcctggaggactggagccctgggcctggccctgctgctgctgctgggcctgggcctgggcctggaggccgccgccagccccctgagcacccccaccagcgcccaggccgccggcatcgagccctgcacccagaagggccagtgccccccacctcctggcctgccctgcccctgcacaggagtgtctgactgcagcggcggcacagacaagaagctgaggaactgcagccggctggcctgcctggccggggagctgcgctgcaccctgagtgatgactgcatccccctgacctggaggtgtgatggccacccagactgcccagacagcagtgatgagctgggctgcggcaccaatgagatcctgcctgaaggagatgccaccaccatgggcccccctgtgaccctggagagcgtgaccagcctgagaaatgccaccaccatgggcccccctgtgaccctggagagcgtgcccagcgtgggcaatgccaccagcagcagcgctggggaccagagcggcagccccacagcctatggagtgattgctgctgctgctgtgctgagcgccagcctggtgacagccaccctgctgctgctgtcctggctgcgggcccaggagcggctgcggcccctgggcctgctggtggccatgaaggagagcctgctgctgtctgagcagaagaccagcctgccctag

SEQ ID NO: 63881 - DNA, 723 bp, Artificial Sequence
  derived and/or modified sequence
atgagcggcggctggatggcccaggtgggcgcctggcggaccggcgccctcgggctggccctgctgcttctgctaggactgggactcggacttgaggctgcggctagcccattgagcacacccaccagtgcccaagctgctgggattgagccttgtacccaaaaaggtcagtgtcctcctcccccaggacttccctgcccctgtaccggcgtttccgattgctcggggggaacggacaagaagttgaggaattgtagccggctcgcctgtctggccggagagttgcggtgcacactctccgatgattgcattccgctcacatggcgctgtgacggacaccctgattgcccagattctagcgatgagctgggctgcggtacaaatgaaattctccccgagggagacgccaccacgatggggcctccagtgaccctggaaagcgtcacgtccttgcgaaatgcaacgactatgggcccaccggtgacgctagagtctgtgcctagcgttggcaacgcgactagtagtagcgctggagaccagtcaggatcccccaccgcgtatggagtgatcgcagctgccgcagtcctgtctgctagtctcgtaaccgccaccctcctgttgctaagctggttgagggcgcaggagagattaagacccttgggactgctggttgctatgaaagaaagccttctcttgtctgagcagaaaacgtcactcccctag

SEQ ID NO: 63882 - DNA, 606 bp, Artificial Sequence
  derived and/or modified sequence
aacgaaatcctgccagagggcgatgctaccacaatgggtcccccagtgacacttgagtctgtgacaagcctgcgcaacgccactactatgggccctccggtgactctagagtctgtccccagtgttggaaatgccatcctgctatgtagacgaccggtctggaagcccaactgtctgtggggctattgctcgtgctgcggcgctcagtgcaaacccggacaccgacatccgccaccattcgttttggcaccgtctcctggggcaccccctccaaccggggtgacaggcggacatgaaggcgtgcctgctgctgtgaggacggaggacttggccgctctccgcacgtcaacctgccatcatcggcactcagcactcggagttgcaggccaggaagaatcctcagatgccgatggttaccctggcacccctgccctacgcgatttgagctcatcaggccacgtggagcccaggacacgtgctcccgctgaggtggcattagagattgaggggccatggaccctccccatggaaatccgtggagcgcgtatggggaaccttcctcagccggaactgcggggttggccccaggctgccccacgtggatag

SEQ ID NO: 63883 - DNA, 723 bp, Artificial Sequence
  derived and/or modified sequence
atgagcggcggatggatggctcaggtcggagcatggaggactggtgctctggggctagctctgctgctcctgctggggttagggctcggcctggaagccgcagctagtcctttgtcaactccgacttcagcgcaggctgctggaatcgaaccctgcacccaaaagggccagtgccccccacctcccggattgccatgcccttgcaccggcgttagtgattgcagcgggggtaccgacaaaaaattgcggaattgttcccggttggcttgcttggccggtgaattgcgctgtactctcagtgatgattgcattcccctgacttggcgctgcgatggccaccccgactgtccggattcaagcgacgaactcgggtgcggaaccaatgagattctgccagaaggagatgcaaccaccatgggccctccggtgaccctcgagtcagttaccagtttgcgcaatgccaccacaatgggccctcctgtgacccttgagtccgtaccttccgtgggaaacgcaacctctagctccgccggtgatcagtcgggatcgcccaccgcctatggcgtaattgcggcagcggctgtcttatcagcatcgctggtgaccgccacccttcttctgctttcatggctgcgagcccaggagagattgcgccctctggggctccttgtcgctatgaaggagtctctactcctcagcgaacaaaagactagcctcccctag

SEQ ID NO: 63884 - DNA, 1125 bp, Artificial Sequence
  derived and/or modified sequence
gtgcgcgtgcgcagggataagagagcggtctggacagcgcgtggccggcgccgctgtggggacagcatgagcggcggttggatggcgcaggttggagcgtggcgaacaggggctctgggcctggcgctgctgctgctgctcggcctcggactaggcctggaggccgccgcgagcccgctttccaccccgacctctgcccaggccgcagggattgagccatgtacccagaaagggcaatgcccaccgccccctggcctcccctgcccctgcaccggcgtcagtgactgctctgggggaactgacaagaaactgcgcaactgcagccgcctggcctgcctagcaggcgagctccgttgcacgctgagcgatgactgcattccactcacgtggcgctgcgacggccacccagactgtcccgactccagcgacgagctcggctgtggaaccaatgagatcctcccggaaggggatgccacaaccatggggccccctgtgaccctggagagtgtcacctctctcaggaatgccacaaccatggggccccctgtgaccctggagagtgtcccctctgtcgggaatgccacatcctcctctgccggagaccagtctggaagcccaactgcctatggggttattgcagctgctgcggtgctcagtgcaagcctggtcaccgccaccctcctccttttgtcctggctccgagcccaggagcgcctccgcccactggggttactggtggccatgaaggagtccctgctgctgtcagaacagaagacctcgctgccctgaggacaagcacttgccaccaccgtcactcagccctgggcgtagccggacaggaggagagcagtgatgcggatgggtacccgggcacaccagccctcagagacctgagctcttctggccacgtggaacctcgaacccgagctcctgcagaagtggccctggagattgagggtccctggacactccctatggagatccggggagctaggatggggaacctgccacagccagaactgaggggctggccccaggcagctcccagggggtagaacggccctgtgcttaagacactcctgctgccccgtctgagggtggcaattaaagttgcttcacatcctc

SEQ ID NO: 63885 - DNA, 606 bp, Artificial Sequence
  derived and/or modified sequence
aacgagatcctgcccgagggcgacgccaccaccatgggcccccccgtgaccctggagagcgtgaccagcctgagaaacgccaccaccatgggcccccccgtgaccctggagagcgtgcccagcgtgggcaacgccatcctgctgtgcagaagacccgtgtggaagcccaactgcctgtggggctactgcagctgctgcggcgcccagtgcaagcccggccacagacaccccccccccttcgtgctggcccccagccccggcgcccccccccccaccggcgtgaccggcggccacgagggcgtgcccgccgccgtgagaaccgaggacctggccgccctgagaaccagcacctgccaccacagacacagcgccctgggcgtggccggccaggaggagagcagcgacgccgacggctaccccggcacccccgccctgagagacctgagcagcagcggccacgtggagcccagaaccagagcccccgccgaggtggccctggagatcgagggcccctggaccctgcccatggagatcagaggcgccagaatgggcaacctgccccagcccgagctgagaggctggccccaggccgcccccagaggctag

SEQ ID NO: 63886 - DNA, 723 bp, Artificial Sequence
  derived and/or modified sequence
atgagcggcggctggatggcccaggtgggcgcctggagaaccggcgccctgggcctggccctgctgctgctgctgggcctgggcctgggcctggaggccgccgccagccccctgagcacccccaccagcgcccaggccgccggcatcgagccctgcacccagaagggccagtgcccccccccccccggcctgccctgcccctgcaccggcgtgagcgactgcagcggcggcaccgacaagaagctgagaaactgcagcagactggcctgcctggccggcgagctgagatgcaccctgagcgacgactgcatccccctgacctggagatgcgacggccaccccgactgccccgacagcagcgacgagctgggctgcggcaccaacgagatcctgcccgagggcgacgccaccaccatgggcccccccgtgaccctggagagcgtgaccagcctgagaaacgccaccaccatgggcccccccgtgaccctggagagcgtgcccagcgtgggcaacgccaccagcagcagcgccggcgaccagagcggcagccccaccgcctacggcgtgatcgccgccgccgccgtgctgagcgccagcctggtgaccgccaccctgctgctgctgagctggctgagagcccaggagagactgagacccctgggcctgctggtggccatgaaggagagcctgctgctgagcgagcagaagaccagcctgccctag

SEQ ID NO: 63887 - protein, 748 aa, Artificial Sequence
  derived and/or modified sequence
MKRNTCDLLSRSKSASEETLHSSNEEEDPFRGMEPYLVRRLSCRNIQLPPLAFRQLEQADLKSESENIQRPTSLPLKILPLIAITSAESSGFDVDNGTSAGRSPLDPMTSPGSGLILQANFVHSQRRESFLYRSDSDYDLSPKSMSRNSSIASDIHGDDLIVTPFAQVLASLRTVRNNFAALTNLQDRAPSKRSPMCNQPSINKATITEEAYQKLASETLEELDWCLDQLETLQTRHSVSEMASNKFKRMLNRELTHLSEMSRSGNQVSEFISNTFLDKQHEVEIPSPTQKEKEKKKRPMSQISGVKKLMHSSSLTNSSIPRFGVKTEQEDVLAKELEDVNKWGLHVFRIAELSGNRPLTVIMHTIFQERDLLKTFKIPVDTLITYLMTLEDHYHADVAYHNNIHAADVVQSTHVLLSTPALEAVFTDLEILAAIFASAIHDVDHPGVSNQFLINTNSELALMYNDSSVLENHHLAVGFKLLQEENCDIFQNLTKKQRQSLRKMVIDIVLATDMSKHMNLLADLKTMVETKKVTSSGVLLLDNYSDRIQVLQNMVHCADLSNPTKPLQLYRQWTDRIMEEFFRQGDRERERGMEISPMCDKHNASVEKSQVGFIDYIVHPLWETWADLVHPDAQDILDTLEDNREWYQSTIPQSPSPAPDDPEEGRQGQTEKFQFELTLEEDGESDTEKDSGSQVEEDTSCSDSKTLCTQDSESTEIPLDEQVEEEAVGEEEESQPEACVIDDRSPDT

SEQ ID NO: 63888 - protein, 81 aa, Artificial Sequence
  derived and/or modified sequence
MKRNTCDLLSRSKSASEETLHSSNEEEDPFRGMEPYLVRRLSCRNIQLPPLAFRQLEQADLKSESENIQRPTSLPLKILPL

SEQ ID NO: 63889 - protein, 75 aa, Artificial Sequence
  derived and/or modified sequence
MKRNTCDLLSRSKSASEETLHSSNEEEDPFRGMEPYLVRRLSCRNIQLPPLAFRQLEQADLKSESENIQRPTSLP

SEQ ID NO: 63890 - DNA, 2247 bp, Artificial Sequence
  derived and/or modified sequence
atgaaacgcaacacttgcgatctactctcccggtctaaatccgcctcggaagagactcttcatagcagcaatgaggaggaggaccctttccgcggcatggagccctatttagtacggcgcctcagttgccgcaatatccagttgcctcccttagccttccgtcagttagagcaagcggatctgaagtcagaatctgaaaacatacagcggcctacaagtctacctctgaaaatccttcccctcatagcaattaccagtgctgagtctagcggctttgacgtcgacaatggcacctccgctgggcgctctccgcttgacccgatgacctcacccggatccggcttgatcttgcaggccaacttcgtacattcccagagaagggagagtttcctgtatagaagcgactctgattatgatctttcccccaagagcatgagtaggaactcaagtatagcctcagatatccatggagatgacctaatcgtgacaccgtttgcacaggttctggcctcccttcgaaccgttcggaacaatttcgcggccctgacgaatctgcaggacagggcaccttcaaaacggagcccaatgtgtaaccagccatcgattaacaaggccaccatcaccgaggaagcctaccaaaagctggcgtcggaaactctcgaagagcttgattggtgccttgaccagctggaaacactgcagacccggcactctgtttccgagatggcctcaaacaaattcaagaggatgctgaatcgcgagctgactcacctcagcgagatgtctcgatcaggcaatcaggtgtcggagttcattagcaatactttcctggacaaacaacatgaagtagagatcccatcaccaacacagaaggagaaagaaaagaagaaaaggccaatgtcgcagatcagcggggtgaagaagttaatgcactctagctccctgactaattctagtatccccaggttcggtgttaaaaccgagcaggaggacgtgcttgctaaggagctggaggatgtcaacaagtggggactgcacgttttccggattgccgagctgtccggaaaccgccctctgaccgtgatcatgcacaccatcttccaggagcgggatctgctcaaaacgttcaagatcccagtcgacactcttatcacatacctgatgactctggaggatcactatcatgccgacgtggcttaccataacaacattcacgccgcagatgtggttcagagtacgcatgtcctattgagtaccccagcactagaggcggtgtttacggacctggagatccttgccgcaatttttgcttccgccattcatgatgtggatcaccccggggtatcgaaccagtttctgattaataccaattctgagctggccctcatgtacaacgacagctctgtcctggagaaccaccatctggccgtgggcttcaaactgctacaggaagagaattgcgacattttccagaacctcaccaaaaagcagcgtcagagtctgcggaaaatggtgattgacatcgtgctggccactgatatgagcaagcacatgaacctacttgcggatctaaagaccatggtggaaacaaaaaaagtgacctcctctggggtcttgctgctcgacaactacagcgacagaatccaggtactgcagaacatggtgcattgtgcggacttatcaaaccccacaaagccgttgcagctgtaccgccagtggactgatagaataatggaggagtttttcaggcagggggaccgcgaaagagaaaggggtatggagatcagtcccatgtgcgataagcataatgcatcagtcgagaagtctcaagtcggctttatcgactacatcgtccaccccctctgggaaacatgggccgaccttgtccatcccgacgcacaggacatactggacacactggaagacaatcgggaatggtatcagagcacaattccacagtctccaagtcccgccccagatgaccctgaagaaggccggcaaggccagaccgagaaattccagtttgaactcaccctggaggaagacggcgaatccgataccgagaaggatagcggcagccaggtggaagaggatacctcttgctcggattctaagactctgtgtacgcaggactccgagagcacggaaataccactcgatgagcaggtggaggaggaggctgttggcgaagaggaggagagccagccggaagcctgtgtaattgacgatcgaagcccagacacttag

SEQ ID NO: 63891 - DNA, 246 bp, Artificial Sequence
  derived and/or modified sequence
atgaaacggaatacttgtgacctgttgtcccggtccaaatccgcaagtgaggaaaccctgcattcatccaacgaggaggaagatcccttcagagggatggagccttacttggttcgcagattatcctgtcgaaacatacagctcccgccactggctttcagacagctcgagcaagcagacctcaagagcgaatcagaaaacatccagcggccgacctctctgcccctgaaaatcctccctctgtag

SEQ ID NO: 63892 - DNA, 228 bp, Artificial Sequence
  derived and/or modified sequence
atgaagcgtaatacctgtgacctgctgtcacggagcaaatctgctagcgaggaaacactccactcatccaacgaggaggaggatccttttcgaggcatggagccatatctggtgcgaaggctatcatgccgcaatatccagctccctccactggccttcagacagttagagcaagccgatctaaagtcagaatccgagaacatccagaggcccacctctttgccctag

SEQ ID NO: 63893 - DNA, 2247 bp, Artificial Sequence
  derived and/or modified sequence
atgaagaggaatacttgcgatctcttgtccaggtccaagagcgcctctgaagagactcttcacagttcaaacgaagaggaagacccttttcgcggtatggaaccctacctggtacgaaggttgtcttgtcgcaacatccagctccctccattggcctttcgtcagttagagcaggccgatctgaagtcagaaagcgaaaatatccagcgccctacatccctccctctgaagattctgcccctgatcgcgattacgtctgccgagtctagtggctttgatgttgataacggcacatctgccggccgctctccactggatcccatgacatcacccggctctgggctaattctgcaggctaacttcgtgcatagccaaagacgcgaatcttttttgtacaggagcgacagtgactacgatctgtcccccaaatctatgagtcggaactcttctatagcatccgacattcacggcgacgatctgatagttacccccttcgcacaggtgctggctagccttaggaccgttcggaacaacttcgctgctctgacaaatctccaagatcgagcgccatccaaacgctctcccatgtgcaatcagcccagtataaataaggccaccattacagaagaggcctaccagaaactagccagcgaaactctggaggaactcgactggtgcttggaccagctcgagactcttcaaacccgccattccgtgtccgagatggcctcaaacaagtttaagcggatgttaaaccgcgagctaacacacctcagtgaaatgagtcggtctggcaatcaggtgtcagagtttatctctaacacattcctagacaaacagcacgaagtggagatcccttctcctacccagaaggagaaagaaaagaagaaacgccccatgagccagatttccggggtgaaaaagctcatgcattcttcgagcttaaccaactcaagcatcccccgattcggggtcaagactgagcaagaggatgttctcgccaaggaattggaggatgttaataaatggggattacatgtattcagaattgccgagttaagcggcaacaggcctctcaccgtgattatgcacactattttccaggagcgagaccttctgaaaacttttaagatacctgttgacacacttattacttatcttatgactctcgaggatcattaccatgcagatgttgcataccacaacaatatccatgcggcagacgttgtccagtctacccatgtgctcctgagcacccccgcactagaggccgtgttcactgatctcgaaattctggcagcaatcttcgcctccgctatacatgatgtcgatcatcccggggtgtccaatcagtttcttattaatacaaactcagaactggccttaatgtacaatgacagttctgtgctcgagaatcaccatctcgcggtgggctttaaacttttacaggaagagaactgtgatattttccagaacctcaccaaaaagcagaggcagtctttacgtaagatggtgattgacatagtactggccacagatatgtctaaacacatgaacctgctggctgacctgaagaccatggttgagactaagaaagtgacttcctcaggcgtgttactgctcgataactatagtgaccggatccaggtgctgcagaacatggtgcattgcgctgatctatccaatccaactaagcctctacaattataccgccagtggacggaccgtattatggaagagttcttccggcagggtgatagagagagggaacgtggcatggagatcagtcccatgtgcgacaagcataacgccagcgtggagaaaagccaggtggggttcattgactacatcgtgcaccctctctgggagacatgggcagacctcgtgcacccggatgcccaggacattcttgatacccttgaggataaccgcgagtggtaccagtctactatacctcagtccccttccccagcccccgacgaccccgaagaaggcaggcagggtcagacggagaaattccagtttgaactgacactagaagaagacggtgaaagcgacaccgagaaagattccggttcccaggtggaggaggataccagctgctcggatagcaagaccctatgcacccaggatagcgaaagcactgagattccgttagatgaacaggtggaagaggaagctgtcggcgaggaggaggagtcgcagccagaagcttgcgtcatcgacgaccggtcccctgatacctag

SEQ ID NO: 63894 - DNA, 2247 bp, Artificial Sequence
  derived and/or modified sequence
atgaagaggaacacctgtgacctgctgagccgcagcaagagcgccagcgaggagaccctgcacagcagcaatgaggaggaggaccccttccggggcatggagccctacctggtgcggcggctgagctgcaggaacatccagctgccccccctggccttccggcagctggagcaggccgacctgaagtctgagagcgagaacatccagaggcccaccagcctgcccctgaagatcctgcccctcatcgccatcaccagcgctgagagcagcggctttgatgtggacaatggcaccagcgctggccgcagccccctggaccccatgaccagccctggcagcggcctcatcctgcaggccaactttgtgcacagccagaggcgggagagcttcctgtacagaagtgacagcgactatgacctgagccccaagtccatgagcaggaacagcagcatcgccagtgacatccatggagatgacctgattgtgaccccatttgcccaggtgctggccagcctgaggacagtgaggaacaactttgctgccctgaccaacctgcaggaccgggcccccagcaagaggagccccatgtgcaaccagcccagcatcaacaaggccaccatcacagaggaggcctaccagaagctggccagcgagaccctggaggagctggactggtgcctggaccagctggagaccctgcagaccaggcacagcgtgtctgagatggccagcaacaagttcaagaggatgctgaaccgggagctgacccacctgtctgagatgagccgcagcggcaaccaggtgtctgagttcatcagcaacaccttcctggacaagcagcacgaggtggagatccccagccccacccagaaggagaaggagaagaagaagaggcccatgagccagatcagcggcgtgaagaagctgatgcacagcagcagcctgaccaacagcagcatccccaggtttggagtgaagacagagcaggaggatgtgctggccaaggagctggaggatgtgaacaagtggggcctgcacgtgttcagaattgctgagctgagcggcaaccggcccctgaccgtcatcatgcacaccatcttccaggagcgggacctgctgaagaccttcaagatccctgtggacaccctcatcacctacctgatgaccctggaggaccactaccacgcagatgtggcctaccacaacaacatccacgccgcagatgtggtgcagagcacccacgtgctgctgagcaccccagccctggaggccgtgttcacagacctggagatcctggccgccatctttgccagcgccatccatgatgtggaccaccctggggtgagcaaccagttcctgatcaacaccaacagcgagctggccctgatgtacaatgacagctctgtgctggagaaccaccacctggccgtgggcttcaagctgctgcaggaggagaactgtgacatcttccagaacctgaccaagaagcagaggcagagcctgaggaagatggtgattgacatcgtgctggccacagacatgagcaagcacatgaacctgctggccgacctgaagaccatggtggagaccaagaaggtgaccagcagcggcgtgctgctgctggacaactacagcgaccgcatccaggtgctgcagaacatggtgcactgtgccgacctgagcaaccccaccaagcccctgcagctgtaccggcagtggacagaccgcatcatggaggagttcttccggcagggcgaccgggagcgggagcggggcatggagatcagccccatgtgtgacaagcacaatgcctctgtggagaagagccaggtgggcttcatcgactacatcgtgcaccccctgtgggagacctgggccgacctggtgcacccagatgcccaggacatcctggacaccctggaggacaaccgggagtggtaccagagcaccatcccccagagccccagccctgccccagatgatcctgaggagggccggcagggccagacagagaagttccagtttgagctgaccctggaggaggatggagagagtgacacagagaaggacagcggcagccaggtggaggaggacaccagctgcagcgacagcaagaccctgtgcacccaggacagcgagagcacagagatccccctggatgagcaggtggaggaggaggccgtgggggaggaggaggagagccagcctgaggcctgtgtgattgatgacaggagcccagacacctag

SEQ ID NO: 63895 - DNA, 246 bp, Artificial Sequence
  derived and/or modified sequence
atgaagaggaacacctgtgacctgctgagccgcagcaagagcgccagcgaggagaccctgcacagcagcaatgaggaggaggaccccttccggggcatggagccctacctggtgcggcggctgagctgcaggaacatccagctgccccccctggccttccggcagctggagcaggccgacctgaagtctgagagcgagaacatccagaggcccaccagcctgcccctgaagatcctgcccctgtag

SEQ ID NO: 63896 - DNA, 228 bp, Artificial Sequence
  derived and/or modified sequence
atgaagaggaacacctgtgacctgctgagccgcagcaagagcgccagcgaggagaccctgcacagcagcaatgaggaggaggaccccttccggggcatggagccctacctggtgcggcggctgagctgcaggaacatccagctgccccccctggccttccggcagctggagcaggccgacctgaagtctgagagcgagaacatccagaggcccaccagcctgccctag

SEQ ID NO: 63897 - DNA, 2247 bp, Artificial Sequence
  derived and/or modified sequence
atgaagcggaacacctgcgacctgctgagccggagcaagagcgcctcagaggaaactctccactcaagcaacgaggaggaggacccgtttagggggatggagccatacctcgtgaggagactgtcctgtaggaatattcagcttcccccactcgcgtttcgccagctcgagcaggctgatttgaagtctgaatccgaaaacattcaaaggcccaccagtctgccacttaaaatcctccccctcattgcaatcaccagtgctgaaagcagcgggtttgacgtggataatggaacatctgccggacggtcccccctggacccaatgacgagccctggcagcggactcattctgcaagccaatttcgttcactcacagagacgcgaatcctttctttatcggtccgactccgactatgacctgtccccaaagagcatgtcccgcaactcgtccatagcctcagatatacatggtgacgaccttatagtgaccccctttgctcaggtcctggcatccctccgaacggtgcgcaacaattttgctgctctcactaacctgcaggaccgcgcacccagtaaaaggagcccgatgtgcaatcagccgagcattaacaaagcaaccattacggaggaggcctatcaaaaactggcttcagaaactctcgaagagttagattggtgtctcgaccaattggaaaccttgcagacccgccactcggtgagcgaaatggcctctaacaagttcaagcgcatgttaaatcgtgagctaacacacttatcagaaatgtccagatcaggcaaccaggtgtctgagttcatatcaaacacattcctcgacaagcagcatgaggtcgagataccatctcccacacaaaaggagaaggagaaaaagaaacgaccaatgtcgcaaatctccggagtgaaaaagcttatgcacagctcatccctgacaaactcctcaatccctcgctttggtgtgaagactgagcaggaggatgtgctcgccaaggaattggaagacgtcaacaagtgggggctgcacgtcttccggattgcagagctgtctgggaatcgcccacttacagtgattatgcatacaattttccaggagagggacttgctgaaaacattcaaaattcccgttgacacactaatcacatacctgatgacgctggaggatcattaccatgccgatgtggcataccataataatatacacgccgctgatgtcgtccagtctacccatgttctcctgtccacccccgccctcgaggcagtatttaccgacctggaaatcctcgccgctatattcgcttctgctattcatgatgttgaccacccaggagtgtccaaccaattcctaatcaacaccaacagtgagcttgccctgatgtataatgattcaagcgtgttagaaaatcaccacctggctgttgggttcaagctgctacaggaggaaaactgcgacatcttccagaacctcactaagaagcagaggcaatctctgcggaaaatggtgatcgacattgtcctagccacagatatgtcgaaacacatgaacctgctggccgacctaaagaccatggtggaaactaaaaaggtcacgtctagcggagtgctccttctggataattacagcgatcgtatccaagtccttcagaatatggtgcattgtgcagatctgtccaatcccacaaaaccccttcagctgtatcgccaatggacagacaggataatggaagagttctttaggcagggcgatcgggagcgcgagcgcgggatggagatctcccccatgtgcgataaacataacgctagcgtagaaaagagccaggtgggcttcatagattatatcgtgcatcccctgtgggagacctgggcggatctggtgcatcccgatgctcaggacattcttgatacgctagaggacaatagagaatggtatcagagcaccataccgcaatctccatcccctgccccagacgatccagaggagggaaggcagggccagactgaaaaatttcagttcgaactgacgctagaagaggacggagagagcgacacagaaaaggactccggctcccaggtcgaggaggacacatcctgctcagactcaaagaccctgtgcacccaagattctgagagcactgaaatccctctcgacgaacaggtcgaagaagaagccgtgggtgaagaagaggaatcacagcctgaggcctgtgtgattgatgaccggtcacccgacacctag

SEQ ID NO: 63898 - DNA, 246 bp, Artificial Sequence
  derived and/or modified sequence
atgaagcggaacacctgcgacctgctgagccggagcaagagcgccagcgaggagacactgcattcctccaatgaagaagaagacccgtttcggggtatggagccttatctcgtacgacgcctgagctgcagaaatatccagcttccccctcttgctttccgccagctggagcaagctgacctaaaaagcgagtccgaaaatatccagcgccctacatccctgccgctgaagattctccctctctag

SEQ ID NO: 63899 - DNA, 228 bp, Artificial Sequence
  derived and/or modified sequence
atgaagcggaacacctgcgacctgctgagccggagcaagagcgcctcagaggagacactccactctagtaacgaggaagaagatcctttcagagggatggagccttatctcgtgaggagactgtcttgcagaaacattcagctccctccgctggccttccgccaactggaacaagcggatctcaagtccgagtctgaaaatatccagcgtcccactagccttccatag

SEQ ID NO: 63900 - DNA, 2247 bp, Artificial Sequence
  derived and/or modified sequence
atgaagcggaacacctgcgacctgctgagccggagcaagagcgcctctgaggagactctgcacagttccaacgaggaggaagaccccttccgaggaatggagccgtaccttgttagaagactgtcatgcagaaacatccagctccctccattagcttttagacagttggagcaggcagacctcaagtctgagtcagagaatattcagaggcccacaagcctgcccttaaagatcctgccgttaatcgccatcacctctgcagagtcatccggatttgacgtggacaatggtaccagtgcggggcgatccccactggaccccatgactagccccgggagtggactgatcttgcaagccaatttcgtgcattcgcagcggagggaatcatttttgtaccgtagcgattctgattacgatctgagccccaagagtatgtccaggaactcaagcatcgcatctgatatacatggggatgatcttattgtcaccccattcgcccaggtccttgctagcctcagaacggtacgcaacaacttcgcggcactgaccaacctgcaagaccgcgcccccagcaaaaggtctccaatgtgtaatcagccatctataaacaaggcaacaatcaccgaagaggcttaccaaaagttggcttcagaaacactagaagaactggactggtgtctggaccagctagagacattgcaaaccagacacagcgtaagtgaaatggctagcaacaaattcaagagaatgctcaaccgggagctgacccatctgtctgagatgtctaggtcaggtaaccaggtgagcgaattcatttctaacacattcctggacaaacagcacgaggtcgagattcccagtccaacccagaaagagaaggagaaaaagaaaaggccaatgtcacagattagcggtgttaagaaactgatgcatagctcctccctcacaaactccagtatccccaggttcggggtgaaaaccgagcaagaggacgttttggcaaaagaactggaggatgtgaacaaatggggcttacacgtgttccggattgcagagctctcaggcaacagacccctgactgtaattatgcataccatattccaggagcgcgacctgctgaaaacctttaaaattcccgtcgacacactgattacctatctgatgacgctggaggaccactaccacgccgacgtggcgtaccacaataatattcacgccgctgatgttgttcagagtacgcacgtcctgctgagcacaccggcactggaggccgtatttacagatctcgaaattcttgctgcaatcttcgcttcagccattcacgatgtcgatcatcctggcgtgtccaaccaattcctcatcaacacaaacagcgagctggctcttatgtacaatgattcttctgtcctagagaatcatcacctagctgtaggatttaagcttctacaagaggagaattgcgacatcttccagaacctcacaaaaaagcaacggcagtccctgcgaaaaatggttatcgacatagtgctggctaccgatatgtccaagcatatgaatttgctcgccgacttaaaaactatggttgaaactaagaaagtaacgtcttcaggagtgctgctccttgataattacagcgaccgcattcaggtgttgcaaaatatggtgcattgcgctgacctttccaacccaacaaagcccctacagctgtacaggcagtggacagacagaatcatggaagaattcttcaggcagggggacagggaaagggaacgggggatggaaatttcgccaatgtgtgataaacacaacgcctcagtcgaaaaaagccaagttggatttatagattacatcgtgcaccccttgtgggaaacttgggctgacttagtgcacccagatgctcaggacatcctggatacactcgaagacaatcgggagtggtaccagtccacaatccctcagtctccctccccagcacctgacgacccagaggagggtagacaaggccagacggaaaagttccagtttgagcttacgctggaagaggatggagagagcgacacagaaaaggacagcggctcccaggtggaagaggatacttcttgctctgattccaaaactctctgtacccaggactctgagagcaccgagattcctctggatgagcaggttgaggaagaagctgtcggggaggaagaggagtctcagcccgaagcatgtgttatagacgacaggagccctgacacttag

SEQ ID NO: 63901 - DNA, 2478 bp, Artificial Sequence
  derived and/or modified sequence
aagcacgagtcctatagttggcgtaccctgaggcctgccagttcctgccttaatgcatatgtagtcgtaattgagttctgacacggccttggatgtttctgtcctaaatagctgacattgcatcttcaagactgtcattccagttggcttttgagtggatacgtgcagtgagatcattgacactggaaacactagttcccattttaattacttaaaacaccacgatgaaaagaaatacctgtgatttgctttctcggagcaaaagtgcctctgaggaaacactacattccagtaatgaagaggaagaccctttccgcggaatggaaccctatcttgtccggagactttcatgtcgcaatattcagcttccccctctcgccttcagacagttggaacaagctgacttgaaaagtgaatcagagaacattcaacgaccaaccagcctccccctgaagattctgccgctgattgctatcacttctgcagaatccagtggttttgatgtggacaatggcacatctgcgggacggagtcccttggatcccatgaccagcccaggatccgggctaattctccaagcaaattttgtccacagtcaacgacgggagtccttcctgtatcgatccgacagcgattatgacctctctccaaagtctatgtcccggaactcctccattgccagtgatatacacggagatgacttgattgtgactccatttgctcaggtcttggccagtctgcgaactgtacgaaacaactttgctgcattaactaatttgcaagatcgagcacctagcaaaagatcacccatgtgcaaccaaccatccatcaacaaagccaccataacagaggaggcctaccagaaactggccagcgagaccctggaggagctggactggtgtctggaccagctagagaccctacagaccaggcactccgtcagtgagatggcctccaacaagtttaaaaggatgcttaatcgggagctcacccatctctctgaaatgagtcggtctggaaatcaagtgtcagagtttatatcaaacacattcttagataagcaacatgaagtggaaattccttctccaactcagaaggaaaaggagaaaaagaaaagaccaatgtctcagatcagtggagtcaagaaattgatgcacagctctagtctgactaattcaagtatcccaaggtttggagttaaaactgaacaagaagatgtccttgccaaggaactagaagatgtgaacaaatggggtcttcatgttttcagaatagcagagttgtctggtaaccggcccttgactgttatcatgcacaccatttttcaggaacgggatttattaaaaacatttaaaattccagtagatactttaattacatatcttatgactctcgaagaccattaccatgctgatgtggcctatcacaacaatatccatgctgcagatgttgtccagtctactcatgtgctattatctacacctgctttggaggctgtgtttacagatttggagattcttgcagcaatttttgccagtgcaatacatgatgtagatcatcctggtgtgtccaatcaatttctgatcaatacaaactctgaacttgccttgatgtacaatgattcctcagtcttagagaaccatcatttggctgtgggctttaaattgcttcaggaagaaaactgtgacattttccagaatttgaccaaaaaacaaagacaatctttaaggaaaatggtcattgacatcgtacttgcaacagatatgtcaaaacacatgaatctactggctgatttgaagactatggttgaaactaagaaagtgacaagctctggagttcttcttcttgataattattccgataggattcaggttcttcagaatatggtgcactgtgcagatctgagcaacccaacaaagcctctccagctgtaccgccagtggacggaccggataatggaggagttcttccgccaaggagaccgagagagggaacgtggcatggagataagccccatgtgtgacaagcacaatgcttccgtggaaaaatcacaggtgggcttcatagactatattgttcatcccctctgggagacatgggcagacctcgtccaccctgacgcccaggatattttggacactttggaggacaatcgtgaatggtaccagagcacaatccctcagagcccctctcctgcacctgatgacccagaggagggccggcagggtcaaactgagaaattccagtttgaactaactttagaggaagatggtgagtcagacacggaaaaggacagtggcagtcaagtggaagaagacactagctgcagtgactccaagactctttgtactcaagactcagagtctactgaaattccccttgatgaacaggttgaagaggaggcagtaggggaagaagaggaaagccagcctgaagcctgtgtcatagatgatcgttctcctgacacgtaacagtgca

SEQ ID NO: 63902 - DNA, 1430 bp, Artificial Sequence
  derived and/or modified sequence
gacagaagatctgcgaacatgatgcacgtgaataattttccctttagaaggcattcctggatatgaggaggcctaccagaaactggccagcgagaccctggaggagctggactggtgtctggaccagctagagaccctacagaccaggcactccgtcagtgagatggcctccaacaagtttaaaaggatgcttaatcgggagctcacccatctctctgaaatgagtcggtctggaaatcaagtgtcagagtttatatcaaacacattcttagataagcaacatgaagtggaaattccttctccaactcagaaggaaaaggagaaaaagaaaagaccaatgtctcagatcagtggagtcaagaaattgatgcacagctctagtctgactaattcaagtatcccaaggtttggagttaaaactgaacaagaagatgtccttgccaaggaactagaagatgtgaacaaatggggtcttcatgttttcagaatagcagagttgtctggtaaccggcccttgactgttatcatgcacaccatttttcaggaacgggatttattaaaaacatttaaaattccagtagatactttaattacatatcttatgactctcgaagaccattaccatgctgatgtggcctatcacaacaatatccatgctgcagatgttgtccagtctactcatgtgctattatctacacctgctttggaggctgtgtttacagatttggagattcttgcagcaatttttgccagtgcaatacatgatgtagatcatcctggtgtgtccaatcaatttctgatcaatacaaactctgaacttgccttgatgtacaatgattcctcagtcttagagaaccatcatttggctgtgggctttaaattgcttcaggaagaaaactgtgacattttccagaatttgaccaaaaaacaaagacaatctttaaggaaaatggtcattgacatcgtacttgcaacagatatgtcaaaacacatgaatctactggctgatttgaagactatggttgaaactaagaaagtgacaagctctggagttcttcttcttgataattattccgataggattcaggttcttcagaatatggtgcactgtgcagatctgagcaacccaacaaagcctctccagctgtaccgccagtggacggaccggataatggaggagttcttccgccaaggagaccgagagagggaacgtggcatggagataagccccatgtgtgacaagcacaatgcttccgtggaaaaatcacaggtgggcttcatagactatattgttcatcccctctgggagacatgggcagacctcgtccaccctgacgcccaggatattttggacactttggaggacaatcgtgaatggtaccagagcacaatccctcagagcccctctcctgcacctgatgacccagagg

SEQ ID NO: 63903 - DNA, 577 bp, Artificial Sequence
  derived and/or modified sequence
atagttggcgtaccctgaggcctgccagttcctgccttaatgcatatgtagtcgtaattgagttctgacacggccttggatgtttctgtcctaaatagctgacattgcatcttcaagactgtggtctagctgtgtcccagagagcaacttcccttttcaaggcagcccactctgtgtgatgctttttcctaggtatgggcaacccatccctcctagggtgaaaacttcgctgttgctagttccagcattccagttggcttttgagtggatacgtgcagtgagatcattgacactggaaacactagttcccattttaattacttaaaacaccacgatgaaaagaaatacctgtgatttgctttctcggagcaaaagtgcctctgaggaaacactacattccagtaatgaagaggaagaccctttccgcggaatggaaccctatcttgtccggagactttcatgtcgcaatattcagcttccccctctcgccttcagacagttggaacaagctgacttgaaaagtgaatcagagaacattcaacgaccaaccagcctccccctgaagattctgccgctg

SEQ ID NO: 63904 - DNA, 494 bp, Artificial Sequence
  derived and/or modified sequence
ggtcacacagagagtacgtgtcaaaggaaactcaaaagaacacattttctcagtgattacaggttttagagaagaggaacaatgcttcctctgagcctgaagaaaagaatgaaataagggctgcaagggaacatgcaggtttcacactacaggagcttgtctgtcttggtgcaagtgggagcattccagttggcttttgagtggatacgtgcagtgagatcattgacactggaaacactagttcccattttaattacttaaaacaccacgatgaaaagaaatacctgtgatttgctttctcggagcaaaagtgcctctgaggaaacactacattccagtaatgaagaggaagaccctttccgcggaatggaaccctatcttgtccggagactttcatgtcgcaatattcagcttccccctctcgccttcagacagttggaacaagctgacttgaaaagtgaatcagagaacattcaacgaccaaccagcctccc

SEQ ID NO: 63905 - DNA, 2247 bp, Artificial Sequence
  derived and/or modified sequence
atgaaaagaaatacctgtgatttgctttctcggagcaaaagtgcctctgaggaaacactacattccagtaatgaagaggaagaccctttccgcggaatggaaccctatcttgtccggagactttcatgtcgcaatattcagcttccccctctcgccttcagacagttggaacaagctgacttgaaaagtgaatcagagaacattcaacgaccaaccagcctccccctgaagattctgccgctgattgctatcacttctgcagaatccagtggttttgatgtggacaatggcacatctgcgggacggagtcccttggatcccatgaccagcccaggatccgggctaattctccaagcaaattttgtccacagtcaacgacgggagtccttcctgtatcgatccgacagcgattatgacctctctccaaagtctatgtcccggaactcctccattgccagtgatatacacggagatgacttgattgtgactccatttgctcaggtcttggccagtctgcgaactgtacgaaacaactttgctgcattaactaatttgcaagatcgagcacctagcaaaagatcacccatgtgcaaccaaccatccatcaacaaagccaccataacagaggaggcctaccagaaactggccagcgagaccctggaggagctggactggtgtctggaccagctagagaccctacagaccaggcactccgtcagtgagatggcctccaacaagtttaaaaggatgcttaatcgggagctcacccatctctctgaaatgagtcggtctggaaatcaagtgtcagagtttatatcaaacacattcttagataagcaacatgaagtggaaattccttctccaactcagaaggaaaaggagaaaaagaaaagaccaatgtctcagatcagtggagtcaagaaattgatgcacagctctagtctgactaattcaagtatcccaaggtttggagttaaaactgaacaagaagatgtccttgccaaggaactagaagatgtgaacaaatggggtcttcatgttttcagaatagcagagttgtctggtaaccggcccttgactgttatcatgcacaccatttttcaggaacgggatttattaaaaacatttaaaattccagtagatactttaattacatatcttatgactctcgaagaccattaccatgctgatgtggcctatcacaacaatatccatgctgcagatgttgtccagtctactcatgtgctattatctacacctgctttggaggctgtgtttacagatttggagattcttgcagcaatttttgccagtgcaatacatgatgtagatcatcctggtgtgtccaatcaatttctgatcaatacaaactctgaacttgccttgatgtacaatgattcctcagtcttagagaaccatcatttggctgtgggctttaaattgcttcaggaagaaaactgtgacattttccagaatttgaccaaaaaacaaagacaatctttaaggaaaatggtcattgacatcgtacttgcaacagatatgtcaaaacacatgaatctactggctgatttgaagactatggttgaaactaagaaagtgacaagctctggagttcttcttcttgataattattccgataggattcaggttcttcagaatatggtgcactgtgcagatctgagcaacccaacaaagcctctccagctgtaccgccagtggacggaccggataatggaggagttcttccgccaaggagaccgagagagggaacgtggcatggagataagccccatgtgtgacaagcacaatgcttccgtggaaaaatcacaggtgggcttcatagactatattgttcatcccctctgggagacatgggcagacctcgtccaccctgacgcccaggatattttggacactttggaggacaatcgtgaatggtaccagagcacaatccctcagagcccctctcctgcacctgatgacccagaggagggccggcagggtcaaactgagaaattccagtttgaactaactttagaggaagatggtgagtcagacacggaaaaggacagtggcagtcaagtggaagaagacactagctgcagtgactccaagactctttgtactcaagactcagagtctactgaaattccccttgatgaacaggttgaagaggaggcagtaggggaagaagaggaaagccagcctgaagcctgtgtcatagatgatcgttctcctgacacgtaa

SEQ ID NO: 63906 - DNA, 2247 bp, Artificial Sequence
  derived and/or modified sequence
atgaagcgaaacacctgtgacttgctgtccagatccaagtcagcaagtgaggagacgctgcattcgtccaatgaggaggaggatcccttccgaggcatggagccttatttggtcagaaggctctcctgcaggaatatccaacttccccctctcgcctttaggcagctcgaacaggcagacctgaagagtgagtctgagaacatccagaggcccaccagtctgcctttgaagattttgccccttatcgcaatcacgtccgcggaatcatctggctttgatgtcgacaatggaacgtccgctggcagatctccactggacccaatgaccagcccgggtagtggcttaatcctccaagcgaattttgtgcattcccagagacgggagagtttcctatatcgctcggactcagattatgatctgtcacccaagtcaatgtccaggaactcttcaattgcttccgacatccatggagatgacctgattgtgaccccctttgcacaagtgctcgcctctttgcgaacagtgaggaataattttgccgcactaaccaatctgcaggaccgggctccctctaagcggtctcctatgtgtaaccagccgagcattaacaaagcaaccatcacagaagaggcgtaccaaaaattagcatccgagaccctggaggaactggactggtgtctggatcagttggagaccctgcagacaagacactccgtttccgagatggcgtctaataagttcaaaaggatgctcaatcgcgaactaacacacttgtcagagatgtccaggtccgggaaccaagtcagtgagttcatcagtaatactttcctggacaaacagcacgaggtggaaattccatcccctacccagaaggaaaaggaaaagaaaaagcgccctatgagccaaataagcggcgtcaaaaagctgatgcatagctcctccctaacaaactcgtccatcccaagattcggggtcaagacagaacaggaggacgtcctcgcaaaggagctcgaggacgtgaacaaatggggcctgcacgtgtttcgcattgccgagttgtcaggcaaccgaccgttaaccgtgattatgcatactatatttcaggaacgtgatcttctcaagacatttaaaatacctgtggatactctcataacataccttatgaccctcgaggaccattaccatgctgacgtggcctaccacaacaacatacacgccgctgatgtagtacagtcaactcatgtgttgctgtccacaccagcactggaagctgtgtttacggatttggagattcttgcggctatcttcgccagcgccattcatgacgtggatcatcctggagtctccaatcaatttttaatcaataccaatagcgaattggcgctgatgtacaacgactcctccgtactcgaaaaccaccacctcgccgtcggattcaaacttttgcaagaggaaaattgcgatattttccagaacctgacgaagaagcagagacaatcgctaaggaagatggttattgacattgtattggcgacagacatgtccaagcatatgaatcttctggccgacttgaagaccatggttgaaacaaaaaaagtgacctcatcaggcgtgctgttgctggataactacagcgatagaattcaggtgctacagaacatggtccattgtgctgatctctcgaatcctaccaagcctctccagctgtataggcagtggaccgataggatcatggaagaatttttccgccaaggggacagggagcgcgaacggggtatggaaatcagccccatgtgtgataagcataacgccagtgtggagaaatcccaagtggggttcatcgattacatcgtgcaccctctatgggaaacttgggccgatctggtgcacccggacgctcaagacattcttgatactctggaagacaatcgtgaatggtaccagtccacgattccgcagagcccctctccagctcctgatgaccctgaggaagggcgacagggccagaccgagaagtttcagttcgagctgaccctggaggaggacggagaatccgatacagaaaaggatagtggctcccaagttgaggaggatacttcatgcagtgattccaagaccctgtgcacacaggacagcgagtccacagagattccacttgatgaacaggtagaagaggaagccgtcggagaggaggaggagtcacaaccagaagcctgtgtgattgacgatcggtccccagatacttag

SEQ ID NO: 63907 - DNA, 246 bp, Artificial Sequence
  derived and/or modified sequence
atgaaaagaaacacctgcgatctgcttagtagaagcaaaagcgcctcggaagaaacacttcactcatctaacgaagaggaggatcctttccggggtatggaaccgtacctagtgcggaggctgtcctgtaggaatatccaactccctcctctcgcttttcgacagctcgagcaggccgatcttaaatctgagtccgaaaatattcagcggccaactagcctcccacttaagatcctgcctctctag

SEQ ID NO: 63908 - DNA, 228 bp, Artificial Sequence
  derived and/or modified sequence
atgaaaagaaacacatgcgacttgctgtcacgctctaagtcagcgtctgaggaaactttacattcatctaatgaggaggaggatccatttagagggatggagccatatctggtgcgcagactcagttgcaggaacattcagctgcctccactcgcttttcgccagctggaacaagccgatctgaagtcagagagcgagaacatccagcgacccacatcactgccgtag

SEQ ID NO: 63909 - DNA, 2247 bp, Artificial Sequence
  derived and/or modified sequence
atgaagcgcaatacatgtgatctgctgtcccgatcaaagagtgccagtgaggagaccctgcactcaagtaatgaggaagaggatccatttcgtggtatggagccatatctggtgaggagacttagttgtcgcaacattcagctgccaccgttggcctttcggcagctagaacaggcagacttaaaatccgagagtgagaatatccagcgcccaactagtttacccctgaagatactgcccctgatcgccattacctcagctgagagctctggattcgacgtggacaatggaacatctgccggtcggagcccactggaccccatgaccagcccaggtagcggcctgattctgcaggccaatttcgtgcacagtcagcggagggaatcgttcctttatcgctccgactcagattacgacctatcccccaagtccatgagtagaaacagttccatcgccagcgatatccacggggacgacctgatagttaccccctttgctcaagtcctggcgtccctccgtactgtccggaacaacttcgcggctctgacaaatctgcaagatagagcaccatctaaaaggtctcctatgtgcaatcaaccatctattaataaggccacaattaccgaggaagcctatcagaaactggcgtccgagaccctggaagaactggactggtgtctcgaccagctggagaccttacaaacaagacacagcgtgagcgagatggccagcaataagttcaaacgcatgctcaaccgagagttgactcacctgagcgaaatgagcagaagcggcaatcaggtgtcagagttcatcagcaacacatttttagacaagcaacacgaggtggaaatccccagtcccactcagaaagagaaggaaaagaagaagcggccaatgtcccaaatctctggtgtgaaaaaactaatgcatagcagcagcttgactaatagctccatacccaggttcggggtgaagactgagcaggaggacgttcttgcaaaagaactggaagatgtgaacaagtggggccttcatgtcttcagaatcgctgagctttctggaaacagacccctcactgttataatgcatacaattttccaggaaagggatctcctgaaaacctttaagatcccagttgataccctgatcacctatctcatgaccttggaggaccattaccacgcagatgtggcctatcataacaatattcacgccgctgacgtggtccaatctacacacgtacttctctccacacccgcactggaggctgtctttacagacctcgagatcctagcggctatctttgcatccgctatccacgatgttgaccatccaggcgtgagtaatcagtttctcatcaacactaactctgaactggcactaatgtacaacgattcgtccgttttggagaaccatcatctggcagtgggctttaaactccttcaggaggagaactgcgatatttttcagaatctgactaagaagcaacgccaatctcttaggaagatggtgatcgacattgtgctcgcaacagatatgagtaagcacatgaacctcctggcggacctgaaaactatggtggaaactaaaaaggttacatcttctggcgtactgctcctcgacaattattccgatcgaatccaagtgctccaaaacatggtgcactgtgctgatctgtccaaccctacaaagccactccagctgtaccgccagtggactgataggatcatggaggagtttttccgacaaggcgaccgtgagcgcgagcggggaatggagataagtcccatgtgcgacaagcataacgcatccgtggagaaatcccaggtcggcttcattgactatatagtccacccgctctgggagacatgggccgacctggtccatcctgacgcccaagacatcttggataccctcgaagacaatcgtgagtggtaccaatcaacgattccacagtccccaagtccagccccagacgaccctgaagaaggaaggcaaggacagaccgaaaaattccagttcgagttgaccctggaagaagacggcgagtcagacaccgaaaaggactcaggctcccaagttgaggaagacacttcctgcagcgacagcaaaactctatgtactcaggactcagaatcgactgaaatcccgctggatgaacaggtggaggaggaagccgtgggggaggaggaggagagtcagcctgaggcctgcgtgattgacgataggtctcctgatacctag

SEQ ID NO: 63910 - DNA, 2247 bp, Artificial Sequence
  derived and/or modified sequence
atgaagagaaacacctgcgacctgctgagcagaagcaagagcgccagcgaggagaccctgcacagcagcaacgaggaggaggaccccttcagaggcatggagccctacctggtgagaagactgagctgcagaaacatccagctgccccccctggccttcagacagctggagcaggccgacctgaagagcgagagcgagaacatccagagacccaccagcctgcccctgaagatcctgcccctgatcgccatcaccagcgccgagagcagcggcttcgacgtggacaacggcaccagcgccggcagaagccccctggaccccatgaccagccccggcagcggcctgatcctgcaggccaacttcgtgcacagccagagaagagagagcttcctgtacagaagcgacagcgactacgacctgagccccaagagcatgagcagaaacagcagcatcgccagcgacatccacggcgacgacctgatcgtgacccccttcgcccaggtgctggccagcctgagaaccgtgagaaacaacttcgccgccctgaccaacctgcaggacagagcccccagcaagagaagccccatgtgcaaccagcccagcatcaacaaggccaccatcaccgaggaggcctaccagaagctggccagcgagaccctggaggagctggactggtgcctggaccagctggagaccctgcagaccagacacagcgtgagcgagatggccagcaacaagttcaagagaatgctgaacagagagctgacccacctgagcgagatgagcagaagcggcaaccaggtgagcgagttcatcagcaacaccttcctggacaagcagcacgaggtggagatccccagccccacccagaaggagaaggagaagaagaagagacccatgagccagatcagcggcgtgaagaagctgatgcacagcagcagcctgaccaacagcagcatccccagattcggcgtgaagaccgagcaggaggacgtgctggccaaggagctggaggacgtgaacaagtggggcctgcacgtgttcagaatcgccgagctgagcggcaacagacccctgaccgtgatcatgcacaccatcttccaggagagagacctgctgaagaccttcaagatccccgtggacaccctgatcacctacctgatgaccctggaggaccactaccacgccgacgtggcctaccacaacaacatccacgccgccgacgtggtgcagagcacccacgtgctgctgagcacccccgccctggaggccgtgttcaccgacctggagatcctggccgccatcttcgccagcgccatccacgacgtggaccaccccggcgtgagcaaccagttcctgatcaacaccaacagcgagctggccctgatgtacaacgacagcagcgtgctggagaaccaccacctggccgtgggcttcaagctgctgcaggaggagaactgcgacatcttccagaacctgaccaagaagcagagacagagcctgagaaagatggtgatcgacatcgtgctggccaccgacatgagcaagcacatgaacctgctggccgacctgaagaccatggtggagaccaagaaggtgaccagcagcggcgtgctgctgctggacaactacagcgacagaatccaggtgctgcagaacatggtgcactgcgccgacctgagcaaccccaccaagcccctgcagctgtacagacagtggaccgacagaatcatggaggagttcttcagacagggcgacagagagagagagagaggcatggagatcagccccatgtgcgacaagcacaacgccagcgtggagaagagccaggtgggcttcatcgactacatcgtgcaccccctgtgggagacctgggccgacctggtgcaccccgacgcccaggacatcctggacaccctggaggacaacagagagtggtaccagagcaccatcccccagagccccagccccgcccccgacgaccccgaggagggcagacagggccagaccgagaagttccagttcgagctgaccctggaggaggacggcgagagcgacaccgagaaggacagcggcagccaggtggaggaggacaccagctgcagcgacagcaagaccctgtgcacccaggacagcgagagcaccgagatccccctggacgagcaggtggaggaggaggccgtgggcgaggaggaggagagccagcccgaggcctgcgtgatcgacgacagaagccccgacacctag

SEQ ID NO: 63911 - DNA, 246 bp, Artificial Sequence
  derived and/or modified sequence
atgaagagaaacacctgcgacctgctgagcagaagcaagagcgccagcgaggagaccctgcacagcagcaacgaggaggaggaccccttcagaggcatggagccctacctggtgagaagactgagctgcagaaacatccagctgccccccctggccttcagacagctggagcaggccgacctgaagagcgagagcgagaacatccagagacccaccagcctgcccctgaagatcctgcccctgtag

SEQ ID NO: 63912 - DNA, 228 bp, Artificial Sequence
  derived and/or modified sequence
atgaagagaaacacctgcgacctgctgagcagaagcaagagcgccagcgaggagaccctgcacagcagcaacgaggaggaggaccccttcagaggcatggagccctacctggtgagaagactgagctgcagaaacatccagctgccccccctggccttcagacagctggagcaggccgacctgaagagcgagagcgagaacatccagagacccaccagcctgccctag

SEQ ID NO: 63913 - protein, 251 aa, Artificial Sequence
  derived and/or modified sequence
MKDRTQELRTAKDSDDDDDVAVTVDRDRFMDEFFEQVEEIRGFIDKIAENVEEVKRKHSAILASPNPDEKTKEELEELMSDIKKTANKVRSKLKSIEQSIEQEEGLNRSSADLRIRKTQHSTLSRKFVEVMSEYNATQSDYRERCKGRIQRQLEITGRTTTSEELEDMLESGNPAIFASGIIMDSSISKQALSEIETRHSEIIKLENSIRELHDMFMDMAMLVESQTMWRGPCLTPRRPSSTRARRAGRKS

SEQ ID NO: 63914 - DNA, 783 bp, Artificial Sequence
  derived and/or modified sequence
atgaaggacagaacccaggagctgagaaccgccaaggacagcgacgacgacgacgacgtggccgtgaccgtggacagagacagattcatggacgagttcttcgagcaggtggaggagatcagaggcttcatcgacaagatcgccgagaacgtggaggaggtgaagagaaagcacagcgccatcctggccagccccaaccccgacgagaagaccaaggaggagctggaggagctgatgagcgacatcaagaagaccgccaacaaggtgagaagcaagctgaagagcatcgagcagagcatcgagcaggaggagggcctgaacagaagcagcgccgacctgagaatcagaaagacccagcacagcaccctgagcagaaagttcgtggaggtgatgagcgagtacaacgccacccagagcgactacagagagagatgcaagggcagaatccagagacagctggagatcaccggcagaaccaccaccagcgaggagctggaggacatgctggagagcggcaaccccgccatcttcgccagcggcatcatcatggacagcagcatcagcaagcaggccctgagcgagatcgagaccagacacagcgagatcatcaagctggagaacagcatcagagagctgcacgacatgttcatggacatggccatgctggtggagagccagccccagggcgccttcctgaagagctgccccgagccccagcccaaccccgaggagggcgccctgtggagcagcggcgcccccggccccgccggcagagacgactag

SEQ ID NO: 63915 - DNA, 756 bp, Artificial Sequence
  derived and/or modified sequence
atgaaggacagaacccaggagctgagaaccgccaaggacagcgacgacgacgacgacgtggccgtgaccgtggacagagacagattcatggacgagttcttcgagcaggtggaggagatcagaggcttcatcgacaagatcgccgagaacgtggaggaggtgaagagaaagcacagcgccatcctggccagccccaaccccgacgagaagaccaaggaggagctggaggagctgatgagcgacatcaagaagaccgccaacaaggtgagaagcaagctgaagagcatcgagcagagcatcgagcaggaggagggcctgaacagaagcagcgccgacctgagaatcagaaagacccagcacagcaccctgagcagaaagttcgtggaggtgatgagcgagtacaacgccacccagagcgactacagagagagatgcaagggcagaatccagagacagctggagatcaccggcagaaccaccaccagcgaggagctggaggacatgctggagagcggcaaccccgccatcttcgccagcggcatcatcatggacagcagcatcagcaagcaggccctgagcgagatcgagaccagacacagcgagatcatcaagctggagaacagcatcagagagctgcacgacatgttcatggacatggccatgctggtggagagccagaccatgtggagaggcccctgcctgacccccagaagacccagcagcaccagagccagaagagccggcagaaagagctag

SEQ ID NO: 63916 - DNA, 783 bp, Artificial Sequence
  derived and/or modified sequence
atgaaagatcggacccaggagctccgcacagccaaggacagtgacgatgacgatgatgttgctgtgactgtggatagggataggtttatggatgaatttttcgagcaggtagaagagatcaggggtttcattgataagatcgcagaaaatgtggaagaggtaaagcgcaaacattccgccattcttgcttcccctaatcctgacgaaaagactaaagaagagctcgaagagctgatgagcgatatcaagaagactgccaacaaggtccggtcaaaactgaaatctatcgaacagagcatcgaacaggaggaagggctgaacagatcttctgctgacctacggatccgcaagacacaacattcgactctatcacgtaaatttgttgaggtgatgtccgagtataacgctacacagagtgactaccgggagcgctgcaaaggccgaatccaacggcagttggaaatcacaggaagaactaccacgtctgaggaactggaagacatgctggagtccggaaaccctgctattttcgcctctggcatcatcatggattcaagcatctctaagcaagcgctgtctgagatcgagactagacattccgagataataaagctggagaactcaatacgggaactccacgacatgtttatggatatggcaatgctggttgaaagccagccccagggggcctttctgaagtcttgtcccgaaccacagcctaacccagaagaaggggctctttggtcatcaggggcacccggtccagccggtagagacgactag

SEQ ID NO: 63917 - DNA, 756 bp, Artificial Sequence
  derived and/or modified sequence
atgaaggatcgcacccaagagctccgtactgctaaagattcagatgatgatgacgacgtggcagtgaccgtggacagggacaggtttatggacgagttttttgagcaggtggaggagattcgtgggtttatagataagattgccgaaaacgtggaggaggtaaagagaaagcattcggccatccttgcctcccccaaccctgacgaaaagacaaaagaagaacttgaggaactgatgtccgacataaagaagacagcaaataaggtgcggtccaagctgaaatcgatcgagcagtccatcgaacaagaagagggactcaatcggtctagcgctgacctaagaatccgcaaaactcagcacagcaccctgagccgcaagttcgttgaagtaatgtcagaatacaacgcaacgcaatctgactatagggaacggtgtaaggggaggatccagagacagctggaaattaccggtcggaccactacatcagaggaactcgaagacatgctggaatccgggaaccccgccatcttcgcctctgggatcattatggattcaagcattagcaagcaggcattgtccgagatcgaaacccgccactctgagattatcaagctcgagaatagtatcagagaactgcacgatatgttcatggacatggctatgctcgttgagtctcaaaccatgtggcgcggtccatgcctaacaccccgacgccccagctcgactagagcacgacgtgccgggcgcaagtcctag

SEQ ID NO: 63918 - DNA, 783 bp, Artificial Sequence
  derived and/or modified sequence
atgaaggacaggacccaggagctgaggacagccaaggacagtgatgatgatgatgatgtggccgtgacagtggaccgggaccgcttcatggatgagttctttgagcaggtggaggagatccggggcttcatcgacaagattgctgaaaatgtggaggaggtgaagaggaagcacagcgccatcctggccagccccaacccagatgagaagaccaaggaggagctggaggagctgatgtctgacatcaagaagacagccaacaaggtgcgcagcaagctgaagagcattgagcagagcattgagcaggaggagggcctgaacagaagcagcgctgacctgcgcatcaggaagacccagcacagcaccctgagcaggaagtttgtggaggtgatgtctgagtacaatgccacccagagcgactaccgggagcgctgcaagggccgcatccagaggcagctggagatcaccggccgcaccaccaccagcgaggagctggaggacatgctggagagcggcaacccagccatctttgccagcggcatcatcatggacagcagcatcagcaagcaggccctgtctgaaattgagaccaggcacagcgagatcatcaagctggagaacagcatccgggagctgcatgacatgttcatggacatggccatgctggtggagagccagccccagggcgccttcctgaagagctgcccagagccccagcccaaccctgaggagggcgccctgtggagcagcggggcccctggccctgctggaagagatgactag

SEQ ID NO: 63919 - DNA, 756 bp, Artificial Sequence
  derived and/or modified sequence
atgaaggacaggacccaggagctgaggacagccaaggacagtgatgatgatgatgatgtggccgtgacagtggaccgggaccgcttcatggatgagttctttgagcaggtggaggagatccggggcttcatcgacaagattgctgaaaatgtggaggaggtgaagaggaagcacagcgccatcctggccagccccaacccagatgagaagaccaaggaggagctggaggagctgatgtctgacatcaagaagacagccaacaaggtgcgcagcaagctgaagagcattgagcagagcattgagcaggaggagggcctgaacagaagcagcgctgacctgcgcatcaggaagacccagcacagcaccctgagcaggaagtttgtggaggtgatgtctgagtacaatgccacccagagcgactaccgggagcgctgcaagggccgcatccagaggcagctggagatcaccggccgcaccaccaccagcgaggagctggaggacatgctggagagcggcaacccagccatctttgccagcggcatcatcatggacagcagcatcagcaagcaggccctgtctgaaattgagaccaggcacagcgagatcatcaagctggagaacagcatccgggagctgcatgacatgttcatggacatggccatgctggtggagagccagaccatgtggaggggcccctgcctgaccccaagaagacccagcagcacccgggccaggagagctggcaggaagagctag

SEQ ID NO: 63920 - DNA, 783 bp, Artificial Sequence
  derived and/or modified sequence
atgaaggaccggacccaggagctgcggaccgccaaggacagcgacgatgacgatgatgtagctgtgacagtggacagggatcggtttatggacgagttctttgagcaagtggaggagatacggggcttcatcgataagattgcagagaatgtagaagaagtgaaaaggaagcattcagccattctggctagccccaaccctgacgaaaagacaaaagaggaactggaggagttgatgagcgacattaaaaagactgcaaataaagtaagatcaaaacttaagagtatcgagcagagtatcgaacaggaagaaggactgaatagatcaagcgctgacttgcggatcagaaagacccagcatagcactctttcaaggaagttcgttgaagtgatgtcagaatacaacgccacccagtcagactatagggagcgctgtaaaggcagaattcagcgccagctggagatcacagggcggaccacaacatcagaggagctagaagacatgcttgaatccggcaatcccgccatctttgcttccggtatcataatggacagttccatttccaagcaggcactgagcgaaatcgagacacgtcattccgaaattataaagctggaaaactccatccgggaactccacgacatgttcatggatatggccatgttggtagagtctcagcctcaaggagcattcctaaagtcttgcccagagcctcagcctaatccagaggagggggctctatggagttctggcgccccagggcctgctggacgggatgattag

SEQ ID NO: 63921 - DNA, 756 bp, Artificial Sequence
  derived and/or modified sequence
atgaaggaccggacccaggagctgcggaccgccaaggacagcgacgacgatgacgacgttgcagtcaccgtggacagggatcgctttatggacgaattcttcgagcaggtcgaggaaattaggggttttatagacaagatcgctgagaacgttgaagaggtgaaacggaaacatagcgcaatacttgcatcgcccaatcccgatgagaagacgaaagaggaattggaagagctcatgagcgatatcaagaagacagctaacaaagtacggagtaagctgaagtccattgagcagtctatcgagcaagaagaagggctaaatcggagcagcgcagatttgaggattcggaaaacccaacatagcaccctgtctcgaaagttcgtcgaggtgatgtcagagtacaatgctacacagagtgattacagagaaaggtgcaagggccgaatccaaagacagttggagatcaccggccgcactacaactagtgaggagcttgaggatatgctggagtctggcaatccagctatttttgcgagtggcatcattatggacagctccatctccaaacaagcactctctgaaatagaaactcgacacagcgagataatcaaacttgaaaattctattagggagctgcacgacatgtttatggacatggcaatgttggtggagagccagaccatgtggcgaggcccttgccttactccacgtagaccctcttctacccgtgctaggcgggctgggcggaaatcctag

SEQ ID NO: 63922 - DNA, 783 bp, Artificial Sequence
  derived and/or modified sequence
atgaaagacagaactcaagagttgaggactgctaaggattcagatgacgacgacgacgttgctgtaaccgtcgatagggaccggtttatggatgaattctttgagcaggtcgaggaaatcaggggtttcattgacaagattgctgagaacgtggaagaagttaaaagaaaacactcagccatcctggccagtcccaaccccgacgagaaaactaaggaggagctggaagaactcatgtcggacatcaaaaagactgccaataaagtgcgttctaagctgaaatctatcgagcagagcatagaacaggaggaaggactcaatcgcagcagtgccgatctgaggattagaaagactcagcattctactctgagcaggaagttcgtagaggtgatgtccgaatataacgctacacaatccgactatcgcgagcggtgtaaaggaaggatccagcgccaactcgaaatcacaggtaggacgaccacaagtgaggaactagaggacatgttggagagcggcaatccagccattttcgctagcggcattatcatggactcatccattagcaagcaagccctgtctgaaattgaaacaaggcatagcgaaattataaaacttgagaatagtattcgggagctacatgatatgttcatggacatggccatgctggtcgagtctcagcctcaaggggcattcttgaagtcctgtccagagcctcagccaaacccggaggagggtgccctttggtccagcggggctcccggaccggctggccgtgacgactag

SEQ ID NO: 63923 - DNA, 756 bp, Artificial Sequence
  derived and/or modified sequence
atgaaagaccggactcaggagcttaggacagccaaggatagtgatgatgatgatgacgtggccgtcaccgttgatagggacagatttatggatgagttctttgagcaggtcgaagagatcaggggctttatcgataaaattgctgagaatgtggaggaggtaaagcgaaaacattctgccattctggcctcgcccaacccagacgaaaaaactaaggaggagttggaggagctaatgtccgacatcaagaagacagcaaataaggtgcgctccaagctgaagtccatagagcagtccatagagcaggaagaaggcctgaaccgatcttccgccgacctaaggattcgaaaaacgcagcactcaaccctcagcaggaaatttgtggaggtcatgtcggagtacaatgccacccagtccgactatagggagcgatgtaagggaagaatccagaggcagctggaaatcacaggtaggaccaccacttccgaagagttggaggatatgctcgagagcggcaatccagcgatttttgcttcgggcatcatcatggatagctctatcagcaagcaagccctaagcgagatcgaaaccaggcacagtgagataattaaactggagaatagcatccgcgagctgcatgatatgttcatggacatggctatgctggtggagagtcagactatgtggaggggaccctgtcttacgccaaggagaccctctagtacacgagctaggcgcgctgggagaaaaagttag

SEQ ID NO: 63924 - DNA, 783 bp, Artificial Sequence
  derived and/or modified sequence
atgaaggaccgaacccaggagctccgcacggccaaggacagcgatgatgatgatgatgtcgctgtcaccgtggaccgagaccgcttcatggatgagttctttgagcaggtggaggagattcgaggcttcattgacaagatcgcagagaacgtggaggaggtgaagcggaagcacagtgccatcctggcatcccccaaccccgatgagaagacgaaggaggagctggaagaactcatgtccgacataaagaagacagcaaacaaagttcgttccaagttaaagagcatcgagcagtccatcgagcaagaggaaggcctgaaccgctcctccgctgacctgaggatccggaagacacagcactccacgctgtccagaaagtttgtggaggtcatgtcggagtacaacgccacgcagtccgactaccgcgagcgctgcaaaggccgcatccagaggcagctggagatcaccggcaggaccacgaccagtgaggagctggaggacatgctggagagtgggaaccccgccatctttgcctctgggatcatcatggactccagcatctcgaagcaggctctgagcgagattgagacgcggcacagtgagatcatcaagctggagaacagcatccgtgagctacacgacatgttcatggacatggccatgctcgtggagagccagcctcagggtgctttcctgaagtcctgccccgagccccaacccaaccctgaggagggggccctctggagctcgggtgcccccggccccgcagggagagatgattga

SEQ ID NO: 63925 - DNA, 2050 bp, Artificial Sequence
  derived and/or modified sequence
agccggcgccgctgccactcccgggagcatgaaggaccgaacccaggagctccgcacggccaaggacagcgatgatgatgatgatgtcgctgtcaccgtggaccgagaccgcttcatggatgagttctttgagcaggtggaggagattcgaggcttcattgacaagatcgcagagaacgtggaggaggtgaagcggaagcacagtgccatcctggcatcccccaaccccgatgagaagacgaaggaggagctggaagaactcatgtccgacataaagaagacagcaaacaaagttcgttccaagttaaagagcatcgagcagtccatcgagcaagaggaaggcctgaaccgctcctccgctgacctgaggatccggaagacacagcactccacgctgtccagaaagtttgtggaggtcatgtcggagtacaacgccacgcagtccgactaccgcgagcgctgcaaaggccgcatccagaggcagctggagatcaccggcaggaccacgaccagtgaggagctggaggacatgctggagagtgggaaccccgccatctttgcctctgggatcatcatggactccagcatctcgaagcaggctctgagcgagattgagacgcggcacagtgagatcatcaagctggagaacagcatccgtgagctacacgacatgttcatggacatggccatgctcgtggagagccagactatgtggagagggccgtgtctgacaccaagaaggccgtcaagtaccagagcaaggcgcgccggaagaaaatcatgatcatcatctgctgtgtgatcctgggcatcgtcatcgcctccactgttgggggcatcttcgcctagaagccacccaaactgccactccactccaggtgggccactccaaggaggccctggctgctgccacctggctgggctgccctcccaacccccgcctctggctcagagcaccctccctcccggcccccatgctcccttctctgccatgggccctccgtccccgccccgtgtcgtgtgcatgatctctgtgagtgtgcgtctgtacgggaagaggcagagggaggcagccagcggggcgtgatgcagtgtgcacagcgaggagcagacccaggcagggccgccagggtgacacaggccacccttccttgccttcagtaactcggtgggcccaggttctgctcttccctggggaccctaacctcgcctccagctgacctgccctgtcctctccagctgtccccacaagcagagccctgaggggtggggaccagctggccacatggtgctgcttttcaggttaggggagaggtggccctgagggacagcccagctctgagtctcagtcgctgatcactgccagggaggctcaggctgccatggctccaggctccctcccctgcctaggggcaaagtccatcgggtcctgggcctcagcttcccttcccacattcctccggccccaggagcaaccccttgggctaggtctgaccccaggtgtccctctggaaggggctggctggtgccctatttccagccaccccagcagctagggaggcaaagcaggctgcagtcagtccctcaagccagcgttgcatgtttgggatggtggctcctgttgtcttgcgctctgggaagtcagatgtcatttcaggcctgcagtctcatcctgcccttgccatcctcccatcgatgtgccacgtgggtgtcacgtgtcccagatgcagtattcggcagccagccggggagggctacctcctcctcctcaccaccttggggcttctcatgggaaatgtgcccccgccccaggaccctctcccttgtggacaggcagggagatgcatgcgagtgcatgcagcaggggatggggccgtgtccgtgtgccccaccctccctcggctttactcctgcccagtgactgtgaccactgtccgtgttgccttcttgaacagcgattccccccaaccccttcaccaaaggtcttggtacaaccagctgcccattttgtgaaatttttatgtagaataaacatttgtatctgtaccag

SEQ ID NO: 63926 - protein, 255 aa, Artificial Sequence
  derived and/or modified sequence
MALLWGLLVLSWSCLQGPCSVFSPVSAMEPLGRQLTSGPNQEQVSPLTLLKLGNQEPGGQTALKSPPGVCSRDPTPEQTHRLARAMMAFTADLFSLVAQTSTCPNLILSPLSVALALSHLALGAQNHTLQRLQQVLHAGSGPCLPHLLSRLCQDLGPGAFRLAARMYLQKGFPIKEDFLEQSEQLFGAKPVSLTGKQEDDLANINQWVKEATEGKIQEFLSGLPEDTVLLLLNAIHFQGFWRNKFDPSLTQRDSF

SEQ ID NO: 63927 - DNA, 765 bp, Artificial Sequence
  derived and/or modified sequence
atggccctgctgtggggcctgctggtgctgagctggagctgcctgcagggcccctgcagcgtgttcagccccgtgagcgccatggagcccctgggccgccagctgaccagcggccccaaccaggagcaggtgagccccctgaccctgctgaagctgggcaaccaggagcccggcggccagaccgccctgaagagcccccccggcgtgtgcagccgcgaccccacccccgagcagacccaccgcctggcccgcgccatgatggccttcaccgccgacctgttcagcctggtggcccagaccagcacctgccccaacctgatcctgagccccctgagcgtggccctggccctgagccacctggccctgggcgcccagaaccacaccctgcagcgcctgcagcaggtgctgcacgccggcagcggcccctgcctgccccacctgctgagccgcctgtgccaggacctgggccccggcgccttccgcctggccgcccgcatgtacctgcagaagggcttccccatcaaggaggacttcctggagcagagcgagcagctgttcggcgccaagcccgtgagcctgaccggcaagcaggaggacgacctggccaacatcaaccagtgggtgaaggaggccaccgagggcaagatccaggagttcctgagcggcctgcccgaggacaccgtgctgctgctgctgaacgccatccacttccagggcttctggcgcaacaagttcgaccccagcctgacccagcgcgacagcttc

SEQ ID NO: 63928 - DNA, 768 bp, Artificial Sequence
  derived and/or modified sequence
atggccctgctgtggggcctgctggtgctgagctggagctgcctgcagggcccctgcagcgtgttcagccccgtgagcgccatggagcccctgggcagacagctgaccagcggccccaaccaggagcaggtgagccccctgaccctgctgaagctgggcaaccaggagcccggcggccagaccgccctgaagagcccccccggcgtgtgcagcagagaccccacccccgagcagacccacagactggccagagccatgatggccttcaccgccgacctgttcagcctggtggcccagaccagcacctgccccaacctgatcctgagccccctgagcgtggccctggccctgagccacctggccctgggcgcccagaaccacaccctgcagagactgcagcaggtgctgcacgccggcagcggcccctgcctgccccacctgctgagcagactgtgccaggacctgggccccggcgccttcagactggccgccagaatgtacctgcagaagggcttccccatcaaggaggacttcctggagcagagcgagcagctgttcggcgccaagcccgtgagcctgaccggcaagcaggaggacgacctggccaacatcaaccagtgggtgaaggaggccaccgagggcaagatccaggagttcctgagcggcctgcccgaggacaccgtgctgctgctgctgaacgccatccacttccagggcttctggagaaacaagttcgaccccagcctgacccagagagacagcttctag

SEQ ID NO: 63929 - DNA, 768 bp, Artificial Sequence
  derived and/or modified sequence
atggcattgttatggggactgttggtcctgtcctggtcttgcctccaggggccgtgcagtgtattctcccccgtaagcgccatggagcccctgggtaggcagttgacttctggccctaaccaggagcaggtgtcccccctgaccttgctgaagctcggcaatcaggagcctgggggccagactgctttaaagtcccccccgggcgtgtgcagcagagatcccacaccagagcagacacatagattggcccgcgccatgatggcatttaccgctgatctcttctcacttgtcgcacagacatctacctgccctaacctgattttgtcccccttgtccgtggctctcgctctgtctcatttagcacttggcgcccagaaccatacactgcaacggctgcagcaggtactgcacgcagggagcgggccttgcctgcctcacttgctgagcaggctgtgccaggacctcggccccggcgcctttaggctggctgcgcgcatgtatctccagaagggattccccattaaagaagacttcttggagcaaagcgagcagttattcggagccaagcctgtgtctctgactgggaagcaggaagatgacctggcgaatatcaatcaatgggtcaaggaagccaccgagggcaagatccaggagttcttgagcggattaccagaggacacagttctactccttctcaacgcgatccatttccagggattctggagaaacaagtttgatccctctctcacacagagagactcattttag

SEQ ID NO: 63930 - DNA, 768 bp, Artificial Sequence
  derived and/or modified sequence
atggccctgctgtggggcctgctggtgctgtcctggagctgcctgcagggcccctgcagcgtcttcagccctgtgtctgccatggagcccctgggccggcagctgaccagcggccccaaccaggagcaggtgagccccctgaccctgctgaagctgggcaaccaggagcccggcggccagacagccctgaagagccccccaggagtgtgcagccgggaccccaccccagagcagacccaccggctggcccgggccatgatggccttcaccgctgacctcttcagcctggtggcccagaccagcacctgccccaacctgatcctgagccccctgtctgtggccctggccctgagccacctggccctgggcgcccagaaccacaccctgcagaggctgcagcaggtgctgcacgccggcagcggcccctgcctgccccacctgctgagccggctgtgccaggacctgggccctggggccttccggctggccgccaggatgtacctgcagaagggcttccccatcaaggaggacttcctggagcagagcgagcagctgtttggagccaagcctgtgtccctgaccgggaagcaggaggatgacctggccaacatcaaccagtgggtgaaggaggccacagagggcaagatccaggagttcctgagcggcctgcctgaagatactgtgctgctgctgctgaatgccatccacttccagggcttctggaggaacaagtttgaccccagcctgacccagagggacagcttctag

SEQ ID NO: 63931 - DNA, 768 bp, Artificial Sequence
  derived and/or modified sequence
atggccctgctgtggggcctgctggtgctgagctggagctgcctgcaaggaccttgctccgtattttcccctgtgagcgccatggagccgctaggtagacagctgacgagcgggcctaaccaggagcaggtgtctccgctgaccctcttaaaattggggaaccaggaacctggggggcagaccgcactgaaatccccccccggagtttgtagccgagacccgacacccgagcagacccaccgcctcgcacgcgcgatgatggccttcactgctgacctctttagtttggtggcgcagacatccacgtgcccaaatctgatcctttctcccctttcggtggcattggcactcagccacctcgctctgggagctcagaatcacacactgcagcgactccagcaggtgctgcacgctgggagtggaccatgcctgccccacttgttgagtcgtctttgtcaggacttaggtcctggggcgttcaggctggcagccaggatgtatttgcagaaggggttcccaatcaaggaggatttcttagaacaaagtgaacagttgttcggcgctaaacccgtgtctttaacaggcaaacaagaagatgatttggccaatataaaccagtgggtcaaggaagcaacggaagggaagatccaggagtttctctcaggccttccggaagacacagtcctgctgctgctgaatgctattcatttccagggattttggcgcaacaagtttgacccatcccttacacagagagattccttctag

SEQ ID NO: 63932 - DNA, 768 bp, Artificial Sequence
  derived and/or modified sequence
atggctctcttatgggggctcctcgtgctgtcttggtcatgtctgcaagggccttgctccgtcttctccccagtctcagcgatggagcctctcggcagacagttaacctctgggccaaatcaggagcaggtgagccctcttaccctcctgaaactaggcaaccaggagcctggtggacagactgctctgaagtcaccccctggggtctgttccagagacccaacccctgaacagacccaccgccttgccagggccatgatggcatttactgccgatttgttttcactggtggctcagacgagcacttgtcctaatctgattctgtccccgttgagcgtcgcactggccttatcacatctggctttaggcgcacagaaccatacgctgcagcgactccaacaagtgctgcacgccggttctggcccatgccttcctcacctcctatcaaggctgtgtcaggatctcggccctggcgcttttcgactggccgctagaatgtatctccagaaggggttcccaattaaggaagattttttggaacagtcagaacagctgttcggggcaaagccagtgagtctgactgggaagcaggaagacgacctggccaatatcaaccagtgggttaaagaggccaccgaaggtaagattcaggagttcctctctggtctgcccgaggacactgttttgttgctactcaatgcaatacattttcaggggttttggcggaacaagtttgacccatccctgacacagagggactccttttag

SEQ ID NO: 63933 - protein, 427 aa, Artificial Sequence
  derived and/or modified sequence
MALLWGLLVLSWSCLQGPCSVFSPVSAMEPLGRQLTSGPNQEQVSPLTLLKLGNQVQPGAQNHTLQRLQQVLHAGSGPCLPHLLSRLCQDLGPGAFRLAARMYLQKGFPIKEDFLEQSEQLFGAKPVSLTGKQEDDLANINQWVKEATEGKIQEFLSGLPEDTVLLLLNAIHFQGFWRNKFDPSLTQRDSFHLDEQFTVPVEMMQARTYPLRWFLLEQPEIQVAHFPFKNNMSFVVLVPTHFEWNVSQVLANLSWDTLHPPLVWERPTKVRLPKLYLKHQMDLVATLSQLGLQELFQAPDLRGISEQSLVVSGVQHQSTLELSEVGVEAAAATSIAMSRMSLSSFSVNRPFLFFIFEDTTGLPLFVGSVRNPNPSAPRELKEQQDSPGNKDFLQSLKGFPRGDKLFGPDLKLVPPMEEDYPQFGSPK

SEQ ID NO: 63934 - DNA, 1281 bp, Artificial Sequence
  derived and/or modified sequence
atggccctgctgtggggcctgctggtgctgagctggagctgcctgcagggcccctgcagcgtgttcagccccgtgagcgccatggagcccctgggccgccagctgaccagcggccccaaccaggagcaggtgagccccctgaccctgctgaagctgggcaaccaggtgcagcccggcgcccagaaccacaccctgcagcgcctgcagcaggtgctgcacgccggcagcggcccctgcctgccccacctgctgagccgcctgtgccaggacctgggccccggcgccttccgcctggccgcccgcatgtacctgcagaagggcttccccatcaaggaggacttcctggagcagagcgagcagctgttcggcgccaagcccgtgagcctgaccggcaagcaggaggacgacctggccaacatcaaccagtgggtgaaggaggccaccgagggcaagatccaggagttcctgagcggcctgcccgaggacaccgtgctgctgctgctgaacgccatccacttccagggcttctggcgcaacaagttcgaccccagcctgacccagcgcgacagcttccacctggacgagcagttcaccgtgcccgtggagatgatgcaggcccgcacctaccccctgcgctggttcctgctggagcagcccgagatccaggtggcccacttccccttcaagaacaacatgagcttcgtggtgctggtgcccacccacttcgagtggaacgtgagccaggtgctggccaacctgagctgggacaccctgcacccccccctggtgtgggagcgccccaccaaggtgcgcctgcccaagctgtacctgaagcaccagatggacctggtggccaccctgagccagctgggcctgcaggagctgttccaggcccccgacctgcgcggcatcagcgagcagagcctggtggtgagcggcgtgcagcaccagagcaccctggagctgagcgaggtgggcgtggaggccgccgccgccaccagcatcgccatgagccgcatgagcctgagcagcttcagcgtgaaccgccccttcctgttcttcatcttcgaggacaccaccggcctgcccctgttcgtgggcagcgtgcgcaaccccaaccccagcgccccccgcgagctgaaggagcagcaggacagccccggcaacaaggacttcctgcagagcctgaagggcttcccccgcggcgacaagctgttcggccccgacctgaagctggtgccccccatggaggaggactacccccagttcggcagccccaag

SEQ ID NO: 63935 - DNA, 1284 bp, Artificial Sequence
  derived and/or modified sequence
atggccctgctgtggggcctgctggtgctgagctggagctgcctgcagggcccctgcagcgtgttcagccccgtgagcgccatggagcccctgggcagacagctgaccagcggccccaaccaggagcaggtgagccccctgaccctgctgaagctgggcaaccaggtgcagcccggcgcccagaaccacaccctgcagagactgcagcaggtgctgcacgccggcagcggcccctgcctgccccacctgctgagcagactgtgccaggacctgggccccggcgccttcagactggccgccagaatgtacctgcagaagggcttccccatcaaggaggacttcctggagcagagcgagcagctgttcggcgccaagcccgtgagcctgaccggcaagcaggaggacgacctggccaacatcaaccagtgggtgaaggaggccaccgagggcaagatccaggagttcctgagcggcctgcccgaggacaccgtgctgctgctgctgaacgccatccacttccagggcttctggagaaacaagttcgaccccagcctgacccagagagacagcttccacctggacgagcagttcaccgtgcccgtggagatgatgcaggccagaacctaccccctgagatggttcctgctggagcagcccgagatccaggtggcccacttccccttcaagaacaacatgagcttcgtggtgctggtgcccacccacttcgagtggaacgtgagccaggtgctggccaacctgagctgggacaccctgcacccccccctggtgtgggagagacccaccaaggtgagactgcccaagctgtacctgaagcaccagatggacctggtggccaccctgagccagctgggcctgcaggagctgttccaggcccccgacctgagaggcatcagcgagcagagcctggtggtgagcggcgtgcagcaccagagcaccctggagctgagcgaggtgggcgtggaggccgccgccgccaccagcatcgccatgagcagaatgagcctgagcagcttcagcgtgaacagacccttcctgttcttcatcttcgaggacaccaccggcctgcccctgttcgtgggcagcgtgagaaaccccaaccccagcgcccccagagagctgaaggagcagcaggacagccccggcaacaaggacttcctgcagagcctgaagggcttccccagaggcgacaagctgttcggccccgacctgaagctggtgccccccatggaggaggactacccccagttcggcagccccaagtag

SEQ ID NO: 63936 - DNA, 1284 bp, Artificial Sequence
  derived and/or modified sequence
atggcgctgctgtggggcctcctcgtcctgagttggtcctgcctacagggtccatgttcagtgttttcccccgtttcagccatggagcctttgggtcgacagctgacctcgggccctaatcaggaacaggtgtcgcctcttaccctcctcaagctagggaatcaggtgcagccaggcgctcagaaccacacactgcaacgcctgcagcaggtgcttcacgctggttctggaccgtgtctgcctcacctgctgtcacgcctctgtcaggacctgggcccaggcgcctttaggttggccgcgcggatgtacctgcagaaagggttcccaatcaaagaggatttcttggaacagtcagagcagctgtttggagccaagccggtatccttgaccggtaaacaggaggacgatttggcaaacatcaatcaatgggtgaaggaggctacagaaggcaaaatccaggagttcctgagtgggttgccggaggataccgtcctgctcctgttgaacgctattcacttccagggcttttggcgaaacaaattcgacccctctttgacccagcgcgatagctttcacctcgatgaacaatttacagtgccagtggaaatgatgcaggcgcgtacctacccccttcggtggtttttgctagaacaacccgaaatacaggtggcacattttcctttcaagaataatatgtcatttgtggttttagtgcctacgcattttgagtggaatgtgagccaggtgctggctaatttgtcttgggataccctacacccccctctggtgtgggaaagacctacaaaggtgagactgcctaagctgtatctcaaacaccagatggatctcgtcgccactctctcgcaacttggtctccaggagttatttcaggcacccgacctaagaggaatttctgagcagtcgttagtggtttctggcgtgcagcatcagagtaccctcgagctctcggaggtgggcgtagaggctgccgctgccactagtatcgcgatgagcagaatgtccttaagttcgttcagcgtgaacaggccgtttcttttcttcatttttgaggacacaacggggttaccgctgtttgtcggttcagtcaggaaccccaatccgtctgccccccgcgagctgaaagaacagcaggactcgccagggaataaggatttcctccagagtctgaagggatttccccggggggacaagctgttcggcccagacctgaaacttgtcccaccaatggaggaggattacccacagtttgggagccctaaatag

SEQ ID NO: 63937 - DNA, 1284 bp, Artificial Sequence
  derived and/or modified sequence
atggccctgctgtggggcctgctggtgctgtcctggagctgcctgcagggcccctgcagcgtcttcagccctgtgtctgccatggagcccctgggccggcagctgaccagcggccccaaccaggagcaggtgagccccctgaccctgctgaagctgggcaaccaggtgcagcccggggcccagaaccacaccctgcagaggctgcagcaggtgctgcacgccggcagcggcccctgcctgccccacctgctgagccggctgtgccaggacctgggccctggggccttccggctggccgccaggatgtacctgcagaagggcttccccatcaaggaggacttcctggagcagagcgagcagctgtttggagccaagcctgtgtccctgaccgggaagcaggaggatgacctggccaacatcaaccagtgggtgaaggaggccacagagggcaagatccaggagttcctgagcggcctgcctgaagatactgtgctgctgctgctgaatgccatccacttccagggcttctggaggaacaagtttgaccccagcctgacccagagggacagcttccacctggatgagcagttcaccgtgcctgtggagatgatgcaggcccggacctaccccctgcgctggttcctgctggagcagcctgagatccaggtggcccacttccccttcaagaacaacatgagctttgtggtgctggtgcccacccactttgagtggaatgtgtcccaggtgctggccaacctgtcctgggacaccctgcacccccccctggtgtgggagcggcccaccaaggtgcggctgcccaagctgtacctgaagcaccagatggacctggtggccaccctgagccagctgggcctgcaggagctgttccaggccccagacctgcggggcatcagcgagcagagcctggtggtgtctggagtgcagcaccagagcaccctggagctgtctgaggtgggcgtggaggccgctgctgccaccagcatcgccatgagcaggatgagcctgagcagcttctctgtgaaccggcccttcctgttcttcatctttgaggacaccaccggcctgcccctgtttgtgggctctgtgaggaaccccaaccccagcgccccccgggagctgaaggagcagcaggacagccctggcaacaaggacttcctgcagagcctgaagggcttccccaggggggacaagctgtttggaccagacctgaagctggtgccccccatggaggaggactacccccagtttggcagccccaagtag

SEQ ID NO: 63938 - DNA, 1284 bp, Artificial Sequence
  derived and/or modified sequence
atggccctgctgtggggcctgctggtgctgagctggagctgcctgcaggggccttgttccgtgttctcgcccgtctccgccatggagcccctgggccggcaattgacatccggtcctaaccaggagcaggtcagtccattgactctcctgaagttgggcaatcaggtgcaacccggagcccaaaatcataccctgcagcgtttgcagcaggtccttcacgccggctcgggaccgtgcctaccacacctgttgagccgactgtgtcaggacctaggacctggcgcatttcgactcgccgctagaatgtatctgcaaaagggcttccccattaaagaagatttcctggagcagagtgaacagctgttcggagccaagcctgtgtcacttacaggtaaacaagaggacgacctggctaatattaatcagtgggtgaaggaagcaaccgaggggaaaatccaggaattcctgagcggacttcctgaggacacggtgcttctcctgctgaacgccatacactttcaaggcttttggcgcaacaaatttgaccccagcctgacccagcgcgactccttccacctcgatgaacagttcacggtgcccgtagagatgatgcaggccagaacatatccacttaggtggtttctcttagaacagcccgaaattcaggtggcacactttccgttcaagaacaatatgagttttgttgttttggtgccgacacatttcgagtggaacgtcagccaggtgctagccaacctctcctgggatacccttcatccccccctggtgtgggaaagacccactaaggtccggcttccaaagttgtatctcaaacaccagatggacctggtcgcaaccctgagtcagttgggtctccaggaactattccaggcacccgatttacgcgggatctcagaacaaagcttggttgtgtcaggcgtgcagcaccagagtaccctggagttgagcgaggtcggggtggaggcagccgcggccacatctatcgcgatgagccgcatgtcattgtcatcattctccgtaaaccggcccttcctgtttttcattttcgaagacactaccgggttaccccttttcgtgggctctgtccgtaatccaaaccccagcgccccacgggagttgaaagagcagcaagacagcccagggaacaaagacttcctgcaatctcttaaagggttccccagaggtgacaagcttttcggacctgacctgaagctggttccaccgatggaagaggactaccctcagttcggaagtcctaagtag

SEQ ID NO: 63939 - DNA, 1284 bp, Artificial Sequence
  derived and/or modified sequence
atggcactgctgtggggtcttttggttctctcctggagttgcttgcagggcccttgcagtgttttcagccccgtgtccgcaatggagccgttggggaggcaacttacaagcggccctaatcaagagcaggtttcccctctgacactgctgaaactgggtaaccaggtgcaaccgggagcacagaaccacaccttgcagcggctacagcaagtcctgcatgccggatctgggccatgccttccacacctgctttctagactgtgtcaggatcttggcccaggagcctttcggcttgccgcaaggatgtatctgcaaaaagggtttcccatcaaagaagacttcctcgagcaatcagagcagctgtttggagcgaaacctgtgagccttacaggcaaacaggaggatgacctagcaaacattaaccaatgggtgaaggaggccactgaaggcaagatacaggagttcctgtctggtctccctgaagacactgtgttattactgttgaacgccatacactttcagggattctggcggaacaaattcgacccctcattgacacagcgcgacagctttcatttggacgaacaattcacggtcccagtcgagatgatgcaagctaggacttaccctctgcggtggttcctgctagagcagcccgaaatccaagtagctcacttcccattcaagaacaatatgagctttgtggtactcgtgcctactcatttcgagtggaacgtgtcacaagtcttggccaacctctcttgggacactctgcatcccccactggtttgggagcggccaaccaaggtaaggttgcccaagctgtacttaaagcaccagatggaccttgtagccaccctgagccagcttggattgcaagagctctttcaagcacctgacctgcgcggtatctccgagcaatccttggttgtgtctggtgtgcaacaccaaagtacactagagctgagcgaggtgggcgttgaagccgctgccgctacaagcatagccatgagccgtatgagcctgtcttccttctcagtaaatcggccttttctgttctttattttcgaagacaccacaggcctgcccttgtttgtaggcagtgtgcgtaatcccaatccctccgctccacgcgaattaaaagaacagcaggactctccgggtaacaaagatttcttgcagtccctgaagggcttccccaggggcgataaactgtttggccctgatctgaaactggtgcctcccatggaagaggattacccccagttcggttccccaaaatag

SEQ ID NO: 63940 - DNA, 2092 bp, Artificial Sequence
  derived and/or modified sequence
cctgggcagagagtgaggagcacccaagtggggccagaggaacgttgtgtgtggcagcaaggagcccgcagaggaacatggcgctgctctgggggctcctggtgctcagctggtcctgcctgcaaggcccctgctccgtgttctcccctgtgagcgccatggagcccttgggccggcagctaactagcgggccgaaccaggagcaggtgtccccacttaccctcctcaagttgggcaaccaggtacaaccaggtgctcagaaccacacgttgcagaggctgcaacaggtgctgcacgcaggctcagggccctgcctcccccatctgctgagccgcctctgccaggacctgggccccggcgcgttccgactggctgccaggatgtacctgcagaaaggatttcccatcaaagaagatttcctggaacaatccgaacagctatttggggcaaagcccgtgagcctgacgggaaagcaggaagatgacctggcaaacatcaaccaatgggtgaaggaggccacggaggggaagattcaggaattcctctctgggctgccggaagacaccgtgttgcttctcctcaacgccatccacttccagggtttctggaggaacaagtttgacccgagccttacccagagagactccttccacctggacgagcagttcacggtgcccgtggaaatgatgcaggcccgcacgtacccgctgcgctggttcttgctggagcagcctgagatccaggtggctcatttcccctttaagaacaacatgagctttgtggtccttgtacccacccactttgaatggaacgtgtcccaggtactggccaacctgagttgggacaccctgcacccacctctggtgtgggagaggcccaccaaggtccggctgcctaagctgtatctgaaacaccaaatggacctggtggccaccctcagccagctgggcctgcaggagttgttccaggccccagacctgcgtgggatctccgagcagagcctggtggtgtccggcgtgcagcatcagtccaccctggagctcagcgaggtcggcgtggaggcggcggcggccaccagcattgccatgtcccgcatgtccctgtcctccttcagcgtgaaccgccccttcctcttcttcatcttcgaggacaccacaggccttcccctcttcgtgggcagcgtgaggaaccccaaccccagtgcaccgcgggagctcaaggaacagcaggattccccgggcaacaaggacttcctccagagcctgaaaggcttcccccgcggagacaagcttttcggccctgacttaaaacttgtgccccccatggaggaggattacccccagtttggcagccccaagtgaggggccgtggctgtggcatccagagtccctgcctggaccagcctctccactcatgtgactctttccaaccggctttgtggcactggggcaggggccgggggcagtctgagagaggccattctttcccaacacctcttggggagtttagggtggggggggggcgcggctgggaggagggcaggcatcggggagccgggagcctgaccctcatctttcttccaaacaggctcagagggtgtcctgcaccggggcctgggcaggagggaggtgcttctagttctgccaggagacaggttagctgctccccacgtcagctgggacaccccgacttttgtttaccagagaaaaagggagggggagagggctgcctttggacttgtcccgggacacctaggctagggtggggagagacgggccctggtggtggctcgggaggcgaagcgttgtcctcagccccgcgtggaactcgtgtctggcacagcctggctgtggcctaacctgccgagagtccatcagcctccatcctaccccctgtgccttgtcacgccagacttcccacggctcctcgagatcccaacactgccagcatttcccttccttcctctcctgtctccctcctctgcccgggagctcaggaaccgaggcagggaaggatcccatgagctccttaaggctcttttgtaaggtttttgtagtgatttttatgccacctgaataaagaatgaatgggc

SEQ ID NO: 63941 - protein, 531 aa, Artificial Sequence
  derived and/or modified sequence
MVSKLTSLQQELLSALLSSGVTKEVLVQALEELLPSPNFGVKLETLPLSPGSGAEPDTKPVFHTLTNGHAKGRLSGDEGSEDGDDYDTPPILKELQALNTEEAAEQRAEVDRMLSEDPWRAAKMIKGYMQQHNIPQREVVDVTGLNQSHLSQHLNKGTPMKTQKRAALYTWYVRKQREILRQFSQQSHGPGQSDDACSEPTNKKMRRNRFKWGPASQQILYQAYDRQKNPSKEEREALVEECNRAECLQRGVSPSKAHGLGSNLVTEVRVYNWFANRRKEEAFRQKLAMDAYSSNQTHSLNPLLSHGSPHHQPSSSPPNKLSGVRYSQQGNNEITSSSTISHHGNSAMVTSQSVLQQVSPASLDPGHNLLSPDGKMISVSGGGLPPVSTLTNIHSLSHHNPQQSQNLIMTPLSGVMAIAQSLNTSQAQSVPVINSVAGSLAALQPVQFSQQLHSPHQQPLMQQSPGSHMAQQPFMAAVTQLQNSHMYAHKQEPPQYSHTSRFPSAMVVTDTSSISTLTNMSSSKQCPLQAW

SEQ ID NO: 63942 - DNA, 1596 bp, Artificial Sequence
  derived and/or modified sequence
atggtgagcaagctgaccagcctgcagcaggagctgctgagcgccctgctgagcagcggcgtgaccaaggaggtgctggtgcaggccctggaggagctgctgcccagccccaacttcggcgtgaagctggagaccctgcccctgagccccggcagcggcgccgagcccgacaccaagcccgtgttccacaccctgaccaacggccacgccaagggcagactgagcggcgacgagggcagcgaggacggcgacgactacgacaccccccccatcctgaaggagctgcaggccctgaacaccgaggaggccgccgagcagagagccgaggtggacagaatgctgagcgaggacccctggagagccgccaagatgatcaagggctacatgcagcagcacaacatcccccagagagaggtggtggacgtgaccggcctgaaccagagccacctgagccagcacctgaacaagggcacccccatgaagacccagaagagagccgccctgtacacctggtacgtgagaaagcagagagagatcctgagacagttcagccagcagagccacggccccggccagagcgacgacgcctgcagcgagcccaccaacaagaagatgagaagaaacagattcaagtggggccccgccagccagcagatcctgtaccaggcctacgacagacagaagaaccccagcaaggaggagagagaggccctggtggaggagtgcaacagagccgagtgcctgcagagaggcgtgagccccagcaaggcccacggcctgggcagcaacctggtgaccgaggtgagagtgtacaactggttcgccaacagaagaaaggaggaggccttcagacagaagctggccatggacgcctacagcagcaaccagacccacagcctgaaccccctgctgagccacggcagcccccaccaccagcccagcagcagcccccccaacaagctgagcggcgtgagatacagccagcagggcaacaacgagatcaccagcagcagcaccatcagccaccacggcaacagcgccatggtgaccagccagagcgtgctgcagcaggtgagccccgccagcctggaccccggccacaacctgctgagccccgacggcaagatgatcagcgtgagcggcggcggcctgccccccgtgagcaccctgaccaacatccacagcctgagccaccacaacccccagcagagccagaacctgatcatgacccccctgagcggcgtgatggccatcgcccagagcctgaacaccagccaggcccagagcgtgcccgtgatcaacagcgtggccggcagcctggccgccctgcagcccgtgcagttcagccagcagctgcacagcccccaccagcagcccctgatgcagcagagccccggcagccacatggcccagcagcccttcatggccgccgtgacccagctgcagaacagccacatgtacgcccacaagcaggagcccccccagtacagccacaccagcagattccccagcgccatggtggtgaccgacaccagcagcatcagcaccctgaccaacatgagcagcagcaagcagtgccccctgcaggcctggtag

SEQ ID NO: 63943 - DNA, 1596 bp, Artificial Sequence
  derived and/or modified sequence
atggtgtcgaaactcactagtttacaacaagagcttctcagcgcattactttcaagtggagtgacaaaggaggtgcttgtccaagccttggaagaactcctgccaagcccaaactttggggttaagctggaaacactgccgctgtccccaggtagcggtgcagagccggacacaaaaccggtgtttcacaccttgacgaatggccacgccaagggacgtttgtctggtgacgaaggaagcgaggacggagacgattatgataccccacctatactgaaggagctgcaggcccttaacaccgaagaggccgctgagcaacgcgcagaagtggatcggatgttgtccgaagacccttggcgcgccgctaagatgattaagggatacatgcaacagcataatatacctcaaagggaggttgtggacgtgacgggtctcaatcagagtcacctctcccagcacctgaacaagggcaccccgatgaagacacagaagagagcagctttgtacacgtggtacgtgcgcaagcaaagggaaatcctgcggcagttctcacagcagtcacacggtccaggccagtctgacgatgcttgcagcgaacccacaaataagaaaatgaggcgcaacaggttcaaatggggcccagcctcccagcaaatcctgtaccaggcttacgaccgccagaagaacccttcgaaggaggaacgcgaagcacttgtcgaggaatgcaaccgcgctgagtgtctacagaggggcgtgtctccatcaaaggctcatgggctggggagtaacctggttaccgaagtgcgcgtgtataattggttcgcaaataggcggaaagaagaggcgttccgtcagaagctggctatggacgcttatagttccaatcagacccacagcctgaatccgcttctcagccacggctcgccgcatcaccaaccgtcgtcttcgcccccaaataagctatctggagtgagatacagccagcagggcaacaatgagatcacatctagctccaccatctcacaccacggaaatagtgctatggtcacctcgcagtcggtcctgcagcaggtgtcacctgcgtccctcgatcctgggcataatcttctgagtcctgatggcaaaatgattagcgtttctggagggggattgccaccagtgtccacactgacaaacatccacagcttatcccatcacaacccacagcagtcccagaacctcattatgactccgcttagtggcgtcatggccattgcccagtccctgaatacctcccaggcccagagcgtgccggtgatcaactctgtcgctgggagcctggcggcactacagccagttcaattcagtcagcaactccactctccccatcagcagccgttgatgcaacaaagtcctggctcgcacatggcacagcagccctttatggccgccgtgacccaactccaaaattcgcatatgtatgctcataaacaggaacccccccagtattcacacacatcacgctttccatcagctatggtagttaccgatacatcgtctatcagtacattgactaacatgtcaagttctaaacagtgtcctctgcaggcgtggtag

SEQ ID NO: 63944 - DNA, 1971 bp, Artificial Sequence
  derived and/or modified sequence
agaagttttctgactcctttcggaggagcctccgggaccccggggagtaacaggtgtctggaggctgaagggtggaggggttcctggatttggggtttgcttgtgaaactcccctccaccctcctctctcgcacccacccaccccctcacccccttctttttccgtccttggaaaatggtgtccaagctcacgtcgctccagcaagaactcctgagcgccctgctgagctccggggtcaccaaggaggtgctggttcaggccttggaggagttgctgccatccccgaacttcggggtgaagctggagacgctgcccctgtcccctggcagcggggccgagcccgacaccaagccggtcttccatactctcaccaacggccacgccaagggccgcttgtccggcgacgagggctccgaggacggcgacgactatgacacacctcccatcctcaaggagctgcaggcgctcaacaccgaggaggcggcggagcagcgggcggaggtggaccggatgctcagtgaggacccttggagggctgctaaaatgatcaagggttacatgcagcaacacaacatcccccagagggaggtggtcgatgtcaccggcctgaaccagtcgcacctctcccagcatctcaacaagggcacccctatgaagacccagaagcgtgccgctctgtacacctggtacgtcagaaagcaacgagagatcctccgacagttcagtcaacagagccatgggcctgggcagtccgatgatgcctgctctgagcccaccaacaagaagatgcgccgcaaccggttcaaatgggggcccgcgtcccagcaaatcttgtaccaggcctacgatcggcaaaagaaccccagcaaggaagagagagaggccttagtggaggaatgcaacagggcagaatgtttgcagcgaggggtgtccccctccaaagcccacggcctgggctccaacttggtcactgaggtccgtgtctacaactggtttgcaaaccgcaggaaggaggaggcattccggcaaaagctggccatggacgcctatagctccaaccagactcacagcctgaaccctctgctctcccacggctccccccaccaccagcccagctcctctcctccaaacaagctgtcaggagtgcgctacagccagcagggaaacaatgagatcacttcctcctcaacaatcagtcaccatggcaacagcgccatggtgaccagccagtcggttttacagcaagtctccccagccagcctggacccaggccacaatctcctctcacctgatggtaaaatgatctcagtctcaggaggaggtttgcccccagtcagcaccttgacgaatatccacagcctctcccaccataatccccagcaatctcaaaacctcatcatgacacccctctctggagtcatggcaattgcacaaagcctcaacacctcccaagcacagagtgtccctgtcatcaacagtgtggccggcagcctggcagccctgcagcccgtccagttctcccagcagctgcacagccctcaccagcagcccctcatgcagcagagcccaggcagccacatggcccagcagcccttcatggcagctgtgactcagctgcagaactcacacatgtacgcacacaagcaggaacccccccagtattcccacacctcccggtttccatctgcaatggtggtcacagataccagcagcatcagtacactcaccaacatgtcttcaagtaaacagtgtcctctacaagcctggtgatgcccacacaccacttacttcgtgcgcaacaacaaggaccctgttttccacaccatcaccctctgggcagctgtcatggaaaagcccagtgacctgaccggcacctgcgagaggtccctgcttacctgacggacgtcctgctggcacctcagacaatccactctcaggaggcgcagcccgaagcccagtttcccttctat

SEQ ID NO: 63945 - DNA, 1596 bp, Artificial Sequence
  derived and/or modified sequence
atggtgtccaagctgaccagcctgcagcaggagctgctgagcgccctgctgagcagtggagtgaccaaggaggtgctggtgcaggccctggaggagctgctgcccagccccaactttggagtgaagctggagaccctgcccctgagccctggcagcggggctgagccagacaccaagcctgtgttccacaccctgaccaatggacatgccaagggccgcctgtctggagatgagggctctgaagatggagatgattatgacaccccacccatcctgaaggagctgcaggccctgaacacagaggaggccgctgagcagagagctgaggtggacaggatgctgtctgaggacccctggagggctgccaagatgatcaagggctacatgcagcagcacaacatcccccagcgggaggtggtggatgtgacaggcctgaaccagagccacctgagccagcacctgaacaagggcacccccatgaagacccagaagagagctgccctgtacacctggtacgtgaggaagcagcgggagatcctgcggcagttcagccagcagagccacggccctggccagagtgatgatgcctgcagcgagcccaccaacaagaagatgagaagaaaccgcttcaagtggggccctgccagccagcagatcctgtaccaggcctatgaccggcagaagaaccccagcaaggaggagcgggaggccctggtggaggagtgcaacagagctgagtgcctgcagaggggcgtgagccccagcaaggcccacggcctgggcagcaacctggtgacagaggtgcgggtgtacaactggtttgccaacagaaggaaggaggaggccttccggcagaagctggccatggatgcctacagcagcaaccagacccacagcctgaaccccctgctgagccacggcagcccccaccaccagcccagcagcagcccccccaacaagctgagcggcgtgcgctacagccagcagggcaacaatgagatcaccagcagcagcaccatcagccaccacggcaacagcgccatggtgaccagccagagcgtgctgcagcaggtgtccccagccagcctggaccccggccacaacctgctgagcccagatggcaagatgatctctgtgtctgggggcggcctgccccctgtgtccaccctgaccaacatccacagcctgagccaccacaacccccagcagagccagaacctgatcatgacccccctgtctggagtgatggccatcgcccagagcctgaacaccagccaggcccagagcgtgcctgtgatcaacagcgtggccggcagcctggccgccctgcagcctgtgcagttcagccagcagctgcacagcccccaccagcagcccctgatgcagcagagccctggcagccacatggcccagcagcccttcatggctgctgtgacccagctgcagaacagccacatgtatgcccacaagcaggagcccccccagtacagccacaccagccgcttccccagcgccatggtggtgacagacaccagcagcatcagcaccctgaccaacatgagcagcagcaagcagtgccccctgcaggcctggtag

SEQ ID NO: 63946 - DNA, 1596 bp, Artificial Sequence
  derived and/or modified sequence
atggtgagcaagctgaccagcctgcagcaggagctgctgagcgccttgctctcttccggggtgacaaaggaggtgttggttcaagctctggaggaactactgccatcccccaacttcggggtgaaactcgagaccctgcccttatctcctggatctggggccgagcccgataccaaaccggtcttccacactctgacaaatgggcatgcaaaggggagactgtcaggagatgagggatcagaagacggagatgattatgacacccccccaatcctgaaggagctgcaggccctgaacaccgaagaggctgccgaacaacgggccgaagtcgaccgcatgctgtcagaggacccgtggcgggctgccaaaatgatcaagggctatatgcagcaacacaatatacctcaacgagaggtagtcgacgtgaccggtttgaatcagagccatctcagccagcacctgaataaaggaacccctatgaaaacacagaagcgagccgcactatatacctggtatgtgcggaaacaaagagagatactgcgccagttttcacagcagagccacggccctggacaatctgatgacgcctgcagcgagcctacgaacaagaaaatgagaaggaaccgtttcaaatgggggccggctagccagcagatcttataccaagcgtacgaccggcagaagaatccaagcaaggaggagagggaagctcttgtggaagaatgcaaccgcgcagagtgccttcaacggggagtctcgccttcaaaggcccacggactgggatccaacctcgtcactgaggtgcgggtttataattggtttgcgaatcgacgcaaagaagaagcattccggcaaaaactggctatggatgcatactcaagtaatcagacccactcccttaatccactgttgagtcacggatcgccacaccaccagccgtccagcagcccaccaaacaagctgtccggcgtgcgctactcccagcagggtaacaacgaaatcacatcttccagcactatctctcaccatggaaactctgctatggtgactagccaaagcgtgctacagcaagtgtcaccagcttcactggacccgggtcataacctgttgagccctgacgggaagatgatatccgtttcaggcggcggtctgccaccagtgagcaccctgaccaacatccactcactatcccatcacaatccacagcagtcacagaatctgataatgacaccactgtcgggagtcatggcgatcgctcagagcctgaatacctcacaggcccaatcggtgccggtgatcaactcagtggctggttccctggccgccttgcagccagtgcagttttctcaacagctgcactcgccccatcagcagcctctgatgcagcaaagccctggatcacacatggcgcaacaacctttcatggcagcggtcacccagctgcagaacagccatatgtacgcccataagcaggaacctccccagtactctcatacttcccgcttcccttccgccatggttgtcacggatacatcatctatctcaacccttaccaatatgagcagcagtaagcagtgcccccttcaggcatggtag

SEQ ID NO: 63947 - DNA, 1596 bp, Artificial Sequence
  derived and/or modified sequence
atggtgtcaaagctcacctccctgcagcaggaactcctcagcgcccttctgtcgagtggggtgactaaggaagttctggtgcaggccctggaggagctgctcccctcacccaatttcggggttaagctggagaccttgcccctttctcctggcagcggggctgagcctgacaccaaacccgtgttccacaccctgaccaatggccatgcgaaaggccgtctgagcggcgatgaggggagtgaggatggcgatgactacgacacccccccaatcctgaaggaacttcaggcccttaacaccgaggaggctgcggaacagcgggcagaggtagatagaatgctgtcggaagatccctggcgcgcagcgaagatgattaaaggatatatgcaacagcataatatcccgcagcgagaggtggtcgacgtgacaggtctgaaccaatcccacctatcccagcatctgaataagggcacaccaatgaaaacccagaaacgggcagcactctacacatggtatgtgaggaagcaacgcgagatccttcgacaatttagtcagcagtctcacggacctgggcagtccgatgacgcctgcagtgagcccactaacaaaaaaatgcgaagaaatcgcttcaaatggggtcccgcaagccaacaaatcttatatcaggcttacgaccgtcaaaagaacccgtcaaaggaggagcgggaggctctggtcgaggaatgtaaccgggcagagtgtctgcagcgaggcgtgtctccaagcaaagcacatggactaggatccaatctcgtcactgaagttcgcgtttataactggttcgcgaataggcgcaaggaggaagcattccggcagaagctggctatggatgcctatagcagtaaccaaactcattccctgaaccccctgctgtcacatggttccccgcaccatcagccgagtagcagccctcccaacaagctgtctggcgtgcggtactcacagcaggggaataacgagattacatcttcgagcaccatctcccaccacggcaacagtgctatggttacaagccagtctgttctccaacaggttagtcctgcctcacttgaccccggacataatctactttccccggatggaaagatgatttcagtgtccggcggtggactgccgcctgtgtccacactcacgaacattcattcattaagtcatcacaatccccagcagtcccagaacctcatcatgaccccgctgagtggcgttatggccatagcacagtcactgaataccagccaggcacagagcgtgccggttataaatagcgtagctgggtctctggcagcgcttcagcccgtgcagtttagccagcagctgcactctcctcaccagcaaccactgatgcaacaatccccgggatcccacatggcacagcagccattcatggctgcagtcactcagctgcagaactcgcacatgtatgcccataagcaggagccgcctcagtattctcatacatcccgctttccaagtgcaatggtggtgactgatactagcagcatctctacgttgacaaacatgtcgagctccaagcaatgtcccctccaggcctggtag

SEQ ID NO: 63948 - protein, 169 aa, Artificial Sequence
  derived and/or modified sequence
MFQPAPKRCFTIESLVAKDSPLPASRSEDPIRPAALSYANSSPINPFLNGFHSAAAAAAGRGVYSNPDLVFAEAVSHPPNPAVPVHPVPPPHALAAHPLPSSHSPHPLFASQQRDPSTFYPWLIHRYRYLGHRFQGKSMVSEPKNKVQKAEAGGRRLRFATKEKRDAPY

SEQ ID NO: 63949 - DNA, 510 bp, Artificial Sequence
  derived and/or modified sequence
atgttccagcccgctccaaaacgttgcttcaccattgagtctctggttgcaaaagacagtcccctgcctgcttccaggtcggaggatcctatccggccagcagctctgtcgtacgccaactcatcacctatcaatcccttcctgaacggttttcactctgccgctgctgccgccgcggggcggggagtttattctaaccccgatcttgtgtttgctgaggccgttagtcacccccccaatccggccgttccagtgcatccagttcctcctccacacgccttggccgctcatcccctaccgtcaagccactctccccaccctctgtttgcttcccagcagcgagaccccagcacattttacccctggctgatccatcggtataggtacctcgggcacaggtttcaagggaaatcaatggtaagcgagcccaagaataaagtgcagaaggctgaggctggcggcaggagacttaggttcgctaccaaggagaagcgcgatgccccgtactag

SEQ ID NO: 63950 - DNA, 510 bp, Artificial Sequence
  derived and/or modified sequence
atgttccagcctgcccccaagcgctgcttcaccatcgagagcctggtggccaaggacagccccctgcctgccagccgctctgaggaccccatccggcctgctgccctgtcctatgccaacagcagccccatcaaccccttcctgaatggcttccacagcgctgctgctgctgctgctggccggggcgtgtacagcaacccagacctggtgtttgctgaggccgtgagccacccccccaacccagctgtgcctgtgcaccctgtgcccccaccccacgccctggccgcccaccccctgcccagcagccacagcccccaccccctgtttgccagccagcagagggaccccagcaccttctacccctggctgatccaccgctaccgctacctgggccaccgcttccagggcaagtccatggtgtctgagcccaagaacaaggtgcagaaggccgaggccggcggccgccgcctgcgctttgccaccaaggagaagagagatgccccctactag

SEQ ID NO: 63951 - DNA, 510 bp, Artificial Sequence
  derived and/or modified sequence
atgttccagcccgcccccaagcggtgcttcaccatcgagagcctggtggcgaaagacagtccactccccgccagtcggagcgaagatcccatcagaccagccgctctgagctacgcaaatagtagcccgattaaccccttcttaaatggattccactctgctgccgcggctgccgcaggacggggagtgtattcaaatcccgacctggtcttcgctgaggccgtgtcacatccccccaatccggcagtcccggttcatcctgtgccccctccccacgctctggctgcacatccgttgccatcctcgcacagtccacatcccttatttgcgagtcaacaacgtgacccctccacattctatccgtggttaattcacagatacagatacctgggtcaccgcttccagggcaagagcatggtctcagagccaaaaaataaggtccagaaggccgaggccggcggacggcggctgagatttgcgacaaaagagaagagagatgccccctactag

SEQ ID NO: 63952 - DNA, 510 bp, Artificial Sequence
  derived and/or modified sequence
atgttccagcctgctccgaaacggtgtttcacgatcgagtccctcgttgcaaaggattctcctttaccagccagtcggtccgaggatcccatacgcccagctgctctatcctatgccaatagctcgccgataaatccttttctcaatggattccattcagctgctgctgccgcagcaggcagaggtgtctattctaaccctgaccttgtattcgctgaggcggttagccaccccccaaatccggcagtgcctgtccaccctgtcccaccaccacatgcactggcagcccaccccctgcctagctcacacagtccacaccctctgttcgcctcccagcagcgggatcccagcacattttacccttggttgatccaccgctacagatacttgggccatcggtttcagggtaaatctatggtttccgaacctaagaacaaagtgcagaaagcagaggctggaggcagaaggcttcgcttcgcgaccaaggagaagcgcgatgccccatactag

SEQ ID NO: 63953 - DNA, 510 bp, Artificial Sequence
  derived and/or modified sequence
atgttccagcccgcccccaagagatgcttcaccatcgagagcctggtggccaaggacagccccctgcccgccagcagaagcgaggaccccatcagacccgccgccctgagctacgccaacagcagccccatcaaccccttcctgaacggcttccacagcgccgccgccgccgccgccggcagaggcgtgtacagcaaccccgacctggtgttcgccgaggccgtgagccacccccccaaccccgccgtgcccgtgcaccccgtgccccccccccacgccctggccgcccaccccctgcccagcagccacagcccccaccccctgttcgccagccagcagagagaccccagcaccttctacccctggctgatccacagatacagatacctgggccacagattccagggcaagagcatggtgagcgagcccaagaacaaggtgcagaaggccgaggccggcggcagaagactgagattcgccaccaaggagaagagagacgccccctactag

SEQ ID NO: 63954 - DNA, 2710 bp, Artificial Sequence
  derived and/or modified sequence
cgggcgccgcaggagcgagtgagctgggagcgaggggcgaaggcgcggagaagcccggccgcccggtgggcggcagaaggctcagccgaggcggcggcgccgactccgttccactctcggcccggatccaggcctccgggttcccaggcgctcacctccctctgacgcactttaaagagtctccccccttccacctcagggcgagtaatagcgaccaatcatcaagccatttaccaggcttcggaggaagctgtttatgtgatccccgcactaattaggctcatgaactaacaaatcgtttgcacaacttgtgaagaagcgaacacttccatggattgtccttggacttagggcgccctgcccgccttttgcagaggagaaaaaacttttttttttttttgcctcccccgagaactttccccccttctcctccctgcctctaactccgatccccccacgccatctcgccaaaaaaaaaaaaaaaaaaaaaaaagaaaaaaaaagaaaaaaaaagaaaaaaaattaccccaatccacgcctgcaaattcttctggaaggattttcccccctctcttcaggttgggcgcgtttggtgcaagattctcgggatcctcggctttgcctctccctctccctcccccctcctttcctttttcctttcctttcctttctttcttcctttccttccccccacccccacccccaccccaaacaaacgagtccccaattctcgtccgtcctcgccgcgggcagcgggcggcggaggcagcgtgcggcggtcgccaggagctgggagcccagggcgcccgctcctcggcgcagcatgttccagccggcgcccaagcgctgcttcaccatcgagtcgctggtggccaaggacagtcccctgcccgcctcgcgctccgaggaccccatccgtcccgcggcactcagctacgctaactccagccccataaatccgttcctcaacggcttccactcggccgccgccgccgccgccggtaggggcgtctactccaacccggacttggtgttcgccgaggcggtctcgcacccgcccaaccccgccgtgccagtgcacccggtgccgccgccgcacgccctggccgcccaccccctaccctcctcgcactcgccacaccccctattcgcctcgcagcagcgggatccgtccaccttctacccctggctcatccaccgctaccgatatctgggtcatcgcttccaaggtaaaagtatggtttcagaaccgaagaacaaagttcaaaaggcagaagctggaggaagaaggctcagattcgcaacaaaagaaaaaagggacgcaccatattaaccggtggagaatcgccaccaagcaggcgagtccggaggaaatagacgtgacctcagatgattaaaaacataaacctaaccccacagaaacggacaacatggagcaaaagagacagggagaggtggagaaggaaaaaaccctacaaaacaaaaacaaaccgcatacacgttcaccgagaaagggagagggaatcggagggagcagcggaatgcggcgaagactctggacagcgagggcacagggtcccaaaccgaggccgcgccaagatggcagaggatggaggctccttcatcaacaagcgaccctcgtctaaagaggcagctgagtgagagacacagagagaaggagaaagagggagggagagagagaaagagagagaaagagagagagagagagagagagagaaagctgaacgtgcactctgacaaggggagctgtcaatcaaacaccaaaccggggagacaagatgattggcaggtattccgtttatcacagtccacttaaaaaatgatgatgatgataaaaaccacgacccaaccaggcacaggacttttttgttttttgcacttcgctgtgtttcccccccatctttaaaaataattagtaataaaaaacaaaaattccatatctagccccatcccacacctgtttcaaatccttgaaatgcatgtagcagttgttgggcgaatggtgtttaaagaccgaaaatgaattgtaattttcttttccttttaaagacaggttctgtgtgctttttattttgattttttttcccaagaaatgtgcagtctgtaaacactttttgataccttctgatgtcaaagtgattgtgcaagctaaatgaagtaggctcagcgatagtggtcctcttacagagaaacggggagcaggacgacgggggggctgggggtggcgggggagggtgcccacaaaaagaatcaggacttgtactgggaaaaaaacccctaaattaattatatttcttggacattccctttcctaacatcctgaggcttaaaaccctgatgcaaacttctcctttcagtggttggagaaattggccgagttcaaccattcactgcaatgcctattccaaactttaaatctatctattgcaaaacctgaaggactgtagttagcggggatgatgttaagtgtggccaagcgcacggcggcaagttttcaagcactgagtttctattccaagatcatagacttactaaagagagtgacaaatgcttccttaatgtcttctataccagaatgtaaatatttttgtgttttgtgttaatttgttagaattctaacacactatatacttccaagaagtatgtcaatgtcaatattttgtcaataaagatttatcaatatgccctc

SEQ ID NO: 63955 - protein, 549 aa, Artificial Sequence
  derived and/or modified sequence
MAVPVSSFAQRTRSRFRVHLQRITSSNFLHYQPAAELGKDLIDLATFRPQPTASGHRPEEDEEEEIVIGWQEKLFSQFEVDLYQNETACQSPLDYQYRQEILKLENSGGKKNRRIFTYTDSDRYTNLEEHCQRMTTAASEVPSFLVERMANVRRRRQDRRGMEGGILKSRIVTWEPSEEFVRNNHVINTPLQTMHIMADLGPYKKLGYKKYEHVLCTLKVDSNGVITVKPDFTGLKGPYRIETEGEKQELWKYTIDNVSPHAQPEEEERERRVFKDLYGRHKEYLSSLVGTDFEMTVPGALRLFVNGEVVSAQGYEYDNLYVHFFVELPTAHWSSPAFQQLSGVTQTCTTKSLAMDKVAHFSYPFTFEAFFLHEDESSDALPEWPVLYCEVLSLDFWQRYRVEGYGAVVLPATPGSHTLTVSTWRPVELGTVAELRRFFIGGSLELEDLSYVRIPGSFKGERLSRFGLRTETTGTVTFRLHCLQQSRAFMESSSLQKRMRSVLDRLEGFSQQSSIHNVLEAFRRARRRMQEARESLPQDLVSPSGTLVS

SEQ ID NO: 63956 - protein, 356 aa, Artificial Sequence
  derived and/or modified sequence
MHIMADLGPYKKLGYKKYEHVLCTLKVDSNGVITVKPDFTGLKGPYRIETEGEKQELWKYTIDNVSPHAQPEEEERERRVFKDLYGRHKEYLSSLVGTDFEMTVPGALRLFVNGEVVSAQGYEYDNLYVHFFVELPTAHWSSPAFQQLSGVTQTCTTKSLAMDKVAHFSYPFTFEAFFLHEDESSDALPEWPVLYCEVLSLDFWQRYRVEGYGAVVLPATPGSHTLTVSTWRPVELGTVAELRRFFIGGSLELEDLSYVRIPGSFKGERLSRFGLRTETTGTVTFRLHCLQQSRAFMESSSLQKRMRSVLDRLEGFSQQSSIHNVLEAFRRARRRMQEARESLPQDLVSPSGTLVS

SEQ ID NO: 63957 - DNA, 1650 bp, Artificial Sequence
  derived and/or modified sequence
atggccgtacccgtctctagctttgctcaacgtacccggtccaggttcagagtccatctgcagcggataactagtagtaatttcctgcactaccagccagcagccgaactgggcaaggatctgattgacttagcaaccttccgcccacagcctacagccagcggccacaggcctgaggaggatgaggaggaggaaatcgtcatcggttggcaagagaagctgttcagccagttcgaggtggacttataccagaacgaaaccgcttgccagagccctttagactaccagtacagacaggaaatcctcaaattggaaaactccggagggaagaaaaaccgcaggatctttacctatacagattccgatcggtatactaacctggaagaacattgccagaggatgactacggcagcttcagaggtgccgtccttcttagtggaacgcatggccaatgtgcggcgtaggagacaggatcggagggggatggaggggggcatactgaagtcccgaattgttacgtgggaaccaagcgaggagttcgtaaggaacaatcacgtcatcaatacccctttacagactatgcacattatggctgaccttgggccctataagaagctggggtacaaaaaatatgaacatgttctctgtaccttaaaggtggatagcaacggagtcatcacagttaaacccgattttactgggctgaagggcccgtatcgtattgagactgaaggggaaaaacaggagctgtggaagtacaccatcgacaatgtgagcccccacgcgcagccggaagaggaggaacgggagcgccgggtgtttaaagacctctatggacgtcacaaggaatacctaagcagcctcgtcggtactgactttgaaatgaccgtgccaggagcattgcgcttgtttgtgaacggcgaggtagtttccgcacaaggctacgagtatgacaacctgtatgttcacttcttcgtcgaactaccgacagctcactggtcttccccagcatttcagcagctttcaggagttactcagacatgcacaaccaaatctctggccatggacaaggtcgcccatttctcttatccctttacgttcgaggcctttttcctccatgaggatgaaagcagcgacgcgctgcctgagtggccagtactatactgcgaggtccttagtctggatttttggcagcggtacagagtggaaggctacggcgctgttgtactcccagccacacctggcagccacactttaacggtttctacctggaggcccgtcgagctcgggacggtcgcagagctcagaaggtttttcattggtggctctctggagttagaggatctctcctacgtgcgaattcccggatcttttaagggagagcggctgagtcgatttgggctgcgaacagagacgactggcaccgtgacatttagactgcattgtcttcagcagtctcgggcctttatggagagtagctccttgcagaagcggatgcgatccgtcctcgatcggctcgagggtttcagccagcaatctagcatccataatgtgctggaagccttcagacgcgctcgtcgaaggatgcaggaagcccgagagtctctcccacaggatctggtctccccatcagggacactcgtttcgtag

SEQ ID NO: 63958 - DNA, 1650 bp, Artificial Sequence
  derived and/or modified sequence
atggctgtgcctgtgtcctcctttgcccagaggaccaggagccgcttccgggtgcacctgcagaggatcaccagcagcaacttcctgcactaccagcctgctgctgagctgggcaaggacctgattgacctggccaccttccggccccagcccacagccagcggccacaggcctgaggaggatgaggaggaggagatcgtcatcggctggcaggagaagctgttcagccagtttgaggtggacctgtaccagaatgaaacagcctgccagagccccctggactaccagtaccggcaggagatcctgaagctggagaacagcggcggcaagaagaacagacgcatcttcacctacacagacagcgaccgctacaccaacctggaggagcactgccagaggatgaccacagctgccagcgaggtgcccagcttcctggtggagaggatggccaacgtgagaagaagacggcaggacagaagaggcatggagggcggcatcctgaagagcagaattgtgacctgggagcccagcgaggagtttgtgaggaacaaccacgtgatcaacacccccctgcagaccatgcacatcatggctgacctgggcccctacaagaagctgggctacaagaagtatgaacatgtgctgtgcaccctgaaggtggacagcaatggagtcatcaccgtgaagccagacttcaccggcctgaagggcccctacagaattgaaacagaaggagagaagcaggagctgtggaagtacaccatcgacaacgtgagcccccacgcccagcctgaggaggaggagcgggagaggagggtcttcaaggacctgtatggccgccacaaggagtacctgagcagcctggtgggcacagactttgagatgacagtgcctggggccctgcggctgtttgtgaatggagaggtggtgtctgcccagggctatgaatatgacaacctgtatgtgcacttctttgtggagctgcccacagcccactggagcagccctgccttccagcagctgagcggcgtgacccagacctgcaccaccaagagcctggccatggacaaggtggcccacttctcctaccccttcacctttgaggccttcttcctgcatgaagatgagagcagtgatgccctgcctgagtggcctgtgctgtactgtgaggtgctgagcctggacttctggcagcgctacagagtggagggctatggagctgtggtgctgcctgccaccccaggcagccacaccctgactgtgtccacctggaggcctgtggagctgggcaccgtggccgagctgcggcgcttcttcatcggcggcagcctggagctggaggacctgtcctatgtgcgcatccctggcagcttcaagggggagcggctgagccgcttcggcctgaggacagagaccactggaacagtgaccttccggctgcactgcctgcagcagagccgggccttcatggagagcagcagcctgcagaagaggatgaggtctgtgctggaccggctggagggcttcagccagcagagcagcatccacaacgtgctggaggccttcagaagagcccggcggaggatgcaggaggcccgggagagcctgccccaggacctggtgagccccagcggcaccctggtgtcctag

SEQ ID NO: 63959 - DNA, 2385 bp, Artificial Sequence
  derived and/or modified sequence
agtgtggcatggtggaaaaggtagagggcgaagactcaggccacctggtccccgtcatcatttctgcatctatctgtctatatgaagtgggctgatggctgtgccagtttcctcatttgcacagcgcacgaggtcccgctttcgagtccacctgcaaagaatcacatcaagcaactttcttcattatcagcctgctgccgagctcgggaaggacctcatagacttggccacttttaggcctcagccaactgccagtggacaccgcccagaggaagacgaagaggaggagattgtgattgggtggcaggagaagctctttagccagtttgaagtagatctgtaccaaaatgaaacagcctgtcagagtcctttggattatcagtaccgtcaggagatcctgaagctggagaattcgggtggcaagaaaaaccgacgaatctttacctacactgactctgatagatacaccaatttggaggagcactgtcagagaatgaccactgcagccagcgaggtgccttcattcttggtcgagcgaatggcaaatgtcaggcgtcgccggcaggacaggcgagggatggagggcggcatcctcaagtcacgcatcgtcacctgggagccctcagaagagtttgtcaggaacaaccacgtcattaacacccctcttcagacaatgcacatcatggcagacctggggccctataaaaagcttggctataagaagtatgaacatgtcctgtgtactctgaaggtggatagcaatggtgtgatcacagtaaagcctgacttcacgggcctcaaaggaccctacaggattgagacggagggggagaagcaggagctgtggaaatatacgatcgacaatgtttccccccacgcacagccggaggaggaggagcgggaacggcgagtgttcaaggatctttatggccggcacaaggagtatctcagcagcctcgtaggcaccgactttgagatgactgtcccaggtgccctccggctctttgtaaatggagaggtcgtttcagcccaaggctatgagtatgacaatctctacgtccacttctttgtagaattgccaactgctcactggtcaagcccagcattccagcagctctcaggagtaacacagacctgcaccaccaagtccctggcaatggacaaggtggctcacttctcctacccattcacgtttgaagccttcttcctccatgaggatgaatcttctgatgcactcccggagtggcctgtgctctactgtgaggtcctctcgctggacttctggcagaggtaccgtgtggaaggctatggggctgtggtgctgcctgccactccaggctcacacaccctgacagtctccacgtggagacctgtggagcttggcacggtggctgagctgaggaggtttttcattggcggttctctggaactggaggacctctcctatgtacggataccaggatccttcaagggggaacgcctgagccgctttggactccgcacagagaccacaggcactgtcaccttccgcttgcactgtctgcagcagtccagggccttcatggaatcgagctcccttcagaaaaggatgcggagtgtgttggaccgtctggaagggttcagccagcagagttccattcacaatgtgctagaggccttccgtcgagcccggcgccgcatgcaggaggcccgggaaagcctcccgcaggacctagtgagcccctctggaaccctggtctcctagctcacagcagccctggcccacagtgcaagaggacaagatgggggatatctgaggccagtgctctcctgcctcttcgtctttctgattagagaccacgttggtctgctgagaaccagaaaagctgggaaattcccggctggcccctctgcctagccttctgcagggtcttctccctaccctgtggaaataaagccagagaccctgtggccccccctttatatttgcagccactgtcaatgggcatcacagcaaggcaggctttttgatctgaagctgtttggggtgaccccatagtgagtctggccttgactcacttttctggcttgtctcacagtagcaggggatctgctgttctccaccctttaaaaatggagcctttcatcttccaagaccaaagaaggaaggaaggtggacggtgagagggtcttaaatccccagcctgtgagtctcagcctctttccagggaagcctcattctactgcttggggcttgctgaggttgagatatgagttatttctgagtaagtgaaggctgaaggcagtgctgagtcctttctgctagctgggtggtatcttttactgtgtttttttgtttgtttgtttttttgttttttgttacataaaccccttttattttgactg

SEQ ID NO: 63960 - DNA, 1650 bp, Artificial Sequence
  derived and/or modified sequence
atggccgtgcccgtgagcagcttcgcccagcggacccggagccggtttcgggtgcatctgcagaggattaccagttctaatttcttacattaccagccagccgctgaactggggaaagacctcattgatctcgcaacctttaggccacaaccaacagcctcaggacatagaccggaagaggatgaagaagaggaaatcgtgataggatggcaggagaagctgtttagtcagttcgaggtcgatctgtaccagaacgaaacagcttgtcagagtccactggactaccaatatcggcaggagattcttaaactcgagaacagcggagggaaaaagaacaggcggatctttacttacactgattccgacaggtacactaacctcgaagagcactgccagagaatgactacagctgcatctgaagtaccttcctttctggtggagaggatggcgaatgtccgccgccgcagacaggaccgacgagggatggaaggtggcatcctcaagagtaggattgtgacgtgggaaccatccgaagaattcgtacggaacaatcatgtaatcaatacccccttgcaaaccatgcacataatggccgaccttggtccttataagaaactcgggtataaaaagtacgagcacgtgctttgcacattaaaggtcgattccaatggtgtgattactgtcaaaccagatttcacaggcctcaagggaccatatcgcatcgagacggagggggagaagcaggaactgtggaagtatacaatcgacaatgtaagcccccatgcccagccagaagaagaggagcgcgagcgccgagtttttaaggatctttatggacgtcacaaggagtatctgtcatcacttgtggggacggacttcgaaatgacagtcccgggagcccttcggctgtttgtaaacggagaggtggttagcgcacaagggtacgagtatgataatctctatgtgcacttttttgtggaattgcctactgcgcattggagttctcccgcttttcagcagctgtctggagtcacacagacgtgtactactaagagcttagctatggataaggttgcccacttttcgtatccttttacttttgaggccttttttctccatgaggacgaatctagtgacgcactgcccgaatggccagttctatattgtgaggtgctttctttagacttttggcagcgctatagagtcgagggttacggcgccgttgtgctgcctgcgactcccggttctcataccctgaccgtgagcacttggcggcctgtggagttaggtacagtggcagagctgaggaggtttttcatcggaggttctctcgagctagaagaccttagctatgtgcgcattcccgggtcctttaaaggagagagactgagcagattcgggcttcgcaccgagactactgggaccgtgacattccggctgcactgtcttcagcagagtcgggctttcatggagtcttcttccctgcaaaaacgcatgcgaagtgtactcgacaggctggagggctttagtcagcagtcctccatccacaacgtgctggaagctttccggcgcgctagaagacggatgcaagaggcgagggagtccctaccccaggacctcgtcagtccctcaggcactctagtctcatag

SEQ ID NO: 63961 - DNA, 1650 bp, Artificial Sequence
  derived and/or modified sequence
atggctgtacccgtgagcagcttcgctcagaggaccaggtccagatttagggtccacttgcaaaggataacgtcatcaaatttcctccattaccagcccgcagctgagttgggcaaggacctgatagatctcgcaactttcagacctcagcccaccgcatcgggccaccgacctgaggaagacgaagaggaggagatcgtgattggctggcaagagaaactgttctcacaattcgaggttgatctctaccagaacgagacagcctgtcagtctcctttggattatcagtatcggcaggaaatccttaaattggaaaacagcggcggtaaaaagaatcggagaatcttcacatacacggactctgataggtatactaacctggaagaacattgccagaggatgaccacagctgcatcagaagtgccatccttcctggtggagcgaatggcaaatgttaggcgccgaaggcaggatcggagaggcatggaagggggtattctgaaatcacgaatcgtgacctgggagccttcagaagaatttgtgagaaacaatcacgttatcaacactcctctgcaaactatgcatattatggcagacctcggaccttacaaaaagctcggatataaaaagtatgaacacgtgctctgcactctgaaagtagacagtaacggggtgataacagtgaaacccgatttcacgggtctgaagggcccttatcgcattgaaacagaaggtgagaagcaggagctctggaaatataccattgacaacgtatcaccacatgcccagccggaagaggaggagagagaacgacgggtgtttaaggacctgtatggtaggcataaagaataccttagttcgctggtgggcaccgactttgagatgaccgtcccaggagcgttgaggttgttcgttaatggcgaggtcgtcagtgctcaagggtatgagtacgacaatctatatgtacatttttttgtggagcttcccaccgcccattggtcttctccagccttccagcagctgagcggagtgactcagacctgtactacaaaaagcctcgcaatggacaaagtggcccacttcagctatcctttcactttcgaagcgttttttctccacgaagacgaatccagtgatgcgctgcctgagtggcccgtgctgtactgtgaagtgttgtctctcgatttctggcagaggtaccgtgtggaaggatacggggctgtggtgctgcctgccacccctgggagccataccttgacagtttcaacttggcggccagtggagctcggtacagtggcggagctgcgtcgctttttcatcggtgggagtctggagctggaagacttaagttatgtgaggataccaggctctttcaagggggagagactgagtcgcttcgggctgcgcactgagaccaccggaaccgtgacattcaggctgcactgcctacagcagagccgtgcgtttatggaatcctccagtctgcagaagaggatgaggagcgtcctcgataggttagaagggttcagccaacagtcatctattcataacgtccttgaagcatttaggcgcgcacgaaggcgcatgcaggaagcacgcgaatctctgccacaggacctggtctcgccctccggcaccctggtatcctag

SEQ ID NO: 63962 - DNA, 1650 bp, Artificial Sequence
  derived and/or modified sequence
atggccgtgcccgtgagcagcttcgcccagagaaccagaagcagattcagagtgcacctgcagagaatcaccagcagcaacttcctgcactaccagcccgccgccgagctgggcaaggacctgatcgacctggccaccttcagaccccagcccaccgccagcggccacagacccgaggaggacgaggaggaggagatcgtgatcggctggcaggagaagctgttcagccagttcgaggtggacctgtaccagaacgagaccgcctgccagagccccctggactaccagtacagacaggagatcctgaagctggagaacagcggcggcaagaagaacagaagaatcttcacctacaccgacagcgacagatacaccaacctggaggagcactgccagagaatgaccaccgccgccagcgaggtgcccagcttcctggtggagagaatggccaacgtgagaagaagaagacaggacagaagaggcatggagggcggcatcctgaagagcagaatcgtgacctgggagcccagcgaggagttcgtgagaaacaaccacgtgatcaacacccccctgcagaccatgcacatcatggccgacctgggcccctacaagaagctgggctacaagaagtacgagcacgtgctgtgcaccctgaaggtggacagcaacggcgtgatcaccgtgaagcccgacttcaccggcctgaagggcccctacagaatcgagaccgagggcgagaagcaggagctgtggaagtacaccatcgacaacgtgagcccccacgcccagcccgaggaggaggagagagagagaagagtgttcaaggacctgtacggcagacacaaggagtacctgagcagcctggtgggcaccgacttcgagatgaccgtgcccggcgccctgagactgttcgtgaacggcgaggtggtgagcgcccagggctacgagtacgacaacctgtacgtgcacttcttcgtggagctgcccaccgcccactggagcagccccgccttccagcagctgagcggcgtgacccagacctgcaccaccaagagcctggccatggacaaggtggcccacttcagctaccccttcaccttcgaggccttcttcctgcacgaggacgagagcagcgacgccctgcccgagtggcccgtgctgtactgcgaggtgctgagcctggacttctggcagagatacagagtggagggctacggcgccgtggtgctgcccgccacccccggcagccacaccctgaccgtgagcacctggagacccgtggagctgggcaccgtggccgagctgagaagattcttcatcggcggcagcctggagctggaggacctgagctacgtgagaatccccggcagcttcaagggcgagagactgagcagattcggcctgagaaccgagaccaccggcaccgtgaccttcagactgcactgcctgcagcagagcagagccttcatggagagcagcagcctgcagaagagaatgagaagcgtgctggacagactggagggcttcagccagcagagcagcatccacaacgtgctggaggccttcagaagagccagaagaagaatgcaggaggccagagagagcctgccccaggacctggtgagccccagcggcaccctggtgagctag

SEQ ID NO: 63963 - protein, 449 aa, Artificial Sequence
  derived and/or modified sequence
MGRVGGMAQPMGRAGAPKPMGRAGSARRGRFKGCWSEGSPVHPVPAVLSWLLALLRCASTMLSLRVPLAPITDPQQLQLSPLKGLSLVDKENTPPALSGTRVLASKTARRIFQEPTEPKTKAAAPGVEDEPLLRENPRRFVIFPIEYHDIWQMYKKAEASFWTAEEVDLSKDIQHWESLKPEERYFISHVLAFFAASDGIVNENLVERFSQEVQITEARCFYGFQIAMENIHSEMYSLLIDTYIKDPKEREFLFNAIETMPCVKKKADWALRWIGDKEATYGERVVAFAAVEGIFFSGSFASIFWLKKRGLMPGLTFSNELISRDEGLHCDFACLMFKHLVHKPSEERVREIIINAVRIEQEFLTEALPVKLIGMNCTLMKQYIEFVADRLMLELGFSKVFRVENPFDFMENISLEGKTNFFEKRVGEYQRMGVMSSPTENSFTLDADF

SEQ ID NO: 63964 - DNA, 1350 bp, Artificial Sequence
  derived and/or modified sequence
atgggcagagtaggaggaatggcgcagcctatgggcagagccggcgcccccaaacctatgggacgtgcaggtagcgccagacgcggaagattcaaggggtgttggtccgaaggatctcctgtccacccggtgcccgctgtgctctcctggcttctggcattgctgcgatgcgcgtctacgatgctctccctacgggtgcctctggcaccgatcacggacccccagcaactccagctgtccccccttaaggggctctcattagtggataaggagaatactcctcccgccttgagcgggactcgggtgctagcatccaagaccgctcggcgaatctttcaggagcctacggaaccaaagaccaaagcagccgcaccgggtgtggaggacgagcccctgctgcgtgagaaccccagaaggtttgtgattttccctattgaataccacgatatctggcagatgtacaagaaggcagaggcatctttttggaccgccgaggaagtcgatctgtccaaagacatccagcactgggagagcctgaagcccgaggagaggtacttcatctcacacgtgctggccttctttgcggcctccgacggaatagtaaatgagaacctcgtcgagcgattttctcaagaagtccagattacagaggcccggtgcttctacggctttcaaattgctatggaaaacattcactctgagatgtattctctcctaattgacacatacataaaggatcctaaagaacgggaattcctatttaatgccatcgaaactatgccttgcgttaagaaaaaggccgattgggcgctcaggtggattggagacaaagaagctacttatggcgagagggtggttgctttcgctgccgttgaagggatcttcttctctggatcctttgcctctattttctggctgaagaagagaggcctgatgccgggcttgacattctccaacgaactcatctcgagagacgaaggcctgcactgcgatttcgcatgtctgatgtttaaacatctcgtgcacaaacccagtgaggagcgggtgagagagatcatcattaatgccgtgagaatcgagcaagagttcctgactgaagccctaccggtgaagcttatcgggatgaattgtaccctgatgaagcagtacattgagttcgtggcagaccgcctaatgcttgagctgggttttagtaaagtctttagggtcgagaatccttttgactttatggagaacatctcgctagagggaaaaactaacttcttcgagaaacgcgtcggagagtatcagagaatgggcgttatgagcagtccaaccgagaacagcttcacactcgacgcggatttctag

SEQ ID NO: 63965 - DNA, 1350 bp, Artificial Sequence
  derived and/or modified sequence
atgggccgggtgggcggcatggcccagcccatgggccgggccggggcccccaagcccatgggccgggccggcagcgcccggcggggccgcttcaagggctgctggagcgagggcagccctgtgcaccctgtgcctgctgtgctgtcctggctgctggccctgctgcgctgtgccagcaccatgctgagcctgcgggtgcccctggcccccatcacagacccccagcagctgcagctgagccccctgaagggcctgagcctggtggacaaggagaacaccccaccagccctgagcggcaccagggtgctggccagcaagacagcccggcgcatcttccaggagcccacagagcccaagaccaaggctgctgcccctggggtggaggatgagcccctgctgcgggagaacccccggcgcttcgtcatcttccccatcgagtaccatgacatctggcagatgtacaagaaggccgaggccagcttctggacagctgaggaggtggacctgagcaaggacatccagcactgggagagcctgaagccagaggagcgctacttcatcagccacgtgctggccttctttgctgccagtgatggcatcgtgaatgaaaacctggtggagcgcttcagccaggaggtgcagatcacagaggcccgctgcttctacggcttccagatcgccatggagaacatccacagcgagatgtacagcctgctgattgacacctacatcaaggaccccaaggagcgggagttcctgttcaatgccatcgagaccatgccctgtgtgaagaagaaggctgactgggccctgcgctggattggagacaaggaggccacctatggagagcgggtggtggcctttgctgctgtggagggcatcttcttcagcggcagctttgccagcatcttctggctgaagaagaggggcctgatgcctggcctgaccttcagcaatgaactcatcagcagagatgagggcctgcactgtgactttgcctgcctgatgttcaagcacctggtgcacaagcccagcgaggagcgggtgcgggagatcatcatcaatgctgtgagaattgagcaggagttcctgacagaggccctgcctgtgaagctgattggcatgaactgcaccctgatgaagcagtacatcgagtttgtggccgaccggctgatgctggagctgggcttcagcaaggtgttccgggtggagaacccctttgacttcatggagaacatcagcctggagggcaagaccaacttctttgagaagagggtgggggagtaccagaggatgggcgtgatgagcagccccacagagaacagcttcaccctggatgctgacttctag

SEQ ID NO: 63966 - DNA, 1350 bp, Artificial Sequence
  derived and/or modified sequence
atgggccgggtgggcggcatggcccagcccatgggccgggccggcgccccaaaaccaatgggtagggcaggatccgcacggcgaggtagattcaagggatgttggagtgaaggaagtccagtacatccagtgcctgccgtgctctcgtggctgctggctttgctccggtgtgcatccaccatgctgagtctgcgggtgccactggcacctatcacggacccgcagcagttgcagttgtcccctttgaagggtttgagcttagtggataaagagaacaccccccctgccctgagcggcacgagggtgttggctagcaagactgcacggaggatctttcaggagcccaccgaaccaaagaccaaagctgccgcacccggggttgaggacgagcctctgttgcgagaaaatccacggcggttcgtaatctttcctattgagtaccatgacatatggcagatgtacaaaaaggcagaggcttcattttggaccgcggaggaggttgacctctctaaagacatacagcactgggagtctttgaagcccgaagagagatacttcatcagtcatgttcttgcctttttcgccgccagcgacgggatcgtgaatgagaacctcgtggagagattcagtcaggaagtgcagattactgaagccaggtgcttttacgggttccaaatcgccatggagaatatccatagcgagatgtactctttacttattgacacctacattaaggatccaaaggaacgggagttcctgttcaatgccatcgagactatgccttgcgttaagaaaaaggctgattgggctctgaggtggattggagacaaggaggcaacctacggagagagagtggtggcattcgcagctgttgaagggattttcttttcgggcagtttcgcatcgatcttctggttgaagaagcgggggcttatgcctggactgacctttagtaacgaattaatctctcgcgacgaaggccttcactgcgatttcgcatgcctgatgttcaagcacctggtgcacaaaccatctgaggagcgcgtgcgggagattatcataaacgccgttcggatcgagcaggagttcttgacagaggctctcccagttaagcttattggcatgaactgcacattaatgaagcagtatatcgaatttgtagccgaccgtctgatgctggagctgggtttctctaaggtcttcagagtggagaacccatttgatttcatggaaaacatttctttagaagggaagaccaacttttttgagaaaagggtgggtgaatatcagcgtatgggggtgatgtcctcaccgacagaaaacagctttaccttggacgcagatttctag

SEQ ID NO: 63967 - DNA, 1350 bp, Artificial Sequence
  derived and/or modified sequence
atgggcagagtgggcggtatggcccagcccatgggacgcgctggagcgccaaaaccaatgggtcgcgctgggtcagccagacgtggccgtttcaaaggctgctggtcagagggcagccccgttcaccctgtacccgctgttttgagctggcttctggccctgctacggtgcgccagtaccatgctcagtctgcgggtgcctctggcccctatcaccgacccccaacaactgcaactctcacctctgaagggtctctccctcgttgataaggagaatacaccgcctgccctgagcggaacaagagtgttggcctctaagaccgcccgaaggatctttcaggagccaaccgaacctaagacaaaggccgcagcacccggagttgaagatgaacccctgttgcgcgaaaaccctagacgcttcgttatctttcctatcgagtaccatgatatatggcagatgtataaaaaggctgaagcatcattttggacagcagaagaagtggatctgagcaaagacatccagcattgggaatcactaaaaccagaagagaggtacttcatcagtcacgtactcgcattcttcgccgcttcggacggtattgtgaatgagaatctggttgaacgctttagccaggaggttcaaataactgaagctagatgtttctatggtttccagatcgccatggagaacattcacagcgagatgtatagcctcctcatcgacacttatatcaaggatccaaaggaacgcgagttcctattcaatgcgatagagactatgccttgcgttaaaaaaaaagctgactgggcattgcggtggatcggagataaggaggccacttatggagaaagggtggtcgcattcgcagccgtcgagggcatcttcttctctggcagcttcgccagtatattttggctgaaaaagagaggtctcatgcccggtctgacatttagcaatgaactcattagtagggacgagggattgcactgcgattttgcctgtctgatgtttaagcatctcgttcacaaaccctcagaagagcgggttagagaaatcattatcaatgcagtgagaatagagcaggaattcctcaccgaggccctcccagttaaattgatcggaatgaactgcaccctcatgaagcagtatattgagttcgtggcagaccgcctgatgctggaactaggcttttccaaggtttttcgagtcgagaacccgttcgatttcatggaaaacatcagcctcgagggaaagaccaacttctttgaaaaacgcgtcggggagtatcagcgcatgggagtcatgtctagcccgactgagaactcatttacgctggacgctgacttttag

SEQ ID NO: 63968 - DNA, 3673 bp, Artificial Sequence
  derived and/or modified sequence
gctcctcacgcaatcctaaacggttcccgggcgaaccggggcccgcgcgcgccaaggccgccgagaccctcaggggctgcggccctggtcccgcgggacctgtgggggcctgggcggcggcgcccccgacccagccagcggacgggccggggggggaaccgggaggtcccggggggcgtccacgggggtgtccccgggggtctccggaaggcgccggcggaggctcccgcgctgcgcttgaaaatcgcgcgcggccccgcggccagcctgggtaggggcaaggcgcagccaatgggaagggtcggaggcatggcacagccaatgggaagggccggggcaccaaagccaatgggaagggccgggagcgcgcggcgcgggagatttaaaggctgctggagtgaggggtcgcccgtgcaccctgtcccagccgtcctgtcctggctgctcgctctgcttcgctgcgcctccactatgctctccctccgtgtcccgctcgcgcccatcacggacccgcagcagctgcagctctcgccgctgaaggggctcagcttggtcgacaaggagaacacgccgccggccctgagcgggacccgcgtcctggccagcaagaccgcgaggaggatcttccaggagcccacggagccgaaaactaaagcagctgcccccggcgtggaggatgagccgctgctgagagaaaacccccgccgctttgtcatcttccccatcgagtaccatgatatctggcagatgtataagaaggcagaggcttccttttggaccgccgaggaggtggacctctccaaggacattcagcactgggaatccctgaaacccgaggagagatattttatatcccatgttctggctttctttgcagcaagcgatggcatagtaaatgaaaacttggtggagcgatttagccaagaagttcagattacagaagcccgctgtttctatggcttccaaattgccatggaaaacatacattctgaaatgtatagtcttcttattgacacttacataaaagatcccaaagaaagggaatttctcttcaatgccattgaaacgatgccttgtgtcaagaagaaggcagactgggccttgcgctggattggggacaaagaggctacctatggtgaacgtgttgtagcctttgctgcagtggaaggcattttcttttccggttcttttgcgtcgatattctggctcaagaaacgaggactgatgcctggcctcacattttctaatgaacttattagcagagatgagggtttacactgtgattttgcttgcctgatgttcaaacacctggtacacaaaccatcggaggagagagtaagagaaataattatcaatgctgttcggatagaacaggagttcctcactgaggccttgcctgtgaagctcattgggatgaattgcactctaatgaagcaatacattgagtttgtggcagacagacttatgctggaactgggttttagcaaggttttcagagtagagaacccatttgactttatggagaatatttcactggaaggaaagactaacttctttgagaagagagtaggcgagtatcagaggatgggagtgatgtcaagtccaacagagaattcttttaccttggatgctgacttctaaatgaactgaagatgtgcccttacttggctgattttttttttccatctcataagaaaaatcagctgaagtgttaccaactagccacaccatgaattgtccgtaatgttcattaacagcatctttaaaactgtgtagctacctcacaaccagtcctgtctgtttatagtgctggtagtatcaccttttgccagaaggcctggctggctgtgacttaccatagcagtgacaatggcagtcttggctttaaagtgaggggtgaccctttagtgagcttagcacagcgggattaaacagtcctttaaccagcacagccagttaaaagatgcagcctcactgcttcaacgcagattttaatgtttacttaaatataaacctggcactttacaaacaaataaacattgtttgtactcacaaggcgataatagcttgatttatttggtttctacaccaaatacattctcctgaccactaatgggagccaattcacaattcactaagtgactaaagtaagttaaacttgtgtagactaagcatgtaatttttaagttttattttaatgaattaaaatatttgttaaccaactttaaagtcagtcctgtgtatacctagatattagtcagttggtgccagatagaagacaggttgtgtttttatcctgtggcttgtgtagtgtcctgggattctctgccccctctgagtagagtgttgtgggataaaggaatctctcagggcaaggagcttcttaagttaaatcactagaaatttaggggtgatctgggccttcatatgtgtgagaagccgtttcattttatttctcactgtattttcctcaacgtctggttgatgagaaaaaattcttgaagagttttcatatgtgggagctaaggtagtattgtaaaatttcaagtcatccttaaacaaaatgatccacctaagatcttgcccctgttaagtggtgaaatcaactagaggtggttcctacaagttgttcattctagttttgtttggtgtaagtaggttgtgtgagttaattcatttatatttactatgtctgttaaatcagaaattttttattatctatgttcttctagattttacctgtagttcatacttcagtcacccagtgtcttattctggcattgtctaaatctgagcattgtctagggggatcttaaactttagtaggaaaccatgagctgttaatacagtttccattcaaatattaatttcagaatgaaacataatttttttttttttttttgagatggagtctcgctctgttgcccaggctggagtgcagtggcgcgattttggctcactgtaacctccatctcctgggttcaagcaattctcctgtctcagcctccctagtagctgggactgcaggtatgtgctaccacacctggctaatttttgtatttttagtagagatggagtttcaccatattggtcaggctggtcttgaactcctgacctcaggtgatccacccacctcggcctcccaaagtgctgggattgcaggcgtgataaacaaatattcttaatagggctactttgaattaatctgcctttatgtttgggagaagaaagctgagacattgcatgaaagatgatgagagataaatgttgatcttttggccccatttgttaattgtattcagtatttgaacgtcgtcctgtttattgttagttttcttcatcatttattgtatagacaatttttaaatctctgtaatatgatacattttcctatcttttaagttattgttacctaaagttaatccagattatatggtccttatatgtgtacaacattaaaatgaaaggctttgtcttgcattgtgaggtacaggcggaagttggaatcaggttttaggattctgtctctcattagctgaataatgtgaggattaacttctgccagctcagaccatttcctaatcagttgaaagggaaacaagtatttcagtctcaaaattgaataatgcacaagtcttaagtgattaaaataaaactgttcttatgtcagttt

SEQ ID NO: 63969 - DNA, 1350 bp, Artificial Sequence
  derived and/or modified sequence
atgggcagagtgggcggcatggcccagcccatgggcagagccggcgcccccaagcccatgggcagagccggcagcgccagaagaggcagattcaagggctgctggagcgagggcagccccgtgcaccccgtgcccgccgtgctgagctggctgctggccctgctgagatgcgccagcaccatgctgagcctgagagtgcccctggcccccatcaccgacccccagcagctgcagctgagccccctgaagggcctgagcctggtggacaaggagaacaccccccccgccctgagcggcaccagagtgctggccagcaagaccgccagaagaatcttccaggagcccaccgagcccaagaccaaggccgccgcccccggcgtggaggacgagcccctgctgagagagaaccccagaagattcgtgatcttccccatcgagtaccacgacatctggcagatgtacaagaaggccgaggccagcttctggaccgccgaggaggtggacctgagcaaggacatccagcactgggagagcctgaagcccgaggagagatacttcatcagccacgtgctggccttcttcgccgccagcgacggcatcgtgaacgagaacctggtggagagattcagccaggaggtgcagatcaccgaggccagatgcttctacggcttccagatcgccatggagaacatccacagcgagatgtacagcctgctgatcgacacctacatcaaggaccccaaggagagagagttcctgttcaacgccatcgagaccatgccctgcgtgaagaagaaggccgactgggccctgagatggatcggcgacaaggaggccacctacggcgagagagtggtggccttcgccgccgtggagggcatcttcttcagcggcagcttcgccagcatcttctggctgaagaagagaggcctgatgcccggcctgaccttcagcaacgagctgatcagcagagacgagggcctgcactgcgacttcgcctgcctgatgttcaagcacctggtgcacaagcccagcgaggagagagtgagagagatcatcatcaacgccgtgagaatcgagcaggagttcctgaccgaggccctgcccgtgaagctgatcggcatgaactgcaccctgatgaagcagtacatcgagttcgtggccgacagactgatgctggagctgggcttcagcaaggtgttcagagtggagaaccccttcgacttcatggagaacatcagcctggagggcaagaccaacttcttcgagaagagagtgggcgagtaccagagaatgggcgtgatgagcagccccaccgagaacagcttcaccctggacgccgacttctag

SEQ ID NO: 63970 - protein, 445 aa, Artificial Sequence
  derived and/or modified sequence
MSKLPRELTRDLERSLPAVASLGSSLSHSQSLSSHLLPPPEKRRAISDVRRTFCLFVTFDLLFISLLWIIELNTNTGIRKNLEQEIIQYNFKTSFFDIFVLAFFRFSGLLLGYAVLRLRHWSRRWCPVHSSLSRSSSLSCSAKGHLATCSPSSLLSSPGWRPGSLTSKSYPRKLKRSDSAPPGYLAAQVAVARGPLLFSGALSEGQFYSPPESFAGSDNESDEEVAGKKSFSAQEREYIRQGKEATAVVDQILAQEENWKFEKNNEYGDTVYTIEVPFHGKTFILKTFLPCPAELVYQEVILQPERMVLWNKTVTACQILQRVEDNTLISYDVSAGAAGGVVSPRDFVNVRRIERRRDRYLSSGIATSHSAKPPTHKYVRGENGPGGFIVLKSASNPRVCTFVWILNTDLKGRLPRYLIHQSLAATMFEFAFHLRQRISELGARA

SEQ ID NO: 63971 - DNA, 1338 bp, Artificial Sequence
  derived and/or modified sequence
atgagcaagctgcccagagagctgaccagagacctggagagaagcctgcccgccgtggccagcctgggcagcagcctgagccacagccagagcctgagcagccacctgctgcccccccccgagaagagaagagccatcagcgacgtgagaagaaccttctgcctgttcgtgaccttcgacctgctgttcatcagcctgctgtggatcatcgagctgaacaccaacaccggcatcagaaagaacctggagcaggagatcatccagtacaacttcaagaccagcttcttcgacatcttcgtgctggccttcttcagattcagcggcctgctgctgggctacgccgtgctgagactgagacactggagcagaagatggtgccccgtgcacagcagcctgagcagaagcagcagcctgagctgcagcgccaagggccacctggccacctgcagccccagcagcctgctgagcagccccggctggagacccggcagcctgaccagcaagagctaccccagaaagctgaagagaagcgacagcgccccccccggctacctggccgcccaggtggccgtggccagaggccccctgctgttcagcggcgccctgagcgagggccagttctacagcccccccgagagcttcgccggcagcgacaacgagagcgacgaggaggtggccggcaagaagagcttcagcgcccaggagagagagtacatcagacagggcaaggaggccaccgccgtggtggaccagatcctggcccaggaggagaactggaagttcgagaagaacaacgagtacggcgacaccgtgtacaccatcgaggtgcccttccacggcaagaccttcatcctgaagaccttcctgccctgccccgccgagctggtgtaccaggaggtgatcctgcagcccgagagaatggtgctgtggaacaagaccgtgaccgcctgccagatcctgcagagagtggaggacaacaccctgatcagctacgacgtgagcgccggcgccgccggcggcgtggtgagccccagagacttcgtgaacgtgagaagaatcgagagaagaagagacagatacctgagcagcggcatcgccaccagccacagcgccaagccccccacccacaagtacgtgagaggcgagaacggccccggcggcttcatcgtgctgaagagcgccagcaaccccagagtgtgcaccttcgtgtggatcctgaacaccgacctgaagggcagactgcccagatacctgatccaccagagcctggccgccaccatgttcgagttcgccttccacctgagacagagaatcagcgagctgggcgccagagcctag

SEQ ID NO: 63972 - DNA, 1338 bp, Artificial Sequence
  derived and/or modified sequence
atgagtaagctacctcgtgagctcactcgggacctggagcggagcctgccagctgtggcaagcctgggttcttcgctttcacactcccagtccctgtcctcacatctgctgccgccacccgaaaagcggcgtgcaatttctgatgttcggcggactttttgcttgttcgtcaccttcgacttgttgttcattagccttctgtggatcatcgagttaaatactaatacaggaatcaggaagaatcttgaacaggagattattcagtataactttaagacatccttttttgatatttttgttctggctttcttccggttcagcgggctcttattaggttatgcagtactccggctgcgccattggtcacggagatggtgtcccgtgcactcttctctatctcgatcgagcagtcttagttgctccgctaaagggcatctggccacttgctcaccttcttcactgctttcatctcctggttggaggccaggctccctgactagcaaatcttaccctcgaaagctaaagcgtagcgacagcgctccccctgggtatcttgcagcgcaggtggcagtagcccgcggccccttgctgttttcaggggctctgtcagagggacaattctacagccctccagagtctttcgcgggttccgataacgaatctgatgaggaagttgccggcaaaaagagtttttctgctcaggaaagggaatacatcaggcaggggaaagaagccactgccgttgtcgatcagattctcgcccaggaggaaaactggaagtttgagaaaaacaatgagtatggtgatacagtgtacaccattgaagtgccttttcatggcaaaaccttcattttgaaaacatttcttccctgcccagcggagttggtgtatcaggaggtcatactccagccggagcgtatggtgctgtggaacaaaaccgtcacagcttgccaaatcctacaacgagtcgaagacaatacacttatttcctatgacgtgtctgctggggccgcgggtggcgttgttagccccagggactttgtcaacgtacgcagaattgaaaggcgacgcgaccgctatctgtccagcggcatagccaccagtcattcagctaaacctccaactcataaatatgtaagaggagaaaacggacctggaggttttattgttctgaaatcagctagcaacccgagagtctgcacctttgtgtggattttgaacactgatcttaaaggtcgactgcctaggtatctcatccatcagtcgttggccgctacaatgtttgaatttgcctttcacctaagacaacggatttccgagctcggagcgcgcgcttag

SEQ ID NO: 63973 - DNA, 1338 bp, Artificial Sequence
  derived and/or modified sequence
atgagcaagctgccccgggagctgacccgggacctggagaggagcctgcctgctgtggccagcctgggcagcagcctgagccacagccagagcctgagcagccacctgctgcccccacctgagaagagaagagccatcagtgatgtgcggaggaccttctgcctgtttgtgacctttgacctgctcttcatcagcctgctgtggatcatcgagctgaacaccaacacaggcatcaggaagaacctggagcaggagatcatccagtacaacttcaagaccagcttctttgacatctttgtgctggccttcttccgcttcagcggcctgctgctgggctatgctgtgctgcggctgcggcactggagccgccgctggtgccctgtgcacagcagcctgagccgcagcagcagcctgagctgcagcgccaagggccacctggccacctgcagccccagcagcctgctgagcagccctggctggaggcctggcagcctgaccagcaagagctaccccaggaagctgaagagaagtgacagcgcccctcctggctacctggccgcccaggtggccgtggcccggggccccctgctcttcagcggggccctgtctgagggccagttctacagccccccagagagctttgctggcagtgacaatgaaagtgatgaggaggtggccggcaagaagagcttcagcgcccaggagcgggagtacatccggcagggcaaggaggccacagctgtggtggaccagatcctggcccaggaggagaactggaagtttgagaagaacaatgaatatggagacacagtgtacaccatcgaggtgcccttccacggcaagaccttcatcctgaagaccttcctgccctgcccagctgagctggtgtaccaggaggtgatcctgcagcctgagaggatggtgctgtggaacaagacagtgacagcctgccagatcctgcagagggtggaggacaacaccctcatctcctatgatgtgtctgctggagctgctgggggcgtggtgagcccccgggactttgtgaatgtgagaagaattgaaagaagaagagaccgctacctgagcagcggcatcgccaccagccacagcgccaagccacccacccacaagtatgtgcggggggagaatggacctgggggcttcatcgtgctgaagagcgccagcaacccccgggtgtgcacctttgtgtggatcctgaacacagacctgaagggccgcctgccccgctacctgatccaccagagcctggccgccaccatgtttgaatttgccttccacctgcggcagaggatcagcgagctgggcgcccgggcctag

SEQ ID NO: 63974 - DNA, 1338 bp, Artificial Sequence
  derived and/or modified sequence
atgagcaagctgccccgggagctgacccgggacctggagcggagcctacctgctgttgcgtccttaggatcctccctctctcatagccagagcctgtcctcgcacctgctgccccctcccgaaaagaggagagccatttctgacgtgcggcgtacattctgtttgtttgtaacattcgacctcctttttatatccctgctgtggattattgagcttaacaccaatacagggattcggaaaaatctcgagcaagaaatcattcaatacaatttcaagacctctttctttgacattttcgtccttgcctttttccggttctctggactcttgctcgggtatgccgttctccgactccgccactggagcagaaggtggtgtcctgtgcacagttcactctcccgttcttcctccctgagttgcagtgctaaaggccatctcgctacatgtagcccttcatcactgctgtcatcacccgggtggcgcccaggatccctcacttctaagagctaccctaggaaacttaagagaagcgattcagctccgccgggatatctggcggcccaagttgccgtggcccggggccctttgctgttttcaggagccctgtctgaggggcagttttactcccctccggaaagcttcgctggtagcgataatgagagcgatgaggaagttgccggcaaaaagagcttctctgcccaagagagggagtacatccggcagggcaaagaggcgacagccgtggtggaccagatcctggcacaagaggagaactggaagtttgaaaagaataatgaatacggagacaccgtctacacaattgaagtgcccttccatggcaaaactttcatcctgaaaactttcctcccatgcccggcagagctcgtgtatcaggaggtgattctgcaaccagaacgcatggtgctttggaataagaccgtcacagcatgtcagatactgcagagggtggaggacaacactttaattagttacgatgtctccgccggcgccgcaggtggtgtcgtgtcccccagggatttcgtgaatgtaagaagaattgagcgccgtcgcgaccgctacctaagttctggaattgccaccagtcactctgctaaaccccccacacataaatatgtgcgtggggagaatggacctggaggctttattgtcctaaaatctgcttctaatccccgcgtgtgcacttttgtgtggatactcaacacagacctcaagggacgcctccctagatacctgattcaccaatcactggccgccaccatgtttgagtttgcgtttcatttacgacaacggatctccgaactcggtgctagagcttag

SEQ ID NO: 63975 - DNA, 1338 bp, Artificial Sequence
  derived and/or modified sequence
atgtctaaactgcccagggagctcacaagagatctcgagcggagtctgcctgccgtcgcctctcttggctcatcgctgtcccactcccagtcactaagttctcatctcctcccaccccctgagaagcgaagagcgatttcagacgtacgtcggactttctgcctgttcgttactttcgatctgctgtttatttcactgctctggattattgagttaaataccaacacaggtatccggaaaaatctggagcaggagatcattcagtacaatttcaaaaccagcttcttcgatattttcgtgctcgcgttttttcggttctccgggttgctgcttggatatgcagtcctgagactgcggcactggtcccgcaggtggtgccccgtgcattctagcttgagcaggtcctcatccttatcttgcagtgcaaaagggcacctggctacctgtagccccagctcccttctctcctcgccgggatggcgcccaggctcgctaacctcgaaatcctatccacggaagctcaaaaggtcagactcagctcctccagggtacttagccgctcaggtcgccgtggctaggggtcctttgctgttcagcggggcactgtcagaaggacagttttactctccccctgagtcattcgctgggagcgacaacgagtcagatgaagaagtggcaggcaaaaagtctttcagtgcacaagagcgtgagtacatccgacagggtaaggaggctactgctgtggttgaccagattctggcccaggaagaaaattggaaattcgaaaaaaacaatgaatacggcgacacagtatacacaattgaagtgcccttccatggtaaaaccttcatactgaagacattcctgccctgcccagccgagttagtctatcaagaagtgatcctgcagccagagcgtatggtgttatggaataagaccgtaacggcctgccagatcctccagcgcgtggaagacaataccttgatctcttacgatgtaagtgcaggggctgccggtggcgtggtgtcaccaagagatttcgttaatgtgcgcagaatcgagcgacgacgagatagatacctttctagtggaatcgctacgtctcactccgcaaaaccacctacacacaaatacgtcagaggggaaaacgggccaggaggctttattgtcctaaagtccgcttccaacccccgagtatgtactttcgtatggatcctgaacacagatttaaaagggaggctccctcgctatctgatacatcagtcacttgcggctacgatgtttgagttcgcctttcatcttcgacagagaatctctgagctgggagcacgagcttag

SEQ ID NO: 63976 - DNA, 2834 bp, Artificial Sequence
  derived and/or modified sequence
gaacgcaagtcccgcttcgctctcgggggcggactcagcggcggaagtggcgctgccggaagatcttcttccgctctgaggcgctactgaggccgcggagccggactgcggttggggcgggaagagccggggccgtggctgacatggagcagccctgctgctgaggccgcgccctccccgccctgaggtgggggcccaccaggatgagcaagctgcccagggagctgacccgagacttggagcgcagcctgcctgccgtggcctccctgggctcctcactgtcccacagccagagcctctcctcgcacctccttccgccgcctgagaagcgaagggccatctctgatgtccgccgcaccttctgtctcttcgtcaccttcgacctgctcttcatctccctgctctggatcatcgaactgaataccaacacaggcatccgtaagaacttggagcaggagatcatccagtacaactttaaaacttccttcttcgacatctttgtcctggccttcttccgcttctctggactgctcctaggctatgccgtgctgcggctccggcactggtcacgacgctggtgtccagtgcattcctcattgtcaaggtcatcctctctgagctgctcagcaaaggggcatttggctacctgctccccatcgtctcttttgtcctcgcctggttggagacctggttccttgacttcaaagtcctaccccaggaagctgaagaggagcgattctgctcctccagggtatcttgccgcccaggttgctgttgcccgtggacccctgctgttctccggtgctctgtccgagggacagttctattcacccccagaatcctttgcagggtctgacaatgaatcagatgaagaagttgctgggaagaaaagtttctctgctcaggagcgggagtacatccgccaggggaaggaggccacggcagtggtggaccagatcttggcccaggaagagaactggaagtttgagaagaataatgaatatggggacaccgtgtacaccattgaagttccctttcacggcaagacgtttatcctgaagaccttcctgccctgtcctgcggagctcgtgtaccaggaggtgatcctgcagcccgagaggatggtgctgtggaacaagacagtgactgcctgccagatcctgcagcgagtggaagacaacaccctcatctcctatgacgtgtctgcaggggctgcgggcggcgtggtctccccaagggacttcgtgaatgtccggcgcattgagcggcgcagggaccgatacttgtcatcagggatcgccacctcacacagtgccaagcccccgacgcacaaatatgtccggggagagaatggccctgggggcttcatcgtgctcaagtcggccagtaacccccgtgtttgcacctttgtctggattcttaatacagatctcaagggccgcctgccccggtacctcatccaccagagcctcgcggccaccatgtttgaatttgcctttcacctgcgacagcgcatcagcgagctgggggcccgggcgtgactgtgccccctcccaccctgcgggccagggtcctgtcgccaccacttccagagccagaaagggtgccagttgggctcgcactgcccacatgggacctggccccaggctgtcaccctccaccgagccacgcagtgcctggagttgactgactgagcaggctgtggggtggagcactggactccggggccccactggctggaggaagtggggtctggcctgttgatgtttacatggcgccctgcctcctggaggaccagattgctctgccccaccttgccagggcagggtctgggctgggcacctgacttggctggggaggaccagggccctgggcagggcagggcagcctgtcacccgtgtgaagatgaaggggctcttcatctgcctgcgctctcgtcggtttttttaggattattgaaagagtctgggacccttgttggggagtgggtggcaggtgggggtgggctgctggccatgaatctctgcctctcccaggctgtccccctcctcccagggcctcctgggggacctttgtattaagccaattaaaaacatgaatttaaaaaaaaaaaaaaattccagcccctcccactgccttgcctcttgagggaagagaaaggcaggcagcagcttggatgaagagggaagacccctcacacagcctctcctgggctcacaggagggcggagcccggggagccagttcctgaaacatgccccccattccccccccgcccaccccccactccccgctttcctgaccagttcaactgagcagatgactggtcagaaaaaaatgccccgccccctgccaggcttcagcggggcaagtttaaagtctctagtccaggaatggaggtgggggtatgggcacctggcagtgcccacagcaagccttgactgtgtggcctggagatggggcctgagcttcagggtcactgaggcacctctgggatccaggccacctggagccccggacctcccagactccactcacccattccctctccccgcacggcactcacaccaggggcggcctggagcccggatcgcagggcggggccaggccactgcctgccttcctcctccctcccggctggcctgcccccttgcctgcctgcatgcaggcttccagcagagccagcttcttcagagccaggtggatcctgtttcggtcctgcctaggtgtgtgaccctgggcgaatctacctctctcagcttctgcttcccactttatgaaaatgggactgatgtcacagggttgttatgagattaaaagatatgaagaaccggg

SEQ ID NO: 63977 - protein, 427 aa, Artificial Sequence
  derived and/or modified sequence
MSKLPRELTRDLERSLPAVASLGSSLSHSQSLSSHLLPPPEKRRAISDVRRTFCLFVTFDLLFISLLWIIELNTNTGIRKNLEQEIIQYNFKTSFFDIFVLAFFRFSGLLLGYAVLRLRHWWVIALLSKGAFGYLLPIVSFVLAWLETWFLDFKVLPQEAEEERWYLAAQVAVARGPLLFSGALSEGQFYSPPESFAGSDNESDEEVAGKKSFSAQEREYIRQGKEATAVVDQILAQEENWKFEKNNEYGDTVYTIEVPFHGKTFILKTFLPCPAELVYQEVILQPERMVLWNKTVTACQILQRVEDNTLISYDVSAGAAGGVVSPRDFVNVRRIERRRDRYLSSGIATSHSAKPPTHKYVRGENGPGGFIVLKSASNPRVCTFVWILNTDLKGRLPRYLIHQSLAATMFEFAFHLRQRISELGARA

SEQ ID NO: 63978 - DNA, 1284 bp, Artificial Sequence
  derived and/or modified sequence
atgagcaagctgcccagagagctgaccagagacctggagagaagcctgcccgccgtggccagcctgggcagcagcctgagccacagccagagcctgagcagccacctgctgcccccccccgagaagagaagagccatcagcgacgtgagaagaaccttctgcctgttcgtgaccttcgacctgctgttcatcagcctgctgtggatcatcgagctgaacaccaacaccggcatcagaaagaacctggagcaggagatcatccagtacaacttcaagaccagcttcttcgacatcttcgtgctggccttcttcagattcagcggcctgctgctgggctacgccgtgctgagactgagacactggtgggtgatcgccctgctgagcaagggcgccttcggctacctgctgcccatcgtgagcttcgtgctggcctggctggagacctggttcctggacttcaaggtgctgccccaggaggccgaggaggagagatggtacctggccgcccaggtggccgtggccagaggccccctgctgttcagcggcgccctgagcgagggccagttctacagcccccccgagagcttcgccggcagcgacaacgagagcgacgaggaggtggccggcaagaagagcttcagcgcccaggagagagagtacatcagacagggcaaggaggccaccgccgtggtggaccagatcctggcccaggaggagaactggaagttcgagaagaacaacgagtacggcgacaccgtgtacaccatcgaggtgcccttccacggcaagaccttcatcctgaagaccttcctgccctgccccgccgagctggtgtaccaggaggtgatcctgcagcccgagagaatggtgctgtggaacaagaccgtgaccgcctgccagatcctgcagagagtggaggacaacaccctgatcagctacgacgtgagcgccggcgccgccggcggcgtggtgagccccagagacttcgtgaacgtgagaagaatcgagagaagaagagacagatacctgagcagcggcatcgccaccagccacagcgccaagccccccacccacaagtacgtgagaggcgagaacggccccggcggcttcatcgtgctgaagagcgccagcaaccccagagtgtgcaccttcgtgtggatcctgaacaccgacctgaagggcagactgcccagatacctgatccaccagagcctggccgccaccatgttcgagttcgccttccacctgagacagagaatcagcgagctgggcgccagagcctag

SEQ ID NO: 63979 - DNA, 1284 bp, Artificial Sequence
  derived and/or modified sequence
atgagcaaattgcctcgggagctgactcgtgaccttgaacgctcactgccagccgtggcctctttggggtcctcgctgagccactcgcagtctctaagcagtcacctgctgccccctccggaaaagcgcagagccatttccgacgttagaagaacattctgtctgtttgtgacttttgatctcctctttatcagtctgctgtggatcatcgaattaaatacaaataccggtatccggaaaaatctcgagcaagagattatacaatataactttaaaaccagtttttttgatatctttgttctcgcctttttccggttctcaggcctgcttctgggatacgctgtgctgcggcttaggcactggtgggtcatagctctgctctctaaaggggcctttggataccttttgccaatcgtgagcttcgttctggcctggcttgaaacctggttcctggactttaaggtgcttccccaggaagcggaagaggagagatggtaccttgcggcccaggttgctgtcgctagggggccccttctgttttctggggctttgagtgaagggcaattctattcaccaccagaatcatttgccggttcagataatgaatcggatgaggaagtcgcaggtaaaaaaagtttctccgcccaggaacgagaatacattaggcagggaaaggaagccaccgctgtggttgatcaaatcctggcccaagaggaaaactggaagttcgagaaaaataacgagtacggagacactgtctacacgatcgaggtgccctttcacggtaagacgtttatcctgaagactttcctgccttgcccagctgagctggtgtaccaggaagtcattctccagccagagagaatggtgttgtggaataaaaccgtaacggcgtgccaaatcctgcagcgggtggaggacaacactcttatctcctacgacgtgtcagctggtgcagccggcggcgtggtctctcccagggacttcgtgaatgtccggcgtattgagcggagacgcgaccggtacctgtcatccggaatcgccacttcccactccgcaaagccacccacacataagtatgttagaggcgaaaatggcccgggtggattcatcgtgttgaagtccgcctctaatcctcgcgtttgcactttcgtgtggatcctcaacactgacctaaagggccgcctgccccggtatttgattcaccaatccctggcagcaaccatgtttgagtttgcgttccacttgaggcagcgcattagcgagctgggggccagggcatag

SEQ ID NO: 63980 - DNA, 1284 bp, Artificial Sequence
  derived and/or modified sequence
atgagcaagctgccccgggagctgacccgggacctggagaggagcctgcctgctgtggccagcctgggcagcagcctgagccacagccagagcctgagcagccacctgctgcccccacctgagaagagaagagccatcagtgatgtgcggaggaccttctgcctgtttgtgacctttgacctgctcttcatcagcctgctgtggatcatcgagctgaacaccaacacaggcatcaggaagaacctggagcaggagatcatccagtacaacttcaagaccagcttctttgacatctttgtgctggccttcttccgcttcagcggcctgctgctgggctatgctgtgctgcggctgcggcactggtgggtgattgccctgctgagcaaaggagccttcggctacctgctgcccatcgtgtcctttgtgctggcctggctggagacctggttcctggacttcaaggtgctgccccaggaggccgaggaggagcgctggtacctggccgcccaggtggccgtggcccggggccccctgctcttcagcggggccctgtctgagggccagttctacagccccccagagagctttgctggcagtgacaatgaaagtgatgaggaggtggccggcaagaagagcttcagcgcccaggagcgggagtacatccggcagggcaaggaggccacagctgtggtggaccagatcctggcccaggaggagaactggaagtttgagaagaacaatgaatatggagacacagtgtacaccatcgaggtgcccttccacggcaagaccttcatcctgaagaccttcctgccctgcccagctgagctggtgtaccaggaggtgatcctgcagcctgagaggatggtgctgtggaacaagacagtgacagcctgccagatcctgcagagggtggaggacaacaccctcatctcctatgatgtgtctgctggagctgctgggggcgtggtgagcccccgggactttgtgaatgtgagaagaattgaaagaagaagagaccgctacctgagcagcggcatcgccaccagccacagcgccaagccacccacccacaagtatgtgcggggggagaatggacctgggggcttcatcgtgctgaagagcgccagcaacccccgggtgtgcacctttgtgtggatcctgaacacagacctgaagggccgcctgccccgctacctgatccaccagagcctggccgccaccatgtttgaatttgccttccacctgcggcagaggatcagcgagctgggcgcccgggcctag

SEQ ID NO: 63981 - DNA, 1284 bp, Artificial Sequence
  derived and/or modified sequence
atgagcaagctgccccgggagctgacccgggacctggagcggagcctcccggccgtcgcctccctcgggagcagcctcagccatagtcagtccctttcttctcacctgctgcctcccccggaaaaaaggcgggcaatctctgatgtgaggagaacgttctgcctattcgtcaccttcgatctgcttttcattagcctcctgtggatcatcgagctgaacacgaataccggcatccgtaaaaatctcgagcaggagattatacagtacaatttcaagacgtctttctttgacatctttgtactggccttcttccggttttccgggttgctcttaggttacgcagtcttgcgactgagacattggtgggtgatcgcactgctcagcaagggggcgttcggctatttgctcccaatcgtctctttcgtgttagcctggttggagacatggttcctggactttaaagtgcttccacaagaagccgaagaggaacgatggtatctcgccgcccaggttgcggtggctcgcggacctctcctctttagcggtgccctgtcagaggggcaattttacagccctcccgaatcttttgccgggtcagataacgagagtgatgaagaagttgctgggaaaaagtctttcagcgcccaggagcgggagtacattaggcaaggaaaggaagctacggctgtggtggatcaaattctcgcacaagaagaaaactggaagttcgagaaaaacaacgaatacggtgatactgtgtacactatcgaggtccccttccacgggaagacttttattcttaaaactttcctgccctgtcccgctgagctagtgtaccaggaggtgatcctccagccagagagaatggtcctgtggaacaagactgtgaccgcatgccagatattgcagcgggtcgaagacaacactctgatcagctacgacgtgtccgcgggcgccgcagggggagtcgtctcaccaagagattttgtgaacgtgcggagaatcgagcgccgacgagatcgatatctgtcttctgggattgccaccagccacagtgctaaaccgcccacacacaaatacgtccgtggtgagaatggtccagggggtttcatcgtcctgaaaagcgcatcaaatccaagggtatgtacattcgtgtggatacttaacacagacctcaagggtaggctgcctcggtacctgatccaccaatctctggccgctacaatgttcgagttcgcatttcacctgagacagcggatatccgaattgggggcacgcgcctag

SEQ ID NO: 63982 - DNA, 1284 bp, Artificial Sequence
  derived and/or modified sequence
atgtcgaaacttccaagagagttgacaagggacctggaaaggagcctgcctgctgtcgccagcctaggtagttctctcagccacagccaaagcctgagttcacacttacttcctccgccagaaaagcgcagagcgatttccgatgtgcgcaggacattttgcttatttgtgacgtttgacctgctgttcatttctcttctttggattatcgagctgaatacaaacacaggcatccggaagaacctagaacaagaaattatccaatataattttaagacttcattcttcgacatttttgtactagccttctttcgcttttctggtctattgctgggctatgctgttttgcgactgcggcattggtgggtaattgccctcctgagcaagggtgcgtttggctatctgctgcctattgtgtccttcgtgcttgcctggttggagacttggttcctggacttcaaggtgttgccacaggaagctgaggaggagcgatggtatttggccgcacaagtggctgttgccagagggccacttctctttagtggagccctgagcgagggtcagttctacagcccccctgaatcgtttgccggatcggacaacgagagcgatgaagaggtggcgggaaaaaagtcatttagtgcccaggaacgtgaatacatcaggcagggaaaagaggctacggcggtcgtggaccagattttggcccaggaggaaaattggaagtttgagaagaataacgagtatggggacaccgtctacactattgaagtgcccttccatggaaagaccttcattctgaaaacatttctgccatgtccggctgaactggtataccaggaagtcatactccagccggaacgaatggtgttatggaacaaaacagttacagcctgccagattttacagcgggtggaggataacaccctcatctcttacgacgtgagtgctggtgccgcaggaggcgtggttagtcctagggactttgtcaacgtgagaagaattgagcgcaggagggacagatacttgagttccggaatcgctacctcacacagtgctaaaccccctactcataaatatgtgaggggcgagaatggtccaggcggttttattgtgctgaaatcagctagtaacccacgagtgtgcactttcgtctggattctgaataccgatctcaaggggcgtctgcctaggtacctgatccatcagagtcttgccgctactatgtttgagttcgccttccatttgcgacaaagaattagcgagcttggcgctagggcttag

SEQ ID NO: 63983 - DNA, 1925 bp, Artificial Sequence
  derived and/or modified sequence
gaggccgcggagccggactgcggttggggcgggaagagccggggccgtggctgacatggagcagccctgctgctgaggccgcgccctccccgccctgaggtgggggcccaccaggatgagcaagctgcccagggagctgacccgagacttggagcgcagcctgcctgccgtggcctccctgggctcctcactgtcccacagccagagcctctcctcgcacctccttccgccgcctgagaagcgaagggccatctctgatgtccgccgcaccttctgtctcttcgtcaccttcgacctgctcttcatctccctgctctggatcatcgaactgaataccaacacaggcatccgtaagaacttggagcaggagatcatccagtacaactttaaaacttccttcttcgacatctttgtcctggccttcttccgcttctctggactgctcctaggctatgccgtgctgcggctccggcactggtgggtgattgcgctgctcagcaaaggggcatttggctacctgctccccatcgtctcttttgtcctcgcctggttggagacctggttccttgacttcaaagtcctaccccaggaagctgaagaggagcgatggtatcttgccgcccaggttgctgttgcccgtggacccctgctgttctccggtgctctgtccgagggacagttctattcacccccagaatcctttgcagggtctgacaatgaatcagatgaagaagttgctgggaagaaaagtttctctgctcaggagcgggagtacatccgccaggggaaggaggccacggcagtggtggaccagatcttggcccaggaagagaactggaagtttgagaagaataatgaatatggggacaccgtgtacaccattgaagttccctttcacggcaagacgtttatcctgaagaccttcctgccctgtcctgcggagctcgtgtaccaggaggtgatcctgcagcccgagaggatggtgctgtggaacaagacagtgactgcctgccagatcctgcagcgagtggaagacaacaccctcatctcctatgacgtgtctgcaggggctgcgggcggcgtggtctccccaagggacttcgtgaatgtccggcgcattgagcggcgcagggaccgatacttgtcatcagggatcgccacctcacacagtgccaagcccccgacgcacaaatatgtccggggagagaatggccctgggggcttcatcgtgctcaagtcggccagtaacccccgtgtttgcacctttgtctggattcttaatacagatctcaagggccgcctgccccggtacctcatccaccagagcctcgcggccaccatgtttgaatttgcctttcacctgcgacagcgcatcagcgagctgggggcccgggcgtgactgtgccccctcccaccctgcgggccagggtcctgtcgccaccacttccagagccagaaagggtgccagttgggctcgcactgcccacatgggacctggccccaggctgtcaccctccaccgagccacgcagtgcctggagttgactgactgagcaggctgtggggtggagcactggactccggggccccactggctggaggaagtggggtctggcctgttgatgtttacatggcgccctgcctcctggaggaccagattgctctgccccaccttgccagggcagggtctgggctgggcacctgacttggctggggaggaccagggccctgggcagggcagggcagcctgtcacccgtgtgaagatgaaggggctcttcatctgcctgcgctctcgtcggtttttttaggattattgaaagagtctgggacccttgttggggagtgggtggcaggtgggggtgggctgctggccatgaatctctgcctctcccaggctgtccccctcctcccagggcctcctgggg

SEQ ID NO: 63984 - protein, 464 aa, Artificial Sequence
  derived and/or modified sequence
MSKLWFKQDDKFFLPKACLNFEFFSPFAYVDPLHCNMAYLYLELLKDSLNEYAYAAELAGLSYDLQNTIYGMYLSVKGYNDKQPILLKKIIEKMATFEIDEKRFEIIKEAYMRSLNNFRAEQPHQHAMYYLRLLMTEVAWTKDELKEALDDVTLPRLKAFIPQLLSRLHIEALLHGNITKQAALGIMQMVEDTLIEHAHTKPLLPSQLVRYREVQLPDRGWFVYQQRNEVHNNCGIEIYYQTDMQSTSENMFLELFCQIISEPCFNTLRTKEQLGYIVFSGPRRANGIQGLRFIIQSEKPPHYLESRVEAFLITMEKSIEDMTEEAFQKHIQALAIRRLDKPKKLSAECAKYWGEIISQQYNFDRDNTEVAYLKTLTKEDIIKFYKEMLAVDAPRRHKVSVHVLAREMDSCPVVGEFPCQNDINLSQAPALPQPEVIQNMTEFKRGLPLFPLVKPHINFMAAKL

SEQ ID NO: 63985 - DNA, 1395 bp, Artificial Sequence
  derived and/or modified sequence
atgtccaagctgtggtttaagcaggatgacaagttttttcttcccaaggcttgtctcaatttcgaattcttttcacctttcgcatatgtcgatccgctgcattgcaatatggcctatctgtatctcgaactccttaaggacagccttaacgaatacgcatacgctgctgagttggcggggttgagttatgacctgcaaaacacaatttacgggatgtatctttcagttaaaggctacaatgataagcagccaatactactgaagaaaatcatcgagaagatggccactttcgaaatcgatgaaaaacgctttgagattattaaagaagcatatatgcgaagtcttaacaatttcagggctgagcagccacatcaacatgctatgtattatctccggctcctgatgactgaggtggcctggacgaaagacgagctgaaggaggcccttgatgacgttaccctgcccagactcaaggcatttattccacagttgctgagcaggctccacattgaggccctgctccatggtaatatcaccaaacaggccgctctcggcatcatgcagatggtggaggatacgctgatcgagcacgcccacacgaagcccttgctgccctctcaacttgttagataccgagaagtgcaattacctgaccggggatggtttgtctaccagcagcgtaatgaggtccataacaattgcggaattgaaatctattatcagaccgacatgcaatccacttccgagaacatgttcttggagctattttgccagatcatctctgaaccctgttttaacaccctgaggacaaaggagcagctggggtacattgttttttctggccctaggcgcgccaacggaatacagggccttagatttattatccagagtgaaaagccaccccattaccttgagagccgggtcgaggcatttttaattacgatggagaagtcgatcgaggatatgaccgaggaggcctttcaaaagcacattcaggcattggcgattcgacgtctggacaagcccaagaagctgtccgccgagtgcgccaagtactggggcgaaatcatttcgcaacaatacaacttcgacagggacaataccgaggtggcatatttgaagacccttacgaaagaggacataatcaagttttacaaagagatgttggcagtggatgcacccaggcgacacaaagttagcgtgcacgtgctagctagggaaatggattcatgccccgtagtgggagaatttccatgccagaatgatataaacctgtctcaagctccagccttgccacagcctgaagtgattcaaaatatgactgaatttaaacgtggcttgcctcttttcccgctggtcaaaccccacattaattttatggccgccaaactctag

SEQ ID NO: 63986 - DNA, 1395 bp, Artificial Sequence
  derived and/or modified sequence
atgagcaagctgtggttcaagcaggatgacaagttcttcctgcccaaggcctgcctgaactttgagttcttcagcccctttgcctacgtggaccccctgcactgcaacatggcctacctgtacctggagctgctgaaggacagcctgaatgaatatgcctatgctgctgagctggccggcctgtcctatgacctgcagaacaccatctacggcatgtacctgtctgtgaagggctacaatgacaagcagcccatcctgctgaagaagatcatcgagaagatggccacctttgaaattgatgagaagagatttgagatcatcaaggaggcctacatgaggagcctgaacaacttccgggcagagcagccccaccagcacgccatgtactacctgcggctgctgatgacagaggtggcctggaccaaggatgagctgaaggaggccctggatgatgtgaccctgccccggctgaaggccttcatcccccagctgctgagccggctgcacatcgaggccctgctgcacggcaacatcaccaagcaggccgccctgggcatcatgcagatggtggaggacaccctgattgaacatgcccacaccaagcccctgctgcccagccagctggtgcgctaccgggaggtgcagctgcctgaccggggctggtttgtgtaccagcagagaaatgaggtgcacaacaactgtggcatcgagatctactaccagacagacatgcagagcaccagcgagaacatgttcctggagctgttctgccagatcatcagcgagccctgcttcaacaccctgcggaccaaggagcagctgggctacatcgtgttcagcggcccccggcgggccaacggcatccagggcctgcgcttcatcatccagagcgagaagccaccccactacctggagagccgggtggaggccttcctgatcaccatggagaagagcattgaggacatgacagaggaggccttccagaagcacatccaggccctggccatccggcggctggacaagcccaagaagctgtctgcagaatgtgccaagtactggggcgagatcatcagccagcagtacaactttgaccgggacaacacagaggtggcctacctgaagaccctgaccaaggaggacatcatcaagttctacaaggagatgctggccgtggatgcccccaggaggcacaaggtgtctgtgcacgtgctggcccgggagatggacagctgccctgtggtgggggagttcccctgccagaatgacatcaacctgagccaggccccagccctgccccagcctgaggtgatccagaacatgacagagttcaagaggggcctgcccctcttccccctggtgaagccccacatcaacttcatggccgccaagctgtag

SEQ ID NO: 63987 - DNA, 1395 bp, Artificial Sequence
  derived and/or modified sequence
atgagcaagctgtggttcaagcaggacgacaagttcttcctgcccaaagcttgccttaactttgagttttttagcccatttgcttacgtcgacccattacactgcaatatggcctacctgtaccttgagctcctgaaggacagcctgaatgagtacgcttatgctgcggaactggccggattatcatatgatctgcagaacaccatctacggcatgtatttgtccgtcaaaggctataatgataagcaacccatcctgctcaaaaaaatcattgagaaaatggcaacctttgaaattgatgaaaaaaggtttgaaatcatcaaagaagcctacatgcgatccctgaataacttccgtgctgagcagccccaccagcatgccatgtactatctgcgcctgctgatgactgaggtggcatggaccaaagatgaacttaaagaggccctcgacgacgtgacacttccaaggctcaaggcttttatcccccagcttctatctcgactccatatcgaagccctgcttcatggcaacatcaccaagcaggcagcattgggcattatgcaaatggtggaagataccttaatcgaacatgcccacacaaaacccctgttgccaagccaattagtgcggtatagggaagtgcagctccccgaccgcggctggtttgtataccagcaacgtaacgaggtccacaacaactgtgggatcgagatctattatcagactgacatgcagagtacttccgaaaacatgtttctggagctgttctgccagatcattagcgagccgtgtttcaacacactgcgtacaaaagagcagctcggttacatcgtatttagtggaccaaggcgcgcgaatggcattcaggggcttcggtttataattcagtcagaaaaacctccccactatctcgaatcaagagtcgaagcgttcctgattacaatggagaagtcaatcgaagatatgacggaggaagcttttcagaagcatattcaggccctcgcaatccggcggcttgataagccgaagaagctgagcgccgagtgtgctaaatactggggcgaaataatatcacagcagtacaatttcgaccgggataacacagaggtcgcttacctcaagacactcaccaaggaagacataataaaattttataaagaaatgctggcagttgacgctccccgtaggcacaaggtctccgtccacgtgctggctcgggagatggattcatgtccagtggtcggcgagttcccatgccaaaacgacatcaacctgtcacaggccccagctctgccacaacctgaggtgatccagaacatgaccgaatttaaaaggggactgccactctttcctcttgttaaaccgcatatcaatttcatggccgcaaaactgtag

SEQ ID NO: 63988 - DNA, 1395 bp, Artificial Sequence
  derived and/or modified sequence
atgtctaagctgtggttcaagcaggatgacaagttctttttgcccaaagcctgtctcaactttgaatttttctcaccttttgcctatgtggaccctctacactgtaatatggcgtacttgtatcttgaactcctcaaagattccctgaatgagtatgcatatgccgctgaattggcaggcctatcctatgatctgcagaacaccatctatggtatgtatctcagtgttaaaggatacaatgataaacagcctattctgctgaagaaaataattgagaagatggcaactttcgaaatcgatgagaaacgattcgaaataattaaagaagcctacatgcgctctctgaacaacttccgagccgagcagccacatcagcacgctatgtattacttgaggctgctcatgacggaggtggcgtggaccaaggacgaactgaaggaggcactggacgacgttacattgcctcgccttaaggcatttatcccccagcttttatctcgccttcacattgaggcactcctgcacggcaacatcaccaagcaggcggcactgggcatcatgcagatggttgaagacactctgattgaacacgcgcataccaagcccttgctcccctctcagttagtgaggtaccgcgaggtgcagctgcctgatcgcggatggttcgtgtaccaacaaagaaatgaggtgcacaataactgcggaatcgaaatttactatcaaacagatatgcagagcacgagcgagaacatgtttctggagctgttttgtcagataatctccgagccttgtttcaatactctccgcactaaagagcagctcgggtacattgtgttttccggacccaggcgggctaatggcatccaaggtcttcggtttattatccagagcgaaaagccaccacattacctggagagccgtgttgaggcgttcctcattaccatggagaaatctattgaagacatgacagaggaggcgtttcagaaacatatccaggcgctcgccatccgaaggcttgataaaccgaagaagctttcagctgaatgcgccaagtactggggagaaattatttctcaacaatacaacttcgaccgagacaacactgaggtggcctacctgaagactcttacgaaagaagatattatcaagttctacaaggagatgctggccgtagacgcccctcggaggcataaagtgtccgtgcacgtgctcgccagggagatggattcttgccctgtagtgggagaattcccctgccagaatgacatcaacttgagccaggcgcctgccttgccccagcctgaagtcattcagaacatgaccgaattcaaacgtggcttgcctctattcccacttgtgaagccacatataaactttatggcagccaagttatag

SEQ ID NO: 63989 - DNA, 1395 bp, Artificial Sequence
  derived and/or modified sequence
atgagcaagctgtggttcaagcaggacgacaagttcttcctgcccaaggcctgcctgaacttcgagttcttcagccccttcgcctacgtggaccccctgcactgcaacatggcctacctgtacctggagctgctgaaggacagcctgaacgagtacgcctacgccgccgagctggccggcctgagctacgacctgcagaacaccatctacggcatgtacctgagcgtgaagggctacaacgacaagcagcccatcctgctgaagaagatcatcgagaagatggccaccttcgagatcgacgagaagagattcgagatcatcaaggaggcctacatgagaagcctgaacaacttcagagccgagcagccccaccagcacgccatgtactacctgagactgctgatgaccgaggtggcctggaccaaggacgagctgaaggaggccctggacgacgtgaccctgcccagactgaaggccttcatcccccagctgctgagcagactgcacatcgaggccctgctgcacggcaacatcaccaagcaggccgccctgggcatcatgcagatggtggaggacaccctgatcgagcacgcccacaccaagcccctgctgcccagccagctggtgagatacagagaggtgcagctgcccgacagaggctggttcgtgtaccagcagagaaacgaggtgcacaacaactgcggcatcgagatctactaccagaccgacatgcagagcaccagcgagaacatgttcctggagctgttctgccagatcatcagcgagccctgcttcaacaccctgagaaccaaggagcagctgggctacatcgtgttcagcggccccagaagagccaacggcatccagggcctgagattcatcatccagagcgagaagcccccccactacctggagagcagagtggaggccttcctgatcaccatggagaagagcatcgaggacatgaccgaggaggccttccagaagcacatccaggccctggccatcagaagactggacaagcccaagaagctgagcgccgagtgcgccaagtactggggcgagatcatcagccagcagtacaacttcgacagagacaacaccgaggtggcctacctgaagaccctgaccaaggaggacatcatcaagttctacaaggagatgctggccgtggacgcccccagaagacacaaggtgagcgtgcacgtgctggccagagagatggacagctgccccgtggtgggcgagttcccctgccagaacgacatcaacctgagccaggcccccgccctgccccagcccgaggtgatccagaacatgaccgagttcaagagaggcctgcccctgttccccctggtgaagccccacatcaacttcatggccgccaagctgtag

SEQ ID NO: 63990 - protein, 387 aa, Artificial Sequence
  derived and/or modified sequence
MQFLKSAKQKPNYYHIMLVEDQEEGTLHQFNYCERCSESQNNKCISCVDPEDKWYRWPLPSKLCAVWIYLDVLFSTASIMHLCAISLDRYVAIQNPIHHSRFNSRTKAFLKIIAVWTISVGISMPIPVFGLQDDSKVFKEGSCLLADDNFVLIGSFVSFFIPLTIMVITYFLTIKSLQKEATLCVSDLGTRAKLASFSFLPQSSLSSEKLFQRSIHREPGSYTGRRTMQSISNEQKACKVLGIVFFLFVVMWCPFFITNIMAVICKESCNEDVIGALLNVFVWIGYLSSAVNPLVYTLFNKTYRSAFSRYIQCQYKENKKPLQLILVNTIPALAYKSSQLQMGQKKNSKQDAKTTDNDCSMVALGKQHSEEASKDNSDGVNEKVSCV

SEQ ID NO: 63991 - DNA, 1164 bp, Artificial Sequence
  derived and/or modified sequence
atgcaattcctgaaaagtgccaaacagaaacctaactactaccatatcatgttagtggaagatcaagaggaggggaccttgcaccagtttaattattgcgaacgttgctcagagtcacaaaataacaagtgcatctcttgcgtcgatcctgaagacaagtggtatcgatggcctctaccatccaaactctgtgcagtttggatatacctggacgtgcttttctctacggcatcaattatgcatctctgcgcaatcagtttagacaggtacgtagccattcagaaccctattcatcattctagatttaatagtaggacgaaggccttcctgaagattatcgcggtgtggacaatctctgtggggatttcaatgcctataccagtcttcggattacaggacgattcaaaagtgtttaaggagggaagctgcctcctcgcggacgacaattttgttcttatcggctcttttgtatcattcttcatcccattgaccatcatggtgatcacatatttcttaacaattaagtctttgcagaaagaggctacactctgtgtctccgacctggggactcgcgctaagctagcgtcattcagtttcctgccacaaagtagcctctcttctgagaagctgtttcagcgctcaatccaccgcgagcctggctcctacacaggaaggcggacaatgcagagtataagcaacgagcagaaagcgtgcaaggttttggggatcgtgttttttctgttcgttgttatgtggtgccctttcttcatcacgaatatcatggctgtgatctgcaaagaaagctgtaacgaggacgtgattggcgcgttgttaaacgtctttgtctggattggatatctttcctcagcagtgaacccgctggtttataccctgttcaacaagacctatagatccgccttttcgcggtacatccagtgccagtacaaggaaaacaaaaagccattacagttaatcctcgtgaacacgatccctgcactggcatataagtcaagtcagctgcaaatgggccagaagaaaaactccaagcaggacgctaaaaccaccgataatgattgtagcatggtggcccttggcaagcagcactctgaagaagccagcaaggataattcagatggcgtcaacgaaaaagtgtcatgtgtgtag

SEQ ID NO: 63992 - DNA, 1164 bp, Artificial Sequence
  derived and/or modified sequence
atgcagttcctgaagagcgccaagcagaagcccaactactaccacatcatgctggtggaggaccaggaggagggcaccctgcaccagttcaactactgtgagcgctgcagcgagagccagaacaacaagtgcatcagctgtgtggaccctgaggacaagtggtaccgctggcccctgcccagcaagctgtgtgctgtgtggatctacctggatgtgctcttcagcacagccagcatcatgcacctgtgtgccatcagcctggaccgctacgtggccatccagaaccccatccaccacagccgcttcaacagcaggaccaaggccttcctgaagatcatcgctgtgtggaccatctctgtgggcatctccatgcccatccctgtgtttggcctgcaggatgacagcaaggtgttcaaggagggcagctgcctgctggctgatgacaactttgtgctgattggcagctttgtgtccttcttcatccccctgaccatcatggtgatcacctacttcctgaccatcaagagcctgcagaaggaggccaccctgtgtgtgtctgacctgggcacccgggccaagctggccagcttctccttcctgccccagagcagcctgagcagcgagaagctgttccagaggagcatccaccgggagcccggcagctacacaggaagaaggaccatgcagagcatcagcaatgagcagaaggcctgcaaggtgctgggcatcgtgttcttcctgtttgtggtgatgtggtgccccttcttcatcaccaacatcatggccgtcatctgcaaggagagctgcaatgaagatgtgattggagccctgctgaatgtgtttgtgtggattggctacctgagcagcgctgtgaaccccctggtgtacaccctcttcaacaagacctacagaagtgccttcagccgctacatccagtgccagtacaaggagaacaagaagcccctgcagctgatcctggtgaacaccatcccagccctggcctacaagagcagccagctgcagatgggccagaagaagaacagcaagcaggatgccaagaccacagacaatgactgcagcatggtggccctgggcaagcagcacagcgaggaggccagcaaggacaacagtgatggagtgaatgagaaggtgtcctgtgtgtag

SEQ ID NO: 63993 - DNA, 1164 bp, Artificial Sequence
  derived and/or modified sequence
atgcagttcctgaagagcgccaagcagaagcccaactactaccacattatgctggtggaggatcaggaggaaggaacactccaccagttcaactattgtgagagatgcagtgaatctcagaataacaagtgtataagctgcgtggaccctgaagacaaatggtatcgctggcctctcccatcgaaactctgtgcggtgtggatctatctggacgtgctgttctcaaccgcttcaatcatgcatctatgcgcaatttctttggatagatacgtggccattcagaatcccattcatcacagccggttcaactcacgcacaaaagctttcctgaagatcatcgcagtatggacgatttctgtggggattagtatgcctattcccgtatttgggctgcaggacgattccaaggtgttcaaggagggttcttgtctcttagctgatgacaactttgtgctaataggatcttttgttagtttcttcatccctttgacaatcatggtgatcacctacttcctcaccatcaaatccctgcagaaagaagcaacactctgtgtgagcgacctgggtaccagagctaagctggcaagcttctcctttctcccacaatcttcattatcttctgaaaagctgttccagaggagcattcaccgagaaccaggatcctacacagggagacggaccatgcagagtatcagcaacgagcaaaaagcttgcaaggtactcggcatcgtctttttcctgtttgttgtcatgtggtgccccttctttattacaaacatcatggccgttatctgcaaggagagttgtaacgaggatgtgatcggggcactgttaaacgtattcgtttggataggttatctatcctcagccgtgaatcccctcgtgtacactttattcaacaaaacatacaggagtgccttctcccgatacatccagtgtcagtataaggaaaacaagaagcccttacaactcatcctggtcaatacaattcccgcactggcttacaaatcctctcagctgcagatggggcagaagaaaaattcaaagcaagacgcgaagacaactgataatgactgttctatggtagctcttggaaaacagcactccgaagaagcatcaaaggacaattcagacggagtgaatgagaaggttagctgcgtgtag

SEQ ID NO: 63994 - DNA, 1164 bp, Artificial Sequence
  derived and/or modified sequence
atgcagtttctcaagagtgccaagcagaagccgaactattaccacataatgctggtcgaggaccaagaggagggtacactccatcagtttaattattgcgagaggtgctcagagagccagaacaataagtgtatctcatgcgtggatcccgaggataaatggtaccgctggcctctgccctcgaaattgtgtgcggtgtggatttacctggacgtactgtttagcaccgcgagcatcatgcacctgtgcgcaatctccctggacaggtacgtggcgattcaaaacccgatccaccattcccggtttaactcccggactaaggctttcctgaaaatcatcgcagtatggactatttccgtcggaatatctatgcccatccctgtgtttgggttgcaggatgactcaaaagtgttcaaggagggctcctgtttgctggctgacgacaacttcgtcctcatagggtcctttgtctccttcttcatccctctaaccatcatggttatcacttacttcctcaccattaagagtttgcagaaagaggcgacactgtgcgtctccgatctgggaacacgcgcaaaactcgcgagtttttccttcctgccgcaatcctcgctcagcagcgagaaactgttccagcgttctatacatagagagcccggtagttataccggccgacggactatgcaatccatcagtaatgagcagaaggcctgtaaggtgctgggcatcgtgttctttctgtttgtggtaatgtggtgcccatttttcatcaccaacatcatggcggtgatatgcaaggaaagctgcaatgaggacgtgattggagccctgcttaacgtcttcgtctggattggctatctcagcagcgccgtcaacccactggtgtacactctatttaataagacatatcgcagcgccttttccaggtatatccagtgccagtacaaagaaaataaaaaacccctgcagctaatcttagtgaatactatccccgctttggcttacaagtcctcccaactccagatgggccagaagaagaattctaagcaggatgctaagaccaccgataatgactgttccatggtggcattgggcaaacagcattctgaggaggcctccaaggacaatagcgacggtgtgaatgaaaaagttagctgcgtgtag

SEQ ID NO: 63995 - DNA, 2824 bp, Artificial Sequence
  derived and/or modified sequence
gtggaaaccaggagtcccttggtgcagacagctcttcctactttcccatgcagttcttttgtgcgactttgaggggctcgtgaatgatttctaaatgtgtgcctgctgaggcgagccgcacagggagggaggaacccagccgagccgtgccagaggaagccaacaggatcctagcagtgcgggagctggctcagctcttgcatgcagtttttgaagtcagcaaaacagaaaccaaattactatcatattatgctggtggaagatcaagaagaggggactctacaccagtttaattactgtgagagatgcagcgagtcacagaataacaaatgtatctcatgtgtggaccctgaagacaaatggtaccggtggcctctgccgagcaagctttgtgcagtctggatttacctggacgtgctcttctccacggcctccatcatgcacctctgcgccatctcgctggaccgctacgtcgccatccagaatcccatccaccacagccgcttcaactccagaactaaggcatttctgaaaatcattgctgtttggaccatatcagtaggtatatccatgccaataccagtctttgggctacaggacgattcgaaggtctttaaggaggggagttgcttactcgccgatgataactttgtcctgatcggctcttttgtgtcatttttcattcccttaaccatcatggtgatcacctactttctaactatcaagtcactccagaaagaagctactttgtgtgtaagtgatcttggcacacgggccaaattagcttctttcagcttcctccctcagagttctttgtcttcagaaaagctcttccagcggtcgatccatagggagccagggtcctacacaggcaggaggactatgcagtccatcagcaatgagcaaaaggcatgcaaggtgctgggcatcgtcttcttcctgtttgtggtgatgtggtgccctttcttcatcacaaacatcatggccgtcatctgcaaagagtcctgcaatgaggatgtcattggggccctgctcaatgtgtttgtttggatcggttatctctcttcagcagtcaacccactagtctacacactgttcaacaagacctataggtcagccttttcacggtatattcagtgtcagtacaaggaaaacaaaaaaccattgcagttaattttagtgaacacaataccggctttggcctacaagtctagccaacttcaaatgggacaaaaaaagaattcaaagcaagatgccaagacaacagataatgactgctcaatggttgctctaggaaagcagcattctgaagaggcttctaaagacaatagcgacggagtgaatgaaaaggtgagctgtgtgtgataggctagttgccgtggcaactgtggaaggcacactgagcaagttttcacctatctggaaaaaaaaaaatatgagattggaaaaaattagacaagtctagtggaaccaacgatcatatctgtatgcctcattttattctgtcaatgaaaagcggggttcaatgctacaaaatgtgtgcttggaaaatgttctgacagcatttcagctgtgagctttctgatacttatttataacattgtaaatgatatgtctttaaaatgattcacttttattgtataattatgaagccctaagtaaatctaaattaacttctattttcaagtggaaaccttgctgctatgctgttcattgatgacatgggattgagttggttacctattgctgtaaataaaaatagctataaatagtgaaaattttattgaatataatggcctcttaaaaattatctttaaaacttactatggtatatattttgaaaggagaaaaaaaaagccactaaggtcagtgttataaaatctgtattgctaagataattaaatgaaatacttgacaacatttttcattcctgctttttcatagataccattttgaaatattcacaaggttgctggcatttgctgcatttcaagttaattctcagaagtgaaaaagacttcaaatgttattcaataactattgctgctttctcttctacttcttgtgctttactctgaatttccagtgtggtcttgtttaatatttgttcctctaggtaaactagcaaaaggatgatttaacattaccaaatgcctttctagcaattgcttctctaaaacagcactatcgaggtatttggtaacttgctgtgaaatgactgcatcatgcatgcactcttttgagcagtaaatgtatattgatgtaactgtgtcaggattgaggatgaactcaggtttccggctactgacagtggtagagtcctaggacatctctgtaaaaagcaggtgactttcctatgacactcatcaggtaaactgatgctttcagatccatcggtttatactatttattaaaaccattctgcttggttccacaatcatctattgagtgtacatttatgtgtgaagcaaatttctagatatgagaaatataaaaataattaaaacaaaatccttgccttcaaacgaaatggctcggccaggcacggaggctcgtgcatgtaatcctagcactttgggaggctgagatgggaggatcacttgaggccaagagtttgagaccaacctgggtaacaaagtgagacctccctgtctctacaaaaaaaatcaaaaaattatctgatccttgtggcacacaactgtggtcccagctacaggggaggctgagacgcaaggatcacttgagcccagaagctcaaggctgcagtgagccaagttcacaccactgccatttcctcctgggcaacagagtgagaccctatcac

SEQ ID NO: 63996 - DNA, 1164 bp, Artificial Sequence
  derived and/or modified sequence
atgcagttcctgaagagcgccaagcagaagcccaactactaccacatcatgctggtggaggaccaggaggagggcaccctgcaccagttcaactactgcgagagatgcagcgagagccagaacaacaagtgcatcagctgcgtggaccccgaggacaagtggtacagatggcccctgcccagcaagctgtgcgccgtgtggatctacctggacgtgctgttcagcaccgccagcatcatgcacctgtgcgccatcagcctggacagatacgtggccatccagaaccccatccaccacagcagattcaacagcagaaccaaggccttcctgaagatcatcgccgtgtggaccatcagcgtgggcatcagcatgcccatccccgtgttcggcctgcaggacgacagcaaggtgttcaaggagggcagctgcctgctggccgacgacaacttcgtgctgatcggcagcttcgtgagcttcttcatccccctgaccatcatggtgatcacctacttcctgaccatcaagagcctgcagaaggaggccaccctgtgcgtgagcgacctgggcaccagagccaagctggccagcttcagcttcctgccccagagcagcctgagcagcgagaagctgttccagagaagcatccacagagagcccggcagctacaccggcagaagaaccatgcagagcatcagcaacgagcagaaggcctgcaaggtgctgggcatcgtgttcttcctgttcgtggtgatgtggtgccccttcttcatcaccaacatcatggccgtgatctgcaaggagagctgcaacgaggacgtgatcggcgccctgctgaacgtgttcgtgtggatcggctacctgagcagcgccgtgaaccccctggtgtacaccctgttcaacaagacctacagaagcgccttcagcagatacatccagtgccagtacaaggagaacaagaagcccctgcagctgatcctggtgaacaccatccccgccctggcctacaagagcagccagctgcagatgggccagaagaagaacagcaagcaggacgccaagaccaccgacaacgactgcagcatggtggccctgggcaagcagcacagcgaggaggccagcaaggacaacagcgacggcgtgaacgagaaggtgagctgcgtgtag

SEQ ID NO: 63997 - protein, 843 aa, Artificial Sequence
  derived and/or modified sequence
MPRGAFRPCLPALYFAFLTCPTPEQRMSGTQAPDIHLGEPARGTGCVRGKQTSIRVQDCGRREEARAASRELRREKAQEHPRESWAHPQPYPAPQPLALRPETQPCPACRSSPPGRLLLRPALPGHPFLLPIMAVYRLCVTTGPYLRAGTLDNISVTLVGTCGESPKQRLDRMGRDFAPGSVQKYKVRCTAELGELLLLRVHKERYAFFRKDSWYCSRICVTEPDGSVSHFPCYQWIEGYCTVELRPGTARTICQDSLPLLLDHRTRELRARQECYRWKIYAPGFPCMVDVNSFQEMESDKKFALTKTTTCVDQGDSSGNRYLPGFPMKIDIPSLMYMEPNVRYSATKTISLLFNAIPASLGMKLRGLLDRKGSWKKLDDMQNIFWCHKTFTTKYVTEHWCEDHFFGYQYLNGVNPVMLHCISSLPSKLPVTNDMVAPLLGQDTCLQTELERGNIFLADYWILAEAPTHCLNGRQQYVAAPLCLLWLSPQGALVPLAIQLSQTPGPDSPIFLPTDSEWDWLLAKTWVRNSEFLVHENNTHFLCTHLLCEAFAMATLRQLPLCHPIYKLLLPHTRYTLQVNTIARATLLNPEGLVDQVTSIGRQGLIYLMSTGLAHFTYTNFCLPDSLRARGVLAIPNYHYRDDGLKIWAAIESFVSEIVGYYYPSDASVQQDSELQAWTGEIFAQAFLGRESSGFPSRLCTPGEMVKFLTAIIFNCSAQHAAVNSGQHDFGAWMPNAPSSMRQPPPQTKGTTTLKTYLDTLPEVNISCNNLLLFWLVSQEPKDQRPLGTYPDEHFTEEAPRRSIAAFQSRLAQISRDIQERNQGLALPYTYLDPPLIENSVSI

SEQ ID NO: 63998 - protein, 867 aa, Artificial Sequence
  derived and/or modified sequence
MGRNRSWGTLGSGRTSTPGHQSGPLTRRRAVSQLYRRYLLFSISASDPSLRSGTQAPDIHLGEPARGTGCVRGKQTSIRVQDCGRREEARAASRELRREKAQEHPRESWAHPQPYPAPQPLALRPETQPCPACRSSPPGRLLLRPALPGHPFLLPIMAVYRLCVTTGPYLRAGTLDNISVTLVGTCGESPKQRLDRMGRDFAPGSVQKYKVRCTAELGELLLLRVHKERYAFFRKDSWYCSRICVTEPDGSVSHFPCYQWIEGYCTVELRPGTARTICQDSLPLLLDHRTRELRARQECYRWKIYAPGFPCMVDVNSFQEMESDKKFALTKTTTCVDQGDSSGNRYLPGFPMKIDIPSLMYMEPNVRYSATKTISLLFNAIPASLGMKLRGLLDRKGSWKKLDDMQNIFWCHKTFTTKYVTEHWCEDHFFGYQYLNGVNPVMLHCISSLPSKLPVTNDMVAPLLGQDTCLQTELERGNIFLADYWILAEAPTHCLNGRQQYVAAPLCLLWLSPQGALVPLAIQLSQTPGPDSPIFLPTDSEWDWLLAKTWVRNSEFLVHENNTHFLCTHLLCEAFAMATLRQLPLCHPIYKLLLPHTRYTLQVNTIARATLLNPEGLVDQVTSIGRQGLIYLMSTGLAHFTYTNFCLPDSLRARGVLAIPNYHYRDDGLKIWAAIESFVSEIVGYYYPSDASVQQDSELQAWTGEIFAQAFLGRESSGFPSRLCTPGEMVKFLTAIIFNCSAQHAAVNSGQHDFGAWMPNAPSSMRQPPPQTKGTTTLKTYLDTLPEVNISCNNLLLFWLVSQEPKDQRPLGTYPDEHFTEEAPRRSIAAFQSRLAQISRDIQERNQGLALPYTYLDPPLIENSVSI

SEQ ID NO: 63999 - DNA, 2532 bp, Artificial Sequence
  derived and/or modified sequence
atgccccggggtgcatttagaccctgtctgccagcactttatttcgcctttctaacctgtcccactcctgagcaaagaatgagcgggactcaggcgccggacatccacctgggcgagccagctcgcgggacaggctgcgtgagaggcaagcaaacaagtatccgggtgcaggattgcgggagacgcgaagaggcgagagcggcaagcagagagttacggagagagaaagctcaggaacacccaagggagtcctgggctcatccccagccctaccccgcaccacagccattggcgcttcggccagagacccaaccttgtcccgcatgccgctccagtccccccggcaggttattgttgcgtccagctctccccggccatccctttttactgcctatcatggccgtgtacaggctctgtgtgaccaccggcccttacctgcgagccggaacgttggataatatatccgtcactctggtgggcacatgtggcgaatcacccaagcagaggctcgatcgcatgggccgcgacttcgcacccggtagcgtccagaaatataaagtacgctgcaccgccgagctgggcgagctgttgctgctgcgcgtgcacaaagagaggtacgcattctttcgaaaagacagctggtactgttctaggatatgcgtcaccgagcccgatggttccgtgagtcacttcccctgttatcaatggatcgagggctactgcacagtggaactgcgaccaggaaccgcacgaacaatctgtcaggacagcctgccacttctgcttgaccatcgaacgagggagctgcgagctagacaggaatgttaccgctggaaaatatatgccccaggttttccttgcatggtcgacgttaattcttttcaggagatggaatctgacaaaaagtttgcactgaccaaaaccaccacatgtgttgaccagggggacagttcagggaatagatatctccccggtttccccatgaaaattgacattccttcactgatgtatatggaaccaaatgttcggtactcagctaccaaaaccatctcactactgtttaacgctatccctgcttccttaggcatgaagctccggggattgctggatcgcaagggctcctggaaaaaacttgatgacatgcaaaacatcttttggtgtcataagacgttcactaccaagtatgtgaccgagcactggtgtgaggaccactttttcggttaccagtatcttaatggtgtcaaccccgtgatgctgcactgcatctctagcctaccctcaaagctcccggttacaaacgacatggtggcacctcttctggggcaagacacttgcttacagaccgaactcgagcgcggaaatatctttctcgctgactactggattctcgctgaggcccctactcactgcctgaatggtaggcagcaatatgtggccgcaccactttgtttactatggctgagcccgcagggggcgctggtgccactcgccatccagttatctcagacccccggccctgatagccctatcttcttacctaccgactctgaatgggactggctgctggccaaaacctgggtgcgcaatagcgaattccttgtccacgagaacaacactcacttcctctgtactcatcttctgtgcgaggcattcgcgatggccactttgcggcagctgcccctatgccaccctatctacaagttgcttctgccgcacaccagatatacactgcaggtaaacactattgcccgcgctacactgctgaacccagagggcctggtcgaccaggttacaagtatcggtagacaggggctgatctatctgatgtccaccggactcgcacacttcacgtacactaacttttgcctcccagacagccttagagcaagaggggtcttagccataccaaactatcattatcgagacgacggacttaaaatttgggctgcaattgagtcatttgtcagcgagatcgtagggtactactatccatcggacgcctctgtacagcaggacagcgagttacaagcctggacgggtgagatctttgcgcaagcctttttagggagagaaagctcaggcttcccatcgagactgtgcacccccggcgaaatggtgaaatttctcacagcgatcattttcaattgcagtgcccagcacgccgcggtcaattccggccagcacgactttggcgcttggatgccaaacgccccttcctccatgagacagccccccccccaaacaaagggaacgacaacgttgaagacctatctcgataccctgccagaggttaatattagctgtaataacctgctcttgttttggctggtgtcacaggaacctaaggatcaacggccccttggtacatacccagatgaacacttcacggaggaagctccaagacgctccatagccgcattccagtcccgtctggcacagatctcacgcgatattcaggaaaggaaccaaggactggccctgccctatacatacctggatcccccactcatcgagaattccgtctcaatctag

SEQ ID NO: 64000 - DNA, 2604 bp, Artificial Sequence
  derived and/or modified sequence
atggggagaaatcggagctggggtacactcggttccggcagaacgtctacacctggtcaccaatcaggccccctgacaagaagacgagccgtcagtcagctgtacagacgatacttgctgttctccatctcagctagcgacccttctcttaggagcggtactcaggctcccgatatccacctgggggagccagcccggggcacggggtgcgtgagggggaaacagactagcattagggttcaagactgtggcagacgtgaggaggcacgggccgcctcccgagaactccgcagagagaaagctcaagaacatcccagggaaagctgggcccacccacagccataccctgctccacagccactcgcattacggcctgaaactcagccttgtcctgcatgtagaagttctccaccaggcagactcctgttgaggcccgccctccccggacaccctttcctcttgccgataatggccgtttaccggctatgcgtgacaaccgggccttatctccgggctggcaccctggacaacatttccgtgacgctggtcgggacatgtggcgagtctccaaagcagcgacttgacaggatggggagagatttcgcaccaggatctgtccagaagtataaagtgcgctgcaccgctgagctcggcgagttgttgctcctgagagtgcataaggagcgctacgccttcttccgcaaagattcatggtactgcagtcgcatttgcgtgacagaacccgatggcagcgtgtcgcacttcccttgctaccaatggatagaagggtactgtacggttgagctgcgacccgggaccgctcgaacaatttgtcaagattcgctgcccctgctgctcgaccacagaactcgagaacttagggctagacaggagtgctataggtggaagatttacgcacctggtttcccatgtatggtggatgtgaacagttttcaagagatggaatcagacaagaaatttgctttaactaagacgactacttgtgttgatcaaggtgatagttcggggaatcgctacctgccagggttccctatgaagatagatatcccatccctgatgtatatggagcccaacgtacggtattccgcaacgaaaaccataagtctcctcttcaacgcaatcccagccagcctcggcatgaaacttcgggggctgctggacagaaaaggatcctggaagaagctcgacgacatgcagaacattttctggtgtcacaaaacattcacaacaaaatacgttactgagcactggtgcgaagaccacttttttggttaccaatacctcaatggcgtcaatcctgtgatgttgcactgcatttcctctctgccttccaaattacctgtaacgaacgacatggtcgcgcctctcctgggacaggacacgtgcctccagacagagctcgaacggggtaacattttcctggctgattactggattctggctgaggcccctacacactgcttgaatgggaggcagcagtacgtcgccgcaccgctctgtctgctctggctgagtcctcagggagccttggtgcccctcgccattcagctctctcagactccaggccccgacagccctatcttcctgcccacggattctgagtgggactggctactggctaagacgtgggttagaaattccgaatttcttgtgcacgaaaataacacacatttcctctgtacacacctactatgtgaagcattcgccatggcgacacttcgacagcttccactgtgtcacccaatatataagttactgctccctcatactcggtatacattgcaggtcaatacaattgccagagcaaccctcctgaatcccgagggactcgtggaccaggtcacctctatcggccggcaagggctgatctatctaatgtccaccggcctcgcacacttcacatatacaaatttttgcttacccgacagtttaagagcccggggagtgctggctataccaaactatcattaccgggacgacggactgaaaatctgggctgccatcgaaagctttgtgagcgagatcgtcggatactactatccgtcagatgccagcgttcaacaggacagtgagctccaagcctggaccggagaaatcttcgcccaggcattcctcgggcgcgagtcaagtggttttccctccaggctgtgcacccccggggagatggttaaatttttaactgcaattatattcaactgtagcgcacagcatgctgctgtgaattctggccagcacgatttcggtgcgtggatgcctaatgccccctcgagcatgagacagcctccacctcagactaagggcacaactacactgaaaacgtacctagataccctgcctgaggtaaacatctcatgcaataacctgttacttttctggttagtgtctcaggagcccaaagatcaacgaccccttggaacctacccagacgagcacttcacagaggaagctccgcgacgcagtatagctgctttccagtctcgtttagcacagatatctagagacattcaggaacgaaaccaggggctagcactcccttacacctatctcgaccctcccctcatagaaaattcagtgtccatctag

SEQ ID NO: 64001 - DNA, 2532 bp, Artificial Sequence
  derived and/or modified sequence
atgcccaggggggccttccggccctgcctgcctgccctgtactttgccttcctgacctgccccaccccagagcagaggatgagcggcacccaggccccagacatccacctgggggagcccgcccggggcaccggctgtgtgcggggcaagcagaccagcatccgggtgcaggactgtggcagaagagaggaggcccgggccgccagccgggagctgcggcgggagaaggcccaggagcacccccgggagagctgggcccacccccagccctacccagccccccagcccctggccctgcggcctgagacccagccctgcccagcctgccgcagcagccccccaggccgcctgctgctgcggcctgccctgcccggccaccccttcctgctgcccatcatggctgtgtaccgcctgtgtgtgaccaccggcccctacctgcgggccggcaccctggacaacatctctgtgaccctggtgggcacctgtggggagagccccaagcagaggctggacaggatgggccgggactttgcccctggctctgtgcagaagtacaaggtgcgctgcacagctgagctgggggagctgctgctgctgcgggtgcacaaggagagatatgccttcttcaggaaggacagctggtactgcagccgcatctgtgtgacagagccagatggctctgtgagccacttcccctgctaccagtggattgagggctactgcaccgtggagctgcggcctggaacagcccggaccatctgccaggacagcctgcccctgctgctggaccacaggacccgggagctgcgggcccggcaggagtgctaccgctggaagatctatgcccctggcttcccctgcatggtggatgtgaacagcttccaggagatggagagtgacaagaagtttgccctgaccaagaccaccacctgtgtggaccagggcgacagcagcggcaaccgctacctgcccggcttccccatgaagattgacatccccagcctgatgtacatggagcccaacgtgcgctacagcgccaccaagaccatcagcctgctcttcaatgccatcccagccagcctgggcatgaagctgcggggcctgctggacaggaagggctcctggaagaagctggatgacatgcagaacatcttctggtgccacaagaccttcaccaccaagtatgtgacagagcactggtgtgaggaccacttcttcggctaccagtacctgaatggagtgaaccctgtgatgctgcactgcatcagcagcctgcccagcaagctgcctgtgaccaatgacatggtggcccccctgctgggccaggacacctgcctgcagacagagctggagcggggcaacatcttcctggccgactactggatcctggccgaggcccccacccactgcctgaatggccggcagcagtatgtggccgcccccctgtgcctgctgtggctgagcccccagggcgccctggtgcccctggccatccagctgagccagaccccaggccctgacagccccatcttcctgcccacagacagcgagtgggactggctgctggccaagacctgggtgaggaacagcgagttcctggtgcatgagaacaacacccacttcctgtgcacccacctgctgtgtgaggcctttgccatggccaccctgcggcagctgcccctgtgccaccccatctacaagctgctgctgccccacacccgctacaccctgcaggtgaacaccatcgcccgggccaccctgctgaaccctgagggcctggtggaccaggtgaccagcatcggccggcagggcctcatctacctgatgagcacaggcctggcccacttcacctacaccaacttctgcctgcctgacagcctgcgggcccggggcgtgctggccatccccaactaccactacagagatgatggcctgaagatctgggccgccatcgagagctttgtgtctgagatcgtgggctactactaccccagtgatgcctctgtgcagcaggacagcgagctgcaggcctggacaggagagatctttgcccaggccttcctgggccgggagagcagcggcttccccagccggctgtgcaccccaggagagatggtgaagttcctgacagccatcatcttcaactgcagcgcccagcacgccgctgtgaacagcggccagcacgactttggagcctggatgcccaatgcccccagctccatgaggcagcccccaccccagaccaagggcaccaccaccctgaagacctacctggacaccctgcctgaggtgaacatcagctgcaacaacctgctgctcttctggctggtgtcccaggagcccaaggaccagaggcccctgggcacctacccagatgagcacttcacagaggaggcccccaggaggagcattgctgccttccagagccggctggcccagatcagccgggacatccaggagaggaaccagggcctggccctgccctacacctacctggacccccccctgattgagaacagcgtgtccatctag

SEQ ID NO: 64002 - DNA, 2604 bp, Artificial Sequence
  derived and/or modified sequence
atgggcaggaacagatcctggggcaccctgggcagcggccgcaccagcaccccaggccaccagagcggccccctgacccggcggcgggctgtgtcccagctgtaccgccgctacctgctcttcagcatcagcgccagtgaccccagcctgcggagcggcacccaggccccagacatccacctgggggagcccgcccggggcaccggctgtgtgcggggcaagcagaccagcatccgggtgcaggactgtggcagaagagaggaggcccgggccgccagccgggagctgcggcgggagaaggcccaggagcacccccgggagagctgggcccacccccagccctacccagccccccagcccctggccctgcggcctgagacccagccctgcccagcctgccgcagcagccccccaggccgcctgctgctgcggcctgccctgcccggccaccccttcctgctgcccatcatggctgtgtaccgcctgtgtgtgaccaccggcccctacctgcgggccggcaccctggacaacatctctgtgaccctggtgggcacctgtggggagagccccaagcagaggctggacaggatgggccgggactttgcccctggctctgtgcagaagtacaaggtgcgctgcacagctgagctgggggagctgctgctgctgcgggtgcacaaggagagatatgccttcttcaggaaggacagctggtactgcagccgcatctgtgtgacagagccagatggctctgtgagccacttcccctgctaccagtggattgagggctactgcaccgtggagctgcggcctggaacagcccggaccatctgccaggacagcctgcccctgctgctggaccacaggacccgggagctgcgggcccggcaggagtgctaccgctggaagatctatgcccctggcttcccctgcatggtggatgtgaacagcttccaggagatggagagtgacaagaagtttgccctgaccaagaccaccacctgtgtggaccagggcgacagcagcggcaaccgctacctgcccggcttccccatgaagattgacatccccagcctgatgtacatggagcccaacgtgcgctacagcgccaccaagaccatcagcctgctcttcaatgccatcccagccagcctgggcatgaagctgcggggcctgctggacaggaagggctcctggaagaagctggatgacatgcagaacatcttctggtgccacaagaccttcaccaccaagtatgtgacagagcactggtgtgaggaccacttcttcggctaccagtacctgaatggagtgaaccctgtgatgctgcactgcatcagcagcctgcccagcaagctgcctgtgaccaatgacatggtggcccccctgctgggccaggacacctgcctgcagacagagctggagcggggcaacatcttcctggccgactactggatcctggccgaggcccccacccactgcctgaatggccggcagcagtatgtggccgcccccctgtgcctgctgtggctgagcccccagggcgccctggtgcccctggccatccagctgagccagaccccaggccctgacagccccatcttcctgcccacagacagcgagtgggactggctgctggccaagacctgggtgaggaacagcgagttcctggtgcatgagaacaacacccacttcctgtgcacccacctgctgtgtgaggcctttgccatggccaccctgcggcagctgcccctgtgccaccccatctacaagctgctgctgccccacacccgctacaccctgcaggtgaacaccatcgcccgggccaccctgctgaaccctgagggcctggtggaccaggtgaccagcatcggccggcagggcctcatctacctgatgagcacaggcctggcccacttcacctacaccaacttctgcctgcctgacagcctgcgggcccggggcgtgctggccatccccaactaccactacagagatgatggcctgaagatctgggccgccatcgagagctttgtgtctgagatcgtgggctactactaccccagtgatgcctctgtgcagcaggacagcgagctgcaggcctggacaggagagatctttgcccaggccttcctgggccgggagagcagcggcttccccagccggctgtgcaccccaggagagatggtgaagttcctgacagccatcatcttcaactgcagcgcccagcacgccgctgtgaacagcggccagcacgactttggagcctggatgcccaatgcccccagctccatgaggcagcccccaccccagaccaagggcaccaccaccctgaagacctacctggacaccctgcctgaggtgaacatcagctgcaacaacctgctgctcttctggctggtgtcccaggagcccaaggaccagaggcccctgggcacctacccagatgagcacttcacagaggaggcccccaggaggagcattgctgccttccagagccggctggcccagatcagccgggacatccaggagaggaaccagggcctggccctgccctacacctacctggacccccccctgattgagaacagcgtgtccatctag

SEQ ID NO: 64003 - DNA, 2532 bp, Artificial Sequence
  derived and/or modified sequence
atgccccggggcgccttccggccctgcctgcccgccctgtacttcgccttcctcacctgtccaaccccagagcagcggatgtctgggacccaggctccagatatccacctaggggagccagcccggggtactggctgcgttcggggaaagcaaactagtattagggttcaggattgcgggcggagagaagaagctagagcggcttcaagggagcttaggagagagaaagctcaagagcatccaagggagtcttgggctcacccacagccttatccggcccctcagccgctggctctgcggcctgaaacgcagccctgtccggcttgtaggagcagccctccagggcgcctgctactgcggcccgccttgcccggccatccatttctattgcctatcatggccgtgtatcggttgtgtgtaacaaccggcccatatctgagagccggaacactggacaacatctcagttaccctggtcggcacttgtggagagtcaccgaaacagcgtctagatcgtatgggtcgcgatttcgcccctggttctgtccagaaatacaaggtacgatgtaccgcagaactgggggagctactgcttcttcgagtgcataaggaacgctatgccttttttcggaaggattcttggtactgtagccgcatctgcgtgacagagcctgatgggtccgtcagccactttccctgctaccaatggattgagggatactgtacagtcgaactgcgaccaggtaccgcaaggaccatttgtcaggattccctccccctgctgcttgatcatcgcacaagggagctgcgcgcccgtcaggagtgctatcggtggaaaatctacgctccagggtttccctgtatggtagatgtcaacagttttcaggagatggaatcagacaaaaaattcgctctgaccaaaacgaccacctgtgtggaccaaggtgacagctccggtaataggtacctccccgggttccctatgaagattgacattccaagcttgatgtacatggagccaaacgtaaggtactccgccaccaagacaatctcgcttctgtttaacgctattcctgccagtttgggtatgaagcttcgagggctgctggatcgcaagggcagttggaagaagttggacgacatgcaaaatattttttggtgccataagactttcaccacaaaatacgttaccgaacattggtgtgaagatcacttttttggatatcagtacctgaatggagtgaatcctgttatgctgcattgtatctctagcctaccgagtaagctgcccgtcactaacgatatggtggctccactgttaggacaagacacctgcttgcagactgagttggagcggggaaacatttttctggccgactattggattctagccgaagctcccacccactgtttaaatgggcggcagcagtacgtggccgctccgttatgcctcctgtggctgtcccctcaaggtgccctggtgcctctggccattcaattgagtcagacacctggcccggattcccccatattcctgccaaccgactctgagtgggactggctgcttgccaagacctgggtccgcaacagcgagtttctggtgcatgaaaataacacacactttttgtgcacccatctcttgtgtgaggccttcgctatggccaccttaaggcaactcccgctgtgtcatcctatttataagctgcttctcccacataccaggtacacactacaagtgaacactattgcaagagccacccttctgaatcccgaaggtttggtcgaccaggtgacatcgatcgggagacagggtctcatttacctcatgtctactggtctcgctcactttacctacacaaacttttgcctgcccgattccctgagagcccgcggggtgttggcaatacccaattatcattaccgcgatgatggattgaagatctgggccgcaatcgagtcttttgtctcagaaatagtaggatattactatccaagtgatgcttccgtccaacaggactccgagctgcaggcatggaccggagaaatattcgctcaggcattcctgggcagagagtctagcgggtttcctagccggctctgtacgccaggcgaaatggtcaagttcttaaccgccataatttttaattgctccgcccagcacgccgcagtgaactcaggacagcatgattttggggcgtggatgccgaacgcccctagcagcatgcgccaaccacctccccagaccaagggaactaccacactgaagacatatcttgatactctgccagaggtgaatatatcttgcaataacctgttgctgttttggttggtttcgcaggagcccaaggatcaaaggccactcggtacataccccgatgagcactttacggaggaagcccctagacgatcaatagcagcgtttcagtctcgcttggcacagatatcccgagatattcaggaacgtaaccaagggcttgctcttccctacacctaccttgaccctcccttgattgagaactctgtgagcatttag

SEQ ID NO: 64004 - DNA, 2604 bp, Artificial Sequence
  derived and/or modified sequence
atgggccggaaccggagctggggcaccctgggcagcggccggaccagcaccccggggcaccagagtggcccactgactcggagacgtgcagtttcgcaactttaccgacgatacctcctcttcagcatatcagcttccgacccaagtctgcgctccggtacccaggcccctgacatacacttgggggaacccgcccgtggcaccggatgcgtaaggggcaagcagactagcattcgcgtacaggactgcggtaggagggaggaggcacgggccgcctcccgtgagctgcgacgggaaaaagcacaggaacacccacgcgaaagctgggcgcatcctcagccctacccagctccacagccactcgccctgagacccgaaactcagccttgcccagcttgtaggagcagtccccccgggagactcctcttacgaccagccctacccggccaccctttcttgttgcctataatggccgtgtaccggctgtgtgtcaccactgggccatacttgcgagccgggacactggataatatttcagttacactggtcgggacttgcggcgaatcacctaagcaacggctcgatcgcatggggcgggactttgcacccggcagtgtgcagaaatacaaagttaggtgcacagcggagttgggcgagctgcttctgctgagagtgcataaagagagatacgctttttttagaaaagactcctggtactgttctaggatctgcgtcactgaacccgatgggtcagtgtcgcactttccatgctaccagtggattgaggggtattgcacggtagagttgcgccctggcaccgcccgcactatatgccaggacagccttccgttgttgttggaccatagaacaagggagttacgcgcacggcaggaatgttataggtggaagatttacgcccccgggtttccttgcatggtcgatgtgaatagtttccaggagatggagtctgataaaaagttcgccctgaccaagactacaacatgtgtagatcagggcgactcatccggcaacaggtacttgccgggattccccatgaaaatagatataccttccctgatgtacatggaaccaaatgtaaggtactcagctactaagacaatctccctgctttttaacgcaatcccagcctccctgggtatgaaattgaggggcctccttgatcgaaaagggagctggaaaaaattggacgatatgcagaacattttttggtgtcacaagaccttcacgactaagtacgttacagaacactggtgcgaagatcatttttttggataccagtatctgaacggcgtgaaccccgttatgttgcattgcatcagtagcctcccctctaaattaccagtgacgaacgatatggtagcgccactccttggccaggatacatgtctccaaacagaactggaaaggggaaacatcttcttagccgactactggatcttggccgaggcacctacgcattgtctgaatggacgccagcagtatgttgcggcccctctgtgtctcttgtggctgagcccacaaggagctctggtaccactggctatccagctgtcccagactccgggccctgattctccaatttttctacctactgacagcgaatgggactggttgcttgcaaagacgtgggtaagaaactccgagttcttggtccacgaaaacaatacccatttcctgtgtacgcacctgctgtgcgaagctttcgccatggccacattgcgacaactgccactgtgtcaccccatttacaagcttctcctgccccacacccgttacaccctgcaggtcaacacaatcgcccgagcaacccttctgaaccccgagggcctcgtagaccaggttactagcattgggaggcaaggactgatctatttgatgagcacgggattagcccatttcacctacaccaatttttgtctccccgactctcttagagcccgaggggtgctggccatacccaattaccactaccgggacgacggactgaaaatttgggccgctattgagtcctttgtgtccgaaatcgtgggatactattatcccagtgacgcttccgttcaacaagattccgagctgcaagcttggacaggagagatctttgctcaggctttccttggtagggagagctccggcttcccctcacgcctgtgtactcctggtgaaatggtgaagtttctcactgccatcatttttaattgttcggcccagcacgccgccgttaacagtggacagcacgatttcggggcctggatgccaaatgctccatcaagcatgagacaaccccccccccagacaaaaggaaccacaaccctcaaaacgtatctcgacacgcttcccgaggttaatatctcctgcaacaatttgctgttgttctggctcgtgtcccaagaacccaaagaccaacgacccttagggacttatcctgatgagcatttcaccgaggaggccccccgccggagcatcgcggcttttcagtcgcggttagctcagattagtcgcgatattcaagaacgcaatcagggcttagccctgccttatacgtacctcgatccccccctcattgaaaattctgtcagtatctag

SEQ ID NO: 64005 - DNA, 2532 bp, Artificial Sequence
  derived and/or modified sequence
atgccccgaggagcatttagaccatgtctccccgcactctacttcgctttcctgacgtgccctacgccagagcagcggatgtccggcactcaggcgccagatatccatttaggcgagcccgctcgagggacaggttgtgtacggggaaaacaaactagcatcagggttcaagactgcggccgtagagaagaggcaagagccgcatctagagagttaaggagggaaaaggcacaggaacaccccagagaaagctgggcccacccccaaccgtaccccgctccacaaccactcgctctcagaccagagacacaaccgtgccccgcatgcagatcatcccccccagggagactactcttacgtccagctctcccgggtcacccctttttactcccgattatggctgtgtaccgtttgtgtgtgaccactggcccatacctccgggctggcaccctcgataatataagtgtcaccctcgtgggtacatgtggcgagtcacccaaacagagactggatcgcatgggcagggacttcgctcctggatccgtccagaagtataaggtgagatgtacagccgagctgggagagctgctccttctcagggtgcacaaagagcgttacgcattcttcagaaaggactcctggtactgctcccgtatttgtgtaactgaaccagacggcagtgtttcacattttccatgctaccagtggatagagggatactgtaccgtggagcttagaccagggaccgctcggacaatctgccaggattctctgcctctgttgctagaccaccgaacacgggagctgagggcaagacaagagtgttatcggtggaagatttacgctcctggctttccctgcatggtagatgtgaacagctttcaggaaatggaatctgacaaaaaatttgcgctaaccaagactaccacctgtgtggaccagggtgattccagcggcaacaggtatctaccagggtttccaatgaagatcgatatcccttctttaatgtacatggaacccaacgtgagatacagcgccactaagaccatttcactcttatttaatgcgattcctgcatctttagggatgaagctcagaggactgttagaccgcaaaggatcttggaagaagctggacgacatgcagaacattttctggtgtcataagacctttacgactaagtatgtcaccgaacactggtgtgaggatcatttttttggatatcagtatttgaacggcgtgaacccagtgatgttacactgcattagctcactcccttctaaattaccggtgaccaatgacatggtggcaccgctgcttgggcaggacacctgccttcagacagaacttgagagaggcaacatttttttagccgactactggatccttgccgaggcccctacacactgtctcaacggaagacaacagtacgtggcagctcccctgtgcctgctgtggctgagtccccagggagcactagttcccctagcaattcagctgtctcagacccctgggcctgacagcccgatcttcttgcctactgactccgaatgggactggctgctggccaagacatgggtgcggaacagcgaatttctcgttcatgaaaacaacacacacttcctttgcacacatctgttgtgcgaggccttcgcaatggcgacactgcgacagcttcctctttgccatcccatttacaagttgcttcttccacacactaggtataccctacaggtaaacactatcgcccgagcaaccttactgaaccccgaagggcttgtggatcaggtcacgtcaatcggaaggcaagggttaatatacctaatgagcacggggctggcccactttacatatacgaatttctgcctgcccgactctctccgcgcaaggggggtactggcaatcccaaactatcactacagggacgacggactgaaaatctgggccgctattgagagttttgtctctgagatagtggggtactactaccccagcgacgcatctgtgcagcaggattcagaactacaggcatggactggcgaaatcttcgcacaggcctttctgggcagagagtcgtctgggttcccaagcagactatgcacccccggtgaaatggtcaaatttttaaccgcgattattttcaactgtagtgcccagcacgctgcagttaactccggccagcacgatttcggggcttggatgccgaatgcccctagctccatgcgccagccaccccctcagaccaagggcactaccacactcaagacatacctggacacgctcccagaggtaaatatttcctgcaacaatcttctgctgttctggctcgtgagccaggaacccaaggaccaacgacccctcggcacatacccagacgaacactttaccgaagaggcccctcgcagatccattgcagccttccaatctcgtttggcccaaatcagtcgggacatccaggagcgcaaccagggacttgctctgccctacacttatcttgacccacccctcattgaaaactctgtgtcgatctag

SEQ ID NO: 64006 - DNA, 2604 bp, Artificial Sequence
  derived and/or modified sequence
atgggcaggaacagatcctgggggaccctgggaagtggccgtacatccacaccaggtcaccagtcagggcctctcacccgaaggcgggctgtgtcacagctgtatcgtaggtatttgttgttcagtatctctgcaagcgaccctagcctgcgcagtgggacacaggccccagatatacatctcggagaacctgcacggggtacaggttgcgtccgaggcaagcagacctccattcgtgtacaggactgtggcagacgagaggaagcacgggcagccagcagagagcttcgtcgggaaaaagctcaggaacacccgcgtgaatcttgggctcacccccagccttaccctgcccctcagccactcgccttaagaccagagacccagccatgtccagcctgccgaagctcacctccaggaagactattgcttcgtcctgctctgcctggacacccattcctgctccccatcatggctgtctacaggttatgcgtgacaaccgggccttatctgcgcgcaggaaccttggacaacatttcagtgacgctagtaggtacttgcggcgagagtcctaagcagcgacttgacaggatggggagagactttgccccaggctctgtgcagaaatataaagttagatgtacagctgaacttggggagctactcttgctgcgcgtgcacaaggagcgttacgccttctttcgaaaggattcttggtattgttctcgaatatgcgtgaccgagccagacggatctgtatcacacttcccctgctatcagtggatcgagggctactgtacagttgaacttcgtcccggaaccgcccgaaccatttgtcaggatagtttaccattgctgctggaccatcgcacgcgagaattaagagctagacaggagtgttaccggtggaaaatttatgcacccggtttcccttgtatggtcgatgtgaacagttttcaggagatggagagcgataaaaagttcgcgttgactaagacaaccacatgcgtggatcagggggatagcagcggaaaccggtacctgccaggttttccgatgaaaatagatattccatccttgatgtatatggaaccgaacgtgcgatattcagccacgaaaacaatctcgttgctttttaatgccatccccgcatccttgggcatgaaacttagggggctgctcgatcgtaaagggagttggaagaaactggacgatatgcaaaatatcttttggtgccataaaaccttcacaaccaagtacgtcaccgaacattggtgtgaagatcacttttttgggtaccagtacctaaatggagtgaatcccgttatgctgcactgcatctcctcattgccctctaagcttccagtgaccaatgatatggtggctcctttattgggtcaggacacctgtctccaaaccgagcttgaaagaggaaatatcttcctggcggattattggattctggctgaagccccaacccactgtctcaatgggagacaacagtacgtcgctgcgcctttgtgtctactgtggctctctccgcagggagctttagtccctctggcaatccagttgagtcagacccctggcccagactccccaatctttctgcccaccgattctgagtgggattggctcctggccaagacttgggtccgtaactccgaattcctggtccacgaaaacaatacacacttcctgtgcactcacctgctctgtgaggctttcgccatggctaccctcaggcagctgccactgtgtcaccctatctacaaattgttgctgcctcatacacgatacacattacaggtgaacacaatagccagagccacgttgctgaacccggagggtctcgtggaccaggtcacctccataggccgacaaggtttaatttatttaatgagcacaggtctggctcacttcacatatactaacttctgcctgccagattccctgagggccaggggggtgctagctataccgaactaccactacagggacgacggcttgaagatctgggcagctattgagagttttgtgtctgaaatagttggatattactatcctagcgacgcctcagtgcagcaagactccgagttacaagcatggactggagaaatcttcgctcaggcttttctgggcagggagtcctccgggtttccatcccggctgtgtacaccgggagaaatggtcaagttcctgaccgcaatcatttttaactgctccgctcaacatgccgcagtcaatagtgggcaacatgactttggcgcttggatgccaaacgccccttcctccatgcgccagccccctccacagacaaaaggcacgacgactctcaagacatacttggacacactcccggaggtgaacatctcatgtaataacttgctgctgttctggctcgtctcccaggaacccaaagatcagagacctctgggaacataccccgacgagcattttacagaggaggccccaagaaggtccatcgccgcattccagtcacgactggctcagatttctagagacatacaggagcgtaaccagggtttagcgcttccatatacttatctagaccctccgctgatcgaaaattccgtgtccatctag

SEQ ID NO: 64007 - DNA, 3396 bp, Artificial Sequence
  derived and/or modified sequence
ggaaccggccgcgcggggccgctgcgggctatgggcttctctgagaggttcctccccagtccctagtggcccagatcccggacacctgggctcccgcccaggatcctgcaggcccagggcggtcctggagcggaaagaatgccacgcggggcattcagaccctgtttgccggcgctgtatttcgctttcctgacctgccctactccagagcagagaatgagtggaacccaggctcctgatatccatctgggtgagccagccagagggaccggctgtgtcagaggcaagcaaacaagtattagagtgcaagactgtgggcggagagaggaagcccgagccgccagcagggagcttcggagagagaaagcccaggaacatcccagagagagctgggcccatcctcagccctacccagccccgcagcccctagccctccgcccagaaacccagccctgtccggcgtgccgctcttctcctccaggccggctgctgctgcggccagcgttgccggggcatcccttcctccttcccatcatggcagtgtaccgcctgtgtgtgaccactggtccctacctgagggccggcacactggacaacatctctgtcacactggtgggcacgtgtggtgaaagccccaagcagcggctagatcgaatgggcagggacttcgcccctggatcggtacagaagtacaaggtgcgttgcacagcggagctgggtgagctcttgctgctgcgtgtacacaaggagcgctacgctttcttccgcaaggactcttggtactgtagccgcatctgtgtcaccgaaccggatggtagtgtatcccacttcccctgctatcagtggattgaaggctactgcaccgtggagctgaggccaggaacagcaagaactatttgtcaggactctcttcccctcctcctggatcacaggacacgggagctccgggcccgacaagaatgctaccgctggaagatctatgcccctggcttcccctgcatggtagacgtcaacagctttcaggagatggagtcagacaagaaatttgccttgacaaagacgacaacttgtgtagaccagggtgacagcagtgggaatcggtacctgcccggcttccccatgaaaattgacatcccatccctgatgtacatggagcccaatgttcgatactcagccaccaagacgatctcgctgctcttcaatgccatccctgcgtccttgggaatgaagcttcgagggctgttggatcgcaagggctcctggaagaagctggatgacatgcagaacatcttctggtgccataagaccttcacgacaaagtatgtcacagagcactggtgtgaagatcacttctttgggtaccagtacctgaatggtgtcaatcccgtcatgctccactgcatctctagcttgcccagcaagctgcctgtcaccaatgacatggtggcccccttgctgggacaggacacatgcctgcagacagagctagagagggggaacatcttcctagcggactactggatcctggcggaggcccccacccactgcctaaacggccgccagcagtacgtggccgccccactgtgcctgctgtggctcagcccccagggggcgctggtgcccttggccatccagctcagccagacccccgggcctgacagccccatcttcctgcccactgactccgaatgggactggctgctggccaagacgtgggtgcgcaactctgagttcctggtgcacgaaaacaacacgcactttctgtgcacgcatttgctgtgcgaggccttcgccatggccacgctgcgccagctgccgctctgccaccccatctacaagctcctactcccccacactcgatacacgctgcaggtgaacaccatcgcgagggccacgctgctcaaccccgagggcctcgtggaccaggtcacgtccatcgggaggcaaggcctcatctacctcatgagcacgggcctggcccacttcacctacaccaatttctgccttccggacagcctgcgggcccgcggcgtcctggctatccccaactaccactaccgagacgacggcctgaagatctgggcggccattgagagctttgtctcagaaatcgtgggctactattatcccagtgacgcatctgtgcagcaggattcggagctgcaggcctggactggcgagatttttgctcaggcgttcctgggccgggaaagctcaggtttcccaagccggctgtgcaccccaggagagatggtgaagttcctcactgcaatcatcttcaattgctctgcccagcacgctgctgtcaacagtgggcagcatgactttggggcctggatgcccaatgctccatcatccatgaggcagcccccaccccagaccaaggggaccaccaccctgaagacttacctagacaccctccctgaagtgaacatcagctgtaacaacctcctcctcttctggttggttagccaagaacccaaggaccagaggcccctgggcacctacccagatgagcacttcacagaggaggccccgaggcggagcatcgccgccttccagagccgcctggcccagatctcaagggacatccaggagcggaaccagggtctggcactgccctacacctacctggaccctcccctcattgagaacagcgtctccatctaaccacccccaaataccacccaagaagaaagaaaggtccaagcatgaggaggaccagttcctcaggtcctccagacccttccatcctccctgttctcagttcacctgaaccttctcttctgcacatggagacttttgcagccaagatggctctgacatcatacaaactgggccctgagctgtgagagaccagcacagcagcgtccaggttaaaagccgctgaccaaagtccaatgcacaatagcccctccgaaaggaaggaaccgcttcacttcttgccccacttggggcagcctcttgttccagcctcttggaatgcccagcttgggtttctgagcttttctccctcatcctccccaatccccaaactccttctcctaccatgcctttctacgttctctttcttccaagcctagagccaccagcccagcttccttctctggaaaagcctggaaactgggcacagaaggactgtgtgcctgggtctaacatgtggtcccctttgtccctagcacctttaaggggaggggaagaattggagggcagcttgcctggacccctaacggctgttctcaggaacaggttcccaggcctggggtgtttgtggagatctgtctttctccaaagatttcatccaactcccctttcatcccactccctttcatcccatttttttctttctgtccttgagcccagtgagttcaataaaaaccaaaatatttggctctc

SEQ ID NO: 64008 - DNA, 3362 bp, Artificial Sequence
  derived and/or modified sequence
gcaggtgccctgtgctcatctctgcctgggaatggggaggaacagatcttgggggacattggggagtgggcggacaagcactccagggcatcagtccgggccgctgaccaggcggagggcagtgtcccaattatacaggcgttacctccttttctccatctcagcatctgatccctccctccgcagtggaacccaggctcctgatatccatctgggtgagccagccagagggaccggctgtgtcagaggcaagcaaacaagtattagagtgcaagactgtgggcggagagaggaagcccgagccgccagcagggagcttcggagagagaaagcccaggaacatcccagagagagctgggcccatcctcagccctacccagccccgcagcccctagccctccgcccagaaacccagccctgtccggcgtgccgctcttctcctccaggccggctgctgctgcggccagcgttgccggggcatcccttcctccttcccatcatggcagtgtaccgcctgtgtgtgaccactggtccctacctgagggccggcacactggacaacatctctgtcacactggtgggcacgtgtggtgaaagccccaagcagcggctagatcgaatgggcagggacttcgcccctggatcggtacagaagtacaaggtgcgttgcacagcggagctgggtgagctcttgctgctgcgtgtacacaaggagcgctacgctttcttccgcaaggactcttggtactgtagccgcatctgtgtcaccgaaccggatggtagtgtatcccacttcccctgctatcagtggattgaaggctactgcaccgtggagctgaggccaggaacagcaagaactatttgtcaggactctcttcccctcctcctggatcacaggacacgggagctccgggcccgacaagaatgctaccgctggaagatctatgcccctggcttcccctgcatggtagacgtcaacagctttcaggagatggagtcagacaagaaatttgccttgacaaagacgacaacttgtgtagaccagggtgacagcagtgggaatcggtacctgcccggcttccccatgaaaattgacatcccatccctgatgtacatggagcccaatgttcgatactcagccaccaagacgatctcgctgctcttcaatgccatccctgcgtccttgggaatgaagcttcgagggctgttggatcgcaagggctcctggaagaagctggatgacatgcagaacatcttctggtgccataagaccttcacgacaaagtatgtcacagagcactggtgtgaagatcacttctttgggtaccagtacctgaatggtgtcaatcccgtcatgctccactgcatctctagcttgcccagcaagctgcctgtcaccaatgacatggtggcccccttgctgggacaggacacatgcctgcagacagagctagagagggggaacatcttcctagcggactactggatcctggcggaggcccccacccactgcctaaacggccgccagcagtacgtggccgccccactgtgcctgctgtggctcagcccccagggggcgctggtgcccttggccatccagctcagccagacccccgggcctgacagccccatcttcctgcccactgactccgaatgggactggctgctggccaagacgtgggtgcgcaactctgagttcctggtgcacgaaaacaacacgcactttctgtgcacgcatttgctgtgcgaggccttcgccatggccacgctgcgccagctgccgctctgccaccccatctacaagctcctactcccccacactcgatacacgctgcaggtgaacaccatcgcgagggccacgctgctcaaccccgagggcctcgtggaccaggtcacgtccatcgggaggcaaggcctcatctacctcatgagcacgggcctggcccacttcacctacaccaatttctgccttccggacagcctgcgggcccgcggcgtcctggctatccccaactaccactaccgagacgacggcctgaagatctgggcggccattgagagctttgtctcagaaatcgtgggctactattatcccagtgacgcatctgtgcagcaggattcggagctgcaggcctggactggcgagatttttgctcaggcgttcctgggccgggaaagctcaggtttcccaagccggctgtgcaccccaggagagatggtgaagttcctcactgcaatcatcttcaattgctctgcccagcacgctgctgtcaacagtgggcagcatgactttggggcctggatgcccaatgctccatcatccatgaggcagcccccaccccagaccaaggggaccaccaccctgaagacttacctagacaccctccctgaagtgaacatcagctgtaacaacctcctcctcttctggttggttagccaagaacccaaggaccagaggcccctgggcacctacccagatgagcacttcacagaggaggccccgaggcggagcatcgccgccttccagagccgcctggcccagatctcaagggacatccaggagcggaaccagggtctggcactgccctacacctacctggaccctcccctcattgagaacagcgtctccatctaaccacccccaaataccacccaagaagaaagaaaggtccaagcatgaggaggaccagttcctcaggtcctccagacccttccatcctccctgttctcagttcacctgaaccttctcttctgcacatggagacttttgcagccaagatggctctgacatcatacaaactgggccctgagctgtgagagaccagcacagcagcgtccaggttaaaagccgctgaccaaagtccaatgcacaatagcccctccgaaaggaaggaaccgcttcacttcttgccccacttggggcagcctcttgttccagcctcttggaatgcccagcttgggtttctgagcttttctccctcatcctccccaatccccaaactccttctcctaccatgcctttctacgttctctttcttccaagcctagagccaccagcccagcttccttctctggaaaagcctggaaactgggcacagaaggactgtgtgcctgggtctaacatgtggtcccctttgtccctagcacctttaaggggaggggaagaattggagggcagcttgcctggacccctaacggctgttctcaggaacaggttcccaggcctggggtgtttgtggagatctgtctttctccaaagatttcatccaactcccctttcatcccactccctttcatcccatttttttctttctgtccttgagcccagtgagttcaataaaaaccaaaatatttggctctca

SEQ ID NO: 64009 - DNA, 3232 bp, Artificial Sequence
  derived and/or modified sequence
agtgcaactctccactgtttagtgattcacacggatgattcacacgtaggaatgcagtggaacccaggctcctgatatccatctgggtgagccagccagagggaccggctgtgtcagaggcaagcaaacaagtattagagtgcaagactgtgggcggagagaggaagcccgagccgccagcagggagcttcggagagagaaagcccaggaacatcccagagagagctgggcccatcctcagccctacccagccccgcagcccctagccctccgcccagaaacccagccctgtccggcgtgccgctcttctcctccaggccggctgctgctgcggccagcgttgccggggcatcccttcctccttcccatcatggcagtgtaccgcctgtgtgtgaccactggtccctacctgagggccggcacactggacaacatctctgtcacactggtgggcacgtgtggtgaaagccccaagcagcggctagatcgaatgggcagggacttcgcccctggatcggtacagaagtacaaggtgcgttgcacagcggagctgggtgagctcttgctgctgcgtgtacacaaggagcgctacgctttcttccgcaaggactcttggtactgtagccgcatctgtgtcaccgaaccggatggtagtgtatcccacttcccctgctatcagtggattgaaggctactgcaccgtggagctgaggccaggaacagcaagaactatttgtcaggactctcttcccctcctcctggatcacaggacacgggagctccgggcccgacaagaatgctaccgctggaagatctatgcccctggcttcccctgcatggtagacgtcaacagctttcaggagatggagtcagacaagaaatttgccttgacaaagacgacaacttgtgtagaccagggtgacagcagtgggaatcggtacctgcccggcttccccatgaaaattgacatcccatccctgatgtacatggagcccaatgttcgatactcagccaccaagacgatctcgctgctcttcaatgccatccctgcgtccttgggaatgaagcttcgagggctgttggatcgcaagggctcctggaagaagctggatgacatgcagaacatcttctggtgccataagaccttcacgacaaagtatgtcacagagcactggtgtgaagatcacttctttgggtaccagtacctgaatggtgtcaatcccgtcatgctccactgcatctctagcttgcccagcaagctgcctgtcaccaatgacatggtggcccccttgctgggacaggacacatgcctgcagacagagctagagagggggaacatcttcctagcggactactggatcctggcggaggcccccacccactgcctaaacggccgccagcagtacgtggccgccccactgtgcctgctgtggctcagcccccagggggcgctggtgcccttggccatccagctcagccagacccccgggcctgacagccccatcttcctgcccactgactccgaatgggactggctgctggccaagacgtgggtgcgcaactctgagttcctggtgcacgaaaacaacacgcactttctgtgcacgcatttgctgtgcgaggccttcgccatggccacgctgcgccagctgccgctctgccaccccatctacaagctcctactcccccacactcgatacacgctgcaggtgaacaccatcgcgagggccacgctgctcaaccccgagggcctcgtggaccaggtcacgtccatcgggaggcaaggcctcatctacctcatgagcacgggcctggcccacttcacctacaccaatttctgccttccggacagcctgcgggcccgcggcgtcctggctatccccaactaccactaccgagacgacggcctgaagatctgggcggccattgagagctttgtctcagaaatcgtgggctactattatcccagtgacgcatctgtgcagcaggattcggagctgcaggcctggactggcgagatttttgctcaggcgttcctgggccgggaaagctcaggtttcccaagccggctgtgcaccccaggagagatggtgaagttcctcactgcaatcatcttcaattgctctgcccagcacgctgctgtcaacagtgggcagcatgactttggggcctggatgcccaatgctccatcatccatgaggcagcccccaccccagaccaaggggaccaccaccctgaagacttacctagacaccctccctgaagtgaacatcagctgtaacaacctcctcctcttctggttggttagccaagaacccaaggaccagaggcccctgggcacctacccagatgagcacttcacagaggaggccccgaggcggagcatcgccgccttccagagccgcctggcccagatctcaagggacatccaggagcggaaccagggtctggcactgccctacacctacctggaccctcccctcattgagaacagcgtctccatctaaccacccccaaataccacccaagaagaaagaaaggtccaagcatgaggaggaccagttcctcaggtcctccagacccttccatcctccctgttctcagttcacctgaaccttctcttctgcacatggagacttttgcagccaagatggctctgacatcatacaaactgggccctgagctgtgagagaccagcacagcagcgtccaggttaaaagccgctgaccaaagtccaatgcacaatagcccctccgaaaggaaggaaccgcttcacttcttgccccacttggggcagcctcttgttccagcctcttggaatgcccagcttgggtttctgagcttttctccctcatcctccccaatccccaaactccttctcctaccatgcctttctacgttctctttcttccaagcctagagccaccagcccagcttccttctctggaaaagcctggaaactgggcacagaaggactgtgtgcctgggtctaacatgtggtcccctttgtccctagcacctttaaggggaggggaagaattggagggcagcttgcctggacccctaacggctgttctcaggaacaggttcccaggcctggggtgtttgtggagatctgtctttctccaaagatttcatccaactcccctttcatcccactccctttcatcccatttttttctttctgtccttgagcccagtgagttcaataaaaaccaaaatatttggctctc

SEQ ID NO: 64010 - DNA, 2532 bp, Artificial Sequence
  derived and/or modified sequence
atgcccagaggcgccttcagaccctgcctgcccgccctgtacttcgccttcctgacctgccccacccccgagcagagaatgagcggcacccaggcccccgacatccacctgggcgagcccgccagaggcaccggctgcgtgagaggcaagcagaccagcatcagagtgcaggactgcggcagaagagaggaggccagagccgccagcagagagctgagaagagagaaggcccaggagcaccccagagagagctgggcccacccccagccctaccccgccccccagcccctggccctgagacccgagacccagccctgccccgcctgcagaagcagcccccccggcagactgctgctgagacccgccctgcccggccaccccttcctgctgcccatcatggccgtgtacagactgtgcgtgaccaccggcccctacctgagagccggcaccctggacaacatcagcgtgaccctggtgggcacctgcggcgagagccccaagcagagactggacagaatgggcagagacttcgcccccggcagcgtgcagaagtacaaggtgagatgcaccgccgagctgggcgagctgctgctgctgagagtgcacaaggagagatacgccttcttcagaaaggacagctggtactgcagcagaatctgcgtgaccgagcccgacggcagcgtgagccacttcccctgctaccagtggatcgagggctactgcaccgtggagctgagacccggcaccgccagaaccatctgccaggacagcctgcccctgctgctggaccacagaaccagagagctgagagccagacaggagtgctacagatggaagatctacgcccccggcttcccctgcatggtggacgtgaacagcttccaggagatggagagcgacaagaagttcgccctgaccaagaccaccacctgcgtggaccagggcgacagcagcggcaacagatacctgcccggcttccccatgaagatcgacatccccagcctgatgtacatggagcccaacgtgagatacagcgccaccaagaccatcagcctgctgttcaacgccatccccgccagcctgggcatgaagctgagaggcctgctggacagaaagggcagctggaagaagctggacgacatgcagaacatcttctggtgccacaagaccttcaccaccaagtacgtgaccgagcactggtgcgaggaccacttcttcggctaccagtacctgaacggcgtgaaccccgtgatgctgcactgcatcagcagcctgcccagcaagctgcccgtgaccaacgacatggtggcccccctgctgggccaggacacctgcctgcagaccgagctggagagaggcaacatcttcctggccgactactggatcctggccgaggcccccacccactgcctgaacggcagacagcagtacgtggccgcccccctgtgcctgctgtggctgagcccccagggcgccctggtgcccctggccatccagctgagccagacccccggccccgacagccccatcttcctgcccaccgacagcgagtgggactggctgctggccaagacctgggtgagaaacagcgagttcctggtgcacgagaacaacacccacttcctgtgcacccacctgctgtgcgaggccttcgccatggccaccctgagacagctgcccctgtgccaccccatctacaagctgctgctgccccacaccagatacaccctgcaggtgaacaccatcgccagagccaccctgctgaaccccgagggcctggtggaccaggtgaccagcatcggcagacagggcctgatctacctgatgagcaccggcctggcccacttcacctacaccaacttctgcctgcccgacagcctgagagccagaggcgtgctggccatccccaactaccactacagagacgacggcctgaagatctgggccgccatcgagagcttcgtgagcgagatcgtgggctactactaccccagcgacgccagcgtgcagcaggacagcgagctgcaggcctggaccggcgagatcttcgcccaggccttcctgggcagagagagcagcggcttccccagcagactgtgcacccccggcgagatggtgaagttcctgaccgccatcatcttcaactgcagcgcccagcacgccgccgtgaacagcggccagcacgacttcggcgcctggatgcccaacgcccccagcagcatgagacagccccccccccagaccaagggcaccaccaccctgaagacctacctggacaccctgcccgaggtgaacatcagctgcaacaacctgctgctgttctggctggtgagccaggagcccaaggaccagagacccctgggcacctaccccgacgagcacttcaccgaggaggcccccagaagaagcatcgccgccttccagagcagactggcccagatcagcagagacatccaggagagaaaccagggcctggccctgccctacacctacctggacccccccctgatcgagaacagcgtgagcatctag

SEQ ID NO: 64011 - DNA, 2604 bp, Artificial Sequence
  derived and/or modified sequence
atgggcagaaacagaagctggggcaccctgggcagcggcagaaccagcacccccggccaccagagcggccccctgaccagaagaagagccgtgagccagctgtacagaagatacctgctgttcagcatcagcgccagcgaccccagcctgagaagcggcacccaggcccccgacatccacctgggcgagcccgccagaggcaccggctgcgtgagaggcaagcagaccagcatcagagtgcaggactgcggcagaagagaggaggccagagccgccagcagagagctgagaagagagaaggcccaggagcaccccagagagagctgggcccacccccagccctaccccgccccccagcccctggccctgagacccgagacccagccctgccccgcctgcagaagcagcccccccggcagactgctgctgagacccgccctgcccggccaccccttcctgctgcccatcatggccgtgtacagactgtgcgtgaccaccggcccctacctgagagccggcaccctggacaacatcagcgtgaccctggtgggcacctgcggcgagagccccaagcagagactggacagaatgggcagagacttcgcccccggcagcgtgcagaagtacaaggtgagatgcaccgccgagctgggcgagctgctgctgctgagagtgcacaaggagagatacgccttcttcagaaaggacagctggtactgcagcagaatctgcgtgaccgagcccgacggcagcgtgagccacttcccctgctaccagtggatcgagggctactgcaccgtggagctgagacccggcaccgccagaaccatctgccaggacagcctgcccctgctgctggaccacagaaccagagagctgagagccagacaggagtgctacagatggaagatctacgcccccggcttcccctgcatggtggacgtgaacagcttccaggagatggagagcgacaagaagttcgccctgaccaagaccaccacctgcgtggaccagggcgacagcagcggcaacagatacctgcccggcttccccatgaagatcgacatccccagcctgatgtacatggagcccaacgtgagatacagcgccaccaagaccatcagcctgctgttcaacgccatccccgccagcctgggcatgaagctgagaggcctgctggacagaaagggcagctggaagaagctggacgacatgcagaacatcttctggtgccacaagaccttcaccaccaagtacgtgaccgagcactggtgcgaggaccacttcttcggctaccagtacctgaacggcgtgaaccccgtgatgctgcactgcatcagcagcctgcccagcaagctgcccgtgaccaacgacatggtggcccccctgctgggccaggacacctgcctgcagaccgagctggagagaggcaacatcttcctggccgactactggatcctggccgaggcccccacccactgcctgaacggcagacagcagtacgtggccgcccccctgtgcctgctgtggctgagcccccagggcgccctggtgcccctggccatccagctgagccagacccccggccccgacagccccatcttcctgcccaccgacagcgagtgggactggctgctggccaagacctgggtgagaaacagcgagttcctggtgcacgagaacaacacccacttcctgtgcacccacctgctgtgcgaggccttcgccatggccaccctgagacagctgcccctgtgccaccccatctacaagctgctgctgccccacaccagatacaccctgcaggtgaacaccatcgccagagccaccctgctgaaccccgagggcctggtggaccaggtgaccagcatcggcagacagggcctgatctacctgatgagcaccggcctggcccacttcacctacaccaacttctgcctgcccgacagcctgagagccagaggcgtgctggccatccccaactaccactacagagacgacggcctgaagatctgggccgccatcgagagcttcgtgagcgagatcgtgggctactactaccccagcgacgccagcgtgcagcaggacagcgagctgcaggcctggaccggcgagatcttcgcccaggccttcctgggcagagagagcagcggcttccccagcagactgtgcacccccggcgagatggtgaagttcctgaccgccatcatcttcaactgcagcgcccagcacgccgccgtgaacagcggccagcacgacttcggcgcctggatgcccaacgcccccagcagcatgagacagccccccccccagaccaagggcaccaccaccctgaagacctacctggacaccctgcccgaggtgaacatcagctgcaacaacctgctgctgttctggctggtgagccaggagcccaaggaccagagacccctgggcacctaccccgacgagcacttcaccgaggaggcccccagaagaagcatcgccgccttccagagcagactggcccagatcagcagagacatccaggagagaaaccagggcctggccctgccctacacctacctggacccccccctgatcgagaacagcgtgagcatctag

SEQ ID NO: 64012 - protein, 786 aa, Artificial Sequence
  derived and/or modified sequence
MWALCSLLRSAAGRTMSQGRTISQAPARRERPRKDPLRHLRTREKRGPSGCSGGPNTVYLQVVAAGSRDSGAALYVFSEFNRYLFNCGEGVQRLMQEHKLKVARLDNIFLTRMHWSNVGGLSGMILTLKETGLPKCVLSGPPQLEKYLEAIKIFSGPLKGIELAVRPHSAPEYEDETMTVYQIPIHSVSQRRGVRDSSLVVAFICKLHLKRGNFLVLKAKEMGLPVGTAAIAPIIAAVKDGKSITHEGREILAEELCTPPDPGAAFVVVECPDESFIQPICENATFQRYQGKADAPVALVVHMAPASVLVDSRYQQWMERFGPDTQHLVLNENCASVHNLRSHKIQTQLNLIHPDIFPLLTSFRCKKEGPTLSVPMVQGECLLKYQLRPRREWQRDAIITCNPEEFIVEALQLPNFQQSVQEYRRSAQDGPAPAEKRSQYPEIIFLGTGSAIPMKIRNVSATLVNISPDTSLLLDCGEGTFGQLCRHYGDQVDRVLGTLAAVFVSHLHADHHTGLPSILLQRERALASLGKPLHPLLVVAPNQLKAWLQQYHNQCQEVLHHISMIPAKCLQEGAEISSPAVERLISSLLRTCDLEEFQTCLVRHCKHAFGCALVHTSGWKVVYSGDTMPCEALVRMGKDATLLIHEATLEDGLEEEAVEKTHSTTSQAISVGMRMNAEFIMLNHFSQRYAKVPLFSPNFSEKVGVAFDHMKVCFGDFPTMPKLIPPLKALFAGDIEEMEERREKRELRQVRAALLSRELAGGLEDGEPQQKRAHTEEPQAKKVRAQ

SEQ ID NO: 64013 - protein, 278 aa, Artificial Sequence
  derived and/or modified sequence
ILAEELCTPPDPGAAFVVVECPDESFIQPICENATFQRFGPDTQHLVLNENCASVHNLRSHKIQTQLNLIHPDIFPLLTSFRCKKEGPTLSVPMVQGECLLKYQLRPRREWQRDAIITCNPEEFIVEALQLPNFQQSVQEYRRSAQDGPAPAEKRSQYPEIIFLGTGSAIPMKIRNVSATLVNISPDTSLLLDCGEGTFGQLCRHYGDQVDRVLGTLAAVFVSHLHADHHTGLPSILLQRERALASLGKPLHPLLVVAPNQLKAWLQQYHNQCQEVLH

SEQ ID NO: 64014 - DNA, 2361 bp, Artificial Sequence
  derived and/or modified sequence
atgtgggcactctgttcactgctgcgctcagccgccggcagaacaatgtcacagggacggacgatctcacaagcccccgctcgacgggagagacctcgcaaagatcccttaaggcatctgaggactcgggaaaaaagaggacctagtggctgctcaggaggccctaatactgtttacttgcaggtggtagcagctggcagccgcgattcaggagccgccctgtatgttttctccgagtttaatcggtatcttttcaactgcggtgagggcgttcaaaggctcatgcaggaacacaagctcaaagtagcaaggcttgacaatatttttttgacgcgcatgcattggtctaatgtgggaggtctaagtggcatgatcctgacactcaaggagacggggctacccaaatgtgtcctttccggaccaccacaactcgagaagtacctagaagccatcaaaatattttcgggtccactcaagggaattgaacttgccgtaagaccgcacagtgcccctgagtacgaggacgagacgatgactgtgtaccaaattccaatccactcagtgtcccagcgcagaggggtgcgggactcctctctggtcgtggcttttatctgcaagctacatcttaaacgggggaatttcctagtgcttaaggcaaaagaaatgggactgccggtgggcacagctgctattgctcctatcatcgccgccgtaaaagatggaaagagcatcacacacgaaggaagagagattctggcagaagagttatgcacccctcccgatcctggtgccgcgtttgttgtcgtggagtgccctgacgagagttttatccaaccgatctgtgaaaatgcaacatttcaaaggtatcagggaaaggccgacgcgccggtggccctggtggtgcacatggctccagccagcgttctcgtcgatagcaggtatcagcagtggatggagcgttttggccctgatacccagcacttagtcctgaacgagaattgtgcctcggttcacaacctgaggagccacaagatccagacacagcttaatctgatccaccctgatatcttcccacttctgacctccttccgttgtaaaaaggaaggacccactctgtctgtgcctatggttcagggcgagtgccttctaaaataccagctccggccgcgcagggagtggcagcgggacgctatcatcacctgtaatcccgaggaattcattgttgaagcactccagctccccaatttccagcagagcgtccaggaatatagaagaagcgcacaagatggccctgccccagcagagaagcgatcccagtaccccgaaattatctttttaggaacaggaagtgcaattcccatgaaaatcaggaatgtatccgccactctggtgaacatttctcccgacacctccctcctgctcgactgcggtgaggggacattcggtcagctgtgtcggcattacggcgatcaggtggatcgggttttaggtaccctcgccgcagtattcgtgagtcacctacatgctgaccaccatactggactgccatctatacttttacagcgcgaacgggccctagcaagcttgggcaaaccgctgcatccgctattggtcgtagcacccaaccagctgaaggcatggctgcagcagtatcataaccagtgtcaggaagtgttgcaccacatcagcatgatcccagccaagtgtctgcaggagggagcggagatatcttcgccagctgtggagcgcctcattagcagtctcctccgcacctgtgacctagaggaattccagacttgtttggtgcgccattgcaaacacgcattcggctgcgctctcgtccacacgagcggatggaaggtggtgtactcaggcgatacgatgccttgcgaagctctcgtgagaatgggaaaggacgcgacgctgctcattcacgaggctacgcttgaggatgggcttgaagaagaagctgtagagaagactcattccactaccagccaggcgatctccgtcggaatgcgcatgaacgccgaatttattatgttgaatcatttcagtcagcggtacgcaaaagttccactgttctccccaaacttctccgagaaggtgggagtggcattcgatcacatgaaggtgtgttttggagatttccctacaatgccaaagttgataccccctcttaaagccttatttgcaggggacatagaggagatggaggagcggagagagaagcgcgaactacggcaggtccgggccgccctgctcagccgagagttagcgggtggtctagaagacggggaaccacagcaaaagagagcacatactgaggagccccaggccaagaaggtgcgagctcagtag

SEQ ID NO: 64015 - DNA, 837 bp, Artificial Sequence
  derived and/or modified sequence
atactggccgaagagctctgcaccccccctgatcctggggcggctttcgttgtagtagagtgccctgacgagagctttattcagcccatatgtgagaacgccacctttcaaagatttgggcctgacacccagcatctcgtcctcaatgagaactgcgcgtctgttcataacctgaggtcccacaaaatccagacacagttaaatctcatccaccctgatatcttccccctgctgaccagcttcaggtgtaagaaggaaggacccaccttgagtgtgccaatggtgcaaggtgaatgcttactgaagtatcagctcagaccacgccgagagtggcaaagggatgcgataatcacgtgcaatccagaagaattcatcgtggaagctctccagttgcctaactttcagcagtccgtgcaggagtaccggcgttcagcccaggacggtcctgcaccagccgagaagaggtctcagtatccagaaatcatattccttggcacaggctcagccatccccatgaaaataagaaatgtgtccgctacgctggtcaacatctccccggatacctctctgctcctggactgcggagaggggacctttggacagctgtgtaggcactatggagaccaggtcgaccgagtcctcgggacactggccgcggtctttgtgagccacttgcatgcggaccaccatacaggactgccatctatactcctgcagcgtgagcgcgctctggcctcacttggtaaacctctgcatccactgctcgtggttgcccctaaccagcttaaggcctggttgcaacaatatcacaatcagtgccaagaggtccttcactag

SEQ ID NO: 64016 - DNA, 2361 bp, Artificial Sequence
  derived and/or modified sequence
atgtgggccctgtgcagcctgctgcggtctgctgctggccgcaccatgagccagggccgcaccatcagccaggccccagcccggcgggagcggcccaggaaggaccccctgcggcacctgcggacccgggagaagaggggccccagcggctgcagcggcggccccaacacagtgtacctgcaggtggtggccgccggcagccgggacagcggggccgccctgtatgtgttcagcgagttcaaccgctacctgttcaactgtggggagggcgtgcagaggctgatgcaggagcacaagctgaaggtggcccggctggacaacatcttcctgaccaggatgcactggagcaatgtgggcggcctgagcggcatgatcctgaccctgaaggagaccggcctgcccaagtgtgtgctgagcggccccccccagctggagaagtacctggaggccatcaagatcttcagcggccccctgaagggcatcgagctggccgtgcggccccacagcgccccagaatatgaagatgagaccatgacagtgtaccagatccccatccacagcgtgtcccagaggagaggagtgcgggacagcagcctggtggtggccttcatctgcaagctgcacctgaagaggggcaacttcctggtgctgaaggccaaggagatgggcctgcctgtgggcacagctgccatcgcccccatcatcgctgctgtgaaggatggcaagagcatcacccatgagggccgggagatcctggccgaggagctgtgcaccccaccagaccccggggccgcctttgtggtggtggagtgcccagatgagagcttcatccagcccatctgtgaaaatgccaccttccagcgctaccagggcaaggcagatgcccctgtggccctggtggtgcacatggccccagcctctgtgctggtggacagccgctaccagcagtggatggagagatttggaccagacacccagcacctggtgctgaatgaaaactgtgcctctgtgcacaacctgcggagccacaagatccagacccagctgaacctgatccacccagacatcttccccctgctgaccagcttccgctgcaagaaggagggccccaccctgtctgtgcccatggtgcagggcgagtgcctgctgaagtaccagctgcggccccggcgggagtggcagagagatgccatcatcacctgcaaccctgaggagttcatcgtggaggccctgcagctgcccaacttccagcagagcgtgcaggagtaccgccgcagcgcccaggacggccctgccccagctgagaagaggagccagtacccagagatcatcttcctgggcaccggcagcgccatccccatgaagatcagaaatgtgtctgccaccctggtgaacatcagcccagacaccagcctgctgctggactgtggggagggcaccttcggccagctgtgccgccactacggggaccaggtggacagagtgctgggcaccctggccgctgtgtttgtgagccacctgcatgctgaccaccacacaggcctgcccagcatcctgctgcagcgggagcgggccctggccagcctgggcaagcccctgcaccccctgctggtggtggcccccaaccagctgaaggcctggctgcagcagtaccacaaccagtgccaggaggtgctgcaccacatctccatgatcccagccaagtgcctgcaggagggcgctgagatcagcagccctgctgtggagcggctcatcagcagcctgctgcggacctgtgacctggaggagttccagacctgcctggtgcgccactgcaagcacgccttcggctgtgccctggtgcacaccagcggctggaaggtggtgtacagcggggacaccatgccctgtgaggccctggtgaggatgggcaaggatgccaccctgctgattcatgaggccaccctggaggatggcctggaggaggaggccgtggagaagacccacagcaccaccagccaggccatctctgtgggcatgaggatgaatgctgagttcatcatgctgaaccacttcagccagagatatgccaaggtgcccctcttcagccccaacttcagcgagaaggtgggcgtggcctttgaccacatgaaggtgtgcttcggggacttccccaccatgcccaagctgatcccccccctgaaggccctgtttgctggggacatcgaggagatggaggagcggcgggagaagcgggagctgcggcaggtgcgggccgccctgctgagccgggagctggccggcggcctggaggatggagagccccagcagaagagggcccacacagaggagccccaggccaagaaggtgcgggcccagtag

SEQ ID NO: 64017 - DNA, 837 bp, Artificial Sequence
  derived and/or modified sequence
atcctggccgaggagctgtgcaccccaccagaccccggggccgcctttgtggtggtggagtgcccagatgagagcttcatccagcccatctgtgaaaatgccaccttccagagatttggaccagacacccagcacctggtgctgaatgaaaactgtgcctctgtgcacaacctgcggagccacaagatccagacccagctgaacctgatccacccagacatcttccccctgctgaccagcttccgctgcaagaaggagggccccaccctgtctgtgcccatggtgcagggcgagtgcctgctgaagtaccagctgcggccccggcgggagtggcagagagatgccatcatcacctgcaaccctgaggagttcatcgtggaggccctgcagctgcccaacttccagcagagcgtgcaggagtaccgccgcagcgcccaggacggccctgccccagctgagaagaggagccagtacccagagatcatcttcctgggcaccggcagcgccatccccatgaagatcagaaatgtgtctgccaccctggtgaacatcagcccagacaccagcctgctgctggactgtggggagggcaccttcggccagctgtgccgccactacggggaccaggtggacagagtgctgggcaccctggccgctgtgtttgtgagccacctgcatgctgaccaccacacaggcctgcccagcatcctgctgcagcgggagcgggccctggccagcctgggcaagcccctgcaccccctgctggtggtggcccccaaccagctgaaggcctggctgcagcagtaccacaaccagtgccaggaggtgctgcactag

SEQ ID NO: 64018 - DNA, 2361 bp, Artificial Sequence
  derived and/or modified sequence
atgtgggccctgtgcagcctgctgcggagcgccgccggccggaccatgagtcagggtagaacgataagccaagctccagcgaggcgcgagaggcctcgcaaggatcctttgagacatctgcggactcgcgagaagcgtggcccgtctggttgttcaggtggccctaacactgtttacctccaagttgttgctgcaggctctagggatagcggagctgctttatatgtgttcagcgaattcaacaggtatctttttaattgcggcgagggcgtgcagaggctcatgcaagaacataaattaaaagtggccagactggataatattttcctgacccgcatgcattggagcaatgtgggtggcctgagcgggatgattctgaccttgaaggaaaccgggttgcccaagtgcgtgctgtcagggcctccccagctcgaaaagtatctggaggctattaaaatcttctctggtcccttgaaaggcatcgagctagccgttcgtccccattcagccccagagtatgaagacgagacaatgacagtgtaccagataccaatccactccgtcagtcagagaaggggcgtaagggatagcagtctggtggtggcttttatatgcaaactgcatctgaaacgcggcaacttccttgtgcttaaggcgaaggagatggggcttcccgtcgggacagccgccattgcgcccataatcgccgcagtcaaggacggcaagtctatcacccatgaaggcagagaaatactagcggaggagctgtgcacacccccagaccccggagctgcattcgtcgtggtggagtgccctgacgaatccttcatacagccaatctgtgagaatgccacatttcagcgctatcagggaaaagcagacgcccccgttgcgctcgtcgttcatatggcccccgcttctgtcctggtggattctcggtaccagcaatggatggaacgattcggacccgacacgcagcatctggtacttaacgagaactgcgctagtgtgcataacctccggagccataaaatacagacccagttaaatctgattcacccggacatcttccccctgttgaccagctttcggtgcaaaaaagaggggccaacactgagcgtcccaatggtgcagggcgagtgtctcctcaagtaccaactccggcctaggcgcgagtggcagagggacgcaattattacctgtaacccagaagaattcatcgtagaagctttgcagctgccaaactttcagcagagcgtacaggagtaccgccgctcggctcaagacggaccagcccctgccgaaaaacggtctcagtaccccgaaattatatttctgggtactggctccgccatacccatgaaaattcggaacgttagcgctaccctcgtgaacatcagcccagacacttctttgctgttggactgtggggaagggacgttcggccaactatgcagacactatggggaccaggtcgacagagttctgggcacacttgccgccgttttcgtttcccatctgcacgcagatcaccacacgggacttcccagtatcctgttgcagagagaacgggcactggctagcctggggaaaccattgcatccccttctagtggtggcacctaatcagttaaaggcctggctgcaacagtatcacaatcagtgtcaagaagtgctgcaccatatctccatgatcccagcaaaatgtttgcaggagggagccgagatcagttcgccagccgtcgaacgcctaatttcttctctgctccggacatgtgatctggaggagtttcagacctgcctggttcgccattgcaagcacgccttcgggtgcgccttggtccacacaagtgggtggaaggtggtgtactccggcgatacaatgccctgtgaagccctagtccggatgggtaaagatgctacactactgatccatgaggctacgttggaagacggtttggaagaggaggccgttgagaaaactcatagcaccacatcgcaagctatatccgtgggaatgcgcatgaatgccgagttcattatgctgaaccacttctcccagcgctacgcaaaagtacccctgttctcccctaatttctcagagaaggtcggggttgctttcgaccacatgaaggtctgctttggggacttccctaccatgcccaaactcataccacctctgaaggccctttttgccggcgacatagaagaaatggaagagcgacgcgaaaagcgcgagctcaggcaggtgcgcgccgcattgttgagtagagaacttgcaggaggattagaagacggagagccccaacagaagcgagcccacactgaggaaccgcaagctaaaaaggtcagggcacagtag

SEQ ID NO: 64019 - DNA, 837 bp, Artificial Sequence
  derived and/or modified sequence
atcctggccgaggagctgtgcaccccccccgaccccggcgccgccttcgtggtagtggaatgccctgatgaatcattcattcagcctatttgtgagaacgccacatttcaacgctttggtccagacacgcagcacctggttctcaatgaaaattgcgcatccgtccataacctccgctcccacaaaatccagactcagctcaacctaattcatccagatatcttccccctattgacaagctttcggtgtaaaaaagaggggcccaccctctcagtccccatggtacagggagagtgtttgcttaagtatcagttgagaccaaggagagaatggcagcgcgatgcaattataacgtgtaatcctgaagagtttatcgtggaggcgctccagctgcccaacttccagcagtctgttcaagagtatcgcagaagcgctcaggatggcccagcccccgcggaaaagcggtcccaataccccgagattatctttctgggaacaggaagtgccatccccatgaagattagaaacgttagcgccactctcgtcaacattagccctgatacctcactgttgctggactgcggggagggaactttcgggcagttgtgccggcattacggcgatcaggttgatcgcgtgttggggacgctcgcggccgtgttcgtcagtcacctgcacgccgaccaccacactggactcccatcaattctgctccagcgtgagcgcgccctggccagtctgggcaagcctctgcatcccctacttgttgtggcccccaatcagcttaaagcatggttgcagcagtatcacaaccaatgtcaagaggtgctgcattag

SEQ ID NO: 64020 - DNA, 2361 bp, Artificial Sequence
  derived and/or modified sequence
atgtgggctctgtgttctctgctaagaagtgccgctggtcgcactatgagccagggcagaacaatttctcaggccccagcgagacgtgaaaggccacggaaggatccgcttcgacacctacggaccagagagaagcgcggtccgtcggggtgtagtggaggcccaaacactgtatacctgcaggtggtcgccgcaggtagccgcgatagtggcgcagccctgtacgtcttcagcgagttcaatcgttatctttttaattgtggggaaggggtgcagcgccttatgcaggaacataagctgaaggtggcgcgattggataacatctttctaacccgcatgcactggagtaacgtgggaggcctttccggaatgattctgacccttaaagagaccgggctccccaagtgtgtactttcgggcccaccccagcttgagaaatacttggaggccatcaagatcttttcaggccctcttaaaggcatcgaactagctgttaggccacattcggctcccgagtacgaagacgaaacgatgactgtttatcagattcctattcactcagtaagccaacggagaggcgtgagagactcgtcattggttgtggctttcatctgcaagttgcacctgaagcgtgggaattttttggtgctgaaagccaaggagatgggcctcccagtggggaccgctgccattgccccaataatagctgcagttaaagacggaaaatcgattacgcatgagggacgcgaaattctcgccgaggaactctgcaccccacctgatcccggtgccgcttttgtggtggtcgagtgcccggacgagtccttcattcagcccatttgcgaaaatgccaccttccaacgctaccaagggaaagccgacgctccagtggcgctggttgtccatatggccccagcttcagtgctcgtcgactctcggtatcaacagtggatggagcgattcggccctgatacccaacacctggtcctaaatgagaactgcgcctctgtgcacaatctgcgttcgcataagatccaaacacagctgaatctgatacatccagatattttcccactcctgacatcgttccggtgcaaaaaagagggcccaaccctcagcgttcccatggtgcagggtgagtgcctccttaaatatcagctcagaccccgacgggagtggcaaagagacgccatcatcacctgcaacccagaggagtttatagtggaggctctgcagctcccaaacttccagcagtccgtgcaagagtatcgcaggtccgctcaggatggtccagcacctgcagagaaaagaagccagtatcccgaaattatcttcttgggcacaggatctgcgattcccatgaagatccgcaacgtgagtgccacattggttaatatcagccctgatacttcgctcctgctcgattgcggagaaggcacattcgggcagctgtgtagacattacggtgaccaagttgacagagtgctggggaccctggctgctgtcttcgtgagtcacttgcacgcggaccatcacaccggcctgcccagcatcctgctccaaagagaacgggctttggcctcccttgggaagccgctgcatccactacttgtcgttgctcctaaccagctcaaggcttggttacagcagtaccataatcagtgccaggaggtgttgcaccatatatcgatgatccctgctaaatgcctccaggagggggcagaaatcagctcacccgcagtcgaaagattgatttctagcctgttacgcacatgcgatctcgaggagttccagacatgtctggtgcgacactgtaagcacgcctttgggtgcgcacttgtacacaccagtggatggaaggtggtgtatagtggcgacacaatgccctgtgaggcattggtgagaatgggcaaagatgctaccctgctaatccacgaggcaacacttgaagatgggctggaggaggaagccgtcgagaaaacacacagtactacaagtcaagcaatctctgtgggaatgcgcatgaatgcagagttcatcatgctgaatcatttctctcagcggtatgctaaggtgccactcttttctcccaacttctcagagaaagttggagtcgctttcgaccatatgaaggtttgttttggggactttccaaccatgccaaaactcataccacctctgaaagccttgttcgccggagatatagaggagatggaagagcgaagagagaagcgggaacttagacaggtcagagccgctcttctgagcagggagttagctggaggcctggaggacggggagccccaacagaagcgtgcacacacggaggagccccaggccaaaaaggttagagcccagtag

SEQ ID NO: 64021 - DNA, 837 bp, Artificial Sequence
  derived and/or modified sequence
atcctcgccgaagagctgtgcaccccacctgatcctggtgctgcttttgtggttgtggagtgcccagacgaatcctttattcagcccatatgcgagaatgctacgttccagcgttttggccctgacacgcagcatctggtcttaaacgagaattgtgcttctgtgcacaacttgaggtctcacaagatacagacccagctgaatctgatacatcccgatatctttcccctgctgacctcttttaggtgtaaaaaagagggccctacgctctccgtgcctatggtgcagggagaatgcctcctcaaatatcagctccgtcctcgacgagaatggcagagagatgcaatcatcacctgcaacccggaagaattcattgtcgaagcgttgcaacttcccaatttccaacagtctgtacaagagtatcggagatctgcccaggacggccctgcgcctgcagaaaaacgtagccaatacccagaaatcattttcctggggaccgggtccgcgattcctatgaagatacgtaacgtctccgcaacactggtgaatatctctccggacactagtcttttattggattgcggcgaggggacttttggacaactgtgccggcactatggagatcaggttgatcgcgtgcttgggacccttgccgcagttttcgtgagccatctgcacgcggaccaccatacgggactcccatctatacttctacagagggagcgggctctggctagcctgggcaagcctcttcatccgcttttggtggtggctccaaaccagcttaaggcctggctgcagcagtatcacaatcagtgtcaggaagtcctgcactag

SEQ ID NO: 64022 - DNA, 2361 bp, Artificial Sequence
  derived and/or modified sequence
atgtgggccctgtgcagcctgctgagaagcgccgccggcagaaccatgagccagggcagaaccatcagccaggcccccgccagaagagagagacccagaaaggaccccctgagacacctgagaaccagagagaagagaggccccagcggctgcagcggcggccccaacaccgtgtacctgcaggtggtggccgccggcagcagagacagcggcgccgccctgtacgtgttcagcgagttcaacagatacctgttcaactgcggcgagggcgtgcagagactgatgcaggagcacaagctgaaggtggccagactggacaacatcttcctgaccagaatgcactggagcaacgtgggcggcctgagcggcatgatcctgaccctgaaggagaccggcctgcccaagtgcgtgctgagcggccccccccagctggagaagtacctggaggccatcaagatcttcagcggccccctgaagggcatcgagctggccgtgagaccccacagcgcccccgagtacgaggacgagaccatgaccgtgtaccagatccccatccacagcgtgagccagagaagaggcgtgagagacagcagcctggtggtggccttcatctgcaagctgcacctgaagagaggcaacttcctggtgctgaaggccaaggagatgggcctgcccgtgggcaccgccgccatcgcccccatcatcgccgccgtgaaggacggcaagagcatcacccacgagggcagagagatcctggccgaggagctgtgcaccccccccgaccccggcgccgccttcgtggtggtggagtgccccgacgagagcttcatccagcccatctgcgagaacgccaccttccagagataccagggcaaggccgacgcccccgtggccctggtggtgcacatggcccccgccagcgtgctggtggacagcagataccagcagtggatggagagattcggccccgacacccagcacctggtgctgaacgagaactgcgccagcgtgcacaacctgagaagccacaagatccagacccagctgaacctgatccaccccgacatcttccccctgctgaccagcttcagatgcaagaaggagggccccaccctgagcgtgcccatggtgcagggcgagtgcctgctgaagtaccagctgagacccagaagagagtggcagagagacgccatcatcacctgcaaccccgaggagttcatcgtggaggccctgcagctgcccaacttccagcagagcgtgcaggagtacagaagaagcgcccaggacggccccgcccccgccgagaagagaagccagtaccccgagatcatcttcctgggcaccggcagcgccatccccatgaagatcagaaacgtgagcgccaccctggtgaacatcagccccgacaccagcctgctgctggactgcggcgagggcaccttcggccagctgtgcagacactacggcgaccaggtggacagagtgctgggcaccctggccgccgtgttcgtgagccacctgcacgccgaccaccacaccggcctgcccagcatcctgctgcagagagagagagccctggccagcctgggcaagcccctgcaccccctgctggtggtggcccccaaccagctgaaggcctggctgcagcagtaccacaaccagtgccaggaggtgctgcaccacatcagcatgatccccgccaagtgcctgcaggagggcgccgagatcagcagccccgccgtggagagactgatcagcagcctgctgagaacctgcgacctggaggagttccagacctgcctggtgagacactgcaagcacgccttcggctgcgccctggtgcacaccagcggctggaaggtggtgtacagcggcgacaccatgccctgcgaggccctggtgagaatgggcaaggacgccaccctgctgatccacgaggccaccctggaggacggcctggaggaggaggccgtggagaagacccacagcaccaccagccaggccatcagcgtgggcatgagaatgaacgccgagttcatcatgctgaaccacttcagccagagatacgccaaggtgcccctgttcagccccaacttcagcgagaaggtgggcgtggccttcgaccacatgaaggtgtgcttcggcgacttccccaccatgcccaagctgatcccccccctgaaggccctgttcgccggcgacatcgaggagatggaggagagaagagagaagagagagctgagacaggtgagagccgccctgctgagcagagagctggccggcggcctggaggacggcgagccccagcagaagagagcccacaccgaggagccccaggccaagaaggtgagagcccagtag

SEQ ID NO: 64023 - DNA, 837 bp, Artificial Sequence
  derived and/or modified sequence
atcctggccgaggagctgtgcaccccccccgaccccggcgccgccttcgtggtggtggagtgccccgacgagagcttcatccagcccatctgcgagaacgccaccttccagagattcggccccgacacccagcacctggtgctgaacgagaactgcgccagcgtgcacaacctgagaagccacaagatccagacccagctgaacctgatccaccccgacatcttccccctgctgaccagcttcagatgcaagaaggagggccccaccctgagcgtgcccatggtgcagggcgagtgcctgctgaagtaccagctgagacccagaagagagtggcagagagacgccatcatcacctgcaaccccgaggagttcatcgtggaggccctgcagctgcccaacttccagcagagcgtgcaggagtacagaagaagcgcccaggacggccccgcccccgccgagaagagaagccagtaccccgagatcatcttcctgggcaccggcagcgccatccccatgaagatcagaaacgtgagcgccaccctggtgaacatcagccccgacaccagcctgctgctggactgcggcgagggcaccttcggccagctgtgcagacactacggcgaccaggtggacagagtgctgggcaccctggccgccgtgttcgtgagccacctgcacgccgaccaccacaccggcctgcccagcatcctgctgcagagagagagagccctggccagcctgggcaagcccctgcaccccctgctggtggtggcccccaaccagctgaaggcctggctgcagcagtaccacaaccagtgccaggaggtgctgcactag

SEQ ID NO: 64024 - DNA, 3683 bp, Artificial Sequence
  derived and/or modified sequence
agctcggtgcacggcgcgctgattggctggatccgccatgcggagcggctaggtggtgcacgggaaacgcgggcgtaggtgaccggcggctttctcagttttggtggagacgggcgcatgtgggcgctttgctcgctgctgcggtccgcggccggacgcaccatgtcgcagggacgcaccatatcgcaggcacccgcccgccgcgagcggccgcgcaaggacccgctgcggcacctgcgcacgcgagagaagcgcggaccgtcggggtgctccggcggcccaaacaccgtgtacctgcaggtggtggcagcgggtagccgggactcgggcgccgcgctctacgtcttctccgagttcaaccggtatctcttcaactgtggagaaggcgttcagagactcatgcaggagcacaagttaaaggttgctcgcctggacaacatattcctgacacgaatgcactggtctaatgttgggggcttaagtggaatgattcttactttaaaggaaaccgggcttccaaagtgtgtactttctggacctccacaactggaaaaatacctcgaagcaatcaaaatattttctggtccattgaaaggaatagaactggctgtgcggccccactctgccccagaatacgaggatgaaaccatgacagtttaccagatccccatacacagtgttagccagagaagaggggtcagggactcttccctggtcgtagctttcatctgtaagcttcacttaaagagaggaaacttcttggtgctcaaagcaaaggagatgggcctcccagttgggacagctgccatcgctcccatcattgctgctgtcaaggacgggaaaagcatcactcatgaaggaagagagattttggctgaagagctgtgtactcctccagatcctggtgctgcttttgtggtggtagaatgtccagatgaaagcttcattcaacccatctgtgagaatgccacctttcagaggtaccaaggaaaggcagatgcccccgtggccttggtggttcacatggccccagcatctgtgcttgtggacagcaggtaccagcagtggatggagaggtttgggcctgacacccagcacttggtcctgaatgagaactgtgcctcagttcacaaccttcgcagccacaagattcaaacccagctcaacctcatccacccggacatcttccccctgctcaccagtttccgctgtaagaaggagggccccaccctcagtgtgcccatggttcagggtgaatgcctcctcaagtaccagctccgtcccaggagggagtggcagagggatgccattattacttgcaatcctgaggaattcatagttgaggcgctgcagcttcccaacttccagcagagcgtgcaggagtacaggaggagtgcgcaggacggcccagccccagcagagaaaagaagtcagtacccagaaatcatcttccttggaacagggtctgccatcccgatgaagattcgaaatgtcagtgccacacttgtcaacataagccccgacacgtctctgctactggactgtggtgagggcacatttgggcagctgtgccgtcattacggagaccaggtggacagggtcctgggcaccctggctgctgtgtttgtgtcccacctgcacgcagatcaccacacgggcttgccaagtatcttgctgcagagagaacgcgccttggcatctttgggaaagccgcttcaccctttgctggtggttgcccccaaccagctcaaagcctggctccagcagtaccacaaccagtgccaggaggtcctgcaccacatcagtatgattcctgccaaatgccttcaggaaggggctgagatctccagtcctgcagtggaaagattgatcagttcgctgttgcgaacatgtgatttggaagagtttcagacctgtctggtgcggcactgcaagcatgcgtttggctgtgcgctggtgcacacctctggctggaaagtggtctattccggggacaccatgccctgcgaggctctggtccggatggggaaagatgccaccctcctgatacatgaagccaccctggaagatggtttggaagaggaagcagtggaaaagacacacagcacaacgtcccaagccatcagcgtggggatgcggatgaacgcggagttcattatgctgaaccacttcagccagcgctatgccaaggtccccctcttcagccccaacttcagcgagaaagtgggagttgcctttgaccacatgaaggtctgctttggagactttccaacaatgcccaagctgattcccccactgaaagccctgtttgctggcgacatcgaggagatggaggagcgcagggagaagcgggagctgcggcaggtgcgggcggccctcctgtccagggagctggcaggcggcctggaggatggggagcctcagcagaagcgggcccacacagaggagccacaggccaagaaggtcagagcccagtgaagatctgggagaccctgaactcagaaggctgtgtgtcttctgccccacgcacgcacccgtatctgccctccttgctggtagaagctgaagagcacggtcccccaggaggcagctcaggataggtggtatggagctgtgccgaggcttgggctcccacataagcactagtctatagatgcctcttaggactggtgcctggcacagccgcgggccaggaggctgccacacggaagcaagcagatgaactaatttcatttcaaggcagtttttaaagaagtcttggaaacagacggcggcacctttcctctaatccagcaaagtgattccctgcacaccagagacaagcagagtaacaggatcagtgggtctaagtgtccgagacttaacgaaaatagtatttcagctgcaataaagattgagtttgcaattgtgagttcttttgcttcctcctgctgctgctacagagcagggtctgctgtgcaccaccttggagaaggctctctgtgctgtagtgtggcagctgcctggtacccgggtggcttggaagaagtcagctcccgtcgtagtgagcacctctggaacctgtcctcagagagccacccttattcgccaagtctttttgacaactcgagctgtgccagctcacagcagggcgtgctttctctatcaatcaatcaatcaatcaatcaaatcaatcagtgagagcctggctgggctggtgtcattggtcagggaaatgcaagtcttctggtggttctgggtaaaagtggagacaatagatttgctgtgttgttgcttccatactgagaggagtgaggatcactttgccctcgaaggttttgagaaatggcacacggggctggtttccattgtcctccttgcgggatttacagacgtggattagtgctcgacaaatggagagcattttccaaggaagtaagtaagtaaagtaagtaagtaagtaagtaagttgaatctagtatttattgtgtatattccctacccaggagaatgtaaaaagaagagctttaaaaactcaaaagacaagcaagcgagagatcagccagggacctggctttacacaggtggtgaccttcaggctccatcccggtgtgcatttgagattgacggccatgtccccgcaggtttattaaagcaagaacagatgccaagctcagggataataaatctattttaataacgtt

SEQ ID NO: 64025 - DNA, 835 bp, Artificial Sequence
  derived and/or modified sequence
attttggctgaagagctgtgtactcctccagatcctggtgctgcttttgtggtggtagaatgtccagatgaaagcttcattcaacccatctgtgagaatgccacctttcagaggtttgggcctgacacccagcacttggtcctgaatgagaactgtgcctcagttcacaaccttcgcagccacaagattcaaacccagctcaacctcatccacccggacatcttccccctgctcaccagtttccgctgtaagaaggagggccccaccctcagtgtgcccatggttcagggtgaatgcctcctcaagtaccagctccgtcccaggagggagtggcagagggatgccattattacttgcaatcctgaggaattcatagttgaggcgctgcagcttcccaacttccagcagagcgtgcaggagtacaggaggagtgcgcaggacggcccagccccagcagagaaaagaagtcagtacccagaaatcatcttccttggaacagggtctgccatcccgatgaagattcgaaatgtcagtgccacacttgtcaacataagccccgacacgtctctgctactggactgtggtgagggcacatttgggcagctgtgccgtcattacggagaccaggtggacagggtcctgggcaccctggctgctgtgtttgtgtcccacctgcacgcagatcaccacacgggcttgccaagtatcttgctgcagagagaacgcgccttggcatctttgggaaagccgcttcaccctttgctggtggttgcccccaaccagctcaaagcctggctccagcagtaccacaaccagtgccaggaggtcctgcacc

SEQ ID NO: 64026 - protein, 2009 aa, Artificial Sequence
  derived and/or modified sequence
MEQTVLVPPGPDSFNFFTRESLAAIERRIAEEKAKNPKPDKKDDDENGPKPNSDLEAGKNLPFIYGDIPPEMVSEPLEDLDPYYINKKTFIVLNKGKAIFRFSATSALYILTPFNPLRKIAIKILVHSLFSMLIMCTILTNCVFMTMSNPPDWTKNVEYTFTGIYTFESLIKIIARGFCLEDFTFLRDPWNWLDFTVITFAYVTEFVDLGNVSALRTFRVLRALKTISVIPGLKTIVGALIQSVKKLSDVMILTVFCLSVFALIGLQLFMGNLRNKCIQWPPTNASLEEHSIEKNITVNYNGTLINETVFEFDWKSYIQDSRYHYFLEGFLDALLCGNSSDAGQCPEGYMCVKAGRNPNYGYTSFDTFSWAFLSLFRLMTQDFWENLYQLTLRAAGKTYMIFFVLVIFLGSFYLINLILAVVAMAYEEQNQATLEEAEQKEAEFQQMIEQLKKQQEAAQQAATATASEHSREPSAAGRLSDSSSEASKLSSKSAKERRNRRKKRKQKEQSGGEEKDEDEFQKSESEDSIRRKGFRFSIEGNRLTYEKRYSSPHQSLLSIRGSLFSPRRNSRTSLFSFRGRAKDVGSENDFADDEHSTFEDNESRRDSLFVPRRHGERRNSNLSQTSRSSRMLAVFPANGKMHSTVDCNGVVSLVGGPSVPTSPVGQLLPEVIIDKPATDDNGTTTETEMRKRRSSSFHVSMDFLEDPSQRQRAMSIASILTNTVEELEESRQKCPPCWYKFSNIFLIWDCSPYWLKVKHVVNLVVMDPFVDLAITICIVLNTLFMAMEHYPMTDHFNNVLTVGNLVFTGIFTAEMFLKIIAMDPYYYFQEGWNIFDGFIVTLSLVELGLANVEGLSVLRSFRLLRVFKLAKSWPTLNMLIKIIGNSVGALGNLTLVLAIIVFIFAVVGMQLFGKSYKDCVCKIASDCQLPRWHMNDFFHSFLIVFRVLCGEWIETMWDCMEVAGQAMCLTVFMMVMVIGNLVVLNLFLALLLSSFSADNLAATDDDNEMNNLQIAVDRMHKGVAYVKRKIYEFIQQSFIRKQKILDEIKPLDDLNNKKDSCMSNHTAEIGKDLDYLKDVNGTTSGIGTGSSVEKYIIDESDYMSFINNPSLTVTVPIAVGESDFENLNTEDFSSESDLEESKEKLNESSSSSEGSTVDIGAPVEEQPVVEPEETLEPEACFTEGCVQRFKCCQINVEEGRGKQWWNLRRTCFRIVEHNWFETFIVFMILLSSGALAFEDIYIDQRKTIKTMLEYADKVFTYIFILEMLLKWVAYGYQTYFTNAWCWLDFLIVDVSLVSLTANALGYSELGAIKSLRTLRALRPLRALSRFEGMRVVVNALLGAIPSIMNVLLVCLIFWLIFSIMGVNLFAGKFYHCINTTTGDRFDIEDVNNHTDCLKLIERNETARWKNVKVNFDNVGFGYLSLLQVATFKGWMDIMYAAVDSRNVELQPKYEESLYMYLYFVIFIIFGSFFTLNLFIGVIIDNFNQQKKKFGGQDIFMTEEQKKYYNAMKKLGSKKPQKPIPRPGNKFQGMVFDFVTRQVFDISIMILICLNMVTMMVETDDQSEYVTTILSRINLVFIVLFTGECVLKLISLRHYYFTIGWNIFDFVVVILSIVGMFLAELIEKYFVSPTLFRVIRLARIGRILRLIKGAKGIRTLLFALMMSLPALFNIGLLLFLVMFIYAIFGMSNFAYVKREVGIDDMFNFETFGNSMICLFQITTSAGWDGLLAPILNSKPPDCDPNKVNPGSSVKGDCGNPSVGIFFFVSYIIISFLVVVNMYIAVILENFSVATEESAEPLSEDDFEMFYEVWEKFDPDATQFMEFEKLSQFAAALEPPLNLPQPNKLQLIAMDLPMVSGDRIHCLDILFAFTKRVLGESGEMDALRIQMEERFMASNPSKVSYQPITTTLKRKQEEVSAVIIQRAYRRHLLKRTVKQASFTYNKNKIKGGANLLIKEDMIIDRINENSITEKTDLTMSTAACPPSYDRVTKPIVEKHEQEGKDEKAKGK

SEQ ID NO: 64027 - DNA, 6030 bp, Artificial Sequence
  derived and/or modified sequence
atggagcagacggtgttagtgccccctggaccggatagctttaactttttcacccgagagagcctggcagccatcgagcggcgcatcgctgaagaaaaggccaagaacccgaaacccgataaaaaggacgacgacgagaatggccctaaaccaaatagcgacctggaggcgggaaaaaacctgccttttatttatggagacatcccccccgaaatggtgtctgagcctttggaagatttagatccctattacataaataagaaaacttttatcgtcctgaacaaagggaaagccatcttccgattttctgctaccagcgcactgtacattctcacaccttttaatccattgaggaaaattgcaataaagatcctggttcatagcttgttcagcatgctcatcatgtgcacaatcctcactaactgtgtatttatgacaatgtccaacccccctgactggactaaaaatgtggaatataccttcaccggaatttatacattcgaatcccttattaaaattatagcgcgggggttttgcctggaagatttcacgttcctcagggacccttggaattggctggatttcactgtgattacctttgcatacgtgactgaattcgttgatctagggaacgtgagtgctctgagaacatttcgggtgctgcgagctctcaaaacaatatctgtcattcctggtctgaaaaccattgtcggagccttgattcagagcgtgaagaaattaagtgatgtcatgattctgaccgtgttttgtctgtccgtgtttgcccttatcggcctccaacttttcatggggaacctgcggaacaaatgcatccagtggccccccaccaacgcaagcctcgaagaacatagcatcgaaaagaacatcacggtgaactacaacggtaccctgataaacgagacagtcttcgagtttgattggaaatcatacatccaggactcccggtaccactatttcctggaagggtttctggacgccctgttatgcggcaacagttcagacgcaggacagtgccccgaaggttatatgtgcgtaaaggccggacggaatcccaattatggttatacatcatttgataccttcagctgggcctttttgtccctattccgacttatgacccaggatttttgggagaatctgtaccagttgaccctgcgggcagcaggcaagacatatatgatatttttcgtgctcgtgattttccttggctccttttacctgattaacctcatcctggcggtggtggctatggcgtacgaggaacaaaatcaggccaccctggaagaagccgagcagaaagaggccgaattccagcagatgatagaacagcttaaaaagcagcaagaagcagcacaacaagccgccaccgccaccgcctcggagcattcgagggaaccatccgcagcaggtaggttgtctgactccagctcagaggcctctaaattatcttcgaagagcgccaaggagcgccgtaatagacgaaagaaacgtaagcagaaagagcagagcgggggggaagagaaggatgaagacgagttccagaagtcagagagcgaagacagcattagaagaaagggcttcagattttccatcgaggggaatcgcctgacttacgaaaagcgctactcgagccctcatcaaagcctgctcagtatacggggcagcttgttctcaccccgcaggaactctcgtaccagcctcttcagcttcagaggtcgtgccaaggatgtggggtccgagaatgacttcgcggacgacgagcattcgacatttgaggacaacgagtctagaagagactcactgttcgttccccggcgtcatggcgagcggcgtaactcgaacctgtctcagacaagtcggtccagccgaatgctggctgtgttcccggctaatggtaagatgcactccaccgtagactgcaatggagttgtatctctggtgggcggtccgtcagtgccaacaagcccagtaggtcagttgcttccagaggtgataatcgataagccagcgactgatgacaacggaacgaccactgaaactgaaatgaggaagaggcggagctcttcattccatgtctccatggacttcttggaagacccttcacagcgccagcgagcgatgtctattgcctctatcctaactaatacagtagaggagttagaggaaagccggcagaagtgccccccatgctggtataagttcagtaatatattcctgatttgggattgcagcccttattggcttaaagtcaaacatgtggtgaatttagtggtaatggacccattcgtggacctcgcaatcacgatctgcatcgtcctaaacacccttttcatggccatggaacactaccccatgaccgaccactttaacaacgtgcttactgttggtaacctcgtctttactggaatctttaccgcagagatgtttttgaagattattgcaatggacccatactactatttccaggaaggctggaacatttttgacgggtttattgtgaccctctcactcgtcgaactgggtctcgccaatgtcgaaggcctttctgttttaagatctttccggctgctgagagtgtttaaacttgccaagtcttggcccacgctcaatatgctaatcaagattattgggaatagtgtaggggccctcggaaacctgacactagtgctcgcaattattgtttttatatttgccgtcgttgggatgcagctgttcgggaagtcctacaaggactgcgtttgcaagattgcgtcagactgccagttaccacgttggcacatgaacgattttttccactcattccttatcgtcttccgagtactctgtggtgagtggattgagaccatgtgggactgtatggaggtggcggggcaggcaatgtgtctaactgtgttcatgatggttatggtcatcggaaacctcgtagttctgaacctctttctggcgctcctcctgtctagtttctccgccgacaatttggccgctaccgacgacgataatgaaatgaacaatctccagatcgccgtggaccgtatgcacaaaggtgtagcctacgtaaaaaggaaaatttacgagtttattcagcagagcttcatcaggaagcagaaaatccttgacgaaatcaaacccctcgatgacctcaacaacaaaaaggattcctgtatgtccaatcatactgctgaaataggaaaggacctcgattacttgaaagacgtcaatgggactacatccgggatagggacagggagcagcgtcgaaaagtacattatagacgaatccgattatatgtccttcatcaacaatccgagtttgactgtgactgtcccaatagccgtgggagagtcagacttcgagaacctcaatactgaggacttttccagtgagtccgacctcgaggaatcaaaggaaaagctgaacgaatcatcctcaagcagcgagggaagcacagtggatattggtgccccagtggaggaacagcctgtcgtggaacccgaggagacactggagcccgaagcatgttttacggaggggtgcgtccagcgcttcaagtgctgtcagatcaatgtggaagagggccgtgggaagcagtggtggaacctgcgcaggacgtgcttcagaatcgttgagcacaattggttcgagacctttattgtgttcatgattctgctgagttcaggcgccttggcctttgaggatatatacatcgatcagcgcaagacaataaagacaatgttagagtacgctgataaggtgttcacgtacatcttcatcctggagatgctgctcaagtgggtcgcttatggctaccaaacctacttcacaaacgcatggtgctggctggatttcctgattgtggacgtttcactcgtcagtcttactgccaatgctctgggatattccgaattaggcgccatcaagtctctgcggactctcagagccctgagaccacttcgcgccctctccaggtttgagggtatgcgcgttgttgtcaatgctctactgggcgccattccatcaataatgaacgtgctgctggtgtgccttattttttggttaatctttagtatcatgggagtcaacctgtttgccgggaagttctaccactgcattaacactacaacaggggacaggtttgacatcgaagacgtcaacaaccacactgactgtctcaagttgattgaaaggaatgagactgctcgttggaagaatgtcaaggtgaatttcgataacgttggcttcggttatctgtccttgcttcaggtcgccactttcaagggttggatggacattatgtacgcggccgttgactctaggaacgtggagctccagccaaagtatgaggaatcactgtacatgtacctgtacttcgtcatattcatcatctttggcagcttcttcacactcaatttgtttattggggtcatcattgataactttaaccaacagaagaagaagtttggtggtcaggatatatttatgacggaagagcagaaaaagtactacaacgccatgaagaaactaggcagcaaaaagcctcaaaagcctattcccaggcctggaaataagtttcagggcatggtcttcgatttcgttacccgccaagtgttcgacatcagcatcatgatcctcatttgtttaaacatggttacaatgatggtggagaccgatgaccaaagtgagtacgtaactacaatcctgtcccgcataaatcttgttttcattgttttgttcaccggtgaatgcgtcctcaaactgattagtctccgccattattattttaccatcggctggaacatttttgattttgtcgtggtcattctgtctatcgtgggaatgtttcttgcagagctaatagagaagtacttcgtgtcacctactctgttcagggttattagacttgcacggattggacgaatcctgcggctgataaagggcgctaaaggtattcgtaccctgctctttgccctgatgatgtccctcccggcgctgttcaatattggattgctgttgtttctcgtgatgtttatttacgctattttcgggatgtccaattttgcttatgttaagagagaggtagggattgatgacatgtttaatttcgaaacattcggcaatagcatgatttgcctcttccagattacgacaagtgctggatgggatggactgctggcccccatcctgaatagtaaacctcctgactgtgatcccaacaaggtgaaccccggttcgagcgtcaaaggagattgcggaaacccgagtgtaggcatcttttttttcgtgtcatatatcatcatctcatttctcgtcgtggttaatatgtacatcgccgtgatcttggaaaacttcagcgtggcaacagaggagagcgcagagcccctctctgaagatgattttgagatgttctacgaggtctgggagaagttcgatccagacgccacccagtttatggagttcgaaaagctcagccagttcgcggccgcactggagcctcccctcaaccttccgcagcccaataaactacagctgattgcaatggacctgcctatggtctccggagacaggattcactgcctagacatccttttcgcatttacaaaacgagttttgggggaaagtggagagatggacgccctcaggatccagatggaggagcggttcatggctagtaaccccagcaaggtctcataccaacctatcacaacaacactgaagcgcaaacaggaggaggtgtcagccgtgatcatacagcgagcctaccggagacatctgttaaaaaggactgtgaaacaagcaagcttcacgtataataagaacaaaatcaagggaggcgcaaatctcctgatcaaggaggacatgataatagatcgtatcaatgaaaacagtataacggaaaagacagacctgactatgagcaccgccgcatgcccaccgtcttacgaccgtgtgactaagccaatcgtggaaaagcacgaacaagaggggaaggacgagaaggctaaaggaaaatag

SEQ ID NO: 64028 - DNA, 6030 bp, Artificial Sequence
  derived and/or modified sequence
atggagcagacagtccttgtcccccctggccctgactcctttaatttctttactagagaaagtcttgccgcaatcgagcgacggatcgccgaggagaaggccaagaacccaaaaccggataagaaagatgatgacgaaaatggacccaagccgaactcggatctggaagccggcaaaaatctcccctttatctatggcgacattcctcccgagatggtcagtgagccccttgaggatcttgacccttactatatcaataagaaaaccttcatagtgcttaacaaagggaaagcgattttccggtttagcgcaactagcgccttgtatattttgacacctttcaaccccttaagaaagatcgccatcaagattctggtacatagcctttttagtatgctgatcatgtgcactatcctgaccaactgtgtctttatgacaatgtccaacccccccgattggaccaagaatgttgaatacactttcactggtatctacacattcgagtctttaattaagatcattgcccgggggttttgcctcgaggacttcaccttcctgagagatccatggaattggttagatttcactgtgataacattcgcttatgtgactgagtttgtcgatctgggcaatgtgagcgccctgaggacatttcgggttctccgggcactcaagactataagcgtcattcctggtctcaagacaatcgtcggcgcacttatccagtcagtaaaaaagttatctgacgtgatgatattgaccgtgttttgcctgtctgtgttcgctcttataggactccaactgtttatgggaaacctgagaaacaagtgcattcaatggccaccgacaaacgcctcacttgaagaacactccatcgaaaagaacattacagtgaactataacgggaccctcattaacgaaactgtcttcgaatttgattggaaatcttacattcaggactccagataccattatttcttggaggggtttctcgatgcactgctttgcggcaacagcagtgacgctgggcagtgccccgaaggctacatgtgtgtgaaggccggaagaaaccccaattacgggtatacttccttcgacacgttctcctgggcctttctgtcgctcttccgacttatgactcaggatttctgggagaatctctaccagttaacgctacgtgccgcgggcaagacttatatgatctttttcgtgctcgttatttttttaggatctttctatctgattaacctgattctagctgtcgtagctatggcttatgaagaacagaaccaagccacactcgaagaagctgagcagaaagaggcagagttccagcagatgattgagcagcttaagaaacagcaggaggcagctcagcaagcagccacggctactgcatccgagcatagcagagagccatccgctgccgggaggctgagcgattctagctctgaagcaagcaaactgtctagtaagagtgccaaggaacggagaaatcgccgaaaaaaacgaaagcagaaagaacagtcgggtggggaggagaaagatgaagatgagttccagaagtccgagtcggaggatagcatacgcagaaaggggtttcggttttcgatcgagggaaacagacttacctatgaaaaacgctattccagcccgcatcagtcgctactgtctattcgtgggtctctattcagccccagacgaaacagcaggacctctctgtttagtttccggggcagggccaaggatgttggatctgagaacgactttgcagacgacgaacactccacgttcgaagacaacgaatcaagacgggactcgcttttcgtcccgagacgccatggcgaacggcgcaactcaaacttgtcacagacaagcagatcctccagaatgctagcagtttttccggccaatggtaagatgcactcaacggtagattgtaatggcgtggtgtcactggtcggcggcccttctgttccaacatcccctgtagggcagctgctccccgaggtcattattgataaaccagcgaccgatgacaatgggacaacaaccgaaactgaaatgcggaaacgccgatctagttcatttcacgtatctatggacttcctggaagatccgagccaacgtcagcgtgccatgagtattgcctctatcctgaccaatactgtggaagagctcgaggagtcacgacagaaatgtccaccctgttggtataagttttctaatattttcctgatttgggactgtagcccatactggctgaaggtgaaacacgtggtgaacctggtggtcatggaccccttcgtcgatctcgctattacgatctgcattgtgctgaatacactgtttatggctatggaacattaccctatgactgaccacttcaataacgtgttgacggttgggaatttggtgttcacaggcatcttcaccgcagaaatgtttctgaagatcatcgccatggatccctactactactttcaagaaggatggaatatattcgatggcttcatcgttaccctgagtctggtcgagcttggtctggccaatgttgagggactctcagtgctgcgaagttttcgcctgctgcgcgtgtttaaattagctaagtcttggcctaccctaaacatgctgatcaaaatcataggaaattctgtgggggctctggggaatctgaccctcgttctcgccataattgtgtttatttttgccgtggtcggaatgcagctgttcggaaagtcttacaaggactgcgtctgtaaaatcgcttcggactgtcagctaccaaggtggcatatgaatgatttctttcactcatttctcattgttttccgggtcctgtgtggcgagtggattgaaacaatgtgggactgcatggaagtcgcgggacaggcaatgtgcctgaccgtatttatgatggtcatggttatcggtaacttggtcgtcctcaatctcttcttggccttgctgctgtctagcttctccgccgacaacctagccgcaaccgacgatgataacgagatgaataacctccagatcgctgtcgaccggatgcacaagggtgtcgcttacgtcaagaggaaaatctacgaatttatccagcagtcattcatcaggaagcagaagatcctagacgaaattaaacctcttgacgacttgaataataaaaaagatagctgcatgagtaaccatactgctgaaattggcaaggacctggactaccttaaggatgtgaacggaactaccagcggcatcggcaccggatcgagtgtcgaaaagtatatcatcgacgaatcagattacatgagttttatcaataatccatctttaaccgtcactgtcccgattgctgttggcgagagcgatttcgaaaatctgaacaccgaggatttctccagtgaatcagaccttgaggaaagtaaggagaagctgaatgaatcatcttcctcctccgaaggcagcactgtggatataggtgcaccagtggaggaacagcctgtcgttgaacctgaggaaaccctggagcccgaggcctgttttactgaaggttgtgttcagaggtttaagtgttgtcagatcaacgtggaagaagggcgcgggaaacaatggtggaatctacgacgaacgtgttttcggatcgttgagcataactggttcgaaaccttcatcgtgtttatgatcctcctttcaagtggtgccctagcgtttgaggacatctacatcgaccaaaggaagactatcaaaactatgctcgagtacgcggacaaagtgtttacgtatatcttcattctggagatgttgctcaagtgggttgcctacgggtaccagacatactttactaatgcttggtgttggttggactttctgattgttgacgtgagtctcgtgtctctcactgctaacgcacttggctattcagaactgggggcaatcaagtctctccgcaccctacgtgctcttagaccattgcgcgcactctcccggtttgagggtatgagggtcgttgtgaatgccttactcggcgcaattccctccataatgaacgttctccttgtctgcctcattttttggctgatcttttcaattatgggggtgaatctattcgccggcaagttctaccactgcattaataccactacaggggaccggtttgatatcgaagacgtgaataaccacacagactgcctgaaattaattgaacggaacgagaccgcaaggtggaaaaacgtgaaagtcaattttgacaacgtagggttcgggtatctgagcttactgcaggttgccacttttaaaggctggatggacattatgtatgccgcagtggattcccggaacgtcgagttacagccaaagtatgaggagtcactgtatatgtacctctatttcgtaatattcataatattcggttccttctttacgctgaacctctttatcggtgtgatcattgacaatttcaaccagcagaagaagaagttcggcggacaggacatctttatgacggaggaacagaagaaatactataacgccatgaagaaattaggctcaaagaagccccagaagccaattccacgccccggaaacaagttccagggcatggtcttcgactttgtcacacgacaagtgtttgatattagtattatgatactgatatgtcttaacatggttaccatgatggtggagactgatgaccaatctgagtatgtaacgacaatattgagccggatcaacctggtatttatcgtgctcttcaccggcgaatgtgtcctcaagcttatctctctgcgacactactattttaccatcggatggaatatcttcgacttcgtggtggtgatcctgtccatcgtgggcatgtttttggcagaacttatcgaaaagtacttcgtgagcccaactctctttagagtgatccgtctggctcgcatcgggcgcatcctgaggctcatcaagggcgccaaagggatcaggactttgctgtttgcactgatgatgagcctgccagcactgttcaacatcgggctattgttattccttgtgatgttcatctatgcaatatttgggatgtcaaactttgcatatgtaaaacgggaggtgggaattgacgatatgttcaatttcgaaacttttgggaacagtatgatctgtctgttccaaatcaccacatcagccggctgggatggtctgctagccccaatattgaactcaaaaccacctgattgtgatccaaacaaggtgaacccagggtctagcgtgaagggggattgcggcaacccttctgttggcatcttctttttcgtaagttatataatcatttcattcttggttgtcgttaatatgtacatcgctgttatattagagaactttagtgttgctaccgaggagtccgccgagccattatccgaggatgatttcgagatgttctacgaagtctgggaaaaattcgaccccgacgccactcaatttatggaattcgagaaacttagtcagtttgcagctgccctggagccccccctgaatctgccacaacctaataagctccaacttatcgccatggacctacccatggtgtctggggaccggatccactgtctggatatcttgtttgctttcacaaagcgggttctgggtgagtcaggcgagatggacgccctgcgaattcagatggaggagagatttatggcttctaatccttccaaggtgtcttaccaacctataacaaccaccctaaaacgaaagcaggaggaagtgtctgccgtgattattcaaagggcctacaggagacatctgctcaaaaggacggtgaaacaggcttcatttacctataacaagaacaagatcaagggcggggccaacttgctcattaaggaggacatgatcatcgacaggataaatgagaatagcatcacagagaagacagatctcactatgtctacggccgcttgccccccctcctatgaccgtgtcaccaagcccattgtggaaaagcatgagcaggaaggcaaggatgagaaggcgaaaggcaagtag

SEQ ID NO: 64029 - DNA, 6030 bp, Artificial Sequence
  derived and/or modified sequence
atggagcagacagtgctggtgcccccaggccctgacagcttcaacttcttcacccgggagagcctggccgccattgaaagaagaattgctgaggagaaggccaagaaccccaagccagacaagaaggatgatgatgaaaatggccccaagcccaacagcgacctggaggccggcaagaacctgcccttcatctatggagacatccccccagagatggtgtctgagcccctggaggacctggacccctactacatcaacaagaagaccttcatcgtgctgaacaagggcaaggccatcttccgcttcagcgccaccagcgccctgtacatcctgacccccttcaaccccctgaggaagatcgccatcaagatcctggtgcacagcctcttctccatgctgatcatgtgcaccatcctgaccaactgtgtgttcatgaccatgagcaaccccccagactggaccaagaatgtggagtacaccttcaccggcatctacacctttgagagcctcatcaagatcatcgcccggggcttctgcctggaggacttcaccttcctgcgggacccctggaactggctggacttcaccgtcatcacctttgcctacgtgacagaatttgtggacctgggcaatgtgtctgccctgcggaccttccgggtgctgcgggccctgaagaccatcagcgtcatccctggcctgaagaccatcgtgggcgccctgatccagagcgtgaagaagctgagtgatgtgatgatcctgaccgtcttctgcctgtctgtgtttgccctgattggcctgcagctgttcatgggcaacctgaggaacaagtgcatccagtggccacccaccaatgccagcctggaggagcacagcattgagaagaacatcaccgtgaactacaacggcaccctcatcaatgagaccgtgtttgaatttgactggaagagctacatccaggacagccgctaccactacttcctggagggcttcctggatgccctgctgtgtggcaacagcagtgatgctggccagtgcccagagggctacatgtgtgtgaaggccggcaggaaccccaactacggctacaccagctttgacaccttctcctgggccttcctgagcctcttccggctgatgacccaggacttctgggagaacctgtaccagctgaccctgcgggctgctgggaagacctacatgatcttctttgtgctggtgatcttcctgggcagcttctacctgatcaacctgatcctggccgtggtggccatggcctatgaggagcagaaccaggccaccctggaggaggccgagcagaaggaggccgagttccagcagatgattgagcagctgaagaagcagcaggaggccgcccagcaggccgccacagccacagccagcgagcacagccgggagcccagcgctgctggccgcctgagtgacagcagcagcgaggccagcaagctgagcagcaagagcgccaaggagaggaggaacagaaggaagaagaggaagcagaaggagcagagcggcggggaggagaaggatgaagatgagttccagaagtctgagagcgaggacagcatccggaggaagggcttccgcttcagcattgagggcaaccggctgacctatgagaagcgctacagcagcccccaccagagcctgctgagcatccggggcagcctcttcagccccaggaggaacagcaggaccagcctcttctccttccggggccgggccaaggatgtgggctctgaaaatgactttgctgatgatgagcacagcacctttgaagataatgaaagccggcgggacagcctgtttgtgccccggcggcacggggagaggaggaacagcaacctgagccagaccagccgcagcagcaggatgctggccgtgtttcctgccaacgggaagatgcacagcacagtggactgcaatggagtggtgtccctggtgggcggccccagcgtgcccaccagccctgtgggccagctgctgcctgaggtgatcatcgacaagccagccacagatgacaatggcaccaccacagaaacagagatgaggaagaggaggagcagcagcttccacgtgtccatggacttcctggaggaccccagccagaggcagagggccatgagcatcgccagcatcctgaccaacacagtggaggagctggaggagagccggcagaagtgccccccctgctggtacaagttcagcaacatcttcctgatctgggactgcagcccctactggctgaaggtgaagcacgtggtgaacctggtggtgatggacccctttgtggacctggccatcaccatctgcatcgtgctgaacaccctcttcatggccatggagcactaccccatgacagaccacttcaacaacgtgctgactgtgggcaacctggtgttcaccggcatcttcaccgctgagatgttcctgaagatcatcgccatggacccctactactacttccaggagggctggaacatctttgatggcttcatcgtgaccctgagcctggtggagctgggcctggccaacgtggagggcctgtctgtgctgcggagcttccggctgctgcgggtcttcaagctggccaagtcctggcccaccctgaacatgctgatcaagatcatcggcaacagcgtgggcgccctgggcaacctgaccctggtgctggccatcatcgtgttcatctttgctgtggtgggcatgcagctgtttgggaagagctacaaggactgtgtgtgcaagatcgccagtgactgccagctgccccgctggcacatgaatgacttcttccacagcttcctgattgtgttccgggtgctgtgtggggagtggattgagaccatgtgggactgcatggaggtggccggccaggccatgtgcctgaccgtcttcatgatggtgatggtgattggcaacctggtggtgctgaacctcttcctggccctgctgctgagcagcttctctgctgacaacctggccgccacagatgatgacaatgagatgaacaacctgcagattgctgtggacaggatgcacaagggcgtggcctacgtgaagaggaagatctatgagttcatccagcagagcttcatcaggaagcagaagatcctggatgagatcaagcccctggatgacctgaacaacaagaaggacagctgcatgagcaaccacacagctgagatcggcaaggacctggactacctgaaggatgtgaatggcaccaccagcggcatcggcaccggcagctctgtggagaagtacatcattgatgaaagtgactacatgtccttcatcaacaaccccagcctgactgtgacagtgcccatcgctgtgggggagagtgactttgagaacctgaacacagaggacttcagcagcgagagtgacctggaggagagcaaggagaagctgaatgaaagcagcagcagcagcgagggcagcacagtggacattggagcccctgtggaggagcagcctgtggtggagcctgaggagaccctggagcctgaggcctgcttcacagagggctgtgtgcagcgcttcaagtgctgccagatcaacgtggaggagggccggggcaagcagtggtggaacctgcggaggacctgcttccgcatcgtggagcacaactggtttgagaccttcatcgtgttcatgatcctgctgagcagcggggccctggcctttgaggacatctacatcgaccagaggaagaccatcaagaccatgctggagtatgctgacaaggtgttcacctacatcttcatcctggagatgctgctgaagtgggtggcctacggctaccagacctacttcaccaatgcctggtgctggctggacttcctgattgtggatgtgtccctggtgtccctgacagccaatgccctgggctacagcgagctgggcgccatcaagagcctgcggaccctgcgggccctgcggcccctgcgggccctgagcagatttgagggcatgagggtggtggtgaatgccctgctgggcgccatccccagcatcatgaatgtgctgctggtgtgcctgatcttctggctgatcttcagcatcatgggcgtgaacctgtttgctgggaagttctaccactgcatcaacaccaccactggagacagatttgatattgaagatgtgaacaaccacacagactgcctgaagctgattgaaagaaatgaaacagcccgctggaagaatgtgaaggtgaactttgacaacgtgggcttcggctacctgagcctgctgcaggtggccaccttcaagggctggatggacatcatgtatgctgctgtggacagcagaaatgtggagctgcagcccaagtatgaggagagcctgtacatgtacctgtactttgtgatcttcatcatcttcggcagcttcttcaccctgaacctcttcatcggggtcatcatcgacaacttcaaccagcagaagaagaagtttggaggccaggacatcttcatgacagaggagcagaagaagtactacaatgccatgaagaagctgggcagcaagaagccccagaagcccatcccccggcccggcaacaagttccagggcatggtgtttgattttgtgacccggcaggtgtttgacatcagcatcatgatcctgatctgcctgaacatggtgaccatgatggtggagacagatgaccagagtgaatatgtgaccaccatcctgagccgcatcaacctggtgttcatcgtgctcttcaccggagaatgtgtgctgaagctgatcagcctgcggcactactacttcaccatcggctggaacatctttgattttgtggtggtgatcctgagcatcgtgggcatgttcctggccgagctgattgagaagtactttgtgagccccaccctcttccgggtcatccggctggccagaattggccgcatcctgcggctcatcaagggggccaagggcatccgcaccctgctgtttgccctgatgatgagcctgcctgccctcttcaacatcggcctgctgctcttcctggtgatgttcatctatgccatcttcggcatgagcaactttgcctacgtgaagcgggaggtgggcattgatgacatgttcaactttgagaccttcggcaacagcatgatctgcctcttccagatcaccaccagcgctggctgggatggcctgctggcccccatcctgaacagcaagcccccagactgtgaccccaacaaggtgaaccctggcagctctgtgaagggggactgtggcaaccccagcgtgggcatcttcttctttgtgtcctacatcatcatctccttcctggtggtggtgaacatgtacatcgctgtgatcctggagaacttctctgtggccacagaggagagcgctgagcccctgtctgaagatgactttgagatgttttatgaggtgtgggagaagtttgatcctgatgccacccagttcatggagtttgagaagctgagccagtttgctgctgccctggagccccccctgaacctgccccagcccaacaagctgcagctgattgccatggacctgcccatggtgtctggggaccgcatccactgcctggacatcctgtttgccttcaccaagagggtgctgggggagagcggggagatggatgccctgcgcatccagatggaggagcgcttcatggccagcaaccccagcaaggtgtcctaccagcccatcaccaccaccctgaagaggaagcaggaggaggtgtctgctgtgatcatccagagggcctacagaagacacctgctgaagaggacagtgaagcaggccagcttcacctacaacaagaacaagatcaagggcggggccaacctgctgatcaaggaggacatgatcatcgaccgcatcaatgaaaacagcatcacagagaagacagacctgaccatgagcacagctgcctgccccccatcctatgacagagtgaccaagcccatcgtggagaagcatgagcaggagggcaaggatgagaaggccaagggcaagtag

SEQ ID NO: 64030 - DNA, 6030 bp, Artificial Sequence
  derived and/or modified sequence
atggagcagaccgtgctggtgccccccggccccgacagcttcaacttttttacccgcgagagtttggctgcgatcgaacgccgcattgcagaggaaaaggcgaagaaccccaaacccgataaaaaggatgacgatgaaaatgggccgaaacctaacagcgacctcgaggcgggaaaaaatctaccattcatctacggcgatatccccccagagatggtctccgagcctctcgaggatctggatccctactacatcaataaaaagaccttcattgtgttaaataaaggaaaggccatattccggttctccgccacaagtgctctatacattttaaccccctttaacccgctcaggaaaatcgcgatcaagatccttgtccactcacttttttccatgctcattatgtgcactattctcaccaactgtgtgtttatgacaatgtccaatccacccgactggacgaagaacgttgagtatacttttacaggtatctatacgttcgaaagcctgattaagataatcgccaggggattttgtctggaggatttcacatttctgagagacccatggaattggctcgacttcacggtgattacttttgcctatgtgactgaattcgtcgacctgggcaacgtgtccgccctgcggacctttagggtcttgcgagccctaaagacaatctcggtcatccccggactgaagacaatcgtgggggccttgattcagagtgtcaaaaaacttagcgacgtaatgattctgactgtgttctgccttagcgtcttcgcgctcattggtttgcagctgttcatgggcaatcttagaaacaagtgcattcagtggcccccgactaatgcttcgctcgaggaacacagtattgagaagaacatcaccgtgaactacaacggcaccctcatcaatgaaactgttttcgagttcgattggaagagctatatccaggactctcgataccactattttctggaaggattcctggacgccctgctatgcggcaattctagcgacgccgggcaatgtcctgagggctacatgtgcgttaaggcaggtcggaaccccaactatggctacacctcattcgacacattttcctgggcctttttgagcctgttcaggctgatgacacaagacttctgggagaacctctaccaactgactctgagagccgccggcaagacttatatgatttttttcgtgctggttatcttccttggttcattttacctgataaatttgatacttgcagtggttgcgatggcctacgaggaacagaatcaagccacattggaggaggccgaacagaaagaagctgagtttcagcagatgattgagcagctaaagaaacagcaggaggctgcacaacaggccgccacagccactgcaagtgagcactcccgggagccgagcgcggccggtaggctatccgatagcagctctgaagcgtctaaactctcgtccaaaagcgccaaggaacgtagaaatagaagaaagaagcgcaagcaaaaagaacaatccggtggggaagaaaaagacgaagacgagtttcagaaatctgagtccgaggatagcatccggaggaaaggattcaggttcagtatcgagggtaataggcttacatacgagaagcgctatagctcaccccatcagagcctgctctctataagggggtccttgttctccccccgtagaaactctcggacgtccttatttagctttaggggccgcgcaaaagacgtgggcagcgaaaacgacttcgccgatgatgagcactctacctttgaggacaacgaaagccgccgggattctcttttcgttcccagacggcacggtgaacgacggaactccaatctttcacaaaccagtaggtcctctcggatgctggcagtttttcccgctaacggaaaaatgcacagtaccgttgattgcaatggggtggtgtcgctcgtcggtggaccaagcgtcccaacatcccctgttggccagctgttgccagaagtaattattgacaaacctgccactgacgataacggcacaacaactgagactgaaatgcggaaacgaaggagttctagctttcacgtgagtatggactttctggaggaccctagtcaacgacaaagagctatgtcaatcgcttccattctgactaataccgtggaggaattggaagaatctcggcaaaagtgccctccctgttggtataagttctcgaacatattcctcatttgggattgctcaccctactggttgaaggtgaagcacgtggtcaatctcgttgtaatggacccttttgttgatttggccatcaccatttgcatagttttgaacactctgttcatggctatggagcattatccaatgaccgatcactttaataatgtgctgacggtcggtaatctggtgtttaccggcatttttacagccgagatgtttcttaagatcattgcaatggatccttattactactttcaggagggctggaacattttcgatggctttatcgttacactgagcctggttgagctcggtctggcaaatgtggagggtctttcagtgctgcggagtttccggctgctgcgcgtgttcaaactggccaagtcgtggcctactcttaatatgctgattaaaattatcggaaattctgtcggcgccctgggcaacctgaccctggtgctggctatcatcgtgtttatttttgcagttgtcggcatgcagttgtttggtaagagttacaaggattgcgtgtgcaagattgcttctgactgccaattgcccagatggcacatgaatgatttttttcactccttcctgatagtgtttagagttctgtgtggggagtggatcgaaacaatgtgggattgcatggaggtggctggacaggcaatgtgcctgactgtgtttatgatggtgatggtaatcggtaatctggtcgtcctgaacttatttctggcactgcttctgtcctccttctctgcggataatctcgccgccacagacgacgacaatgaaatgaataacctgcaaatcgccgtggatcgaatgcataaaggagtggcatacgtgaagcgcaagatatacgaatttatacagcagtcctttatccgaaaacagaaaatccttgacgagatcaaacccctcgacgatctgaacaacaaaaaagattcctgcatgtccaatcataccgctgagatcggtaaggatttggattatctcaaggacgtaaatggtaccacaagtggcatcggaacagggtccagcgttgaaaagtatatcattgatgagtctgattatatgtccttcattaacaatcccagcctgactgtgacagtcccaatagccgtgggcgagtccgattttgaaaatctcaacaccgaggattttagctctgagtctgatcttgaggagagcaaggaaaagttaaacgaatccagttcaagtagcgaggggagcactgtcgatatcggggcccctgtcgaggaacaaccggtggttgagcctgaagagacactcgaacctgaagcatgcttcaccgaaggctgtgttcagcgcttcaaatgctgccagatcaatgtcgaagaaggccgcgggaaacagtggtggaacctgcgccgcacatgttttagaatcgtggagcacaattggttcgagaccttcattgtgtttatgattctgcttagctccggagcactggcctttgaggacatctatattgaccagcggaaaaccataaaaactatgttggagtatgctgacaaagtgttcacttatatttttatcctggaaatgctcctgaagtgggtcgcatacgggtatcagacatattttaccaatgcgtggtgctggttggatttcttaatcgtagacgtgagtctcgtgagcctgaccgccaatgccttgggctacagtgaacttggagcaatcaagagccttagaaccctcagggccttgcgcccactgcgggctctgtcacgcttcgaagggatgagggtggtggttaacgcactcctgggcgccataccaagcatcatgaacgttctgctggtgtgtctcatcttttggctcatcttttccatcatgggggtcaatctttttgcaggtaagttttatcattgtattaatacaaccaccggtgacagatttgacatcgaagacgtgaacaatcacactgactgtttgaagttgatcgaacggaatgagaccgctcgctggaagaacgtcaaagttaactttgataacgtcgggtttggatatttatccctactccaggtggccacatttaaggggtggatggacatcatgtatgcagcagtggactccagaaacgtggaactgcaaccaaaatacgaggagtccctgtatatgtacctgtactttgtaatctttattatctttggatctttctttaccctgaacctgtttataggcgtcatcatagacaattttaaccaacagaagaagaagtttgggggccaggacattttcatgaccgaagagcagaaaaaatactataacgccatgaaaaagctcggctctaagaagccccaaaaaccaatacctcggcccggtaataagttccagggcatggtttttgatttcgtcaccagacaggtattcgacatttctatcatgatcctcatttgccttaatatggtgaccatgatggtggaaactgatgatcagtctgagtatgtgacaactatcttaagccgcattaatctcgttttcattgtactctttaccggagagtgtgtgctgaaactaatttccctacggcattactacttcactattggttggaacattttcgatttcgtagtcgtgatcctcagtatagtggggatgttcttggctgagttgatagaaaaatactttgtcagccctaccctatttcgggttatccgactggcaaggattggacgcatcttgaggctgataaaaggcgctaagggaatccggacgcttctttttgctctaatgatgtcactccctgccttgttcaacatcggattgctgctgttcttggtgatgttcatttacgcaatcttcggcatgtctaacttcgcatacgttaagcgagaagtgggaatagacgacatgtttaacttcgagacgtttggaaactccatgatctgcctgtttcagattaccacaagcgccggctgggacggcctgctggcccccatcctaaacagtaagccaccagattgtgaccccaacaaggttaatcctgggagttcagtcaagggagattgtgggaacccctccgttggaatatttttcttcgtctcatacattatcatctctttccttgtggtcgtgaacatgtacattgcagtgattctggaaaacttctcagttgcaaccgaggaaagcgcggagccactatcggaggacgacttcgagatgttttacgaggtgtgggagaagtttgacccggacgcaactcagttcatggagttcgagaagctctcccagtttgcagcagcactagaaccccctctgaatctccctcagcctaacaaactacagctgattgctatggacctgccgatggtatcaggcgataggatacactgtctcgatatcctcttcgcctttacaaaacgagtgcttggcgaatctggtgaaatggacgcccttcgcatccaaatggaggagcggtttatggcctccaatccatctaaggttagctatcagccgattactaccactctcaagagaaagcaggaagaggtcagtgcagtcattatccaaagggcctacagaaggcacctactgaagcggaccgtcaagcaggccagctttacttacaataaaaacaaaatcaaaggtggggccaacctcttgataaaagaggacatgataatagatagaattaacgagaactccatcactgaaaagaccgacctaacaatgagcacggccgcctgtccccctagctacgacagggtgaccaagcccattgttgaaaagcatgagcaagaaggcaaggatgagaaagcgaaagggaaatag

SEQ ID NO: 64031 - DNA, 6030 bp, Artificial Sequence
  derived and/or modified sequence
atggagcagaccgtgctggtgccccccggccccgacagcttcaacttcttcacgcgggaatcccttgcagcaattgaacggagaatcgctgaagaaaaagccaaaaaccctaagcctgataaaaaggatgacgacgaaaatggacctaagccaaattcggatctggaagcaggaaagaatttaccttttatttacggtgacatcccacccgagatggtttccgaaccccttgaagatctggatccatattacatcaacaaaaagaccttcatcgttctcaacaaaggcaaagctatcttccgattttcagccacttcagccctgtacattctgacccccttcaacccattgaggaaaattgctatcaagattctggttcatagtctattcagcatgctgattatgtgtactatcctcacaaattgtgtgttcatgaccatgtctaatccccccgattggacgaaaaacgtcgaatacaccttcacgggcatctacacctttgaatcacttatcaaaatcattgcccgagggttctgtctcgaagactttacattcttgcgcgacccttggaactggttggatttcacagtcattacctttgcctatgtgaccgagtttgtagacctggggaatgtcagtgccctgcggaccttcagagtcctgagagcgctgaaaacaatatctgtcattccagggctgaaaacaatcgttggagctctaatccaaagcgttaagaagctttccgacgtcatgatactgaccgtgttctgcctgagtgtgttcgctcttatcgggcttcagctgttcatgggcaatctgcgaaataaatgtatccaatggcctccaaccaacgccagtctcgaggaacacagtatcgaaaagaatattaccgtcaattacaacggcacccttatcaatgagaccgtttttgagtttgactggaaaagctatatccaggattccaggtaccactattttctcgagggcttccttgacgctctactgtgcgggaactcgagcgacgccggccagtgccccgagggttacatgtgtgtaaaggcaggcagaaatcctaactatggatataccagcttcgatacatttagctgggcgtttctgagtctgttcaggctcatgacacaagatttctgggagaatctatatcagctcacactccgggctgccgggaaaacgtacatgattttcttcgttcttgtgattttcctgggctcattttacctgattaatttaatcctcgcggtggtggcaatggcatacgaagagcagaaccaagcaacgttagaggaagcggagcaaaaagaggccgagtttcagcagatgatcgaacagttgaagaaacagcaggaggcagcccagcaggctgcaacagcaactgcctccgaacactcccgggagccctcagccgcaggccgtctttctgacagtagtagtgaggcaagcaagctgagtagtaaaagtgccaaagagcggcgtaatcggcggaagaaacgtaaacagaaagagcagtcgggtggggaagagaaggatgaggacgagtttcaaaaaagcgagtctgaagatagcatccgcagaaaaggatttcgattttcaattgaggggaatagactcacttacgaaaagcggtatagcagtccacatcagagccttctttctattaggggctccctcttcagccccaggagaaactctaggacgtccctattttcctttagaggtagggccaaggacgttggttcggaaaacgattttgctgatgatgaacactccacatttgaagacaacgagtcaaggcgggatagtctctttgtgcctaggcggcacggagaaaggcgcaacagtaacctgagccagacatccagaagcagcaggatgctcgccgtgtttcccgccaacggtaagatgcactcaactgtcgattgcaacggagttgtgtcactggtgggtggtccaagtgtgcctactagccctgtgggccaactactgcccgaagttattattgataaacccgccaccgacgataacggaacaaccacagagaccgagatgcgaaagaggcgttcttctagctttcatgtttccatggatttccttgaggacccatctcaacgccaaagagctatgagcatagcttcaatcctaactaacacagtggaggaactggaggagtctaggcagaaatgtcccccgtgctggtacaagttcagcaacattttcctcatatgggattgttctccgtactggctgaaagttaagcatgtcgtgaacctcgtggtgatggacccattcgttgatctcgccattaccatatgcatcgttctgaacacccttttcatggccatggaacactaccctatgactgaccactttaataacgtgttgactgtcggcaatctggtcttcaccggcatcttcactgccgaaatgtttctcaaaattattgcgatggacccttactactattttcaggagggctggaacatttttgatggctttatcgtgaccctgagcctcgtggaactgggactggcgaacgtggaaggtctctccgtgctgaggagtttcagattactgagagtgtttaagctggcgaagagctggccaaccctgaatatgctcataaaaatcatcggtaactctgtaggcgccctgggcaatttaacacttgtgctcgcaatcattgtgttcatttttgcggtcgtgggcatgcagctattcggaaagtcatacaaggattgcgtgtgcaagatagcctccgactgtcagctgccaaggtggcacatgaacgactttttccattcctttctaatcgtgtttcgcgtgctctgtggagagtggatcgagacaatgtgggactgcatggaggtcgccggtcaggccatgtgcctgaccgtctttatgatggtcatggtgattggcaatctcgtcgtcttgaacctttttctcgctctcctgctttctagcttcagcgccgacaatctggccgccacagatgatgacaatgagatgaataacctgcagatcgccgtggaccgcatgcataagggcgtcgcttacgtcaagagaaagatctatgaatttattcagcaatcgttcattcgtaaacagaagatactggacgagatcaaaccactggacgacctgaacaacaagaaggattcgtgcatgtctaaccataccgctgagattggtaaggacctggactacctgaaagatgtgaacggaaccacctctgggatagggacaggttcgtcggtggagaaatacatcatcgatgaatcggactacatgtctttcattaacaacccttcgcttaccgtcactgtgccaattgccgtgggtgagagcgattttgaaaacctgaacaccgaggatttctctagtgaatcagacctcgaagaatccaaggaaaagctaaacgagtcctcatccagcagcgagggaagtacagtggacattggcgctcccgttgaagagcagcctgtcgtggagcctgaggaaactctagagccagaggcatgcttcactgaaggctgcgtacagagattcaagtgctgccagatcaatgttgaagaggggagaggtaaacagtggtggaacctgaggcgcacctgctttagaattgtggagcataattggttcgagacattcatcgtattcatgatattgctctcctccggagcactggccttcgaggatatatacatcgatcagaggaagacaattaaaactatgctggaatacgcggacaaggtgtttacatacatctttattctggaaatgcttctgaaatgggtagcctacggatatcagacctattttacgaacgcatggtgttggctcgatttcctgatagttgatgtcagccttgtgagcctgaccgccaatgctctcggttatagcgaacttggcgccattaaatcactgcgaaccctcagagctctccgacccctgcgtgcattgtcccggttcgagggtatgagagttgtggtcaacgctttactcggcgcaattccaagcattatgaacgtgctgttggtttgtcttattttctggttaatcttcagtattatgggagtgaaccttttcgccggcaagttttatcactgcatcaacacaacaaccggcgatcgttttgacatcgaggacgtgaataaccacacggattgcctcaagcttatcgagagaaacgagactgcacgttggaagaacgtgaaggtgaacttcgataacgtcggcttcggctacctatctctactgcaggttgccacgttcaaggggtggatggacataatgtacgccgccgtggactcaagaaacgttgagctgcagcccaagtacgaggagagcctgtatatgtatttgtatttcgtcattttcatcattttcggatctttttttaccttaaatttgtttataggagtgatcatagataactttaaccagcagaaaaagaagttcggcggacaggacatctttatgactgaagagcagaaaaagtattataacgccatgaagaaattgggctctaaaaagccacagaagcctataccacgacctgggaacaagtttcagggaatggtgtttgatttcgttacccggcaagtgtttgacatatcaatcatgattctcatctgcctgaatatggtgacaatgatggtggaaaccgatgatcaatcagaatacgttaccaccattcttagtcgaattaacctggtctttattgtgctgtttaccggcgagtgtgtgttgaaactcatttccttaaggcattactatttcacaattggttggaatatctttgattttgtcgtggtgatcctaagcatagtaggtatgttcctcgcagagctgattgaaaaatacttcgtcagtcctacattgttccgtgtaattcggctggccaggattggtcgaatcctgagactgatcaagggcgcaaagggtatccgaacccttctcttcgctttaatgatgtcgcttcccgcactgttcaatatcggcctgctgttgtttctcgttatgttcatttacgcaatcttcgggatgtctaatttcgcttacgtaaagcgcgaagtgggcatcgacgacatgttcaacttcgagactttcggcaactcgatgatttgcctgtttcagatcactacaagtgccggatgggacggactgctggcccccatactcaactctaagccaccagattgtgaccccaataaggtgaatcccgggagttccgtgaagggggattgcgggaatccttcagtcggaatcttttttttcgtgagctacataatcattagctttctggtggtggttaacatgtatatcgcagtcatcctggagaatttttctgtagccacagaggagtctgcagagcctctgagtgaagatgatttcgagatgttttacgaagtttgggaaaaattcgacccggatgccactcagttcatggaattcgagaagctctcacagttcgcagcagctttagagccaccattaaacctaccacaaccaaataagctgcagttgattgcaatggacctcccgatggtgtcaggcgatcgaattcactgcctcgatattttgtttgcttttaccaaaagggtgctgggagagagtggtgagatggacgcgctccgtatacagatggaagaacgctttatggccagcaaccccagtaaggtctcttatcaaccaatcacaacaactctgaaaagaaagcaagaagaggtgtctgccgtgattattcagcgcgcatatcggcgacatctccttaagcgaaccgtgaaacaggcctctttcacttataataagaacaaaattaaaggaggcgcaaacctgctgatcaaagaggacatgataatcgatcgtattaacgagaacagcatcaccgagaaaactgacctgaccatgtctacagccgcctgtcctcccagctacgatcgggttacaaagcccatcgtagagaaacatgagcaggagggcaaagatgagaaggcgaagggcaaatag

SEQ ID NO: 64032 - DNA, 6030 bp, Artificial Sequence
  derived and/or modified sequence
atggaacaaaccgttctcgttccccctggtcccgacagctttaattttttcacacgagaatcgttggcagctatcgagcgacgaatcgctgaggaaaaagccaagaaccctaagccagataagaaggatgatgacgagaatggcccaaagcctaactctgatctggaagccggaaaaaacctaccatttatttatggtgatatcccacctgagatggtgtcagaacccctggaagacttggacccttactacatcaataagaaaaccttcatcgtgcttaataaaggcaaggcaatctttaggttctcggctacgtctgccttgtacattttgacgccgtttaaccccctcaggaaaatagctattaaaatcttagtccactctctctttagcatgctgataatgtgtactattctgacaaactgcgtgttcatgaccatgagcaacccaccagattggacaaagaacgtcgaatatacatttactggaatttataccttcgaaagcctcatcaaaatcattgctcggggtttttgcctggaggactttacatttctgcgggatccatggaactggctcgactttacagtcatcacgttcgcctatgtgaccgagtttgtggacctgggaaacgtgagtgccctgcgcacattccgggtcttacgagcactcaaaactatttccgtgattcctggtctgaaaaccattgtgggagccctcattcagtcggtaaagaaactgagtgacgtgatgatattgactgtattctgcctttccgtgttcgcactcataggattgcagcttttcatggggaacctgagaaacaagtgcatccagtggccacctaccaacgcttccctggaggaacactccatcgagaagaatattacagtcaactacaacggaacactgatcaatgagacagtttttgaattcgactggaagagttacatccaggatagccgctatcactatttccttgaagggttcctggacgcccttctgtgcggtaattccagtgacgccggtcagtgccccgaaggatatatgtgtgtgaaagctgggcgtaacccgaattacggatacacttcatttgatactttctcttgggccttcctgagtctttttcgactgatgacccaagatttttgggaaaacctttaccagcttactctgcgcgctgcaggcaagacatatatgatctttttcgtgctggtgatcttcctcggaagtttctatctcattaatctgatcctggccgtggttgccatggcctatgaggaacaaaaccaggctaccttagaggaagccgaacaaaaagaggccgaattccagcagatgattgagcagctgaagaagcagcaagaagccgctcaacaggctgccacggccaccgcatcagagcattcccgtgagcccagcgccgcaggcagactctctgactccagctcagaggccagcaaactgtcatccaagagtgcaaaagaaaggaggaatcgccgtaaaaagcgaaaacagaaagagcagtccggcggagaggagaaagacgaagatgagttccagaaaagcgagtctgaggattcaatccgtcggaaagggttcaggttctcaatagaagggaacaggcttacatatgaaaaacgatactcttcgccccaccagtccctcctctcgatacggggtagccttttttcgccccgaaggaattccaggacttccttgttctcctttagagggcgtgcaaaagacgtggggtctgagaatgacttcgcggacgacgagcattcgacgtttgaggacaacgagtcacgcagagacagtctcttcgtgcccaggcggcacggcgagcgtaggaacagcaacctatctcagactagccgctcgagcagaatgctggccgtgttccccgcaaatggtaagatgcactctaccgtggattgtaacggagtggtcagcctggttggaggcccttccgttcctacatcccctgttggtcagctgcttccagaagtgatcattgacaaacccgcaacggacgacaatggtaccactaccgaaaccgagatgcgcaagcggaggagctcaagtttccacgtgtcaatggatttcctcgaggatccatcacagcgacaacgcgcaatgagtatagcatcaattttgactaataccgtggaggaactggaggaaagccgacaaaaatgccctccctgctggtataagttcagcaacattttcctgatctgggattgttctccctactggttgaaggtaaaacatgtggttaatctggtcgtcatggacccatttgtggacttggccatcaccatctgtatcgttctgaacaccctctttatggctatggagcactatcctatgactgatcacttcaacaacgtgttgaccgtgggcaatctcgttttcaccggcatatttaccgctgaaatgtttctgaaaattatcgcgatggatccctactactatttccaggagggttggaatatttttgatggattcatcgtgactctgagcctcgttgagcttggtttggctaacgtggaaggactgtccgtgcttcgaagcttccggttactgcgcgtgttcaaactcgccaagagctggccaaccctgaacatgctgatcaagattataggaaactctgtgggcgctctgggtaatctgacattggtactcgccattatcgtattcatttttgcggtagtggggatgcaacttttcggtaaatcatacaaagactgtgtctgcaagattgcgagtgactgtcaattacctagatggcacatgaatgatttctttcacagttttttaatagtatttcgagtcttatgcggggagtggatagaaactatgtgggactgcatggaagttgcaggacaggcaatgtgcctgaccgtgttcatgatggttatggtcatcgggaacctggtggtcttgaacctgttcctcgccctcttactgtccagcttttccgcagataacctcgctgcgaccgacgatgacaatgaaatgaataacctgcaaatcgccgttgacaggatgcacaagggggtcgcctacgtcaaacgaaagatttatgaattcatccagcagtcctttattagaaagcagaaaattctggatgaaatcaagcccctcgacgatttaaacaacaagaaagattcctgtatgtctaatcacacagctgaaatcgggaaggatctagactatttaaaggacgttaatggtactacctcggggattgggactggctcatcagtggagaagtatatcattgatgagtctgattacatgtccttcatcaataacccttcactgaccgtcaccgtgcccatcgcagttggtgagagtgactttgagaatttgaataccgaggatttttccagcgagagtgatttggaagagtccaaggaaaagttgaatgagagtagctcatcttccgaagggagcactgtcgacatcggagccccagtggaagagcagcccgttgtcgagcccgaagaaaccctggagccagaagcttgttttactgaggggtgcgtgcagagattcaaatgctgccagatcaacgtcgaagaggggcgaggtaagcaatggtggaatctcaggcggacgtgtttcaggatcgttgagcataattggtttgaaacattcattgtcttcatgatcctactgagtagtggcgctctcgccttcgaagatatttacatcgatcagcgtaagacaatcaagaccatgctagaatacgccgacaaggtattcacctatatttttattctggagatgctgttaaaatgggtggcttacggataccagacttacttcacaaacgcttggtgttggttggacttcttgatcgtcgacgtgtccctagtgtctctgacggccaacgccctaggatattccgaactgggggctatcaagtccctccgcactctcagagctctgcgccctctgcgggcactgtcccggtttgaaggaatgcgagtggtggtgaacgccctgttaggcgctatcccctcaataatgaatgtcctgctggtctgtcttattttttggctcatctttagtatcatgggcgtcaatctgtttgccggtaaattctaccactgtattaatacaacaaccggggaccgcttcgacattgaggacgtaaacaatcatacggattgtcttaagctcattgagcgcaatgagactgcaagatggaagaacgtgaaggtgaatttcgacaacgtgggctttggctacctgtcgctccttcaggtcgccacgttcaaaggctggatggatatcatgtatgctgctgtggatagccggaatgttgagctgcagcctaagtatgaagagtctctctatatgtatttatacttcgtcatctttatcattttcggatccttctttaccctgaacctgttcatcggggtgatcatcgacaattttaaccagcagaaaaagaagttcggcggacaggacatcttcatgaccgaagaacagaaaaaatattacaacgctatgaaaaagttaggcagtaagaagccacagaagcccatccccagaccgggtaataaatttcaaggaatggtttttgacttcgtgacccgacaggttttcgacatttcaatcatgatcctcatttgcttaaacatggtgactatgatggtcgagacggacgatcagtctgagtatgtgacaaccatactgtctcgaatcaaccttgtgtttatagttctttttacaggggagtgcgtgctgaaactgatttcactgcgccattactattttaccatcggttggaacatattcgattttgtagtcgtgatactctctattgtgggcatgttccttgcagagctgattgagaagtattttgtcagcccgacattgtttagggtaatcagactggcccgaatcggacgaatattacgcttgattaaaggcgcaaagggaatccggactcttctgttcgctcttatgatgtctctccctgctctgttcaacatcggtttgctactgtttctggtaatgttcatttatgcaattttcgggatgtcaaactttgcttacgtgaagagagaggtcggcatcgatgacatgttcaacttcgagaccttcggcaacagcatgatctgcctgtttcaaatcaccacctctgcaggatgggatgggctcctggctcctatcctgaactccaaacctcccgactgcgatcccaacaaagtgaacccgggaagtagcgtcaagggggactgtggcaatccttctgtgggtatcttcttttttgtgtcctatatcataatttcattccttgtcgtggtgaatatgtatatcgccgtaatccttgaaaacttcagcgtagcaaccgaggagtcagcggaacctttgagcgaggatgatttcgagatgttctacgaggtatgggagaagttcgaccctgatgcaacccaattcatggagtttgaaaaactgtcccaattcgccgctgccttggaacccccactcaacctgccacagccaaacaaactgcagctgatcgctatggacctgcccatggtctctggggacagaatccattgcttagatatcttgtttgcctttaccaagcgggtactgggggagtcgggtgaaatggatgctctgcgcatacagatggaggaaagattcatggcttctaatcccagcaaagttagctatcagccaataaccactacacttaaacgcaagcaggaggaggtgagtgcagtcatcattcagagggcataccggagacacctgctgaagaggactgttaaacaggccagcttcacctacaacaagaacaagataaaagggggagccaacctgctgattaaggaggacatgattatcgacaggatcaacgaaaatagcattaccgaaaagactgacctgacaatgtcaacggcggcttgccccccatcttacgaccgcgtgacaaagccgatcgtagagaagcatgagcaggaaggcaaggacgagaaggccaagggtaagtat

SEQ ID NO: 64033 - DNA, 6029 bp, Artificial Sequence
  derived and/or modified sequence
atggagcagacggtgctcgtgccccctggacccgactcctttaatttttttacccgagagagtctagcggcaatcgagcgaaggattgcggaggaaaaagcaaaaaatccaaaacccgacaaaaaagacgatgacgagaacggaccgaagccaaactccgatttggaggctggcaagaatcttccattcatttacggcgacatacctccagagatggtttcagaacccctggaagacctggatccgtattatataaacaagaagaccttcatcgtcctgaataagggcaaagcaattttccgattctctgccacatccgccctttacattctgaccccttttaatccattacgtaagatcgctattaagatcttggtgcatagtctgttttccatgctcattatgtgcaccatattgacaaactgtgttttcatgacaatgtctaatccacctgattggacgaagaacgtggagtacacctttacaggcatatataccttcgaatccctgataaagattatcgctcgcggtttttgtctcgaagacttcacttttctgcgagatccatggaactggctggatttcacagtcattacttttgcttacgtcactgagttcgtggacctcggcaacgttagcgccttgagaaccttcagggtcttaagagctctgaaaacaatatcagtgatccctggcctaaagaccatcgtaggcgctcttattcagagtgtgaagaagctgtcagacgtgatgatcttgaccgttttttgcctcagtgtgtttgctctaataggcctccagctgttcatgggcaacctgaggaacaagtgtatccaatggccccctacaaacgcatccttggaagaacatagcattgagaaaaacataacagttaattataacgggaccctgatcaatgagaccgtttttgagtttgactggaagagttatatacaggactcccgctaccattactttctcgaaggctttttagatgccctgctgtgcggtaattcctctgatgccggtcagtgccctgaaggctacatgtgtgtgaaggctggacggaatcccaactacggatacacttcttttgatacattttcttgggccttcttatctctgttcagactaatgacccaagatttttgggaaaatctataccagctgaccttaagggcggcaggtaagacctacatgatctttttcgtgcttgtaatctttctgggcagtttctacctgataaatctcatcctcgccgtcgtcgccatggcctacgaggaacaaaatcaggccacactggaagaggccgaacagaaggaagccgagtttcagcaaatgattgaacaactgaaaaagcagcaggaggctgcacagcaagcggcaactgccactgcaagtgagcactctcgcgaaccctcagcagctggacgcctcagcgacagctcgtctgaggcttcgaagctgtcctccaagtcagctaaagaacggcgtaataggcggaagaaacgcaaacagaaggagcaatccggcggtgaggagaaggacgaggatgagttccagaagtccgaaagtgaggattccatcaggcgcaaaggtttcaggtttagtatagagggcaatagactcacgtacgagaagcgttactcatcacctcaccagtctttattgtcaatccgcggaagtctcttttcccctcgcaggaacagccggacaagcttgttctcatttcgcggaagggctaaggacgttgggtccgagaacgacttcgccgatgacgaacattcaacgtttgaggataacgagtcaagacgagacagcctgttcgtcccaaggaggcacggtgagcgccgaaacagtaatctgagccagaccagccgcagcagtcgaatgcttgctgtgtttccagctaacggcaaaatgcacagcaccgtcgactgcaatggagttgtttcgctggtgggcggtccttccgtccccaccagcccagtgggccagcttctacccgaagtgattatcgacaagccggctacagacgacaacggcactaccacggaaacggagatgaggaagcgtaggagctccagtttccacgtgtcgatggacttcctggaggacccctctcagcgacaaagggcaatgagcatcgcctctatactgactaatacagtggaggagcttgaggaaagcagacagaaatgcccaccttgctggtataaattctctaatatatttcttatttgggactgctccccatactggctgaaagtgaagcacgtcgtaaatctggttgttatggacccatttgtggatctcgctattaccatttgcatcgtcctgaatacactcttcatggctatggaacattacccaatgacagaccattttaacaatgtgctgacagtgggaaatctggtgtttacaggaatatttaccgcagagatgttcctcaagattatagccatggacccttactactactttcaggagggctggaatatctttgacggttttattgtgactctctctttggtggaactcggattggcaaacgtagaggggctctctgtactgcgctcctttcgcctacttcgtgtgttcaagctcgctaaatcttggcctaccctgaacatgttaataaagatcattggcaattcagtgggagcacttggcaacctgactcttgttctggccatcatcgtgttcatattcgcggtagtgggcatgcagctattcggtaagagctataaagactgtgtgtgcaaaatcgcaagtgactgccaactgcccaggtggcatatgaatgacttctttcattcttttctgattgtgttccgggtcctgtgtggagaatggattgaaaccatgtgggactgcatggaagtggctggacaagcaatgtgtctgaccgtattcatgatggttatggttatcggaaaccttgtggttttgaatctgtttctggcgctgttgctcagcagtttcagtgctgacaacctcgcggctaccgatgatgataacgagatgaacaacctccagattgccgtcgaccgcatgcacaaaggggtggcatacgtcaaacgcaagatttacgaatttatacagcagtcgtttatccgtaagcaaaaaatcctcgacgagatcaagccactggatgacctcaataataaaaaagatagctgcatgtccaatcacaccgctgagattggaaaggacctggactacctgaaagacgttaatggaaccacgtccgggattggtacgggatcgtcagtcgagaagtacatcatagacgaatctgactatatgtcttttattaacaacccgagcctcactgtcacagtccccattgccgtaggagaaagtgactttgagaacctcaataccgaggacttcagtagtgagtctgatctggaagagtcaaaagaaaagttaaacgagtcaagtagttccagcgaggggagtactgttgacattggagctccagtggaagagcagcccgttgtagagcctgaggagacgttggaacctgaggcttgcttcacggaaggctgcgtgcagcggttcaaatgctgtcaaattaacgtcgaggagggtcgaggcaagcagtggtggaacctgagaaggacctgctttcggatcgtggaacacaattggtttgagacatttatcgtcttcatgatactgctgagcagtggagcacttgcctttgaagacatttacatcgatcagagaaagacgattaagactatgctcgaatacgctgacaaggtattcacttatatctttattctcgaaatgctacttaagtgggtggcctacgggtatcaaacctattttaccaacgcctggtgctggttggatttccttatcgtagatgtatctctcgtcagcctaacagccaatgccctgggatattcagagcttggcgcaattaagtctctgagaaccctgagggcactacgtcccttgcgggcactcagccgattcgaaggtatgcgggtagtcgtgaacgcgttactgggcgctatccctagcatcatgaacgtactgctggtatgcctgattttttggttgatcttttccattatgggagtgaacctgttcgctgggaagttttatcactgtattaacaccactaccggggataggtttgacattgaggatgtgaataaccacaccgactgccttaaactaatagagaggaatgaaacagcacggtggaagaatgtgaaggtgaactttgataatgtcggctttggctatctctctctgctgcaagtggccacgtttaagggatggatggacattatgtacgctgcagtcgatagccgcaatgtcgaactgcagccaaaatatgaagagtcactttatatgtatctgtatttcgtaattttcataattttcggtagcttcttcactctgaaccttttcatcggtgtgattattgataactttaaccagcaaaagaaaaaatttgggggacaggatatctttatgaccgaggagcagaaaaagtactataatgccatgaaaaaactggggtctaagaaaccgcagaaacccattccacgccctggtaacaaatttcagggaatggtgttcgacttcgtgacacggcaggtgttcgacatctctatcatgattctcatttgtctaaacatggtcacaatgatggtcgagactgatgatcagtcagagtacgtgacaactatactgtcacgcatcaacttggtttttatagtactcttcaccggagaatgcgtactcaaactgatttctctgagacattactattttaccatcggctggaatatttttgattttgtggtggtgatcctctctatcgtcggcatgttcctggccgagctgattgagaaatattttgtgtctcctacactgtttcgggtgatccggctggctaggatcggtagaatcctacgcctgatcaagggggctaaggggatccgaactctgctcttcgctctgatgatgagcctcccagcgttattcaacataggcctgcttttgttcctggtgatgttcatttacgcaatcttcggaatgagtaacttcgcctatgtcaaaagagaggttgggattgacgacatgttcaatttcgagacgttcggcaacagcatgatctgtctattccagataaccactagcgcgggatgggatggtttactcgcacccattctgaactcaaagcctcctgactgcgacccgaacaaggtaaaccccggttctagtgtcaagggggactgtggcaatccctctgttggtatttttttttttgtgagttatattatcatctcgtttctggtggtcgttaacatgtatatcgcagtgatattagagaacttcagcgtggcaaccgaggaatcagcggagcccctgtccgaagacgacttcgaaatgttctatgaagtgtgggagaaatttgacccagacgcaacacagttcatggagtttgagaaattgtctcagtttgctgccgcactcgagcctccattgaacctgcctcaaccgaacaagttgcagctgattgccatggatctcccaatggtcagtggcgacaggatccactgcttagacattctgttcgcctttactaagagggtgctgggagagtctggcgagatggatgcccttcggattcagatggaagagcgctttatggcttctaatcctagcaaggtgagctatcagccaattactaccacattgaaaagaaagcaggaagaggtgtcagcagtgattattcagagagcttatcgcaggcacctcttgaaaagaacggtgaaacaggccagttttacatacaacaagaataagataaaagggggtgctaacttgctcattaaagaggatatgattattgatagaataaacgagaacagtatcacagagaagaccgacctaactatgagtaccgccgcttgccctccttcctatgatagagtgactaagcctattgtggagaagcatgaacaggagggaaaagatgagaaagccaaaggtaaata

SEQ ID NO: 64034 - DNA, 8112 bp, Artificial Sequence
  derived and/or modified sequence
atggagcaaacagtgcttgtaccaccaggacctgacagcttcaacttcttcaccagagaatctcttgcggctattgaaagacgcattgcagaagaaaaggcaaagaatcccaaaccagacaaaaaagatgacgacgaaaatggcccaaagccaaatagtgacttggaagctggaaagaaccttccatttatttatggagacattcctccagagatggtgtcagagcccctggaggacctggacccctactatatcaataagaaaacttttatagtattgaataaagggaaggccatcttccggttcagtgccacctctgccctgtacattttaactcccttcaatcctcttaggaaaatagctattaagattttggtacattcattattcagcatgctaattatgtgcactattttgacaaactgtgtgtttatgacaatgagtaaccctcctgattggacaaagaatgtagaatacaccttcacaggaatatatacttttgaatcacttataaaaattattgcaaggggattctgtttagaagattttactttccttcgggatccatggaactggctcgatttcactgtcattacatttgcgtacgtcacagagtttgtggacctgggcaatgtctcggcattgagaacattcagagttctccgagcattgaagacgatttcagtcattccaggcctgaaaaccattgtgggagccctgatccagtctgtgaagaagctctcagatgtaatgatcctgactgtgttctgtctgagcgtatttgctctaattgggctgcagctgttcatgggcaacctgaggaataaatgtatacaatggcctcccaccaatgcttccttggaggaacatagtatagaaaagaatataactgtgaattataatggtacacttataaatgaaactgtctttgagtttgactggaagtcatatattcaagattcaagatatcattatttcctggagggttttttagatgcactactatgtggaaatagctctgatgcaggccaatgtccagagggatatatgtgtgtgaaagctggtagaaatcccaattatggctacacaagctttgataccttcagttgggcttttttgtccttgtttcgactaatgactcaggacttctgggaaaatctttatcaactgacattacgtgctgctgggaaaacgtacatgatattttttgtattggtcattttcttgggctcattctacctaataaatttgatcctggctgtggtggccatggcctacgaggaacagaatcaggccaccttggaagaagcagaacagaaagaggccgaatttcagcagatgattgaacagcttaaaaagcaacaggaggcagctcagcaggcagcaacggcaactgcctcagaacattccagagagcccagtgcagcaggcaggctctcagacagctcatctgaagcctctaagttgagttccaagagtgctaaggaaagaagaaatcggaggaagaaaagaaaacagaaagagcagtctggtggggaagagaaagatgaggatgaattccaaaaatctgaatctgaggacagcatcaggaggaaaggttttcgcttctccattgaagggaaccgattgacatatgaaaagaggtactcctccccacaccagtctttgttgagcatccgtggctccctattttcaccaaggcgaaatagcagaacaagccttttcagctttagagggcgagcaaaggatgtgggatctgagaacgacttcgcagatgatgagcacagcacctttgaggataacgagagccgtagagattccttgtttgtgccccgacgacacggagagagacgcaacagcaacctgagtcagaccagtaggtcatcccggatgctggcagtgtttccagcgaatgggaagatgcacagcactgtggattgcaatggtgtggtttccttggttggtggaccttcagttcctacatcgcctgttggacagcttctgccagaggtgataatagataagccagctactgatgacaatggaacaaccactgaaactgaaatgagaaagagaaggtcaagttctttccacgtttccatggactttctagaagatccttcccaaaggcaacgagcaatgagtatagccagcattctaacaaatacagtagaagaacttgaagaatccaggcagaaatgcccaccctgttggtataaattttccaacatattcttaatctgggactgttctccatattggttaaaagtgaaacatgttgtcaacctggttgtgatggacccatttgttgacctggccatcaccatctgtattgtcttaaatactcttttcatggccatggagcactatccaatgacggaccatttcaataatgtgcttacagtaggaaacttggttttcactgggatctttacagcagaaatgtttctgaaaattattgccatggatccttactattatttccaagaaggctggaatatctttgacggttttattgtgacgcttagcctggtagaacttggactcgccaatgtggaaggattatctgttctccgttcatttcgattgctgcgagttttcaagttggcaaaatcttggccaacgttaaatatgctaataaagatcatcggcaattccgtgggggctctgggaaatttaaccctcgtcttggccatcatcgtcttcatttttgccgtggtcggcatgcagctctttggtaaaagctacaaagattgtgtctgcaagatcgccagtgattgtcaactcccacgctggcacatgaatgacttcttccactccttcctgattgtgttccgcgtgctgtgtggggagtggatagagaccatgtgggactgtatggaggttgctggtcaagccatgtgccttactgtcttcatgatggtcatggtgattggaaacctagtggtcctgaatctctttctggccttgcttctgagctcatttagtgcagacaaccttgcagccactgatgatgataatgaaatgaataatctccaaattgctgtggataggatgcacaaaggagtagcttatgtgaaaagaaaaatatatgaatttattcaacagtccttcattaggaaacaaaagattttagatgaaattaaaccacttgatgatctaaacaacaagaaagacagttgtatgtccaatcatacagcagaaattgggaaagatcttgactatcttaaagatgtaaatggaactacaagtggtataggaactggcagcagtgttgaaaaatacattattgatgaaagtgattacatgtcattcataaacaaccccagtcttactgtgactgtaccaattgctgtaggagaatctgactttgaaaatttaaacacggaagactttagtagtgaatcggatctggaagaaagcaaagagaaactgaatgaaagcagtagctcatcagaaggtagcactgtggacatcggcgcacctgtagaagaacagcccgtagtggaacctgaagaaactcttgaaccagaagcttgtttcactgaaggctgtgtacaaagattcaagtgttgtcaaatcaatgtggaagaaggcagaggaaaacaatggtggaacctgagaaggacgtgtttccgaatagttgaacataactggtttgagaccttcattgttttcatgattctccttagtagtggtgctctggcatttgaagatatatatattgatcagcgaaagacgattaagacgatgttggaatatgctgacaaggttttcacttacattttcattctggaaatgcttctaaaatgggtggcatatggctatcaaacatatttcaccaatgcctggtgttggctggacttcttaattgttgatgtttcattggtcagtttaacagcaaatgccttgggttactcagaacttggagccatcaaatctctcaggacactaagagctctgagacctctaagagccttatctcgatttgaagggatgagggtggttgtgaatgcccttttaggagcaattccatccatcatgaatgtgcttctggtttgtcttatattctggctaattttcagcatcatgggcgtaaatttgtttgctggcaaattctaccactgtattaacaccacaactggtgacaggtttgacatcgaagacgtgaataatcatactgattgcctaaaactaatagaaagaaatgagactgctcgatggaaaaatgtgaaagtaaactttgataatgtaggatttgggtatctctctttgcttcaagttgccacattcaaaggatggatggatataatgtatgcagcagttgattccagaaatgtggaactccagcctaagtatgaagaaagtctgtacatgtatctttactttgttattttcatcatctttgggtccttcttcaccttgaacctgtttattggtgtcatcatagataatttcaaccagcagaaaaagaagtttggaggtcaagacatctttatgacagaagaacagaagaaatactataatgcaatgaaaaaattaggatcgaaaaaaccgcaaaagcctatacctcgaccaggaaacaaatttcaaggaatggtctttgacttcgtaaccagacaagtttttgacataagcatcatgattctcatctgtcttaacatggtcacaatgatggtggaaacagatgaccagagtgaatatgtgactaccattttgtcacgcatcaatctggtgttcattgtgctatttactggagagtgtgtactgaaactcatctctctacgccattattattttaccattggatggaatatttttgattttgtggttgtcattctctccattgtaggtatgtttcttgccgagctgatagaaaagtatttcgtgtcccctaccctgttccgagtgatccgtcttgctaggattggccgaatcctacgtctgatcaaaggagcaaaggggatccgcacgctgctctttgctttgatgatgtcccttcctgcgttgtttaacatcggcctcctactcttcctagtcatgttcatctacgccatctttgggatgtccaactttgcctatgttaagagggaagttgggatcgatgacatgttcaactttgagacctttggcaacagcatgatctgcctattccaaattacaacctctgctggctgggatggattgctagcacccattctcaacagtaagccacccgactgtgaccctaataaagttaaccctggaagctcagttaagggagactgtgggaacccatctgttggaattttcttttttgtcagttacatcatcatatccttcctggttgtggtgaacatgtacatcgcggtcatcctggagaacttcagtgttgctactgaagaaagtgcagagcctctgagtgaggatgactttgagatgttctatgaggtttgggagaagtttgatcccgatgcaactcagttcatggaatttgaaaaattatctcagtttgcagctgcgcttgaaccgcctctcaatctgccacaaccaaacaaactccagctcattgccatggatttgcccatggtgagtggtgaccggatccactgtcttgatatcttatttgcttttacaaagcgggttctaggagagagtggagagatggatgctctacgaatacagatggaagagcgattcatggcttccaatccttccaaggtctcctatcagccaatcactactactttaaaacgaaaacaagaggaagtatctgctgtcattattcagcgtgcttacagacgccaccttttaaagcgaactgtaaaacaagcttcctttacgtacaataaaaacaaaatcaaaggtggggctaatcttcttataaaagaagacatgataattgacagaataaatgaaaactctattacagaaaaaactgatctgaccatgtccactgcagcttgtccaccttcctatgaccgggtgacaaagccaattgtggaaaaacatgagcaagaaggcaaagatgaaaaagccaaagggaaataaatgaaaataaataaaaataattgggtgacaaattgtttacagcctgtgaaggtgatgtatttttatcaacaggactcctttaggaggtcaatgccaaactgactgtttttacacaaatctccttaaggtcagtgcctacaataagacagtgaccccttgtcagcaaactgtgactctgtgtaaaggggagatgaccttgacaggaggttactgttctcactaccagctgacactgctgaagataagatgcacaatggctagtcagactgtagggaccagtttcaaggggtgcaaacctgtgattttggggttgtttaacatgaaacactttagtgtagtaattgtatccactgtttgcatttcaactgccacatttgtcacatttttatggaatctgttagtggattcatctttttgttaatccatgtgtttattatatgtgactatttttgtaaacgaagtttctgttgagaaataggctaaggacctctataacaggtatgccacctggggggtatggcaaccacatggccctcccagctacacaaagtcgtggtttgcatgagggcatgctgcacttagagatcatgcatgagaaaaagtcacaagaaaaacaaattcttaaatttcaccatatttctgggaggggtaattgggtgataagtggaggtgctttgttgatcttgttttgcgaaatccagcccctagaccaagtagattatttgtgggtaggccagtaaatcttagcaggtgcaaacttcattcaaatgtttggagtcataaatgttatgtttctttttgttgtattaaaaaaaaaacctgaatagtgaatattgcccctcaccctccaccgccagaagactgaattgaccaaaattactctttataaatttctgctttttcctgcactttgtttagccatcttcggctctcagcaaggttgacactgtatatgttaatgaaatgctatttattatgtaaatagtcattttaccctgtggtgcacgtttgagcaaacaaataatgacctaagcacagtatttattgcatcaaatatgtaccacaagaaatgtagagtgcaagctttacacaggtaataaaatgtattctgtaccatttatagatagtttggatgctatcaatgcatgtttatattaccatgctgctgtatctggtttctctcactgctcagaatctcatttatgagaaaccatatgtcagtggtaaagtcaaggaaattgttcaacagatctcatttatttaagtcattaagcaatagtttgcagcactttaacagctttttggttatttttacattttaagtggataacatatggtatatagccagactgtacagacatgtttaaaaaaacacactgcttaacctattaaatatgtgtttagaattttataagcaaatataaatactgtaaaaagtcactttattttatttttcagcattatgtacataaatatgaagaggaaattatcttcaggttgatatcacaatcacttttcttactttctgtccatagtactttttcatgaaagaaatttgctaaataagacatgaaaacaagactgggtagttgtagatttctgctttttaaattacatttgctaattttagattatttcacaattttaaggagcaaaataggttcacgattcatatccaaattatgctttgcaattggaaaagggtttaaaattttatttatatttctggtagtacctgcactaactgaattgaaggtagtgcttatgttatttttgttctttttttctgacttcggtttatgttttcatttctttggagtaatgctgctctagattgttctaaatagaatgtgggcttcataatttttttttccacaaaaacagagtagtcaacttatatagtcaattacatcaggacattttgtgtttcttacagaagcaaaccataggctcctcttttccttaaaactacttagataaactgtattcgtgaactgcatgctggaaaatgctactattatgctaaataatgctaaccaacatttaaaatgtgcaaaactaataaagattacattttttatt

SEQ ID NO: 64035 - DNA, 8133 bp, Artificial Sequence
  derived and/or modified sequence
aatgtgcaggatgacaagatggagcaaacagtgcttgtaccaccaggacctgacagcttcaacttcttcaccagagaatctcttgcggctattgaaagacgcattgcagaagaaaaggcaaagaatcccaaaccagacaaaaaagatgacgacgaaaatggcccaaagccaaatagtgacttggaagctggaaagaaccttccatttatttatggagacattcctccagagatggtgtcagagcccctggaggacctggacccctactatatcaataagaaaacttttatagtattgaataaagggaaggccatcttccggttcagtgccacctctgccctgtacattttaactcccttcaatcctcttaggaaaatagctattaagattttggtacattcattattcagcatgctaattatgtgcactattttgacaaactgtgtgtttatgacaatgagtaaccctcctgattggacaaagaatgtagaatacaccttcacaggaatatatacttttgaatcacttataaaaattattgcaaggggattctgtttagaagattttactttccttcgggatccatggaactggctcgatttcactgtcattacatttgcgtacgtcacagagtttgtggacctgggcaatgtctcggcattgagaacattcagagttctccgagcattgaagacgatttcagtcattccaggcctgaaaaccattgtgggagccctgatccagtctgtgaagaagctctcagatgtaatgatcctgactgtgttctgtctgagcgtatttgctctaattgggctgcagctgttcatgggcaacctgaggaataaatgtatacaatggcctcccaccaatgcttccttggaggaacatagtatagaaaagaatataactgtgaattataatggtacacttataaatgaaactgtctttgagtttgactggaagtcatatattcaagattcaagatatcattatttcctggagggttttttagatgcactactatgtggaaatagctctgatgcaggccaatgtccagagggatatatgtgtgtgaaagctggtagaaatcccaattatggctacacaagctttgataccttcagttgggcttttttgtccttgtttcgactaatgactcaggacttctgggaaaatctttatcaactgacattacgtgctgctgggaaaacgtacatgatattttttgtattggtcattttcttgggctcattctacctaataaatttgatcctggctgtggtggccatggcctacgaggaacagaatcaggccaccttggaagaagcagaacagaaagaggccgaatttcagcagatgattgaacagcttaaaaagcaacaggaggcagctcagcaggcagcaacggcaactgcctcagaacattccagagagcccagtgcagcaggcaggctctcagacagctcatctgaagcctctaagttgagttccaagagtgctaaggaaagaagaaatcggaggaagaaaagaaaacagaaagagcagtctggtggggaagagaaagatgaggatgaattccaaaaatctgaatctgaggacagcatcaggaggaaaggttttcgcttctccattgaagggaaccgattgacatatgaaaagaggtactcctccccacaccagtctttgttgagcatccgtggctccctattttcaccaaggcgaaatagcagaacaagccttttcagctttagagggcgagcaaaggatgtgggatctgagaacgacttcgcagatgatgagcacagcacctttgaggataacgagagccgtagagattccttgtttgtgccccgacgacacggagagagacgcaacagcaacctgagtcagaccagtaggtcatcccggatgctggcagtgtttccagcgaatgggaagatgcacagcactgtggattgcaatggtgtggtttccttggttggtggaccttcagttcctacatcgcctgttggacagcttctgccagaggtgataatagataagccagctactgatgacaatggaacaaccactgaaactgaaatgagaaagagaaggtcaagttctttccacgtttccatggactttctagaagatccttcccaaaggcaacgagcaatgagtatagccagcattctaacaaatacagtagaagaacttgaagaatccaggcagaaatgcccaccctgttggtataaattttccaacatattcttaatctgggactgttctccatattggttaaaagtgaaacatgttgtcaacctggttgtgatggacccatttgttgacctggccatcaccatctgtattgtcttaaatactcttttcatggccatggagcactatccaatgacggaccatttcaataatgtgcttacagtaggaaacttggttttcactgggatctttacagcagaaatgtttctgaaaattattgccatggatccttactattatttccaagaaggctggaatatctttgacggttttattgtgacgcttagcctggtagaacttggactcgccaatgtggaaggattatctgttctccgttcatttcgattgctgcgagttttcaagttggcaaaatcttggccaacgttaaatatgctaataaagatcatcggcaattccgtgggggctctgggaaatttaaccctcgtcttggccatcatcgtcttcatttttgccgtggtcggcatgcagctctttggtaaaagctacaaagattgtgtctgcaagatcgccagtgattgtcaactcccacgctggcacatgaatgacttcttccactccttcctgattgtgttccgcgtgctgtgtggggagtggatagagaccatgtgggactgtatggaggttgctggtcaagccatgtgccttactgtcttcatgatggtcatggtgattggaaacctagtggtcctgaatctctttctggccttgcttctgagctcatttagtgcagacaaccttgcagccactgatgatgataatgaaatgaataatctccaaattgctgtggataggatgcacaaaggagtagcttatgtgaaaagaaaaatatatgaatttattcaacagtccttcattaggaaacaaaagattttagatgaaattaaaccacttgatgatctaaacaacaagaaagacagttgtatgtccaatcatacagcagaaattgggaaagatcttgactatcttaaagatgtaaatggaactacaagtggtataggaactggcagcagtgttgaaaaatacattattgatgaaagtgattacatgtcattcataaacaaccccagtcttactgtgactgtaccaattgctgtaggagaatctgactttgaaaatttaaacacggaagactttagtagtgaatcggatctggaagaaagcaaagagaaactgaatgaaagcagtagctcatcagaaggtagcactgtggacatcggcgcacctgtagaagaacagcccgtagtggaacctgaagaaactcttgaaccagaagcttgtttcactgaaggctgtgtacaaagattcaagtgttgtcaaatcaatgtggaagaaggcagaggaaaacaatggtggaacctgagaaggacgtgtttccgaatagttgaacataactggtttgagaccttcattgttttcatgattctccttagtagtggtgctctggcatttgaagatatatatattgatcagcgaaagacgattaagacgatgttggaatatgctgacaaggttttcacttacattttcattctggaaatgcttctaaaatgggtggcatatggctatcaaacatatttcaccaatgcctggtgttggctggacttcttaattgttgatgtttcattggtcagtttaacagcaaatgccttgggttactcagaacttggagccatcaaatctctcaggacactaagagctctgagacctctaagagccttatctcgatttgaagggatgagggtggttgtgaatgcccttttaggagcaattccatccatcatgaatgtgcttctggtttgtcttatattctggctaattttcagcatcatgggcgtaaatttgtttgctggcaaattctaccactgtattaacaccacaactggtgacaggtttgacatcgaagacgtgaataatcatactgattgcctaaaactaatagaaagaaatgagactgctcgatggaaaaatgtgaaagtaaactttgataatgtaggatttgggtatctctctttgcttcaagttgccacattcaaaggatggatggatataatgtatgcagcagttgattccagaaatgtggaactccagcctaagtatgaagaaagtctgtacatgtatctttactttgttattttcatcatctttgggtccttcttcaccttgaacctgtttattggtgtcatcatagataatttcaaccagcagaaaaagaagtttggaggtcaagacatctttatgacagaagaacagaagaaatactataatgcaatgaaaaaattaggatcgaaaaaaccgcaaaagcctatacctcgaccaggaaacaaatttcaaggaatggtctttgacttcgtaaccagacaagtttttgacataagcatcatgattctcatctgtcttaacatggtcacaatgatggtggaaacagatgaccagagtgaatatgtgactaccattttgtcacgcatcaatctggtgttcattgtgctatttactggagagtgtgtactgaaactcatctctctacgccattattattttaccattggatggaatatttttgattttgtggttgtcattctctccattgtaggtatgtttcttgccgagctgatagaaaagtatttcgtgtcccctaccctgttccgagtgatccgtcttgctaggattggccgaatcctacgtctgatcaaaggagcaaaggggatccgcacgctgctctttgctttgatgatgtcccttcctgcgttgtttaacatcggcctcctactcttcctagtcatgttcatctacgccatctttgggatgtccaactttgcctatgttaagagggaagttgggatcgatgacatgttcaactttgagacctttggcaacagcatgatctgcctattccaaattacaacctctgctggctgggatggattgctagcacccattctcaacagtaagccacccgactgtgaccctaataaagttaaccctggaagctcagttaagggagactgtgggaacccatctgttggaattttcttttttgtcagttacatcatcatatccttcctggttgtggtgaacatgtacatcgcggtcatcctggagaacttcagtgttgctactgaagaaagtgcagagcctctgagtgaggatgactttgagatgttctatgaggtttgggagaagtttgatcccgatgcaactcagttcatggaatttgaaaaattatctcagtttgcagctgcgcttgaaccgcctctcaatctgccacaaccaaacaaactccagctcattgccatggatttgcccatggtgagtggtgaccggatccactgtcttgatatcttatttgcttttacaaagcgggttctaggagagagtggagagatggatgctctacgaatacagatggaagagcgattcatggcttccaatccttccaaggtctcctatcagccaatcactactactttaaaacgaaaacaagaggaagtatctgctgtcattattcagcgtgcttacagacgccaccttttaaagcgaactgtaaaacaagcttcctttacgtacaataaaaacaaaatcaaaggtggggctaatcttcttataaaagaagacatgataattgacagaataaatgaaaactctattacagaaaaaactgatctgaccatgtccactgcagcttgtccaccttcctatgaccgggtgacaaagccaattgtggaaaaacatgagcaagaaggcaaagatgaaaaagccaaagggaaataaatgaaaataaataaaaataattgggtgacaaattgtttacagcctgtgaaggtgatgtatttttatcaacaggactcctttaggaggtcaatgccaaactgactgtttttacacaaatctccttaaggtcagtgcctacaataagacagtgaccccttgtcagcaaactgtgactctgtgtaaaggggagatgaccttgacaggaggttactgttctcactaccagctgacactgctgaagataagatgcacaatggctagtcagactgtagggaccagtttcaaggggtgcaaacctgtgattttggggttgtttaacatgaaacactttagtgtagtaattgtatccactgtttgcatttcaactgccacatttgtcacatttttatggaatctgttagtggattcatctttttgttaatccatgtgtttattatatgtgactatttttgtaaacgaagtttctgttgagaaataggctaaggacctctataacaggtatgccacctggggggtatggcaaccacatggccctcccagctacacaaagtcgtggtttgcatgagggcatgctgcacttagagatcatgcatgagaaaaagtcacaagaaaaacaaattcttaaatttcaccatatttctgggaggggtaattgggtgataagtggaggtgctttgttgatcttgttttgcgaaatccagcccctagaccaagtagattatttgtgggtaggccagtaaatcttagcaggtgcaaacttcattcaaatgtttggagtcataaatgttatgtttctttttgttgtattaaaaaaaaaacctgaatagtgaatattgcccctcaccctccaccgccagaagactgaattgaccaaaattactctttataaatttctgctttttcctgcactttgtttagccatcttcggctctcagcaaggttgacactgtatatgttaatgaaatgctatttattatgtaaatagtcattttaccctgtggtgcacgtttgagcaaacaaataatgacctaagcacagtatttattgcatcaaatatgtaccacaagaaatgtagagtgcaagctttacacaggtaataaaatgtattctgtaccatttatagatagtttggatgctatcaatgcatgtttatattaccatgctgctgtatctggtttctctcactgctcagaatctcatttatgagaaaccatatgtcagtggtaaagtcaaggaaattgttcaacagatctcatttatttaagtcattaagcaatagtttgcagcactttaacagctttttggttatttttacattttaagtggataacatatggtatatagccagactgtacagacatgtttaaaaaaacacactgcttaacctattaaatatgtgtttagaattttataagcaaatataaatactgtaaaaagtcactttattttatttttcagcattatgtacataaatatgaagaggaaattatcttcaggttgatatcacaatcacttttcttactttctgtccatagtactttttcatgaaagaaatttgctaaataagacatgaaaacaagactgggtagttgtagatttctgctttttaaattacatttgctaattttagattatttcacaattttaaggagcaaaataggttcacgattcatatccaaattatgctttgcaattggaaaagggtttaaaattttatttatatttctggtagtacctgcactaactgaattgaaggtagtgcttatgttatttttgttctttttttctgacttcggtttatgttttcatttctttggagtaatgctgctctagattgttctaaatagaatgtgggcttcataatttttttttccacaaaaacagagtagtcaacttatatagtcaattacatcaggacattttgtgtttcttacagaagcaaaccataggctcctcttttccttaaaactacttagataaactgtattcgtgaactgcatgctggaaaatgctactattatgctaaataatgctaaccaacatttaaaatgtgcaaaactaataaagattacattttttatttta

SEQ ID NO: 64036 - DNA, 6030 bp, Artificial Sequence
  derived and/or modified sequence
atggagcagaccgtgctggtgccccccggccccgacagcttcaacttcttcaccagagagagcctggccgccatcgagagaagaatcgccgaggagaaggccaagaaccccaagcccgacaagaaggacgacgacgagaacggccccaagcccaacagcgacctggaggccggcaagaacctgcccttcatctacggcgacatcccccccgagatggtgagcgagcccctggaggacctggacccctactacatcaacaagaagaccttcatcgtgctgaacaagggcaaggccatcttcagattcagcgccaccagcgccctgtacatcctgacccccttcaaccccctgagaaagatcgccatcaagatcctggtgcacagcctgttcagcatgctgatcatgtgcaccatcctgaccaactgcgtgttcatgaccatgagcaacccccccgactggaccaagaacgtggagtacaccttcaccggcatctacaccttcgagagcctgatcaagatcatcgccagaggcttctgcctggaggacttcaccttcctgagagacccctggaactggctggacttcaccgtgatcaccttcgcctacgtgaccgagttcgtggacctgggcaacgtgagcgccctgagaaccttcagagtgctgagagccctgaagaccatcagcgtgatccccggcctgaagaccatcgtgggcgccctgatccagagcgtgaagaagctgagcgacgtgatgatcctgaccgtgttctgcctgagcgtgttcgccctgatcggcctgcagctgttcatgggcaacctgagaaacaagtgcatccagtggccccccaccaacgccagcctggaggagcacagcatcgagaagaacatcaccgtgaactacaacggcaccctgatcaacgagaccgtgttcgagttcgactggaagagctacatccaggacagcagataccactacttcctggagggcttcctggacgccctgctgtgcggcaacagcagcgacgccggccagtgccccgagggctacatgtgcgtgaaggccggcagaaaccccaactacggctacaccagcttcgacaccttcagctgggccttcctgagcctgttcagactgatgacccaggacttctgggagaacctgtaccagctgaccctgagagccgccggcaagacctacatgatcttcttcgtgctggtgatcttcctgggcagcttctacctgatcaacctgatcctggccgtggtggccatggcctacgaggagcagaaccaggccaccctggaggaggccgagcagaaggaggccgagttccagcagatgatcgagcagctgaagaagcagcaggaggccgcccagcaggccgccaccgccaccgccagcgagcacagcagagagcccagcgccgccggcagactgagcgacagcagcagcgaggccagcaagctgagcagcaagagcgccaaggagagaagaaacagaagaaagaagagaaagcagaaggagcagagcggcggcgaggagaaggacgaggacgagttccagaagagcgagagcgaggacagcatcagaagaaagggcttcagattcagcatcgagggcaacagactgacctacgagaagagatacagcagcccccaccagagcctgctgagcatcagaggcagcctgttcagccccagaagaaacagcagaaccagcctgttcagcttcagaggcagagccaaggacgtgggcagcgagaacgacttcgccgacgacgagcacagcaccttcgaggacaacgagagcagaagagacagcctgttcgtgcccagaagacacggcgagagaagaaacagcaacctgagccagaccagcagaagcagcagaatgctggccgtgttccccgccaacggcaagatgcacagcaccgtggactgcaacggcgtggtgagcctggtgggcggccccagcgtgcccaccagccccgtgggccagctgctgcccgaggtgatcatcgacaagcccgccaccgacgacaacggcaccaccaccgagaccgagatgagaaagagaagaagcagcagcttccacgtgagcatggacttcctggaggaccccagccagagacagagagccatgagcatcgccagcatcctgaccaacaccgtggaggagctggaggagagcagacagaagtgccccccctgctggtacaagttcagcaacatcttcctgatctgggactgcagcccctactggctgaaggtgaagcacgtggtgaacctggtggtgatggaccccttcgtggacctggccatcaccatctgcatcgtgctgaacaccctgttcatggccatggagcactaccccatgaccgaccacttcaacaacgtgctgaccgtgggcaacctggtgttcaccggcatcttcaccgccgagatgttcctgaagatcatcgccatggacccctactactacttccaggagggctggaacatcttcgacggcttcatcgtgaccctgagcctggtggagctgggcctggccaacgtggagggcctgagcgtgctgagaagcttcagactgctgagagtgttcaagctggccaagagctggcccaccctgaacatgctgatcaagatcatcggcaacagcgtgggcgccctgggcaacctgaccctggtgctggccatcatcgtgttcatcttcgccgtggtgggcatgcagctgttcggcaagagctacaaggactgcgtgtgcaagatcgccagcgactgccagctgcccagatggcacatgaacgacttcttccacagcttcctgatcgtgttcagagtgctgtgcggcgagtggatcgagaccatgtgggactgcatggaggtggccggccaggccatgtgcctgaccgtgttcatgatggtgatggtgatcggcaacctggtggtgctgaacctgttcctggccctgctgctgagcagcttcagcgccgacaacctggccgccaccgacgacgacaacgagatgaacaacctgcagatcgccgtggacagaatgcacaagggcgtggcctacgtgaagagaaagatctacgagttcatccagcagagcttcatcagaaagcagaagatcctggacgagatcaagcccctggacgacctgaacaacaagaaggacagctgcatgagcaaccacaccgccgagatcggcaaggacctggactacctgaaggacgtgaacggcaccaccagcggcatcggcaccggcagcagcgtggagaagtacatcatcgacgagagcgactacatgagcttcatcaacaaccccagcctgaccgtgaccgtgcccatcgccgtgggcgagagcgacttcgagaacctgaacaccgaggacttcagcagcgagagcgacctggaggagagcaaggagaagctgaacgagagcagcagcagcagcgagggcagcaccgtggacatcggcgcccccgtggaggagcagcccgtggtggagcccgaggagaccctggagcccgaggcctgcttcaccgagggctgcgtgcagagattcaagtgctgccagatcaacgtggaggagggcagaggcaagcagtggtggaacctgagaagaacctgcttcagaatcgtggagcacaactggttcgagaccttcatcgtgttcatgatcctgctgagcagcggcgccctggccttcgaggacatctacatcgaccagagaaagaccatcaagaccatgctggagtacgccgacaaggtgttcacctacatcttcatcctggagatgctgctgaagtgggtggcctacggctaccagacctacttcaccaacgcctggtgctggctggacttcctgatcgtggacgtgagcctggtgagcctgaccgccaacgccctgggctacagcgagctgggcgccatcaagagcctgagaaccctgagagccctgagacccctgagagccctgagcagattcgagggcatgagagtggtggtgaacgccctgctgggcgccatccccagcatcatgaacgtgctgctggtgtgcctgatcttctggctgatcttcagcatcatgggcgtgaacctgttcgccggcaagttctaccactgcatcaacaccaccaccggcgacagattcgacatcgaggacgtgaacaaccacaccgactgcctgaagctgatcgagagaaacgagaccgccagatggaagaacgtgaaggtgaacttcgacaacgtgggcttcggctacctgagcctgctgcaggtggccaccttcaagggctggatggacatcatgtacgccgccgtggacagcagaaacgtggagctgcagcccaagtacgaggagagcctgtacatgtacctgtacttcgtgatcttcatcatcttcggcagcttcttcaccctgaacctgttcatcggcgtgatcatcgacaacttcaaccagcagaagaagaagttcggcggccaggacatcttcatgaccgaggagcagaagaagtactacaacgccatgaagaagctgggcagcaagaagccccagaagcccatccccagacccggcaacaagttccagggcatggtgttcgacttcgtgaccagacaggtgttcgacatcagcatcatgatcctgatctgcctgaacatggtgaccatgatggtggagaccgacgaccagagcgagtacgtgaccaccatcctgagcagaatcaacctggtgttcatcgtgctgttcaccggcgagtgcgtgctgaagctgatcagcctgagacactactacttcaccatcggctggaacatcttcgacttcgtggtggtgatcctgagcatcgtgggcatgttcctggccgagctgatcgagaagtacttcgtgagccccaccctgttcagagtgatcagactggccagaatcggcagaatcctgagactgatcaagggcgccaagggcatcagaaccctgctgttcgccctgatgatgagcctgcccgccctgttcaacatcggcctgctgctgttcctggtgatgttcatctacgccatcttcggcatgagcaacttcgcctacgtgaagagagaggtgggcatcgacgacatgttcaacttcgagaccttcggcaacagcatgatctgcctgttccagatcaccaccagcgccggctgggacggcctgctggcccccatcctgaacagcaagccccccgactgcgaccccaacaaggtgaaccccggcagcagcgtgaagggcgactgcggcaaccccagcgtgggcatcttcttcttcgtgagctacatcatcatcagcttcctggtggtggtgaacatgtacatcgccgtgatcctggagaacttcagcgtggccaccgaggagagcgccgagcccctgagcgaggacgacttcgagatgttctacgaggtgtgggagaagttcgaccccgacgccacccagttcatggagttcgagaagctgagccagttcgccgccgccctggagccccccctgaacctgccccagcccaacaagctgcagctgatcgccatggacctgcccatggtgagcggcgacagaatccactgcctggacatcctgttcgccttcaccaagagagtgctgggcgagagcggcgagatggacgccctgagaatccagatggaggagagattcatggccagcaaccccagcaaggtgagctaccagcccatcaccaccaccctgaagagaaagcaggaggaggtgagcgccgtgatcatccagagagcctacagaagacacctgctgaagagaaccgtgaagcaggccagcttcacctacaacaagaacaagatcaagggcggcgccaacctgctgatcaaggaggacatgatcatcgacagaatcaacgagaacagcatcaccgagaagaccgacctgaccatgagcaccgccgcctgcccccccagctacgacagagtgaccaagcccatcgtggagaagcacgagcaggagggcaaggacgagaaggccaagggcaagtag

SEQ ID NO: 64037 - protein, 1981 aa, Artificial Sequence
  derived and/or modified sequence
MEQTVLVPPGPDSFNFFTRESLAAIERRIAEEKAKNPKPDKKDDDENGPKPNSDLEAGKNLPFIYGDIPPEMVSEPLEDLDPYYINKKTFIVLNKGKAIFRFSATSALYILTPFNPLRKIAIKILVHSLFSMLIMCTILTNCVFMTMSNPPDWTKNVEYTFTGIYTFESLIKIIARGFCLEDFTFLRDPWNWLDFTVITFAYVTEFVDLGNVSALRTFRVLRALKTISVIPGLKTIVGALIQSVKKLSDVMILTVFCLSVFALIGLQLFMGNLRNKCIQWPPTNASLEEHSIEKNITVNYNGTLINETVFEFDWKSYIQDSRYHYFLEGFLDALLCGNSSDAGQCPEGYMCVKAGRNPNYGYTSFDTFSWAFLSLFRLMTQDFWENLYQLTLRAAGKTYMIFFVLVIFLGSFYLINLILAVVAMAYEEQNQATLEEAEQKEAEFQQMIEQLKKQQEAAQQAATATASEHSREPSAAGRLSDSSSEASKLSSKSAKERRNRRKKRKQKEQSGGEEKDEDEFQKSESEDSIRRKGFRFSIEGNRLTYEKRYSSPHQSLLSIRGSLFSPRRNSRTSLFSFRGRAKDVGSENDFADDEHSTFEDNESRRDSLFVPRRHGERRNSNLSQTSRSSRMLAVFPANGKMHSTVDCNGVVSLGTTTETEMRKRRSSSFHVSMDFLEDPSQRQRAMSIASILTNTVEELEESRQKCPPCWYKFSNIFLIWDCSPYWLKVKHVVNLVVMDPFVDLAITICIVLNTLFMAMEHYPMTDHFNNVLTVGNLVFTGIFTAEMFLKIIAMDPYYYFQEGWNIFDGFIVTLSLVELGLANVEGLSVLRSFRLLRVFKLAKSWPTLNMLIKIIGNSVGALGNLTLVLAIIVFIFAVVGMQLFGKSYKDCVCKIASDCQLPRWHMNDFFHSFLIVFRVLCGEWIETMWDCMEVAGQAMCLTVFMMVMVIGNLVVLNLFLALLLSSFSADNLAATDDDNEMNNLQIAVDRMHKGVAYVKRKIYEFIQQSFIRKQKILDEIKPLDDLNNKKDSCMSNHTAEIGKDLDYLKDVNGTTSGIGTGSSVEKYIIDESDYMSFINNPSLTVTVPIAVGESDFENLNTEDFSSESDLEESKEKLNESSSSSEGSTVDIGAPVEEQPVVEPEETLEPEACFTEGCVQRFKCCQINVEEGRGKQWWNLRRTCFRIVEHNWFETFIVFMILLSSGALAFEDIYIDQRKTIKTMLEYADKVFTYIFILEMLLKWVAYGYQTYFTNAWCWLDFLIVDVSLVSLTANALGYSELGAIKSLRTLRALRPLRALSRFEGMRVVVNALLGAIPSIMNVLLVCLIFWLIFSIMGVNLFAGKFYHCINTTTGDRFDIEDVNNHTDCLKLIERNETARWKNVKVNFDNVGFGYLSLLQVATFKGWMDIMYAAVDSRNVELQPKYEESLYMYLYFVIFIIFGSFFTLNLFIGVIIDNFNQQKKKFGGQDIFMTEEQKKYYNAMKKLGSKKPQKPIPRPGNKFQGMVFDFVTRQVFDISIMILICLNMVTMMVETDDQSEYVTTILSRINLVFIVLFTGECVLKLISLRHYYFTIGWNIFDFVVVILSIVGMFLAELIEKYFVSPTLFRVIRLARIGRILRLIKGAKGIRTLLFALMMSLPALFNIGLLLFLVMFIYAIFGMSNFAYVKREVGIDDMFNFETFGNSMICLFQITTSAGWDGLLAPILNSKPPDCDPNKVNPGSSVKGDCGNPSVGIFFFVSYIIISFLVVVNMYIAVILENFSVATEESAEPLSEDDFEMFYEVWEKFDPDATQFMEFEKLSQFAAALEPPLNLPQPNKLQLIAMDLPMVSGDRIHCLDILFAFTKRVLGESGEMDALRIQMEERFMASNPSKVSYQPITTTLKRKQEEVSAVIIQRAYRRHLLKRTVKQASFTYNKNKIKGGANLLIKEDMIIDRINENSITEKTDLTMSTAACPPSYDRVTKPIVEKHEQEGKDEKAKGK

SEQ ID NO: 64038 - DNA, 5946 bp, Artificial Sequence
  derived and/or modified sequence
atggagcagacagtgttggtgccccctggcccagatagcttcaacttcttcactagagagagtttagctgcaatcgaacgtcgtatagccgaggagaaggctaagaatccaaagccagacaagaaggacgatgatgaaaatggacccaaaccaaactctgatctggaggcgggcaagaatctcccatttatctacggtgacatcccccctgagatggtgtcggagccccttgaagatctcgacccttactacatcaataaaaagactttcattgtccttaacaaagggaaggccattttcagattctcagccactagtgcactgtatatactaacaccattcaaccctctgagaaagatcgctataaaaatattggttcactctctgttttctatgcttattatgtgtaccatcctgacaaattgcgtgtttatgaccatgtctaatcctcccgattggacgaaaaatgtggaatacacctttacaggcatttacacctttgaatcactgatcaaaattatcgcgagaggattctgtctggaagatttcacctttcttcgagacccctggaattggctggacttcactgttatcactttcgcttacgtgacggagtttgtagatttgggaaacgtgagtgcactccgtacctttagagtactgagggctctgaagacaataagtgtgatccctgggctgaagaccatcgtaggtgctctgatacagtctgttaagaagctcagtgatgttatgatcctaactgtgttttgcctatccgtcttcgccctaattggactccagctgttcatgggaaatttgaggaataaatgcatccagtggccaccgactaatgctagcttagaagagcattctatcgaaaaaaacatcactgtcaactacaacggcaccctgatcaatgagacagtgtttgaattcgattggaagagttacattcaagattccaggtaccactatttcctggaagggtttcttgacgcacttctgtgcggcaactcttccgacgcagggcagtgtcctgaaggttacatgtgtgtaaaagctgggagaaaccccaactatggctacacaagttttgacacattctcctgggcctttttgtccctgtttcgcctgatgacacaagatttttgggagaacctttaccagctgacactgcgggccgccggcaagacatatatgatatttttcgtacttgtcatatttctcggctccttttatctgatcaatttgatattggccgtggtggcgatggcatatgaggagcagaaccaagctactttagaagaagccgaacagaaggaagcggagtttcagcagatgatcgagcagttaaagaaacagcaagaagctgctcagcaagctgccacggccactgcaagcgagcacagcagggagccgtccgccgctggcagactctcagactcttcgagcgaagcaagtaagctttcctctaagtccgctaaggagagaagaaatcgaaggaaaaaacgcaaacaaaaagaacagtccgggggagaagagaaggacgaggacgagttccagaaaagtgaatcagaggatagcatccgtagaaaaggtttccgctttagcatagagggaaatcgcctcacatacgagaagcgctatagttccccccaccagagcttactgtcaatccgcggctcattattttcgccaaggagaaatagcaggaccagtctgtttagcttccgtggaagggctaaggacgttggctccgagaacgactttgccgacgacgagcattccacatttgaagacaatgagagcagaagagactcacttttcgtgcccagaagacacggggaaagaaggaacagtaacctctcgcagacaagccgcagctcaaggatgctcgcggtgttccctgccaacggcaagatgcatagcactgttgattgtaacggtgttgtgagtctgggaaccactaccgagaccgaaatgaggaaaagacgctcaagctcgttccacgtgtctatggacttcctcgaagatccaagtcagcgccagagagctatgagcatcgcgtccatcctcaccaacacagttgaagagctggaggagtcccgccagaaatgccccccctgttggtataagttttccaacatttttttaatctgggattgctcaccctactggctgaaggtaaaacacgttgtcaatctggtggtcatggatcctttcgtagatctggcaatcacaatttgtattgtgctcaatactctttttatggccatggagcactacccaatgaccgaccacttcaacaatgtgctgaccgttggcaacctggtttttacgggaattttcactgccgagatgtttctcaagattatcgctatggatccctactactacttccaggaagggtggaatatttttgacgggttcatcgtaaccctatccctggtcgaacttgggctagccaatgtggaggggttatcagtgctcaggtccttcaggttgctgcgagtcttcaagctagctaagagctggcctaccctgaatatgctcatcaaaatcatcggaaatagtgtaggcgcgcttggtaacctgaccctagtcctggccatcattgtctttatctttgccgtggtgggcatgcagctgtttggaaaatcctacaaggactgtgtgtgtaagattgcatctgattgccaattgccccgttggcatatgaatgatttctttcactccttcctgatagtgtttcgcgtcttatgcggcgagtggattgagactatgtgggattgcatggaagtggccggccaggccatgtgcttgacggtgttcatgatggtaatggtcatcgggaacttggtggttcttaatttgttcctggccctgctgctctcctccttttcagccgacaatctggccgcaacagatgatgataacgagatgaataacttgcagattgcagtggacagaatgcacaagggagtagcctacgtcaagaggaagatatatgagtttatccagcagtcctttatcagaaaacaaaagattttggatgaaatcaaaccactggatgacctgaataataagaaggattcctgtatgtctaaccatactgcagaaattggcaaggatctggattacctgaaagatgtgaacggtaccacgtcaggcatcggtactggatctagcgtggaaaagtacattatcgatgagagtgattatatgtcatttatcaacaacccttctttaactgttactgtccctatcgcagtcggtgagagtgacttcgaaaatttgaataccgaggatttctccagtgagtctgacctcgaagagagtaaggaaaaactgaatgagagcagcagtagctcagagggcagcaccgtggatatcggcgcccctgtggaagagcagcccgtggtggagccggaggaaactctggaacccgaggcatgtttcacagaaggctgtgtgcagagatttaaatgctgccagattaacgtggaggaaggccgagggaagcagtggtggaacctccgaaggacctgttttcgaatcgtcgaacacaattggttcgagacatttattgtgtttatgatcctgctgtctagtggggctttggctttcgaggacatttatattgaccagcgaaagaccataaagactatgctcgagtacgccgataaagtgtttacttatattttcattttggaaatgctgctcaaatgggtcgcctacggctaccagacctacttcacaaacgcttggtgttggctcgattttcttattgtggatgtcagcctggtaagtctaacggctaatgctttgggctactcagagctaggggccataaaatccctgagaactctgcgggccctgcggcccttgcgcgccttgagtaggtttgaaggtatgagagtggtggtcaacgcattgttaggcgccatacctagcattatgaacgtattactggtctgtctgatcttctggctaatttttagtattatgggggtcaatttattcgcaggtaaattttaccattgcataaacacgacaacaggagaccgcttcgatattgaagacgtgaataaccatacagattgtcttaagcttatcgagagaaatgagacagccaggtggaagaatgtcaaggtgaattttgataacgttggcttcgggtatttatctctgttgcaggtagctacatttaagggatggatggatatcatgtacgctgccgtggatagtaggaacgtggaactgcagcctaagtatgaagagagcctgtatatgtatctctattttgtaatattcatcatatttggatcattcttcaccttgaacctttttatcggagtgattatcgacaactttaatcagcagaaaaaaaaatttggcggtcaggatatctttatgacagaggagcagaagaaatactacaatgccatgaagaaactcggctcgaaaaaaccccagaagcctatccctagaccgggcaacaagtttcagggaatggtcttcgatttcgtgactcggcaagtgttcgacatttccatcatgatcctcatctgcctaaacatggtcaccatgatggtggagacagatgatcaaagcgaatacgtcactactatcttatcgagaataaatctggtcttcatcgttctctttactggcgaatgcgtcctcaaacttatctccctgcggcactattacttcacaatcggctggaacatatttgactttgttgtggtcatcttatcaattgtcggcatgtttttggcagagttaatcgagaaatatttcgtgtcaccaacattgttccgggtgatccgcctggcaagaatcggccgcattcttaggttaattaagggggcaaaaggcatccgcacacttctgtttgctcttatgatgagcttgcctgcactttttaacatcggcttgctactctttctagttatgtttatttatgcgatcttcgggatgagcaatttcgcttacgtaaagagggaagtggggattgatgacatgttcaatttcgagacctttggaaatagcatgatatgtctgttccagattaccactagtgccggatgggatgggcttctggccccaattctgaatagtaagcctcctgactgtgatccgaacaaggtcaaccccgggagctcagttaaaggtgattgcggaaatccatccgtgggcatatttttttttgtcagctacatcataatctccttcttggtcgtcgtgaacatgtatattgcagttattctcgagaactttagcgtagccacggaagaaagcgccgagccactgagcgaggacgactttgagatgttttacgaagtctgggagaaattcgaccccgatgcaacccagtttatggagtttgagaagctaagtcagttcgccgccgccctggagccaccgctaaacctgccccagccgaataaactccaactgattgccatggatctgccgatggtgtccggagaccgcatccattgcctggatattctgtttgccttcacgaagcgcgtgctcggggagtcaggagagatggacgccctgagaatccaaatggaagagcggtttatggccagcaacccttccaaagtttcctaccagcccatcaccacaactctgaagcggaagcaggaggaagtgtctgctgttatcattcagcgggcctacagacggcatttactaaaacggaccgtgaaacaggcttccttcacttacaataaaaataaaataaaagggggcgctaatctcctcatcaaagaggacatgattattgacagaatcaatgagaactccatcaccgagaaaacggacttaaccatgtcaactgctgcttgtccgccaagctacgaccgcgtgacaaaaccaatagtggaaaagcatgagcaggaaggcaaggacgaaaaagccaagggaaagtag

SEQ ID NO: 64039 - DNA, 5946 bp, Artificial Sequence
  derived and/or modified sequence
atggagcagacagtgctggtgcccccaggccctgacagcttcaacttcttcacccgggagagcctggccgccattgaaagaagaattgctgaggagaaggccaagaaccccaagccagacaagaaggatgatgatgaaaatggccccaagcccaacagcgacctggaggccggcaagaacctgcccttcatctatggagacatccccccagagatggtgtctgagcccctggaggacctggacccctactacatcaacaagaagaccttcatcgtgctgaacaagggcaaggccatcttccgcttcagcgccaccagcgccctgtacatcctgacccccttcaaccccctgaggaagatcgccatcaagatcctggtgcacagcctcttctccatgctgatcatgtgcaccatcctgaccaactgtgtgttcatgaccatgagcaaccccccagactggaccaagaatgtggagtacaccttcaccggcatctacacctttgagagcctcatcaagatcatcgcccggggcttctgcctggaggacttcaccttcctgcgggacccctggaactggctggacttcaccgtcatcacctttgcctacgtgacagaatttgtggacctgggcaatgtgtctgccctgcggaccttccgggtgctgcgggccctgaagaccatcagcgtcatccctggcctgaagaccatcgtgggcgccctgatccagagcgtgaagaagctgagtgatgtgatgatcctgaccgtcttctgcctgtctgtgtttgccctgattggcctgcagctgttcatgggcaacctgaggaacaagtgcatccagtggccacccaccaatgccagcctggaggagcacagcattgagaagaacatcaccgtgaactacaacggcaccctcatcaatgagaccgtgtttgaatttgactggaagagctacatccaggacagccgctaccactacttcctggagggcttcctggatgccctgctgtgtggcaacagcagtgatgctggccagtgcccagagggctacatgtgtgtgaaggccggcaggaaccccaactacggctacaccagctttgacaccttctcctgggccttcctgagcctcttccggctgatgacccaggacttctgggagaacctgtaccagctgaccctgcgggctgctgggaagacctacatgatcttctttgtgctggtgatcttcctgggcagcttctacctgatcaacctgatcctggccgtggtggccatggcctatgaggagcagaaccaggccaccctggaggaggccgagcagaaggaggccgagttccagcagatgattgagcagctgaagaagcagcaggaggccgcccagcaggccgccacagccacagccagcgagcacagccgggagcccagcgctgctggccgcctgagtgacagcagcagcgaggccagcaagctgagcagcaagagcgccaaggagaggaggaacagaaggaagaagaggaagcagaaggagcagagcggcggggaggagaaggatgaagatgagttccagaagtctgagagcgaggacagcatccggaggaagggcttccgcttcagcattgagggcaaccggctgacctatgagaagcgctacagcagcccccaccagagcctgctgagcatccggggcagcctcttcagccccaggaggaacagcaggaccagcctcttctccttccggggccgggccaaggatgtgggctctgaaaatgactttgctgatgatgagcacagcacctttgaagataatgaaagccggcgggacagcctgtttgtgccccggcggcacggggagaggaggaacagcaacctgagccagaccagccgcagcagcaggatgctggccgtgtttcctgccaacgggaagatgcacagcacagtggactgcaatggagtggtgtccctgggcaccaccacagaaacagagatgaggaagaggaggagcagcagcttccacgtgtccatggacttcctggaggaccccagccagaggcagagggccatgagcatcgccagcatcctgaccaacacagtggaggagctggaggagagccggcagaagtgccccccctgctggtacaagttcagcaacatcttcctgatctgggactgcagcccctactggctgaaggtgaagcacgtggtgaacctggtggtgatggacccctttgtggacctggccatcaccatctgcatcgtgctgaacaccctcttcatggccatggagcactaccccatgacagaccacttcaacaacgtgctgactgtgggcaacctggtgttcaccggcatcttcaccgctgagatgttcctgaagatcatcgccatggacccctactactacttccaggagggctggaacatctttgatggcttcatcgtgaccctgagcctggtggagctgggcctggccaacgtggagggcctgtctgtgctgcggagcttccggctgctgcgggtcttcaagctggccaagtcctggcccaccctgaacatgctgatcaagatcatcggcaacagcgtgggcgccctgggcaacctgaccctggtgctggccatcatcgtgttcatctttgctgtggtgggcatgcagctgtttgggaagagctacaaggactgtgtgtgcaagatcgccagtgactgccagctgccccgctggcacatgaatgacttcttccacagcttcctgattgtgttccgggtgctgtgtggggagtggattgagaccatgtgggactgcatggaggtggccggccaggccatgtgcctgaccgtcttcatgatggtgatggtgattggcaacctggtggtgctgaacctcttcctggccctgctgctgagcagcttctctgctgacaacctggccgccacagatgatgacaatgagatgaacaacctgcagattgctgtggacaggatgcacaagggcgtggcctacgtgaagaggaagatctatgagttcatccagcagagcttcatcaggaagcagaagatcctggatgagatcaagcccctggatgacctgaacaacaagaaggacagctgcatgagcaaccacacagctgagatcggcaaggacctggactacctgaaggatgtgaatggcaccaccagcggcatcggcaccggcagctctgtggagaagtacatcattgatgaaagtgactacatgtccttcatcaacaaccccagcctgactgtgacagtgcccatcgctgtgggggagagtgactttgagaacctgaacacagaggacttcagcagcgagagtgacctggaggagagcaaggagaagctgaatgaaagcagcagcagcagcgagggcagcacagtggacattggagcccctgtggaggagcagcctgtggtggagcctgaggagaccctggagcctgaggcctgcttcacagagggctgtgtgcagcgcttcaagtgctgccagatcaacgtggaggagggccggggcaagcagtggtggaacctgcggaggacctgcttccgcatcgtggagcacaactggtttgagaccttcatcgtgttcatgatcctgctgagcagcggggccctggcctttgaggacatctacatcgaccagaggaagaccatcaagaccatgctggagtatgctgacaaggtgttcacctacatcttcatcctggagatgctgctgaagtgggtggcctacggctaccagacctacttcaccaatgcctggtgctggctggacttcctgattgtggatgtgtccctggtgtccctgacagccaatgccctgggctacagcgagctgggcgccatcaagagcctgcggaccctgcgggccctgcggcccctgcgggccctgagcagatttgagggcatgagggtggtggtgaatgccctgctgggcgccatccccagcatcatgaatgtgctgctggtgtgcctgatcttctggctgatcttcagcatcatgggcgtgaacctgtttgctgggaagttctaccactgcatcaacaccaccactggagacagatttgatattgaagatgtgaacaaccacacagactgcctgaagctgattgaaagaaatgaaacagcccgctggaagaatgtgaaggtgaactttgacaacgtgggcttcggctacctgagcctgctgcaggtggccaccttcaagggctggatggacatcatgtatgctgctgtggacagcagaaatgtggagctgcagcccaagtatgaggagagcctgtacatgtacctgtactttgtgatcttcatcatcttcggcagcttcttcaccctgaacctcttcatcggggtcatcatcgacaacttcaaccagcagaagaagaagtttggaggccaggacatcttcatgacagaggagcagaagaagtactacaatgccatgaagaagctgggcagcaagaagccccagaagcccatcccccggcccggcaacaagttccagggcatggtgtttgattttgtgacccggcaggtgtttgacatcagcatcatgatcctgatctgcctgaacatggtgaccatgatggtggagacagatgaccagagtgaatatgtgaccaccatcctgagccgcatcaacctggtgttcatcgtgctcttcaccggagaatgtgtgctgaagctgatcagcctgcggcactactacttcaccatcggctggaacatctttgattttgtggtggtgatcctgagcatcgtgggcatgttcctggccgagctgattgagaagtactttgtgagccccaccctcttccgggtcatccggctggccagaattggccgcatcctgcggctcatcaagggggccaagggcatccgcaccctgctgtttgccctgatgatgagcctgcctgccctcttcaacatcggcctgctgctcttcctggtgatgttcatctatgccatcttcggcatgagcaactttgcctacgtgaagcgggaggtgggcattgatgacatgttcaactttgagaccttcggcaacagcatgatctgcctcttccagatcaccaccagcgctggctgggatggcctgctggcccccatcctgaacagcaagcccccagactgtgaccccaacaaggtgaaccctggcagctctgtgaagggggactgtggcaaccccagcgtgggcatcttcttctttgtgtcctacatcatcatctccttcctggtggtggtgaacatgtacatcgctgtgatcctggagaacttctctgtggccacagaggagagcgctgagcccctgtctgaagatgactttgagatgttttatgaggtgtgggagaagtttgatcctgatgccacccagttcatggagtttgagaagctgagccagtttgctgctgccctggagccccccctgaacctgccccagcccaacaagctgcagctgattgccatggacctgcccatggtgtctggggaccgcatccactgcctggacatcctgtttgccttcaccaagagggtgctgggggagagcggggagatggatgccctgcgcatccagatggaggagcgcttcatggccagcaaccccagcaaggtgtcctaccagcccatcaccaccaccctgaagaggaagcaggaggaggtgtctgctgtgatcatccagagggcctacagaagacacctgctgaagaggacagtgaagcaggccagcttcacctacaacaagaacaagatcaagggcggggccaacctgctgatcaaggaggacatgatcatcgaccgcatcaatgaaaacagcatcacagagaagacagacctgaccatgagcacagctgcctgccccccatcctatgacagagtgaccaagcccatcgtggagaagcatgagcaggagggcaaggatgagaaggccaagggcaagtag

SEQ ID NO: 64040 - DNA, 5946 bp, Artificial Sequence
  derived and/or modified sequence
atggagcagaccgtgctggtgccccccggccccgacagcttcaacttttttacacgcgagagccttgcagcgattgaaagacgcattgctgaggaaaaagctaagaacccaaaacccgataagaaggatgatgatgagaacggtccaaaaccgaattcagatctcgaggcggggaagaatctaccattcatctacggggacatccctcccgaaatggtaagcgaaccactggaagatttggacccctattacataaataagaagacgttcatcgtcctcaataagggaaaggcgatcttcagattctcggcaaccagtgcattatacatattgacccctttcaacccacttcgcaaaatcgccatcaagatcttagtccacagcctgttctctatgcttatcatgtgcaccatcttgactaattgtgtgttcatgacaatgagcaatccacctgattggacaaagaacgttgaatacaccttcactggaatatacaccttcgagtccctcatcaagatcatcgccagaggattctgtttagaggacttcaccttcctgagggatccatggaactggctggattttactgtaatcacatttgcatacgtcacggagttcgtggacttgggaaatgtgtcagcgctcagaacattccgcgtcctgcgcgctctgaaaactatcagcgtgattcctgggctgaagacaattgtgggggcccttattcagtcagttaagaagctttctgatgtgatgatactgactgtcttctgtttgtccgtgttcgccttaatagggttgcagctcttcatggggaacctgcgcaacaaatgcattcagtggccccccacaaatgcgagcctggaggagcacagcattgaaaaaaatatcaccgtgaactacaatggcactttaatcaatgagaccgtgtttgaattcgactggaagtcttacatccaggattctcgataccactatttccttgagggcttcctggacgctctgctgtgcggaaactctagcgacgctggacaatgccccgagggctatatgtgtgtaaaggcaggtcgaaaccctaactatggctatacatcatttgacacattctcatgggccttcctgagtctgttccgcctgatgacccaggacttctgggaaaacttataccaattgacactgagagccgctggcaaaacttatatgatattcttcgtgttggtgattttcctcggatctttctatctgatcaacctgattctggctgttgtggctatggcgtacgaagagcagaaccaagccactctggaagaggcagaacagaaggaagccgagtttcagcaaatgatagagcaactaaagaaacagcaggaggcagcacagcaggctgcaacagccaccgcctcagagcattcacgagagccgtctgctgccggccggctatcagactctagctccgaggcgtctaagctgagttctaaatctgcgaaggagaggagaaataggcgaaaaaagcggaagcagaaggaacagtcggggggagaggagaaggacgaagacgaatttcaaaaatccgaaagcgaagattcgataagacggaagggattcaggttttcaattgaggggaacagactgacatacgagaagcgatacagcagcccccaccagagtcttttatcaatcagagggtctttgttcagcccacggcgcaatagtagaacctccctcttcagttttcggggccgtgcgaaggatgtcggcagcgaaaatgatttcgctgatgacgaacactcaaccttcgaagacaatgaatcgagacgggattccctctttgtgcctaggcgacacggggaacgccgcaattcgaacctgagccagactagcagatccagcagaatgctcgcagtgtttccggccaacggaaaaatgcactctacagtcgactgcaacggagtggtctccttagggacaactactgagactgaaatgagaaagcgaagatcatcctcttttcatgtgagtatggattttttggaagatccaagtcagcgtcagagagccatgagcattgcatccattctcactaacacagtcgaggagctcgaggagtctagacagaaatgtcccccttgttggtataagttttctaacatctttctcatctgggactgctccccttactggctaaaggtgaagcatgtagtcaatctcgtggttatggatcccttcgtcgacttggccattacgatctgtattgtgctcaacaccctcttcatggccatggaacactatcccatgacagaccattttaataacgtgcttaccgtagggaatctcgtcttcacaggaatcttcactgctgagatgtttctgaaaataatcgccatggacccttattattattttcaggaaggatggaacatatttgatggctttatagttacccttagcttagttgaattgggactggccaatgttgaagggctgtctgtactccgctctttcagactcttgagagtatttaaactggcgaaatcatggccaacactgaatatgctcatcaaaatcattggcaactctgtaggtgccctcggtaatctcacactggttctagctatcattgtgtttatctttgccgtggtcggtatgcagttattcgggaagtcatacaaggactgcgtgtgcaagatagccagcgattgtcaactcccgagatggcacatgaacgactttttccattccttcctcatcgtgttccgggtcctgtgtggcgagtggattgagacaatgtgggactgtatggaggtagccgggcaagccatgtgtttaacagtattcatgatggtgatggtgatcggaaacctcgtggtgctgaatctgttcttggccctcttgctgtcctcattctcagctgataacttggctgccacagacgatgacaacgagatgaacaatctccagatcgccgtggaccgtatgcataaaggcgtcgcatacgtgaaaaggaagatatatgaatttatccaacaatcctttattcgaaagcagaaaattctggacgagataaaacccctggacgatcttaacaacaaaaaagattcctgcatgagcaatcacaccgccgaaattgggaaggaccttgactacttgaaggacgtcaacggtacaacgtccggcattggcaccggcagttccgtggagaagtatatcatcgatgagagcgattacatgtctttcattaacaatccctcccttacagtaactgtccccatagctgtgggagagagcgactttgagaacttgaacacggaggacttctcctctgaaagcgatttggaagagtccaaagagaaattgaatgaaagttcctcttcgtcggaggggtctacagtcgatatcggagcaccagtggaggaacaaccagtggtggaacctgaagaaaccctggagccagaggcttgctttacagagggatgtgtgcagagatttaagtgctgtcagattaatgtagaggagggcagaggtaaacagtggtggaatttaaggcgaacttgtttccggatcgtggagcacaactggtttgagacttttatcgtgtttatgattctcctatctagtggcgctctcgcctttgaggacatttatattgaccaacgaaaaactattaagaccatgctggaatatgccgacaaagtattcacctacatattcatcttggagatgctccttaaatgggtggcctatgggtatcagacttattttacgaacgcatggtgttggcttgatttcctcatcgtcgatgtgtcactggtttctctgacggccaacgcactgggctactcggaactgggagcaattaagtcccttcgcacgctccgggccctgcggcccctgcgggctttatccagattcgagggtatgagagtggtggtgaatgccctgttgggcgccataccatccataatgaacgtgctgctcgtctgtctcattttctggttgattttctcgatcatgggggtcaacctgttcgctgggaagttttatcactgtataaataccacaacaggggacaggttcgatatcgaggacgtgaacaaccatactgattgtttaaaactcattgagagaaatgaaaccgctaggtggaagaacgtgaaagtgaactttgacaatgtcggattcgggtacctgtcgctcttacaggtggccaccttcaagggatggatggatattatgtacgccgccgtggattctcgcaacgtggagctgcagccaaagtacgaggaatccctgtacatgtatctgtattttgtcatatttataatcttcggctctttcttcaccctgaatctctttataggagttatcattgacaatttcaatcagcagaagaaaaagtttggcggacaggatatctttatgaccgaggagcaaaaaaaatattataatgccatgaagaaactgggcagcaagaagcctcagaagccgatccctagaccaggaaataagttccagggcatggtgttcgactttgtgacgagacaagtgtttgatatatcaatcatgattctcatttgtctgaatatggtcactatgatggtcgaaacggatgatcagtctgagtacgtaacgaccattctttcacgcataaatcttgtgttcattgtgttgttcactggcgagtgtgttctgaaactcatcagcctacgccattactacttcaccatcggttggaatatcttcgacttcgttgtggttatattgtctatcgtggggatgtttctcgctgaactaatcgagaagtatttcgtgagccctaccctgttccgtgtgatcagactggctcgcattggacgaatcctgcggcttattaaaggtgctaaaggtattcgcactctcctgtttgcactgatgatgtctctacccgccttgtttaatattggcctcctgctcttcctggtcatgttcatctacgccatcttcgggatgtcaaactttgcctacgtgaaaagagaagtgggcatagatgatatgtttaatttcgaaacttttgggaatagcatgatttgcctgtttcagataacaacctccgctggttgggacgggcttctggcccctatcttaaacagtaagccgccggattgtgaccctaataaagtcaatccagggtcgtccgtcaagggagactgcgggaacccttccgtaggcatttttttcttcgtttcctatataatcattagctttttggtggttgtgaatatgtacatcgcagtcatcctagaaaacttttcagttgcaactgaggaaagcgccgagcccctttctgaggatgactttgagatgttttatgaggtgtgggaaaagttcgaccctgatgcgacacagttcatggagttcgagaaactgtctcagtttgctgcagcactggaacccccgctcaatctgccccagccgaataagctgcagttgattgcaatggacctccccatggtctctggtgatcgcatccactgtctggacatcctgttcgcttttaccaagcgggtgcttggggaaagcggggagatggacgcactgcggattcaaatggaagaacgcttcatggcctctaacccaagtaaggtctcctatcagcctataaccactactctaaaaaggaagcaggaagaggtgtcagccgtgatcattcagcgggcttaccgccggcatctgctcaaaaggaccgtcaaacaagcgagtttcacttacaacaagaacaagataaaaggcggcgccaatcttctcatcaaggaagatatgattatcgataggattaacgaaaacagtattacggaaaaaacagatctgactatgtctacagcggcttgcccaccttcttacgaccgagtgaccaaaccaatcgtggagaaacacgagcaggagggaaaagacgagaaagccaaaggcaaatag

SEQ ID NO: 64041 - DNA, 5945 bp, Artificial Sequence
  derived and/or modified sequence
atggagcaaactgtcctggtacctccgggacctgacagcttcaacttctttactcgggaaagcctggcggctattgaacgtcgtattgcagaggagaaagcaaagaatcccaagccggacaaaaaggacgatgatgagaatggaccaaagccaaattccgatctggaggcaggcaaaaacctgccatttatttatggagatattcccccagagatggtctccgagccattggaagacttagacccttattacataaacaagaagaccttcatcgtgctgaacaaagggaaggccatcttcagattttcagctacaagcgccctgtacatccttacccccttcaacccccttaggaagatcgcaataaaaattctagtgcattcattgttttctatgctgataatgtgcacgatcctgacgaactgcgttttcatgacaatgtccaatcccccagactggacaaagaacgttgagtacacattcaccggcatctataccttcgaaagtttgatcaagatcatagctaggggtttttgcttagaagacttcacattcctgcgcgacccctggaactggctggactttaccgtgatcaccttcgcctacgttactgagttcgtcgaccttggcaacgtctctgccctgagaacgtttagagtgctgagagcgcttaaaaccatcagcgtgattcctggactaaaaactatcgtgggagcactcatccagtccgtaaagaaactatcggacgtgatgattcttacggtgttttgcctctccgtgttcgccctgattgggctgcagctgttcatggggaatctacgcaacaagtgtatccagtggcccccaaccaatgcgtccctggaggaacactctatcgagaaaaacatcacagtcaattataacggaactttaataaacgaaactgtcttcgagtttgactggaaatcctatatccaggactctaggtaccactactttctggagggatttctggatgccctcctatgtggtaacagtagcgacgcagggcaatgtccagaagggtacatgtgcgtgaaggcaggaaggaatcccaactatggatacacctctttcgacacttttagctgggccttcctttcgctgttccgcctgatgacacaagacttctgggaaaacctgtatcagctcactctgcgcgcagcagggaaaacttacatgatcttcttcgtcctggttatttttctaggctccttttacctgatcaacctgatcttagctgtcgtcgccatggcttacgaagagcagaatcaggccactttagaagaggccgaacagaaggaggctgagttccagcaaatgatcgagcagctgaaaaagcagcaggaggccgctcagcaggcagcgaccgctacggcaagtgagcacagtagagagcccagcgccgctggacgtttatctgatagctcatccgaagctagtaagctaagctctaagtccgcaaaagagcggaggaatcgccgaaaaaagcgcaaacaaaaggagcagtcgggtggagaggagaaggacgaggacgagttccagaaatcggagtccgaagactctatcaggagaaaaggtttccgtttttccatcgaaggaaatagactcacatatgaaaagaggtactccagtccccaccagtcactcctgtcaataagaggaagcctcttcagtcccagacggaacagccgtacatcgttgttttccttcagagggagagctaaagatgtgggtagtgaaaatgatttcgccgatgacgaacacagtacgtttgaagataacgagagtagacgagactctctattcgtgccccgaaggcacggcgagagaagaaacagcaatctttcccagacctcccgctcctcacggatgctagccgtattcccagcaaacggcaagatgcatagtacagtcgactgcaacggggtcgttagcctcggaacaaccaccgagaccgagatgcgcaagcgaaggtccagtagcttccacgtgtccatggatttcctcgaagatccaagccagcggcagagagccatgagcatagcgtccattctgaccaacaccgtggaagagctggaggaaagtcgccaaaagtgtcccccttgttggtataagttctctaacatcttcttaatttgggactgctctccgtactggcttaaggtgaaacacgttgtcaacctggtagtgatggacccgtttgtcgatctggccatcaccatttgtattgtattgaacactctgtttatggccatggagcactaccccatgactgatcactttaataatgtcctgaccgtcggcaatctggtattcaccgggatttttaccgccgagatgttccttaagatcatcgctatggatccttattactattttcaagaaggatggaatatcttcgacggctttatagtcactttatccctcgtggagctcggtctggccaatgtggaaggcttgtcggtcctgcggtctttccggctgcttcgcgttttcaagctggctaaaagttggccaacactcaacatgctgattaagattattgggaacagcgtcggagctctcggtaatctgactctggtgctggctataatcgtttttatttttgccgttgtgggtatgcagttatttgggaaaagctacaaggattgcgtgtgcaaaatagcaagtgactgtcaactgcctcgttggcatatgaatgacttcttccacagtttcttaatcgtgtttcgggtgttatgcggcgaatggattgaaactatgtgggattgtatggaggtggccggtcaggccatgtgcctaacagtctttatgatggtcatggtcattggcaatctggtggttctgaatctgtttctcgctctccttctctcttcctttagtgccgacaacctggctgccaccgacgatgacaatgaaatgaataatttacagatagccgttgatagaatgcataagggggtagcctacgtgaaaagaaagatctatgaattcatacagcaatcattcattagaaagcagaagatattggatgagataaagcccctggacgatcttaacaataagaaggattcctgcatgtccaatcacacagccgaaatcggaaaagacctggattatctcaaggacgtgaacggaacaacttccggaatcgggactggatcgtctgtggaaaagtacattattgacgagtccgattatatgtcttttataaacaacccaagcctgaccgtcactgtgccaatcgccgtgggagaatcagacttcgagaacctgaataccgaagacttctccagtgagtccgaccttgaggagagcaaggagaagctgaacgagagttcgtccagctccgagggatcgacagtcgatataggggcacctgtcgaagaacaaccagtggtggaaccagaggagacactcgagccagaagcgtgttttacagaaggctgcgtgcaacgttttaaatgttgccagatcaacgtcgaggaaggacggggaaaacagtggtggaatcttaggcggacatgctttcggattgtagaacacaactggttcgagacctttatagtttttatgattcttctgtcttccggcgctctggccttcgaggatatatatatcgaccagaggaagactatcaagaccatgctggaatatgctgataaagtgttcacatacatctttatcctggaaatgttgttgaagtgggtagcatacggatatcaaacttatttcaccaacgcgtggtgctggctggacttcctgattgtcgacgtgtccctggtgagcctcaccgctaacgcactcggctattcagagctgggggctattaagagcctgcggaccctgcgggcattgagaccgctgagggcactgtcacggttcgagggtatgcgtgttgtggtgaacgcactgctcggagccatcccaagcattatgaacgtccttctcgtctgcttgatcttttggctcattttctctatcatgggagtgaatttgtttgcaggaaaattttatcactgcatcaacacgacaaccggcgatagattcgatatagaggatgtcaacaaccataccgactgcttaaagctcatagaaagaaacgagaccgctagatggaagaacgtgaaagttaatttcgacaatgtggggttcggttacttgagccttctccaggtagccactttcaagggatggatggatattatgtacgctgcagtggacagccgaaacgttgagcttcagcccaagtacgaagaatctctgtacatgtacctctactttgtgatctttatcatatttggttctttcttcactctgaatttgttcatcggcgttatcatcgataatttcaaccagcaaaagaaaaaattcggaggacaggatatctttatgaccgaggaacaaaaaaaatactacaacgcaatgaagaagctgggctctaagaaaccccagaagcctatccctcgcccaggaaacaaattccagggtatggttttcgattttgtcacccggcaggtgttcgacatcagtataatgattctgatttgtttgaatatggtgactatgatggtggagaccgacgaccagtctgagtacgtgacaacaatcctgagcagaattaatttggtgttcattgtcctgtttacgggcgaatgtgtgttgaagctgattagtttaaggcattactatttcaccattggttggaacatcttcgattttgtggtagtcattctctctatcgtaggcatgtttctggcagaactgattgaaaaatatttcgtgagccctacactttttcgggtgatacgtttggcaagaatcgggcgtattctccgtctgattaaaggagcaaagggcatacggactctgttattcgcactgatgatgtcacttcctgctttgtttaatattgggctcttgctctttctcgttatgtttatttacgccattttcggcatgagtaacttcgcatacgtcaagcgggaagtggggatcgacgacatgttcaatttcgagactttcgggaactccatgatatgcctcttccagattaccacaagtgcagggtgggatgggcttttagcacctatcctgaattctaagcctccagattgcgaccccaataaggttaatcccggaagctccgtgaagggggactgcggcaaccccagtgtcggcatcttctttttcgtttcttatatcattatctcgtttcttgtggtggttaacatgtatattgccgttattctggagaatttcagcgtggcaactgaagagagcgcagagcctctctctgaggatgactttgagatgttctatgaggtttgggagaagtttgatccagatgcgactcagtttatggagttcgaaaagttatcccagtttgctgcagccctcgagccacctttgaacctgccacagccgaataaacttcaattaatagccatggaccttccgatggtctccggggaccggattcattgcctcgatatactctttgcttttacaaaacgtgtactaggcgagagtggagagatggatgctctgcgcatccagatggaggagaggtttatggcgtctaacccttccaaagtgagctaccagccaattacaacaacgttgaaacgaaaacaggaggaggtcagcgcagtcatcattcaacgggcttatagaagacacctcctgaagagaacggtcaagcaggcctcgtttacatataataagaataaaatcaagggcggtgcgaacctgctgataaaggaagatatgataatcgatcggatcaacgagaattccattaccgaaaaaaccgatctgaccatgtctaccgcggcatgtcctccctcctacgacagggtcaccaagccaatcgtggagaagcatgaacaggagggaaaggatgagaaggctaaggggaagta

SEQ ID NO: 64042 - DNA, 5946 bp, Artificial Sequence
  derived and/or modified sequence
atggagcaaacagtgcttgtaccaccaggacctgacagcttcaacttcttcaccagagaatctcttgcggctattgaaagacgcattgcagaagaaaaggcaaagaatcccaaaccagacaaaaaagatgacgacgaaaatggcccaaagccaaatagtgacttggaagctggaaagaaccttccatttatttatggagacattcctccagagatggtgtcagagcccctggaggacctggacccctactatatcaataagaaaacttttatagtattgaataaagggaaggccatcttccggttcagtgccacctctgccctgtacattttaactcccttcaatcctcttaggaaaatagctattaagattttggtacattcattattcagcatgctaattatgtgcactattttgacaaactgtgtgtttatgacaatgagtaaccctcctgattggacaaagaatgtagaatacaccttcacaggaatatatacttttgaatcacttataaaaattattgcaaggggattctgtttagaagattttactttccttcgggatccatggaactggctcgatttcactgtcattacatttgcgtacgtcacagagtttgtggacctgggcaatgtctcggcattgagaacattcagagttctccgagcattgaagacgatttcagtcattccaggcctgaaaaccattgtgggagccctgatccagtctgtgaagaagctctcagatgtaatgatcctgactgtgttctgtctgagcgtatttgctctaattgggctgcagctgttcatgggcaacctgaggaataaatgtatacaatggcctcccaccaatgcttccttggaggaacatagtatagaaaagaatataactgtgaattataatggtacacttataaatgaaactgtctttgagtttgactggaagtcatatattcaagattcaagatatcattatttcctggagggttttttagatgcactactatgtggaaatagctctgatgcaggccaatgtccagagggatatatgtgtgtgaaagctggtagaaatcccaattatggctacacaagctttgataccttcagttgggcttttttgtccttgtttcgactaatgactcaggacttctgggaaaatctttatcaactgacattacgtgctgctgggaaaacgtacatgatattttttgtattggtcattttcttgggctcattctacctaataaatttgatcctggctgtggtggccatggcctacgaggaacagaatcaggccaccttggaagaagcagaacagaaagaggccgaatttcagcagatgattgaacagcttaaaaagcaacaggaggcagctcagcaggcagcaacggcaactgcctcagaacattccagagagcccagtgcagcaggcaggctctcagacagctcatctgaagcctctaagttgagttccaagagtgctaaggaaagaagaaatcggaggaagaaaagaaaacagaaagagcagtctggtggggaagagaaagatgaggatgaattccaaaaatctgaatctgaggacagcatcaggaggaaaggttttcgcttctccattgaagggaaccgattgacatatgaaaagaggtactcctccccacaccagtctttgttgagcatccgtggctccctattttcaccaaggcgaaatagcagaacaagccttttcagctttagagggcgagcaaaggatgtgggatctgagaacgacttcgcagatgatgagcacagcacctttgaggataacgagagccgtagagattccttgtttgtgccccgacgacacggagagagacgcaacagcaacctgagtcagaccagtaggtcatcccggatgctggcagtgtttccagcgaatgggaagatgcacagcactgtggattgcaatggtgtggtttccttgggaacaaccactgaaactgaaatgagaaagagaaggtcaagttctttccacgtttccatggactttctagaagatccttcccaaaggcaacgagcaatgagtatagccagcattctaacaaatacagtagaagaacttgaagaatccaggcagaaatgcccaccctgttggtataaattttccaacatattcttaatctgggactgttctccatattggttaaaagtgaaacatgttgtcaacctggttgtgatggacccatttgttgacctggccatcaccatctgtattgtcttaaatactcttttcatggccatggagcactatccaatgacggaccatttcaataatgtgcttacagtaggaaacttggttttcactgggatctttacagcagaaatgtttctgaaaattattgccatggatccttactattatttccaagaaggctggaatatctttgacggttttattgtgacgcttagcctggtagaacttggactcgccaatgtggaaggattatctgttctccgttcatttcgattgctgcgagttttcaagttggcaaaatcttggccaacgttaaatatgctaataaagatcatcggcaattccgtgggggctctgggaaatttaaccctcgtcttggccatcatcgtcttcatttttgccgtggtcggcatgcagctctttggtaaaagctacaaagattgtgtctgcaagatcgccagtgattgtcaactcccacgctggcacatgaatgacttcttccactccttcctgattgtgttccgcgtgctgtgtggggagtggatagagaccatgtgggactgtatggaggttgctggtcaagccatgtgccttactgtcttcatgatggtcatggtgattggaaacctagtggtcctgaatctctttctggccttgcttctgagctcatttagtgcagacaaccttgcagccactgatgatgataatgaaatgaataatctccaaattgctgtggataggatgcacaaaggagtagcttatgtgaaaagaaaaatatatgaatttattcaacagtccttcattaggaaacaaaagattttagatgaaattaaaccacttgatgatctaaacaacaagaaagacagttgtatgtccaatcatacagcagaaattgggaaagatcttgactatcttaaagatgtaaatggaactacaagtggtataggaactggcagcagtgttgaaaaatacattattgatgaaagtgattacatgtcattcataaacaaccccagtcttactgtgactgtaccaattgctgtaggagaatctgactttgaaaatttaaacacggaagactttagtagtgaatcggatctggaagaaagcaaagagaaactgaatgaaagcagtagctcatcagaaggtagcactgtggacatcggcgcacctgtagaagaacagcccgtagtggaacctgaagaaactcttgaaccagaagcttgtttcactgaaggctgtgtacaaagattcaagtgttgtcaaatcaatgtggaagaaggcagaggaaaacaatggtggaacctgagaaggacgtgtttccgaatagttgaacataactggtttgagaccttcattgttttcatgattctccttagtagtggtgctctggcatttgaagatatatatattgatcagcgaaagacgattaagacgatgttggaatatgctgacaaggttttcacttacattttcattctggaaatgcttctaaaatgggtggcatatggctatcaaacatatttcaccaatgcctggtgttggctggacttcttaattgttgatgtttcattggtcagtttaacagcaaatgccttgggttactcagaacttggagccatcaaatctctcaggacactaagagctctgagacctctaagagccttatctcgatttgaagggatgagggtggttgtgaatgcccttttaggagcaattccatccatcatgaatgtgcttctggtttgtcttatattctggctaattttcagcatcatgggcgtaaatttgtttgctggcaaattctaccactgtattaacaccacaactggtgacaggtttgacatcgaagacgtgaataatcatactgattgcctaaaactaatagaaagaaatgagactgctcgatggaaaaatgtgaaagtaaactttgataatgtaggatttgggtatctctctttgcttcaagttgccacattcaaaggatggatggatataatgtatgcagcagttgattccagaaatgtggaactccagcctaagtatgaagaaagtctgtacatgtatctttactttgttattttcatcatctttgggtccttcttcaccttgaacctgtttattggtgtcatcatagataatttcaaccagcagaaaaagaagtttggaggtcaagacatctttatgacagaagaacagaagaaatactataatgcaatgaaaaaattaggatcgaaaaaaccgcaaaagcctatacctcgaccaggaaacaaatttcaaggaatggtctttgacttcgtaaccagacaagtttttgacataagcatcatgattctcatctgtcttaacatggtcacaatgatggtggaaacagatgaccagagtgaatatgtgactaccattttgtcacgcatcaatctggtgttcattgtgctatttactggagagtgtgtactgaaactcatctctctacgccattattattttaccattggatggaatatttttgattttgtggttgtcattctctccattgtaggtatgtttcttgccgagctgatagaaaagtatttcgtgtcccctaccctgttccgagtgatccgtcttgctaggattggccgaatcctacgtctgatcaaaggagcaaaggggatccgcacgctgctctttgctttgatgatgtcccttcctgcgttgtttaacatcggcctcctactcttcctagtcatgttcatctacgccatctttgggatgtccaactttgcctatgttaagagggaagttgggatcgatgacatgttcaactttgagacctttggcaacagcatgatctgcctattccaaattacaacctctgctggctgggatggattgctagcacccattctcaacagtaagccacccgactgtgaccctaataaagttaaccctggaagctcagttaagggagactgtgggaacccatctgttggaattttcttttttgtcagttacatcatcatatccttcctggttgtggtgaacatgtacatcgcggtcatcctggagaacttcagtgttgctactgaagaaagtgcagagcctctgagtgaggatgactttgagatgttctatgaggtttgggagaagtttgatcccgatgcaactcagttcatggaatttgaaaaattatctcagtttgcagctgcgcttgaaccgcctctcaatctgccacaaccaaacaaactccagctcattgccatggatttgcccatggtgagtggtgaccggatccactgtcttgatatcttatttgcttttacaaagcgggttctaggagagagtggagagatggatgctctacgaatacagatggaagagcgattcatggcttccaatccttccaaggtctcctatcagccaatcactactactttaaaacgaaaacaagaggaagtatctgctgtcattattcagcgtgcttacagacgccaccttttaaagcgaactgtaaaacaagcttcctttacgtacaataaaaacaaaatcaaaggtggggctaatcttcttataaaagaagacatgataattgacagaataaatgaaaactctattacagaaaaaactgatctgaccatgtccactgcagcttgtccaccttcctatgaccgggtgacaaagccaattgtggaaaaacatgagcaagaaggcaaagatgaaaaagccaaagggaaataa

SEQ ID NO: 64043 - DNA, 5946 bp, Artificial Sequence
  derived and/or modified sequence
atggagcagaccgtgctggtgccccccggccccgacagcttcaacttcttcaccagagagagcctggccgccatcgagagaagaatcgccgaggagaaggccaagaaccccaagcccgacaagaaggacgacgacgagaacggccccaagcccaacagcgacctggaggccggcaagaacctgcccttcatctacggcgacatcccccccgagatggtgagcgagcccctggaggacctggacccctactacatcaacaagaagaccttcatcgtgctgaacaagggcaaggccatcttcagattcagcgccaccagcgccctgtacatcctgacccccttcaaccccctgagaaagatcgccatcaagatcctggtgcacagcctgttcagcatgctgatcatgtgcaccatcctgaccaactgcgtgttcatgaccatgagcaacccccccgactggaccaagaacgtggagtacaccttcaccggcatctacaccttcgagagcctgatcaagatcatcgccagaggcttctgcctggaggacttcaccttcctgagagacccctggaactggctggacttcaccgtgatcaccttcgcctacgtgaccgagttcgtggacctgggcaacgtgagcgccctgagaaccttcagagtgctgagagccctgaagaccatcagcgtgatccccggcctgaagaccatcgtgggcgccctgatccagagcgtgaagaagctgagcgacgtgatgatcctgaccgtgttctgcctgagcgtgttcgccctgatcggcctgcagctgttcatgggcaacctgagaaacaagtgcatccagtggccccccaccaacgccagcctggaggagcacagcatcgagaagaacatcaccgtgaactacaacggcaccctgatcaacgagaccgtgttcgagttcgactggaagagctacatccaggacagcagataccactacttcctggagggcttcctggacgccctgctgtgcggcaacagcagcgacgccggccagtgccccgagggctacatgtgcgtgaaggccggcagaaaccccaactacggctacaccagcttcgacaccttcagctgggccttcctgagcctgttcagactgatgacccaggacttctgggagaacctgtaccagctgaccctgagagccgccggcaagacctacatgatcttcttcgtgctggtgatcttcctgggcagcttctacctgatcaacctgatcctggccgtggtggccatggcctacgaggagcagaaccaggccaccctggaggaggccgagcagaaggaggccgagttccagcagatgatcgagcagctgaagaagcagcaggaggccgcccagcaggccgccaccgccaccgccagcgagcacagcagagagcccagcgccgccggcagactgagcgacagcagcagcgaggccagcaagctgagcagcaagagcgccaaggagagaagaaacagaagaaagaagagaaagcagaaggagcagagcggcggcgaggagaaggacgaggacgagttccagaagagcgagagcgaggacagcatcagaagaaagggcttcagattcagcatcgagggcaacagactgacctacgagaagagatacagcagcccccaccagagcctgctgagcatcagaggcagcctgttcagccccagaagaaacagcagaaccagcctgttcagcttcagaggcagagccaaggacgtgggcagcgagaacgacttcgccgacgacgagcacagcaccttcgaggacaacgagagcagaagagacagcctgttcgtgcccagaagacacggcgagagaagaaacagcaacctgagccagaccagcagaagcagcagaatgctggccgtgttccccgccaacggcaagatgcacagcaccgtggactgcaacggcgtggtgagcctgggcaccaccaccgagaccgagatgagaaagagaagaagcagcagcttccacgtgagcatggacttcctggaggaccccagccagagacagagagccatgagcatcgccagcatcctgaccaacaccgtggaggagctggaggagagcagacagaagtgccccccctgctggtacaagttcagcaacatcttcctgatctgggactgcagcccctactggctgaaggtgaagcacgtggtgaacctggtggtgatggaccccttcgtggacctggccatcaccatctgcatcgtgctgaacaccctgttcatggccatggagcactaccccatgaccgaccacttcaacaacgtgctgaccgtgggcaacctggtgttcaccggcatcttcaccgccgagatgttcctgaagatcatcgccatggacccctactactacttccaggagggctggaacatcttcgacggcttcatcgtgaccctgagcctggtggagctgggcctggccaacgtggagggcctgagcgtgctgagaagcttcagactgctgagagtgttcaagctggccaagagctggcccaccctgaacatgctgatcaagatcatcggcaacagcgtgggcgccctgggcaacctgaccctggtgctggccatcatcgtgttcatcttcgccgtggtgggcatgcagctgttcggcaagagctacaaggactgcgtgtgcaagatcgccagcgactgccagctgcccagatggcacatgaacgacttcttccacagcttcctgatcgtgttcagagtgctgtgcggcgagtggatcgagaccatgtgggactgcatggaggtggccggccaggccatgtgcctgaccgtgttcatgatggtgatggtgatcggcaacctggtggtgctgaacctgttcctggccctgctgctgagcagcttcagcgccgacaacctggccgccaccgacgacgacaacgagatgaacaacctgcagatcgccgtggacagaatgcacaagggcgtggcctacgtgaagagaaagatctacgagttcatccagcagagcttcatcagaaagcagaagatcctggacgagatcaagcccctggacgacctgaacaacaagaaggacagctgcatgagcaaccacaccgccgagatcggcaaggacctggactacctgaaggacgtgaacggcaccaccagcggcatcggcaccggcagcagcgtggagaagtacatcatcgacgagagcgactacatgagcttcatcaacaaccccagcctgaccgtgaccgtgcccatcgccgtgggcgagagcgacttcgagaacctgaacaccgaggacttcagcagcgagagcgacctggaggagagcaaggagaagctgaacgagagcagcagcagcagcgagggcagcaccgtggacatcggcgcccccgtggaggagcagcccgtggtggagcccgaggagaccctggagcccgaggcctgcttcaccgagggctgcgtgcagagattcaagtgctgccagatcaacgtggaggagggcagaggcaagcagtggtggaacctgagaagaacctgcttcagaatcgtggagcacaactggttcgagaccttcatcgtgttcatgatcctgctgagcagcggcgccctggccttcgaggacatctacatcgaccagagaaagaccatcaagaccatgctggagtacgccgacaaggtgttcacctacatcttcatcctggagatgctgctgaagtgggtggcctacggctaccagacctacttcaccaacgcctggtgctggctggacttcctgatcgtggacgtgagcctggtgagcctgaccgccaacgccctgggctacagcgagctgggcgccatcaagagcctgagaaccctgagagccctgagacccctgagagccctgagcagattcgagggcatgagagtggtggtgaacgccctgctgggcgccatccccagcatcatgaacgtgctgctggtgtgcctgatcttctggctgatcttcagcatcatgggcgtgaacctgttcgccggcaagttctaccactgcatcaacaccaccaccggcgacagattcgacatcgaggacgtgaacaaccacaccgactgcctgaagctgatcgagagaaacgagaccgccagatggaagaacgtgaaggtgaacttcgacaacgtgggcttcggctacctgagcctgctgcaggtggccaccttcaagggctggatggacatcatgtacgccgccgtggacagcagaaacgtggagctgcagcccaagtacgaggagagcctgtacatgtacctgtacttcgtgatcttcatcatcttcggcagcttcttcaccctgaacctgttcatcggcgtgatcatcgacaacttcaaccagcagaagaagaagttcggcggccaggacatcttcatgaccgaggagcagaagaagtactacaacgccatgaagaagctgggcagcaagaagccccagaagcccatccccagacccggcaacaagttccagggcatggtgttcgacttcgtgaccagacaggtgttcgacatcagcatcatgatcctgatctgcctgaacatggtgaccatgatggtggagaccgacgaccagagcgagtacgtgaccaccatcctgagcagaatcaacctggtgttcatcgtgctgttcaccggcgagtgcgtgctgaagctgatcagcctgagacactactacttcaccatcggctggaacatcttcgacttcgtggtggtgatcctgagcatcgtgggcatgttcctggccgagctgatcgagaagtacttcgtgagccccaccctgttcagagtgatcagactggccagaatcggcagaatcctgagactgatcaagggcgccaagggcatcagaaccctgctgttcgccctgatgatgagcctgcccgccctgttcaacatcggcctgctgctgttcctggtgatgttcatctacgccatcttcggcatgagcaacttcgcctacgtgaagagagaggtgggcatcgacgacatgttcaacttcgagaccttcggcaacagcatgatctgcctgttccagatcaccaccagcgccggctgggacggcctgctggcccccatcctgaacagcaagccccccgactgcgaccccaacaaggtgaaccccggcagcagcgtgaagggcgactgcggcaaccccagcgtgggcatcttcttcttcgtgagctacatcatcatcagcttcctggtggtggtgaacatgtacatcgccgtgatcctggagaacttcagcgtggccaccgaggagagcgccgagcccctgagcgaggacgacttcgagatgttctacgaggtgtgggagaagttcgaccccgacgccacccagttcatggagttcgagaagctgagccagttcgccgccgccctggagccccccctgaacctgccccagcccaacaagctgcagctgatcgccatggacctgcccatggtgagcggcgacagaatccactgcctggacatcctgttcgccttcaccaagagagtgctgggcgagagcggcgagatggacgccctgagaatccagatggaggagagattcatggccagcaaccccagcaaggtgagctaccagcccatcaccaccaccctgaagagaaagcaggaggaggtgagcgccgtgatcatccagagagcctacagaagacacctgctgaagagaaccgtgaagcaggccagcttcacctacaacaagaacaagatcaagggcggcgccaacctgctgatcaaggaggacatgatcatcgacagaatcaacgagaacagcatcaccgagaagaccgacctgaccatgagcaccgccgcctgcccccccagctacgacagagtgaccaagcccatcgtggagaagcacgagcaggagggcaaggacgagaaggccaagggcaagtag

SEQ ID NO: 64044 - protein, 938 aa, Artificial Sequence
  derived and/or modified sequence
MAKAGRAGGPPPGGGAPWHLRNVLSDSVESSDDEFFDARGEGTAPCTSSILQEKQRELYRVSLRRQRFPAQGSIEIHEDSEEGCPQRSCKTHVLLLVLHGGNILDTGAGDPSCKAADIHTFSSVLEKVTRAHFPAALGHILIKFVPCPAICSEAFSLVSHLNPYSHDEGCLSSSQDHVPLAALPLLAISSPQYQDAVATVIERANQVYREFLKSSDGIGFSGQVCLIGDCVGGLLAFDAICYSAGPSGDSPASSSRKGSISSTQDTPVAVEEDCSLASSKRLSKSNIDISSGLEDEEPKRPLPRKQSDSSTYDCEAITQHHAFLSSIHSSVLKDESETPAAGGPQLPEVSLGRFDFDVSDFFLFGSPLGLVLAMRRTVLPGLDGFQVRPACSQVYSFFHCADPSASRLEPLLEPKFHLVPPVSVPRYQRFPLGDGQSLLLADALHTHSPLFLEGSSRDSPPLLDAPASPPQASRFQRPGRRMSEGSSHSESSESSDSMAPVGASRITAKWWGSKRIDYALYCPDVLTAFPTVALPHLFHASYWESTDVVAFILRQVMRYESVNIKESARLDPAALSPANPREKWLRKRTQVKLRNVTANHRANDVIAAEDGPQVLVGRFMYGPLDMVALTGEKVDILVMAEPSSGRWVHLDTEITNSSGRITYNVPRPRRLGVGVYPVKMVVRGDQTCAMSYLTVLPRGMECVVFSIDGSFAASVSIMGSDPKVRPGAVDVVRHWQDLGYMILYITGRPDMQKQRVVSWLSQHNFPQGMIFFSDGLVHDPLRQKAIFLRNLMQECFIKISAAYGSTKDISVYSVLGLPASQIFIVGRPTKKYQTQCQFLSEGYAAHLAALEASHRSRPKKNNSRMILRKGSFGLHAQPEFLRKRNHLRRTMSVQQPDPPAANPKPERAQSQPESDKDHERPLPALSWARGPPKFESVP

SEQ ID NO: 64045 - DNA, 2817 bp, Artificial Sequence
  derived and/or modified sequence
atggcgaaggccggacgcgccggaggccccccaccaggagggggtgctccatggcatctccgcaatgtgctgtctgacagtgtggagagctccgatgacgagtttttcgacgcacgcggcgagggaactgccccgtgtacctcttcaatactacaggaaaagcagagagagctataccgggtctccttgaggcgccagaggtttcccgcacagggctctatcgagattcacgaggatagtgaggagggatgtcctcagcgcagctgtaagacccacgtgctactgttggtattgcatgggggaaacattctcgacacgggggcaggggatcctagctgtaaagccgccgacattcacactttcagttccgtgcttgaaaaagttaccagggcacattttcccgccgcactgggtcacatactgataaaatttgtaccatgtcctgcaatatgttctgaggcgttttcccttgtatctcatctgaacccgtactctcacgacgagggctgtttatccagtagccaagatcacgtgcctctggcggccctgccactgctggctatttctagtccccagtatcaggacgcggttgccaccgtgattgaacgggcgaatcaagtttaccgggaattccttaaatcttcagatgggatcgggttttccggccaggtgtgtctgataggcgattgcgtcgggggattactggcgttcgacgccatatgttatagtgccggtccttccggagattcaccagcttcctctagccgcaagggctctatcagctccacacaggatacccccgtcgccgtcgaagaggattgcagcttggcttcctctaaaaggctaagcaaatccaacatcgatatctccagtggtctggaggatgaggagccaaagcgtccactgcctcggaaacagtctgactcctccacctacgattgcgaggcaattacacagcatcatgcatttctgagtagtatccacagcagtgttcttaaggacgaatctgaaacacccgcagccgggggtccccaactcccagaagttagcctaggtcggtttgattttgacgtttccgactttttcctgttcggcagtccactgggtcttgtcctggctatgcggaggactgtgctgccaggcctggacggcttccaagtgaggcccgcctgttctcaggtgtacagttttttccactgcgccgatccctctgcttcacggctagagcccctgcttgagcctaagttccatctggtcccgcccgtgtcagtccctcgctatcaaagatttccattaggagatgggcagagtctgctgctggcagacgctttacatacacactcaccattgttcctcgagggcagtagtagagattctcccccactcctggacgcaccggctagtcccccacaagcttcacgcttccaaagacccggcaggcgtatgagtgagggctcctcccattcagaaagttcagaatcttctgattcaatggctcctgtgggagcaagcaggatcactgcaaaatggtggggaagtaagcggattgactatgcgttgtactgtcccgatgtcctgactgcctttccaactgttgctttacctcacctcttccacgcgtcatactgggaaagtacagatgtggtagccttcatactgagacaggtgatgcgctatgaatctgtcaatatcaaagagtctgcacgtttggacccagccgctctgagtccagccaaccccagagagaagtggctgagaaaacgtacacaggtaaaactgaggaatgtgactgccaaccatcgcgcaaatgacgtgatcgcggccgaggatgggccacaggtgttagtgggccggttcatgtacgggcccctggatatggtcgcactgaccggcgagaaagtggacattctcgttatggcagagccttcctctggtcggtgggtccaccttgatacagaaattaccaattcctccggtagaatcacttacaacgtgcctcgaccaagaagactaggcgttggcgtgtaccctgtcaaaatggtagtgcgcggcgatcaaacctgtgctatgagttatcttacagtgcttcccagggggatggaatgtgtcgttttcagcatcgacggtagtttcgcagcgtcagtgtcgatcatgggaagtgaccctaaggtccgacccggcgcggtggatgtggtccgccattggcaggatctggggtacatgattctctacatcactggacggcctgacatgcagaagcaacgcgtggtttcatggctgtcccagcacaatttcccccaagggatgatcttctttagcgacggcctagtgcatgatcccctgcgccaaaaggcgatttttttgcgtaacctaatgcaggagtgctttatcaagataagtgctgcatatggcagcacaaaggatatctcagtgtatagcgtgttaggactgcccgcctcccagatttttatagtgggacgacccaccaaaaagtaccagacacagtgccagtttctgtccgagggttatgccgcccacctggcagcactcgaggccagccatcggagcagacccaagaagaacaatagcaggatgatattgcgcaaagggagctttggcctgcacgcccaacctgagttcttgaggaaaagaaatcatttaaggagaacaatgagcgtacagcagccagatcccccagcagccaatccaaaacctgagcgggcgcagtcgcagcctgagtccgataaggaccacgaaaggcccctgcccgccctgtcttgggcacggggaccacctaagttcgagtctgtgccctag

SEQ ID NO: 64046 - DNA, 2817 bp, Artificial Sequence
  derived and/or modified sequence
atggccaaggccggccgggccggcggccccccacctgggggcggggccccctggcacctgagaaatgtgctgagtgacagcgtggagagcagtgatgatgagttctttgatgcccggggggagggcacagccccctgcaccagcagcatcctgcaggagaagcagcgggagctgtacagagtgtccctgcggcggcagcgcttccctgcccagggcagcattgagatccacgaggacagcgaggagggctgcccccagaggagctgcaagacccacgtgctgctgctggtgctgcatggaggcaacatcctggacaccggggccggggaccccagctgcaaggctgctgacatccacaccttcagctctgtgctggagaaggtgacccgggcccacttccctgctgccctgggccacatcctgatcaagtttgtgccctgcccagccatctgcagcgaggccttcagcctggtgagccacctgaacccctacagccatgatgagggctgcctgagcagcagccaggaccacgtgcccctggccgccctgcccctgctggccatcagcagcccccagtaccaggatgctgtggccaccgtgattgagcgggccaaccaggtgtaccgggagttcctgaagagcagtgatggcatcggcttcagcggccaggtgtgcctgattggagactgtgtgggcggcctgctggcctttgatgccatctgctacagcgctggccccagcggggacagccctgccagcagcagcaggaagggcagcatcagcagcacccaggacacccctgtggccgtggaggaggactgcagcctggccagcagcaagaggctgagcaagagcaacatcgacatcagcagcggcctggaggatgaggagcccaagaggcccctgcccaggaagcagagcgacagcagcacctatgactgtgaggccatcacccagcaccacgccttcctgagcagcatccacagctctgtgctgaaggatgagagcgagaccccagctgctgggggcccccagctgcctgaggtgtccctgggccgctttgattttgatgtgtctgacttcttcctgtttggcagccccctgggcctggtgctggccatgagaagaacagtgctgcccggcctggatggcttccaggtgcggcctgcctgcagccaggtgtacagcttcttccactgtgccgaccccagcgccagccggctggagcccctgctggagcccaagttccacctggtgccccctgtgtctgtgccccgctaccagcgcttccccctgggagatggccagagcctgctgctggctgatgccctgcacacccacagccccctcttcctggagggcagcagccgggacagcccccccctgctggatgccccagccagccccccccaggccagccgcttccagaggcctggccgcaggatgtctgagggcagcagccacagcgagagcagcgagagcagtgacagcatggcccctgtgggcgccagccgcatcacagccaagtggtggggcagcaagagaattgattatgccctgtactgcccagatgtgctgacagccttccccaccgtggccctgccccacctgttccacgccagctactgggagagcacagatgtggtggccttcatcctgcggcaggtgatgagatatgaatctgtgaacatcaaggagagcgcccggctggaccctgctgccctgagccctgccaacccccgggagaagtggctgaggaagaggacccaggtgaagctgagaaatgtgacagccaaccaccgggccaatgatgtgattgctgctgaagatggcccccaggtgctggtgggccgcttcatgtatggccccctggacatggtggccctgaccggggagaaggtggacatcctggtgatggccgagcccagcagcggccgctgggtgcacctggacacagagatcaccaacagcagcggccgcatcacctacaacgtgccccggccccggcggctgggcgtgggcgtgtaccctgtgaagatggtggtgcggggggaccagacctgtgccatgagctacctgactgtgctgccccggggcatggagtgtgtggtgttcagcattgatggcagctttgctgcctctgtgtccatcatgggcagtgaccccaaggtgcggcctggagctgtggatgtggtgcgccactggcaggacctgggctacatgatcctgtacatcaccggccgcccagacatgcagaagcagagggtggtgtcctggctgagccagcacaacttcccccagggcatgatcttcttcagtgatggcctggtgcatgaccccctgcggcagaaggccatcttcctgaggaacctgatgcaggagtgcttcatcaagatctctgctgcctacggcagcaccaaggacatctctgtgtacagcgtgctgggcctgcctgccagccagatcttcatcgtgggccggcccaccaagaagtaccagacccagtgccagttcctgtctgagggctacgccgcccacctggccgccctggaggccagccacaggagccggcccaagaagaacaacagcaggatgatcctgaggaagggcagctttggcctgcacgcccagcctgagttcctgaggaagaggaaccacctgcggaggaccatgtctgtgcagcagcctgaccccccagctgccaaccccaagccagagcgggcccagagccagcctgagagtgacaaggaccacgagcggcccctgcctgccctgtcctgggcccggggcccccccaagtttgagagcgtgccctag

SEQ ID NO: 64047 - DNA, 2817 bp, Artificial Sequence
  derived and/or modified sequence
atggccaaggccggccgggccggcggccccccccccggcggcggcgcaccatggcacctccgaaacgttctctcagactccgtggagtcaagtgacgacgaatttttcgatgcacgtggagagggtactgctccttgtacatccagtatcttgcaggagaagcagcgggagttgtatagagtgagtttgaggcgtcaacgatttcctgcccagggaagcattgagattcacgaggacagcgaggaagggtgtcctcagcggagttgcaagacccacgtgctgctgctggtgctgcatggtgggaacattctggatacaggagccggtgatccttcctgtaaggcagccgacattcatacgtttagcagtgtcttagagaaggtgacccgggcacactttcccgccgccctggggcacatcctgatcaaatttgttccctgtccggcgatctgttctgaagcctttagtctcgtctcacatctcaatccttacagccacgacgaaggctgtcttagctcttcacaggaccacgtgccattagcggcgctgcctctgctggcaattagttcacctcagtaccaggacgccgtggctaccgtgattgaacgggccaaccaggtgtatcgagaatttttaaaaagcagtgacggaatcgggtttagtggccaggtctgcctcataggggactgtgtggggggcttgctggcattcgatgcgatctgctattctgcagggccttcgggcgactcaccagccagttcttccaggaagggctctataagcagcacacaagatactccagtggctgtggaggaagactgcagtctggcgagctcgaaaagactgtcaaagagtaatatcgacatctccagcggcctggaagatgaggagccgaagaggccactgccgcgtaagcagtccgattccagtacatacgattgtgaagccattacccagcaccacgcctttctctccagtatccacagttctgttttgaaagacgaaagcgaaacacctgcagccgggggcccacagctgcctgaagttagcctgggccgctttgactttgacgtctctgacttttttctatttggctccccgcttgggctcgtccttgcgatgagaaggaccgtgctcccggggctcgatggctttcaagtgcgccccgcctgttcccaagtttactccttcttccattgcgcagatccctcggcctccagacttgaaccgctgctagagcctaagtttcacctagttccacctgtgtcggtgcctaggtatcagcgctttccactcggtgacggacaatcacttctgttggccgacgccttgcatactcactctcccctgttcctggagggcagcagcagggactcgccgccgcttctcgatgccccagcctcccccccacaggcctcacgatttcagcgccctgggaggagaatgtctgagggttcttcacactcagagtcatcggaatcaagcgacagcatggcccctgtgggggccagtcgtattacagcaaagtggtgggggtctaagaggatcgattacgccctgtattgtcccgacgtgctgaccgcatttccaaccgttgcactgccccacctgttccacgcctcatactgggagagtaccgatgttgttgcctttatcttgcgacaggtcatgaggtacgaaagtgtcaacattaaagagtctgcaaggctcgaccccgcggcactcagcccagcaaatccacgagagaagtggttaaggaagcgaacgcaggtgaaacttaggaacgtaactgcgaatcatagggccaatgacgtgatagctgccgaagatggacctcaggtgctggtggggagattcatgtatggtcctttagatatggtggctctcactggcgagaaggtggatatccttgttatggctgagccttcctctggcagatgggtgcatcttgatacagagatcacaaacagttccggcaggatcacatataacgttcccagaccgcgacggctaggagtgggggtgtatccggtgaagatggtggtgcgaggtgaccaaacctgcgcgatgagttatctgactgtcctccccagggggatggaatgcgtggtattttctatcgacggatcttttgctgctagcgtaagcatcatgggctccgaccctaaggtgcgccccggcgccgtagatgttgtgcgtcactggcaggacttggggtacatgatcctttatattactggaagacccgacatgcagaagcagagagtggtgtcatggctaagccaacacaattttccccagggcatgatcttctttagcgatggtctggttcacgatcccctgagacaaaaggcaatcttcctccgtaatctcatgcaggagtgcttcatcaagatctccgccgcttacgggtccacaaaagatatcagtgtctatagtgtactcggactgcctgcttcccagatttttatcgtagggcgccctacaaagaagtaccagactcagtgtcaattcctgtccgaaggctacgccgcgcacctggcagcactggaagccagccataggagcaggccaaagaagaataattccaggatgatcctcagaaaaggatcctttggcctgcatgcacagcctgaattcctcagaaagaggaatcacctcaggcgcacaatgtctgtgcagcaaccagaccctcccgcggctaatccaaaacccgagcgggctcagagccagcctgaaagtgataaagaccacgagaggcccttacctgcccttagctgggccaggggacctcctaaattcgagagcgtaccttag

SEQ ID NO: 64048 - DNA, 7042 bp, Artificial Sequence
  derived and/or modified sequence
gcggcggcggctgcggtggcggcagccgaggcgagcggggcgggggcgcgggcgcggcgctcggagtccgttcggggccggaggcggtcggggccgggcccgggaagcgcgaggagcgcgcgtagcgccgccggagcccgccgcccgggacatggccaaggcgggccgtgcaggtggtcctcccccgggcggcggtgccccctggcaccttcgaaatgtcctcagtgactctgtggagagctcagatgatgaattctttgatgccagaggagaagggaccgcgccgtgcacatccagcatcctccaggagaagcagcgagaactgtaccgggtttccttgagaagacagaggttcccagcccagggaagcatcgagatccacgaagacagcgaggaaggctgcccgcagcgctcctgcaagacacatgtcctcctgctggtcctgcatgggggaaacatcctggacacgggtgccggggacccgtcctgcaaggcagccgacatccacaccttcagctccgtgctggagaaggtcacacgagcccatttccctgctgccctgggccacatcctcatcaagttcgtcccctgtcctgccatctgctctgaggctttctcgcttgtctctcacctgaacccctacagccacgatgagggctgcctcagcagcagccaggaccacgtccctctggccgcccttcccctgttggccatctcctccccgcagtaccaggatgctgtcgccaccgtcatcgagcgagccaaccaggtctacagagagttcctgaagtcctctgatgggattggcttcagtgggcaggtgtgtctcatcggggactgtgtggggggcctcctggccttcgatgccatctgctacagtgcggggccctcaggggacagccctgccagcagcagccggaaggggagcatcagcagcacccaggacaccccagtcgcggtggaggaagattgcagcctggccagcagcaagcgtctcagcaaaagcaacattgacatctccagtgggttggaggatgaggagcccaagaggccgttgccgcggaaacagagcgactcctccacctatgactgcgaggccatcacccagcaccatgccttcctctcaagcatccactccagcgtgctaaaggatgagtctgagaccccggcggctggggggccgcagctccctgaggtcagcctgggccgctttgacttcgatgtgtccgacttcttcctcttcggctcgccactgggcctggtcctggccatgcggaggacggtgctgcctgggctggacggcttccaggtgcgtcctgcctgcagccaggtctacagcttcttccattgcgcagacccctctgcctcacggctcgagccactgctggagcccaagttccacctggtgccgcctgtcagcgtgcctcgctaccagaggttcccactgggcgatgggcagtccctcctcctcgctgatgccctacacacccacagccccctcttcctggagggcagctcccgggacagcccgccacttctggatgcccctgcctcgccccctcaggcctcgaggttccagcgcccaggacggaggatgagcgaggggagctcccacagcgagagctcggagtcctcggacagcatggcacccgtgggtgcctcccgcatcacagccaagtggtggggaagcaagaggatcgactatgccctgtactgccctgatgtcctcacggccttccccaccgtggccctgccccacctcttccacgccagttactgggagtccacagacgtggtggccttcatcctgagacaggtaatgcgctatgagagcgtgaacatcaaggaaagcgcccgcctggaccctgcagcactgagtcctgccaacccccgggagaagtggcttcgtaagcggactcaggtcaagctgaggaatgtcacggctaatcaccgggccaatgatgtgattgctgctgaagatggcccccaggtcctggtggggcggttcatgtacgggcccctcgacatggtggctctgactggagagaaggtggacatcctagtaatggcagagccatcctcaggccgctgggtacacctggacacagagatcaccaacagcagtggtcgcatcacatacaatgtgccgcggccccggcgcctgggggttggtgtctatcctgtgaagatggtcgtcaggggcgaccagacctgtgccatgagctacctcacggtgttgcccaggggcatggagtgtgtagtgttcagcattgatgggtccttcgcggccagcgtgtctatcatgggaagcgaccccaaggtccggccgggtgcagtggatgttgtccggcactggcaggacttgggctacatgatcctttacatcacgggacggccggacatgcagaagcagcgggtggtgtcgtggctgtcccagcacaacttcccacagggcatgatcttcttctccgatgggctggtgcatgacccgctgcggcagaaggccatcttcctgcgcaacctcatgcaggagtgcttcatcaaaatcagtgcggcctatggctccacgaaggacatctctgtctacagcgtgctgggcctgcctgcctcccagatcttcattgtgggccggcccaccaagaagtaccaaacccagtgccagttcctgagcgagggctacgccgcacacctggccgcgctggaggccagccaccgctcacgcccaaagaagaacaactcgcgcatgatcctgcgcaagggcagcttcgggctgcacgcgcagccagagttcctgcggaagcgcaaccacctgcgcagaaccatgtcagtgcagcagcccgacccgcccgccgccaaccccaagcccgagcgggcccagagccagcccgagtcggacaaagaccacgagcggccgctgccggcgctcagctgggcgcgtgggccccccaagttcgagtcggtgccctgaggggtgggctgtgctcagagcagggagcggggggcccaatcaggctgcctgcggggacgggagggggctgccctctccccgacacaggcgttttcctgctttttccctcccgtgtctgtccagcagtgtccgaccagagcggggagggatcctgcccgagcccggggggctccctgagctgcgacggggtgaggtccggggatctcggtgcagccactgctgcctcccacgggcctgcgaccgcaagcccaagtcagggttcatgtttgtgtcatcctgggggcaggcttgcccggggctgaagcgtttgggcaaagtcgaccaccctcctgcgtccccaggcttcacagcgagctaggcaggccctcaagggggcagccccagcctcggcaccaagcgccgctggcaggcacagcctctgggctgtcttgtggaggtgtgagtggcatttgtgcccgcccttcctgtggtttgggtcaccattttggggttggcgctcttatggcaagatggccactttctgggagtgagagcacatccccgggctcatgttacgccgtctctgtccacagccctcgggggtggggtctggtgctgacggtctgtcctgcagctgtccattgtccccaacccccgttgtcctcagtgtcctcaccatttccctgtggccctggaggccagggcttcctcttcccggagccctgcctcatgccctcccttgggaggctgcagccttgggctctggctcagctgggctggctgtgagcccctgagctggttgcttgccctctctgggctccgtcttccttctgttattggaggggtccccctagctgagattggtgtgagtctttgactcccaagatgtcctgcagtttggcccattgaggctcttcaggcctaagggtccctccgagtgtcctgtgacccacacctttcacacagcctgggagagggggtctgggtgggctggaaaggaggggctcttaaaggagcctctctgggtgggctgggaagggatccctactccacggagaggtgcagctggtttgccttgcactgcgtgtcccagggacaacccactcaaactgggtgtcctagggacaacccacctccctctcctgccaaaaggttactgattgggctccccataaccccagctctgccaggacccttttatcctttttggctcccagaggcatagagctgagattccagggttctaggggttcctggaagtttggctccaactgttgtattctcttccctttcccctgctgctcagtttgtgcccataacctcctcctgggtagtcccctgaggttggcaggacttggcccttctggggcccctaaagcctgctcaggccctcctgctgctgaaccttggcctgggcactgctttcctgcatcctggaaaaccccgactccctggcccaggcccacacctgctgtgtggggctgcccacgtggccactgagcccccataggctgccatcaaggccggtcccagcaatttcagccaggctgccccagggcccagacgtctgtatacacagcaggcacctgtgtcagctcagtgtcgcttctgctcaatgtctacctctcgcggctcccatgcagccagtgacgctgctggtgggggcggctggcaccgccgttgtgaattgcctggcaaattgggtgccctcctggggctggaggggtctgggctcctaacccccatccctgctctccccactagaaatgtgtcttcagtctgccagctcttctgctctacttccagtgctgcatcctgcactcaagcccagggctgctggcgagtctatggggaggagtgcggatcaggctcagcctcagcctcagcctcagcctcctctatggtcctgtctcctggcggttcacaggtgcccatcccccctttaacatttcacagttcttggctttccaaaggcaccagctcatatggcatagccaccccaaccctaatccttcccccaaatatcctgatttaaacttgggcagacttagtctgattcttgaaaactctaccatctccttcttgcagaaggcactggttacactaaaatgataaaataattagtatggggtactttgctcccagttacattccctcttccctgagaaccccaggctaggcgagagagggagagggagagagaaagagagagagggagagagagagagagagagggagagagaaagagagagagaaagaaaggaagacagaggaaagaaaggaagacagagagaggaaggcagagagagagagggagaaagaaagacaggaaggcagagagagagagagagagagaaaggaagacagagagagagagagaggaagagagagagagagaggaagagagagagagagctcatgagccaggatccctggggaatttgaagtcagtgtgaccagggttctgtggctctggggtcagagctgggacacaggacccagcaggagggccaccaccccttccttttggaaacagctctggttccaagcagcaatcaggtaggaggatcggggctttggctgatgatgcacacacaagatgctgatggtgtacggtgagatattgtgaacgcaacaactggagctgtagttggcgtgtgtgagtgtgtacctgcggttctgtttagtggcgagacaaggtatgtttcagtactgctttcacggcaactgtgtaatgcatatgctctttctacactagcggtttgctcagttttgtctgtccggttaagttggagaaagaaccaagttgtgttgttctctggagggggtgctgctgcctctccttgagtagttctgtgacccccaatccagctgttttgtagagaatccttctagcttctggtatgcctgctctccagcagctggaaacagatcttcctgcctgaccaaagctccttgtttcttgcgtggcatgtttgttcttcccgatccggtggctgtcgtagccgagggcctgcctgccaccttcctttatcatttgccctgttggggttcagggtgcatccttagcccaggacctgctcttccagcatcatgggttttttcctaaagatctcaacggctcccttgggctccataaaatatttcttttttaaaaaagcagactcctttcatgcattgggatgaacggccctcttgtctgggtgctgggctacagcaaacaaatgtgtttgaatcccagtattccagagattcctggcggtgggctgtctagaagaggcgaggctggatctcacggtttttaaactgtatttttacccctttgggacccatacctgtgccctggagtctttcatgaggcacgtgggtcctctgcatcctcactctcccccctagcccaggtgcagccccgggaggggtgccctgaccccgccttaaacaaccaactttcccaccgaatcccatcggcgggcggggggggggggtttgggtgccaagtgccctggaaacctattgtcttttggctcagccaaaagaaacattccctccttcctttccttccgggcttgggggaaaccttcgtaaaaatcatagttagggttaagtccaagcagtgaggcctgacctgggctctgctctccttgttgagacactaacaggcagttgggaggaaaatctgcatttgactccaccctctttggggcaaaggagaaacaggtgacccgagggggggcaggccagaggagggcgactcgtgcacagggacccccacccttggaccccgctgtccttttctagttgtttacttggtggtggcagccagtctgaccttgtctgtggtctgactgttcctaagtgtgtaactttcagtattatctgtgacagatggttctgtggtgaaaaaggtttattatattccttatggctgccttgtacaaaatccgttagaaacgctaatgtaagatatcagatttctaacaagacaaaaacagcattatggagttaaaagatttttacaactgggtcttgattttgatgtgagctggtttttagctctcaaatgttgtcacttaaataaaaaccttctttgccttt

SEQ ID NO: 64049 - DNA, 2817 bp, Artificial Sequence
  derived and/or modified sequence
atggctaaagccggacgagctggaggccctccccctggcggtggcgcaccttggcacctgcggaacgtgctctctgactccgtggagagctccgacgatgagttctttgatgcaaggggcgaaggtacagccccatgtacttctagcattttacaggaaaagcagagagagctgtacagagtcagcctcagacgccagcgctttccagcacagggatccatagaaatccatgaggactccgaggaaggctgtccacagcgctcttgcaagacacatgtgctcctgctcgtcctgcacgggggtaacattctagatacaggggcaggggaccctagctgtaaagctgcggatattcacacattctccagcgttttggaaaaagtaacgcgcgctcacttccccgcagctctcgggcatatcttaattaaattcgtgccatgccccgcaatatgctctgaggctttctctctggtcagtcacctcaacccctactcccacgacgaaggctgccttagctcttcgcaagatcatgtgccgcttgcggcacttcccttgctcgctatctcatcaccccagtatcaggatgccgtggccacagtaattgaaagggccaaccaggtgtatagggaatttctcaagtcctccgacgggataggttttagtgggcaggtgtgtctgattggggactgcgttggaggccttttggcgttcgacgctatatgttactccgcgggtccctccggggactcacccgcttcctcctccagaaagggctccatctcctcaacccaagatacaccggtagctgtcgaagaggattgttcccttgcaagcagcaagcggctaagcaaaagcaacatcgacatctccagtggcctcgaggacgaggaacccaagcgcccattaccgaggaagcaaagcgacagctccacctatgactgcgaggccattacccaacaccatgcattcttgagctcaattcatagctccgtccttaaggacgagtcggagaccccagccgctggcggtccccagctgcccgaggtcagtctcggcagattcgattttgacgtatcagacttttttttgttcggctcgccactcggtctcgtccttgcaatgcggaggaccgtactccccggtctagacggattccaagtgcgacccgcatgtagccaggtttactcttttttccattgtgcagatccttcagcttcacgcttagagcccttgctggagccaaaattccacctcgtgccacccgtgagcgtccctagataccagagatttcccctgggggatggtcaatctcttttgctggctgacgcactccacactcacagcccccttttcctcgagggctcatcccgcgactctccacccttgctcgacgctccggcttccccacctcaggcgagtcggtttcagcggcctgggcgaaggatgtcggaggggagctctcattctgagtcttccgagagctcagattcaatggctcctgtgggcgcatctcgaatcacagcgaagtggtggggcagcaagcgaatagactatgccttatactgcccagacgttctgactgctttccctaccgtggctctgcctcacctctttcacgctagctactgggagtccaccgacgtggtggcttttattcttagacaagttatgagatacgagtccgtgaacatcaaagagtctgcccgactggatccagccgcacttagtcctgccaatccccgagagaaatggttgcggaagcgtacacaggtgaaattacgtaacgtgacagcaaaccacagagccaacgacgtgatagccgcagaggacggtccacaagtgctcgtcggaagatttatgtacgggcctctcgacatggtggcactcaccggagagaaggtcgacatcctcgtcatggcggagccaagctcaggtcgctgggtgcacctcgacactgaaattactaactcaagcggtagaatcacatataacgtacctagacccagaaggctcggcgtaggggtgtacccagttaaaatggtagtgcgaggggaccagacctgtgcaatgtcgtacctcactgtgctaccgaggggaatggagtgcgtcgtgttcagcatagacgggtcattcgcagctagcgtttctataatgggctctgatccaaaggtaaggcccggagccgttgacgtcgtccgtcactggcaggatttggggtatatgattttgtacattaccgggagacccgatatgcaaaagcagcgcgtcgtctcttggctgagtcagcataacttcccacagggcatgattttctttagtgatggcctcgtgcacgaccccctgcggcaaaaggccatatttctgaggaacctcatgcaggaatgtttcatcaaaatctcagctgcttatgggtccactaaggacatttctgtgtattccgtgctggggctgccagccagccaaatcttcatcgtgggacgaccaacgaaaaagtaccagactcagtgtcagtttctgagcgagggatacgccgctcatctggcagccctggaggcctcccatcggagccggccaaaaaaaaataactccaggatgattttgcgcaagggttcgtttggtctgcacgcacagcctgagtttttacgcaagcggaatcatctgcgtcgcacgatgtcagttcagcaaccagacccccctgcggcaaaccccaaaccggagcgtgcccagtctcaaccagagtccgataaagatcacgagcgccctctcccagcgctgtcttgggcgagaggtccccctaagttcgagtccgttccttag

SEQ ID NO: 64050 - DNA, 2817 bp, Artificial Sequence
  derived and/or modified sequence
atggccaaggccggcagagccggcggccccccccccggcggcggcgccccctggcacctgagaaacgtgctgagcgacagcgtggagagcagcgacgacgagttcttcgacgccagaggcgagggcaccgccccctgcaccagcagcatcctgcaggagaagcagagagagctgtacagagtgagcctgagaagacagagattccccgcccagggcagcatcgagatccacgaggacagcgaggagggctgcccccagagaagctgcaagacccacgtgctgctgctggtgctgcacggcggcaacatcctggacaccggcgccggcgaccccagctgcaaggccgccgacatccacaccttcagcagcgtgctggagaaggtgaccagagcccacttccccgccgccctgggccacatcctgatcaagttcgtgccctgccccgccatctgcagcgaggccttcagcctggtgagccacctgaacccctacagccacgacgagggctgcctgagcagcagccaggaccacgtgcccctggccgccctgcccctgctggccatcagcagcccccagtaccaggacgccgtggccaccgtgatcgagagagccaaccaggtgtacagagagttcctgaagagcagcgacggcatcggcttcagcggccaggtgtgcctgatcggcgactgcgtgggcggcctgctggccttcgacgccatctgctacagcgccggccccagcggcgacagccccgccagcagcagcagaaagggcagcatcagcagcacccaggacacccccgtggccgtggaggaggactgcagcctggccagcagcaagagactgagcaagagcaacatcgacatcagcagcggcctggaggacgaggagcccaagagacccctgcccagaaagcagagcgacagcagcacctacgactgcgaggccatcacccagcaccacgccttcctgagcagcatccacagcagcgtgctgaaggacgagagcgagacccccgccgccggcggcccccagctgcccgaggtgagcctgggcagattcgacttcgacgtgagcgacttcttcctgttcggcagccccctgggcctggtgctggccatgagaagaaccgtgctgcccggcctggacggcttccaggtgagacccgcctgcagccaggtgtacagcttcttccactgcgccgaccccagcgccagcagactggagcccctgctggagcccaagttccacctggtgccccccgtgagcgtgcccagataccagagattccccctgggcgacggccagagcctgctgctggccgacgccctgcacacccacagccccctgttcctggagggcagcagcagagacagcccccccctgctggacgcccccgccagccccccccaggccagcagattccagagacccggcagaagaatgagcgagggcagcagccacagcgagagcagcgagagcagcgacagcatggcccccgtgggcgccagcagaatcaccgccaagtggtggggcagcaagagaatcgactacgccctgtactgccccgacgtgctgaccgccttccccaccgtggccctgccccacctgttccacgccagctactgggagagcaccgacgtggtggccttcatcctgagacaggtgatgagatacgagagcgtgaacatcaaggagagcgccagactggaccccgccgccctgagccccgccaaccccagagagaagtggctgagaaagagaacccaggtgaagctgagaaacgtgaccgccaaccacagagccaacgacgtgatcgccgccgaggacggcccccaggtgctggtgggcagattcatgtacggccccctggacatggtggccctgaccggcgagaaggtggacatcctggtgatggccgagcccagcagcggcagatgggtgcacctggacaccgagatcaccaacagcagcggcagaatcacctacaacgtgcccagacccagaagactgggcgtgggcgtgtaccccgtgaagatggtggtgagaggcgaccagacctgcgccatgagctacctgaccgtgctgcccagaggcatggagtgcgtggtgttcagcatcgacggcagcttcgccgccagcgtgagcatcatgggcagcgaccccaaggtgagacccggcgccgtggacgtggtgagacactggcaggacctgggctacatgatcctgtacatcaccggcagacccgacatgcagaagcagagagtggtgagctggctgagccagcacaacttcccccagggcatgatcttcttcagcgacggcctggtgcacgaccccctgagacagaaggccatcttcctgagaaacctgatgcaggagtgcttcatcaagatcagcgccgcctacggcagcaccaaggacatcagcgtgtacagcgtgctgggcctgcccgccagccagatcttcatcgtgggcagacccaccaagaagtaccagacccagtgccagttcctgagcgagggctacgccgcccacctggccgccctggaggccagccacagaagcagacccaagaagaacaacagcagaatgatcctgagaaagggcagcttcggcctgcacgcccagcccgagttcctgagaaagagaaaccacctgagaagaaccatgagcgtgcagcagcccgacccccccgccgccaaccccaagcccgagagagcccagagccagcccgagagcgacaaggaccacgagagacccctgcccgccctgagctgggccagaggcccccccaagttcgagagcgtgccctag

SEQ ID NO: 64051 - DNA, 693 bp, Artificial Sequence
  derived and/or modified sequence
atggtgactagggatagggctgaaaacagggatgggcccaagatgctgaagccactggtagaaaagaggcggagggacagaattaaccgttccctggaagagctgcggttactacttctggaacgcacacgtgatcagaacttacgtaacccaaaacttgaaaaggcagaaattttggaattcgccgtaggctacctgcgggagcgctctagagtcgagcctccagctgctgctgcccccggcgtcccacgatctccagtgcaagacgctgaggcattggctagctgttacttgagcgggttccgggagtgtctcctgagacttgcagctttcgctcatgatgcctccccggccgcaagagcccagcttttcagcgcccttcacggctatctcaggccaaaaccgccccgccccaaacccgtggaccccaggcctcccgcaccaagaccatctttggatcctgctgcccctgctctagggcctgcgttacaccaaaggcctcctgtgcaccaagggcatccgtcccccagatgtgcatggtccccgtctctatgctctcctcgtgctggggatagcggcgctcccgcccctctgaccggtctcctgccgcccccacctccaccccacaggcaggatggtgccccaaaagcacccttgccccctccccctgctttttggcggccttggccttag

SEQ ID NO: 64052 - DNA, 693 bp, Artificial Sequence
  derived and/or modified sequence
atggtgacccgggacagagctgagaacagagatggccccaagatgctgaagcccctggtggagaagagaagaagagaccgcatcaacagaagcctggaggagctgcggctgctgctgctggagaggacccgggaccagaacctgaggaaccccaagctggagaaggccgagatcctggagtttgctgtgggctacctgcgggagaggagccgggtggagcccccagctgctgctgcccctggggtgcccaggagccctgtgcaggatgctgaggccctggccagctgctacctgagcggcttcagagaatgtctgctgcggctggccgcctttgcccatgatgccagccctgctgcccgggcccagctgttcagcgccctgcacggctacctgcggcccaagccaccccggcccaagcctgtggacccccggcccccagccccccggcccagcctggaccctgctgccccagccctgggccctgccctgcaccagaggcctcctgtgcaccagggccaccccagcccccgctgtgcctggagccccagcctgtgcagccccagggctggggacagcggggccccagcccccctgaccggcctgctgcccccacctcctccaccccaccggcaggatggagcccccaaggcccccctgcccccacctccagccttctggaggccctggccctag

SEQ ID NO: 64053 - DNA, 693 bp, Artificial Sequence
  derived and/or modified sequence
atggtgacccgggaccgggccgagaaccgggacggccccaagatgctcaagcccttggtcgaaaagagaaggagagaccggatcaacaggtctctggaagagctccggttactgcttctggagaggacaagggaccagaatcttcggaacccaaaactggaaaaagcagagattctggagttcgccgtaggttacctgcgtgaacggagccgagtggaaccacctgccgcagcagcccctggtgtcccaaggtctcccgtgcaagacgctgaggcacttgcatcatgttacctgtctggatttcgtgaatgccttctgcgtttggctgcttttgcccatgacgcttccccagctgccagggcccaactcttttcggctctacacggctacctgagacccaaaccacctcgcccaaagcccgttgatcccaggccacccgcaccacgaccatcactggaccccgccgctcctgccctgggacctgccctgcatcagcggccaccagtgcatcaggggcatcctagcccccgctgcgcatggtcaccctctctgtgctcaccccgggcaggtgactccggggcacccgcccccctgactgggttgctcccacccccccctcctccccaccgacaagacggtgcacccaaggcacctctgcctccacctcctgcattctggcgcccgtggccttag

SEQ ID NO: 64054 - DNA, 693 bp, Artificial Sequence
  derived and/or modified sequence
atggttacgcgggatagggcagaaaacagagacgggcctaagatgttgaagcctctggtggagaagcgtagacgcgaccgcatcaaccgctccttagaagaattaaggctgctgctactggagagaacccgggatcagaatctgagaaatcccaagctcgagaaagcagagatcctggaatttgcagttggatatcttcgtgaacggtcccgcgtggaacccccagcagcggctgcaccaggtgtccccagatctcctgtccaagatgctgaggcccttgcatcgtgctacctgagcggtttcagggagtgcctacttcgactcgcagctttcgcccacgatgcctcacctgcagcaagagcgcagctctttagtgccctccatggttatctgcggcctaaacccccacggcctaaaccagtggacccgaggccccctgcgcctcgccctagcctggatcctgctgctcccgctcttggtcccgcactgcaccaaaggccacctgtacaccaggggcacccctctccacgttgtgcttggagtcccagtttgtgctctcccagagccggtgacagcggagctcccgcaccactcactgggctgctcccccctccaccaccaccccatcgccaggatggtgctccaaaggcacctcttccccctcccccagcattctggcggccatggccctag

SEQ ID NO: 64055 - DNA, 693 bp, Artificial Sequence
  derived and/or modified sequence
atggtgaccagagacagagccgagaacagagacggccccaagatgctgaagcccctggtggagaagagaagaagagacagaatcaacagaagcctggaggagctgagactgctgctgctggagagaaccagagaccagaacctgagaaaccccaagctggagaaggccgagatcctggagttcgccgtgggctacctgagagagagaagcagagtggagccccccgccgccgccgcccccggcgtgcccagaagccccgtgcaggacgccgaggccctggccagctgctacctgagcggcttcagagagtgcctgctgagactggccgccttcgcccacgacgccagccccgccgccagagcccagctgttcagcgccctgcacggctacctgagacccaagccccccagacccaagcccgtggaccccagaccccccgcccccagacccagcctggaccccgccgcccccgccctgggccccgccctgcaccagagaccccccgtgcaccagggccaccccagccccagatgcgcctggagccccagcctgtgcagccccagagccggcgacagcggcgcccccgcccccctgaccggcctgctgcccccccccccccccccccacagacaggacggcgcccccaaggcccccctgccccccccccccgccttctggagaccctggccctag

SEQ ID NO: 64056 - protein, 314 aa, Artificial Sequence
  derived and/or modified sequence
MSFLVSKPERIRTNDASSESIASFSKQEVMSSFLPEGGCYELLTVIGKGFEDLMTVNLARYKPTGEYVTVRRINLEACSNEMVTFLQGELHVSKLFNHPNIVPYRATFIADNELWVVTSFMAYGSAKDLICTHFMDGMNELAIAYILQGVLKALDYIHHMGYVHRSVKASHILISVDGKVYLSGLRSNLSMISHGQRQRVVHDFPKYSVKVLPWLSPEVLQQNLQGYDAKSDIYSVGITACELANGHVPFKDMPATQMLLEKLNGTVPCLLDTSTIPAEELTMSPSRSVANSGLSDSLTTSTPRPSNGPVPAPS

SEQ ID NO: 64057 - DNA, 945 bp, Artificial Sequence
  derived and/or modified sequence
atgagcttcctggtgagcaagcccgagagaatcagaaccaacgacgccagcagcgagagcatcgccagcttcagcaagcaggaggtgatgagcagcttcctgcccgagggcggctgctacgagctgctgaccgtgatcggcaagggcttcgaggacctgatgaccgtgaacctggccagatacaagcccaccggcgagtacgtgaccgtgagaagaatcaacctggaggcctgcagcaacgagatggtgaccttcctgcagggcgagctgcacgtgagcaagctgttcaaccaccccaacatcgtgccctacagagccaccttcatcgccgacaacgagctgtgggtggtgaccagcttcatggcctacggcagcgccaaggacctgatctgcacccacttcatggacggcatgaacgagctggccatcgcctacatcctgcagggcgtgctgaaggccctggactacatccaccacatgggctacgtgcacagaagcgtgaaggccagccacatcctgatcagcgtggacggcaaggtgtacctgagcggcctgagaagcaacctgagcatgatcagccacggccagagacagagagtggtgcacgacttccccaagtacagcgtgaaggtgctgccctggctgagccccgaggtgctgcagcagaacctgcagggctacgacgccaagagcgacatctacagcgtgggcatcaccgcctgcgagctggccaacggccacgtgcccttcaaggacatgcccgccacccagatgctgctggagaagctgaacggcaccgtgccctgcctgctggacaccagcaccatccccgccgaggagctgaccatgagccccagcagaagcgtggccaacagcggcctgagcgacagcctgaccaccagcacccccagacccagcaacggccccgtgcccgcccccagctag

SEQ ID NO: 64058 - DNA, 945 bp, Artificial Sequence
  derived and/or modified sequence
atgtctttcttggtatctaagcctgaacgcataagaaccaatgatgcctcatctgaatctatcgccagcttcagtaagcaagaggttatgagcagcttccttccagaaggagggtgctatgaactgcttaccgtcattggtaaggggttcgaggatcttatgacagtgaacttggcacggtataagccgactggcgaatacgtcacagtgcgacgcatcaatctcgaggcctgctccaatgagatggttacctttctacagggcgaactccatgtctctaagttgttcaatcaccccaacatcgtgccatatagggccactttcatcgcagacaatgaattatgggttgttacgtcatttatggcttacggttccgcaaaggacttgatctgcacacattttatggacgggatgaatgagttggctatcgcgtatatacttcaaggtgttctgaaagcgctcgattatattcatcacatgggttatgttcaccggtccgtgaaggcttctcatatcctgatttcggtcgatgggaaggtgtacctctcaggccttcgctccaacctgagcatgatcagccacggccagcgacaacgtgtggtgcacgatttcccaaaatattccgttaaagtgctaccttggctgtcccccgaggtgctccagcagaatctccagggatacgacgccaagtccgacatttatagcgtaggaatcactgcatgtgagctggccaatgggcacgtaccgtttaaggacatgcccgccacgcagatgctacttgaaaagctgaatggaaccgtgccttgcctcctcgacactagcacgattccggccgaggagctcacaatgagtccatctcgttcagtagcaaactccggactgagcgactctcttaccacttcaacccctagaccctcgaacggacccgtgcccgcccccagctag

SEQ ID NO: 64059 - DNA, 945 bp, Artificial Sequence
  derived and/or modified sequence
atgtccttcctggtgtccaagccagagcgcatccgcaccaatgatgccagcagcgagagcatcgccagcttcagcaagcaggaggtgatgagcagcttcctgcctgagggcggctgctatgagctgctgaccgtcatcggcaagggctttgaggacctgatgacagtgaacctggcccgctacaagcccaccggggagtatgtgacagtgcggcgcatcaacctggaggcctgcagcaatgagatggtgaccttcctgcagggcgagctgcacgtgtccaagctgttcaaccaccccaacatcgtgccctaccgggccaccttcatcgctgacaatgagctgtgggtggtgaccagcttcatggcctacggcagcgccaaggacctgatctgcacccacttcatggatggcatgaatgagctggccatcgcctacatcctgcagggcgtgctgaaggccctggactacatccaccacatgggctacgtgcacaggtctgtgaaggccagccacatcctgatctctgtggatggcaaggtgtacctgagcggcctgcggagcaacctgtccatgatcagccacggccagaggcagagggtggtgcatgacttccccaagtacagcgtgaaggtgctgccctggctgagccctgaggtgctgcagcagaacctgcagggctatgatgccaagagtgacatctacagcgtgggcatcacagcctgtgagctggccaatggacatgtgcccttcaaggacatgcctgccacccagatgctgctggagaagctgaatggcaccgtgccctgcctgctggacaccagcaccatcccagctgaggagctgaccatgagccccagccgctctgtggccaacagcggcctgagtgacagcctgaccaccagcaccccccggcccagcaatggacctgtgcctgcccccagctag

SEQ ID NO: 64060 - DNA, 945 bp, Artificial Sequence
  derived and/or modified sequence
atgagcttcctggtgagcaagcccgagcggatccggaccaacgacgcatcctcagaaagcattgcctcattcagtaagcaagaggtcatgtcttcattccttcccgagggcggttgctatgagctcttgactgtaattggtaaaggcttcgaagatttgatgactgtaaaccttgcgaggtataaaccaactggcgagtatgtcaccgttcgcaggatcaatctggaagcttgctctaacgaaatggtaaccttcctccagggcgagctccacgtgtcaaagctgttcaatcatcctaatattgttccctacagagcgacattcatcgctgacaatgagttatgggtcgtaacctcttttatggcctatggcagtgctaaagatcttatttgcacacacttcatggacggaatgaatgaactggcaattgcttacatattgcagggggtgcttaaagccctggattacattcaccacatgggatacgtccatagatcggtgaaggccagccatattctgatctctgttgatggtaaagtgtatctgagcggcctcagatctaacttatccatgatatctcacgggcaaaggcagcgtgtggtccacgactttcctaaatacagtgtgaaggtgctgccctggctctcccctgaggtcctccagcaaaacctccagggatacgatgctaagtcagacatctacagcgtcggtattacagcttgcgagttggcaaatggacacgtcccttttaaggatatgccagctacgcagatgctgcttgaaaaattaaacggcactgtaccatgcctcctggatacctctaccattcctgcagaggagctgaccatgagcccctccagaagtgtggcaaacagtggtctaagtgacagcctaaccaccagcacaccacggccctccaatggtcccgtcccagcccctagttag

SEQ ID NO: 64061 - DNA, 945 bp, Artificial Sequence
  derived and/or modified sequence
atgagctttcttgtgagtaagcctgagagaattcggacgaatgacgccagtagcgagtctatcgcaagcttctctaagcaggaagtaatgtccagtttccttccagaaggcggttgctacgagctgttgacggtcataggcaaaggatttgaggatctgatgactgtgaatctagcaaggtacaagccaacaggtgagtatgtcactgtaagacggattaatctcgaggcctgcagcaatgaaatggtgacctttctgcaaggtgagctgcacgtctcaaaactctttaaccacccaaatatagtaccatatcgagcaactttcattgcggataacgagctctgggtggtgacctcatttatggcctacggttccgctaaggacctgatatgtacacacttcatggatgggatgaacgagcttgctatagcttatatccttcagggggtactgaaggcactcgattacatccaccacatgggttatgtgcatcgaagtgtgaaggcttcccacatactgatttccgtagacggaaaagtgtatctgtcaggactccgctccaacttatctatgattagccacggccagcgccagagagtggtccatgactttcctaaatacagcgtgaaggtgctgccctggctgtcaccagaggtcctacagcagaatctccagggatatgacgccaaatccgatatttactcagtggggatcacagcctgcgagctggccaatgggcacgtcccgttcaaggacatgccagccactcagatgcttctcgaaaaattaaacgggacagtgccttgtctgctggatacgtccaccattccagcagaggagctgactatgtctccttcacggtctgtggccaactccggactgtctgactcattgacgacctccacccctagaccatccaatggtcccgtcccagctccttcttag

SEQ ID NO: 64062 - protein, 299 aa, Artificial Sequence
  derived and/or modified sequence
MSFLVSKPERIRRWVSEKFIVEGLRDLELFGGKGFEDLMTVNLARYKPTGEYVTVRRINLEACSNEMVTFLQGELHVSKLFNHPNIVPYRATFIADNELWVVTSFMAYGSAKDLICTHFMDGMNELAIAYILQGVLKALDYIHHMGYVHRSVKASHILISVDGKVYLSGLRSNLSMISHGQRQRVVHDFPKYSVKVLPWLSPEVLQQNLQGYDAKSDIYSVGITACELANGHVPFKDMPATQMLLEKLNGTVPCLLDTSTIPAEELTMSPSRSVANSGLSDSLTTSTPRPSNGPVPAPS

SEQ ID NO: 64063 - DNA, 900 bp, Artificial Sequence
  derived and/or modified sequence
atgagcttcctggtgagcaagcccgagagaatcagaagatgggtgagcgagaagttcatcgtggagggcctgagagacctggagctgttcggcggcaagggcttcgaggacctgatgaccgtgaacctggccagatacaagcccaccggcgagtacgtgaccgtgagaagaatcaacctggaggcctgcagcaacgagatggtgaccttcctgcagggcgagctgcacgtgagcaagctgttcaaccaccccaacatcgtgccctacagagccaccttcatcgccgacaacgagctgtgggtggtgaccagcttcatggcctacggcagcgccaaggacctgatctgcacccacttcatggacggcatgaacgagctggccatcgcctacatcctgcagggcgtgctgaaggccctggactacatccaccacatgggctacgtgcacagaagcgtgaaggccagccacatcctgatcagcgtggacggcaaggtgtacctgagcggcctgagaagcaacctgagcatgatcagccacggccagagacagagagtggtgcacgacttccccaagtacagcgtgaaggtgctgccctggctgagccccgaggtgctgcagcagaacctgcagggctacgacgccaagagcgacatctacagcgtgggcatcaccgcctgcgagctggccaacggccacgtgcccttcaaggacatgcccgccacccagatgctgctggagaagctgaacggcaccgtgccctgcctgctggacaccagcaccatccccgccgaggagctgaccatgagccccagcagaagcgtggccaacagcggcctgagcgacagcctgaccaccagcacccccagacccagcaacggccccgtgcccgcccccagctag

SEQ ID NO: 64064 - DNA, 900 bp, Artificial Sequence
  derived and/or modified sequence
atgagcttcctagtctccaaacccgagaggatccggcggtgggtgtccgaaaagttcatcgttgaaggcctgagggacctggagctatttgggggcaagggatttgaggacttgatgaccgtcaaccttgcgagatataagcctaccggcgagtatgttaccgtcaggcgtataaacctggaggcctgtagcaacgagatggtgacattcctgcagggcgaactgcacgtcagcaaactctttaaccaccccaacatcgtaccctacagggccacctttattgccgataacgagttgtgggtagtgacctcgtttatggcttacgggtcagccaaggacctgatttgcacacactttatggacggcatgaatgaattggccattgcatacatcttacagggggtgctgaaagctttggattatattcaccacatggggtatgtgcacaggagcgtcaaagcctcccacattctcatatcagtggacggtaaggtgtatctatctggactccgctccaatctttcaatgatttcccacgggcagaggcagcgcgtcgtacacgactttccaaagtattccgtcaaagtcctgccatggctctcaccagaggtccttcagcagaacctgcagggctatgacgctaagtccgacatttactccgtgggcatcactgcatgtgagttagcaaacgggcacgttcccttcaaagacatgcctgctactcagatgctactcgaaaaattaaacggcacggtgccttgcctgctagacacctccactatccctgcggaagagcttacgatgtcaccttcccgctctgtcgctaatagcgggttgtccgactctttaactacatctaccccacgcccctctaacggacccgtgcccgctccatcgtag

SEQ ID NO: 64065 - DNA, 900 bp, Artificial Sequence
  derived and/or modified sequence
atgtccttcctggtgtccaagccagagcgcatccgccgctgggtgtctgagaagttcatcgtggagggcctgcgggacctggagctgtttggaggaaaaggatttgaggacctgatgacagtgaacctggcccgctacaagcccactggagaatatgtgacagtgcggcgcatcaacctggaggcctgcagcaatgagatggtgaccttcctgcagggcgagctgcacgtgtccaagctgttcaaccaccccaacatcgtgccctaccgggccaccttcatcgctgacaatgagctgtgggtggtgaccagcttcatggcctacggcagcgccaaggacctgatctgcacccacttcatggatggcatgaatgagctggccatcgcctacatcctgcagggcgtgctgaaggccctggactacatccaccacatgggctacgtgcacaggtctgtgaaggccagccacatcctgatctctgtggatggcaaggtgtacctgagcggcctgcggagcaacctgtccatgatcagccacggccagaggcagagggtggtgcatgacttccccaagtacagcgtgaaggtgctgccctggctgagccctgaggtgctgcagcagaacctgcagggctatgatgccaagagtgacatctacagcgtgggcatcacagcctgtgagctggccaacggccacgtgcccttcaaggacatgcctgccacccagatgctgctggagaagctgaatggaacagtgccctgcctgctggacaccagcaccatcccagctgaggagctgaccatgagccccagccgctctgtggccaacagcggcctgagtgacagcctgaccaccagcaccccccggcccagcaatggacctgtgcctgcccccagctag

SEQ ID NO: 64066 - DNA, 900 bp, Artificial Sequence
  derived and/or modified sequence
atgagcttcctggtgagcaagcccgagcggatccggcggtgggtgagtgagaaatttatcgtcgagggcttacgcgaccttgagctgtttggcggcaagggcttcgaggatctgatgaccgtaaacctggcgcgttataaacccactggggaatacgtcacagtacgtaggatcaacttggaagcttgcagcaatgagatggtgacgtttctccagggggagctacacgtaagtaagcttttcaatcatcccaacatcgtcccatacagggctacattcatcgctgataatgagctgtgggtcgtcactagcttcatggcatatgggtccgcaaaggatttgatttgtacccacttcatggacgggatgaacgagttggcgattgcctatattctacaaggagtactcaaggcactcgattacatacaccatatgggatatgtgcataggagcgtgaaggcgtcgcatattctcatttccgttgatgggaaagtttacctttccggtctgagaagcaatctgtcaatgattagccatggccaacgtcaacgggtagtgcatgatttccctaaatattccgtcaaggtcctgccttggttatcccctgaggttcttcaacaaaatctacaggggtacgacgcgaagtctgacatctactcggtcggtatcaccgcttgtgaattggccaacggccatgtcccgtttaaggacatgccagccacacagatgcttctggagaagctgaacggcacagtcccttgtctgctggatacatccactatccctgccgaagagctgacaatgtcgccatctcgcagcgtcgcaaactccggtctgtctgactctctgaccaccagcactcccagacctagcaatggaccagtgcccgcgccttcctag

SEQ ID NO: 64067 - DNA, 900 bp, Artificial Sequence
  derived and/or modified sequence
atgagcttcctggtgtccaaaccagaaaggataaggcggtgggtctccgaaaaattcatcgttgaggggctgcgcgacctcgagcttttcggaggaaagggcttcgaggacctgatgacagtcaacctggctcgctacaagccaacaggagaatacgttacagttagaagaatcaacctcgaagcctgttctaatgagatggttacctttctgcaaggagaactgcatgtctcaaaactgtttaaccaccctaacatcgtgccatatagagcaacctttattgccgacaatgagttgtgggtggtgacttccttcatggcttacggatctgcaaaagatctgatatgtacacactttatggatggtatgaatgagctcgcaatcgcctacatcctccagggagtgttaaaggccctcgattatatccaccacatgggctacgtgcaccgttcggtaaaagcctcacacatactgatcagcgtggatgggaaggtgtatctgagcggcttgcggtcaaacctctctatgatcagtcacggacagcgtcagagagttgtgcatgacttcccaaaatattccgtgaaggtactgccctggctctcacctgaagttctgcaacagaatctccagggatacgacgcaaaatctgacatctattcagtcggtatcacagcctgtgagctcgccaacggtcacgtgccattcaaagacatgccggcaacccaaatgctgctagaaaagctcaatggcaccgtaccatgcctgttggatacttctactattcctgccgaagaactgacgatgagtcctagtagaagtgtcgctaactcaggactgagcgactcactaactacttctacacccaggccaagcaacggacctgttccggcacccagctag

SEQ ID NO: 64068 - protein, 695 aa, Artificial Sequence
  derived and/or modified sequence
MSEGAAAASPPGAASAAAASAEEGTAAAAAAAAAGGGPDGGGEGAAEPPRELRCSDCIVWNRQQTWLCVVPLFIGFIGLGLSLMLLKWIVVGSVKEYVPTDLVDSKGMGQDPFFLSKPSSFPKAMETTTTTTSTTSPATPSAGGAASSRTPNRISTRLTTITRAPTRFPGHRVPIRASPRSTTARNTAAPATVPSTTAPFFSSSTLGSRPPVPGTPSTQAMPSWPTAAYATSSYLHDSTPSWTLSPFQDAASSSSSSSSSATTTTPETSTSPKFHTTTYSTERSEHFKPCRDKDLAYCLNDGECFVIETLTGSHKHCRCKEGYQGVRCDQFLPKTDSILSDPTHIGIIFTESEEVYQRQVLSISCIIFGIVIVGMFCAAFYFKSKKQAKQIQEQLKVPQNGKSYSLKASSTMAKSENLVKSHVQLQNYSKVERHPVTALEKMMESSFVGPQSFPEVPSPDRGSQSVKHHRSLSSCCSPGQRSGMLHRNAFRRTPPSPRSRLGGIVGPAYQQLEESRIPDQDTIPCQGYSSSGLKTQRNTSINMQLPSRETNPYFNSLEQKDLVGYSSTRASSVPIIPSVGLEETCLQMPGISEVKSIKWCKNSYSADVVNVSIPVSDCLIAEQQEVKILLETVQEQIRILTDARRSEDYELASVETEDSASENTAFLPLSPTAKSEREAQFVLRNEIQRDSALTK

SEQ ID NO: 64069 - protein, 346 aa, Artificial Sequence
  derived and/or modified sequence
MESEEVYQRQVLSISCIIFGIVIVGMFCAAFYFKSKKQAKQIQEQLKVPQNGKSYSLKASSTMAKSENLVKSHVQLQNYSKVERHPVTALEKMMESSFVGPQSFPEVPSPDRGSQSVKHHRSLSSCCSPGQRSGMLHRNAFRRTPPSPRSRLGGIVGPAYQQLEESRIPDQDTIPCQGYSSSGLKTQRNTSINMQLPSRETNPYFNSLEQKDLVGYSSTRASSVPIIPSVGLEETCLQMPGISEVKSIKWCKNSYSADVVNVSIPVSDCLIAEQQEVKILLETVQEQIRILTDARRSEDYELASVETEDSASENTAFLPLSPTAKSEREAQFVLRNEIQRDSALTK

SEQ ID NO: 64070 - DNA, 285 bp, Artificial Sequence
  derived and/or modified sequence
atgcagcattccctggtgtttttcttcgcagtaattttacacttaagccatttgctgcatctagacgcctcaatccacccattccgtctgccattttcgagcaagccattcctgcttatcccaatgtcaaataccacactgcctcataccgcttggccacttagctttttacatcaaacagtgtctacacttaaggccgtcgccgtcacacattccctgtggcacctgcagatccccgttgactgccaggcatgtaatcgaaaatcaaaaaagatttattgctag

SEQ ID NO: 64071 - DNA, 2088 bp, Artificial Sequence
  derived and/or modified sequence
atgagtgagggagccgcggcggcctctcccccaggcgctgcctctgctgccgctgcatcggcagaagagggcaccgccgcagccgctgccgcggctgcagcaggggggggacccgatggcggcggcgaaggtgcagcagagcctccgagagagctcagatgctctgattgcatcgtatggaatcgccagcagacttggctttgtgttgtaccccttttcattggatttattgggctgggactgagcctgatgttgcttaagtggattgttgtaggaagtgtcaaagaatatgtgcctacagatctggttgattcgaagggtatgggacaggaccctttctttctgtctaagcccagcagcttcccgaaggcaatggaaacaaccacgactactacttcaacaacctctcccgcaaccccgagtgctgggggcgctgcgtcttctcgcacaccaaaccgcatctcaacacggttgacgactatcacacgggctccaaccaggtttcccggccaccgtgtcccaatcagagcatcacctcgatcaactactgccagaaacaccgccgcacctgctaccgtgccatccaccaccgcacccttcttctcctcgtcaaccctcggatctagaccccccgtaccaggtactccttctacccaggccatgccctcatggcctacagcggcgtacgccacatcctcttacctacatgattctactccctcatggacgctctcgccttttcaggacgctgcctcttcctcctcttcctcatcctcgtccgctaccacgactacccctgagacctccacctccccaaagtttcacaccaccacgtacagtaccgagcgaagcgagcatttcaagccatgtcgggataaggacttggcttattgcctgaacgacggcgaatgttttgtgatcgagacacttactgggtctcacaagcattgccggtgtaaggagggataccagggcgtgcgatgtgaccagtttctcccgaagacggacagcatcttatctgaccccacccatattggaattattttcaccgagagcgaggaagtctaccagcgccaggtgctcagcatctcctgcatcattttcggaatcgttattgtgggcatgttttgcgctgcgttctatttcaagtccaagaagcaggccaaacagatccaagagcagttgaaagtcccccagaacggtaaatcttatagcctaaaagcctcatccacgatggcaaagagcgagaacctggtgaagtcccatgtgcagctgcagaactattcaaaagtcgaacgacaccccgtgactgccctcgagaaaatgatggagtcctctttcgtgggtccccaaagcttccccgaagtgccgtcaccagaccgagggagtcaaagtgtgaaacatcaccgttcattatctagctgctgctcacctggacagaggtccgggatgctgcaccgcaacgcattcagaagaaccccaccatcacctaggtcaagattgggtggtattgtggggcctgcttaccagcagttggaggagagtaggataccggatcaggacaccataccatgtcagggctattcgtcatccgggctgaaaacacagcgaaacacctccattaacatgcagctgccctccagggaaaccaacccttacttcaattccttggaacagaaagacctcgtggggtacagctccacaagggccagcagcgtcccgatcatcccgtctgtcggacttgaagaaacttgtttacagatgccaggcattagtgaggttaagagtatcaaatggtgcaagaattcttactccgccgacgtggtcaacgtgtctatacccgtgagcgattgtctgattgccgagcagcaggaagttaaaattcttctggagaccgttcaagaacagataagaattctaacagatgctcgacgctctgaagattatgagcttgcctccgtggagacagaggactccgctagtgagaacacggcattcctgcccctttctcctacagccaagtccgagagggaggctcaattcgtgctgagaaacgaaatccaacgcgactcggccctaaccaagtag

SEQ ID NO: 64072 - DNA, 2088 bp, Artificial Sequence
  derived and/or modified sequence
atgtctgagggcgctgctgctgccagccccccaggagctgccagcgctgctgctgccagcgctgaggagggcacagctgctgctgctgctgctgctgctgctgggggcggcccagatggcggcggggagggcgctgctgagcccccccgggagctgcgctgcagcgactgcatcgtgtggaaccggcagcagacctggctgtgtgtggtgcccctcttcatcggcttcatcggcctgggcctgagcctgatgctgctgaagtggatcgtggtgggctctgtgaaggagtatgtgcccacagacctggtggacagcaagggcatgggccaggaccccttcttcctgagcaagcccagcagcttccccaaggccatggagaccaccaccaccaccaccagcaccaccagccctgccaccccatctgctgggggcgccgccagcagcaggacccccaaccgcatcagcacccggctgaccaccatcacccgggcccccacccgcttccctggccaccgggtgcccatccgggccagccccaggagcaccacagccaggaacacagctgccccagccaccgtgcccagcaccacagcccccttcttcagcagcagcaccctgggcagccggccccctgtgcccggcacccccagcacccaggccatgcccagctggcccacagctgcctatgccaccagcagctacctgcatgacagcacccccagctggaccctgagccccttccaggatgctgccagcagcagcagcagcagcagcagcagcgccaccaccaccaccccagagaccagcaccagccccaagttccacaccaccacctacagcacagagaggtctgagcacttcaagccctgccgggacaaggacctggcctactgcctgaatgatggagaatgttttgtgattgagaccctgaccggcagccacaagcactgccgctgcaaggagggctaccagggcgtgcgctgtgaccagttcctgcccaagacagacagcatcctgagtgaccccacccacatcggcatcatcttcacagagagcgaggaggtgtaccagaggcaggtgctgagcatcagctgcatcatcttcggcatcgtcatcgtgggcatgttctgtgccgccttctacttcaagagcaagaagcaggccaagcagatccaggagcagctgaaggtgccccagaatggcaagagctacagcctgaaggccagcagcaccatggccaagtctgagaacctggtgaagagccacgtgcagctgcagaactacagcaaggtggagcggcaccctgtgacagccctggagaagatgatggagagcagctttgtgggcccccagagcttccctgaggtgcccagcccagaccggggcagccagagcgtgaagcaccacaggagcctgagcagctgctgcagccctggccagaggagcggcatgctgcacagaaatgccttccggaggaccccacccagccccaggagccggctgggcggcatcgtgggccctgcctaccagcagctggaggagagccgcatcccagaccaggacaccatcccctgccagggctacagcagcagcggcctgaagacccagaggaacaccagcatcaacatgcagctgcccagccgggagaccaacccctacttcaacagcctggagcagaaggacctggtgggctacagcagcacccgggccagctctgtgcccatcatccccagcgtgggcctggaggagacctgcctgcagatgcctggcatcagcgaggtgaagagcatcaagtggtgcaagaacagctacagcgcagatgtggtgaatgtgtccatccctgtgtctgactgcctgattgctgagcagcaggaggtgaagatcctgctggagaccgtgcaggagcagatccgcatcctgacagatgcccggcggagtgaagattatgagctggcctctgtggagacagaagattctgccagcgagaacacagccttcctgcccctgagccccacagccaagtctgagcgggaggcccagtttgtgctgagaaatgagatccagagggacagcgccctgaccaagtag

SEQ ID NO: 64073 - DNA, 2088 bp, Artificial Sequence
  derived and/or modified sequence
atgagcgagggcgccgccgccgccagcccccccggcgccgccagcgccgctgcggcttccgccgaagagggcacagccgctgcagcagctgccgccgcagctgggggcggacctgatggaggcggcgagggggctgccgagcctccccgcgagctgagatgctctgactgtatagtatggaataggcaacagacatggctgtgcgtcgtccctcttttcattggttttattggactgggcttatctttgatgttgctgaagtggatcgtggtgggctccgtgaaagaatacgttcccactgacctcgtggatagcaaagggatgggtcaagaccctttctttctgtccaagccatccagctttcccaaggctatggagaccacgaccacaactacaagcacgacctcccctgctacacctagcgccggcggcgctgcttcaagtaggacgcccaatcgaatttctactagactgacaaccataactagagcccccacaaggtttccagggcaccgcgtcccaatccgggctagcccccgatcaaccacggctcgaaatacagccgccccggcgaccgtgccttccaccaccgcccctttctttagctcttctaccctaggctcacgacctcctgtgccaggaaccccaagcacccaggcaatgcccagctggccgacagcagcctacgctacatcaagttacctccacgacagcacgccgtcttggacactgtcccctttccaggacgccgcttctagttcatctagcagctctagcagcgctacgactactactccagaaacgagcacctcccccaaatttcatacgaccacttattctacggagcgctccgaacattttaaaccctgtagggacaaggatctggcttattgcctgaatgatggggagtgtttcgtgatagagacactgacagggtctcacaagcactgtcgatgcaaggaaggataccagggagtgagatgtgatcagtttctgcccaaaaccgacagtattctctccgacccgactcatatcgggatcatttttacggagagtgaggaggtataccagaggcaggtccttagtatcagttgtataatttttggcattgtgatcgtggggatgttctgtgcagcattttacttcaagagcaagaaacaggctaaacagattcaggaacagctaaaggttccccagaatgggaagtcttactcacttaaagcctcttctacaatggctaagtcggagaatctggtgaaatcccacgtccagctgcagaactattctaaagtagagcgacaccccgtgaccgcactggagaagatgatggagagctctttcgtaggcccacaatcgttccctgaagtcccctcacctgatcggggctctcagagcgtcaaacatcacaggtcgttgagcagttgctgctctcctggtcaaagaagcggcatgttgcatcgtaacgcatttagaagaactccacctagtcctcggagccgcctgggcggaatcgtaggccctgcctaccagcagctcgaagaatccaggatccccgatcaggatacaatcccatgccaggggtattcatcatctggactgaagacccaacggaacactagcattaatatgcagcttcccagtcgggagaccaatccctattttaactctctggaacaaaaagatctcgtgggctacagtagcacaagagccagctcggtgcctatcatcccgtcagtcggcctggaggagacctgtctgcagatgccaggcatcagtgaagtcaaaagcatcaagtggtgtaaaaattcctactctgcagatgtggtcaacgtttctatccctgtgtctgattgtcttatcgctgaacagcaagaggtgaaaattctcctggagacagttcaggagcagattcggatcttgaccgatgcaaggagatccgaagattatgagctggcctctgtggagacagaggactcagccagcgagaataccgccttcttgcctctttcccccacagccaaaagcgaacgggaagctcagttcgtgctgagaaacgaaatccaaagagactcagctttgaccaagtag

SEQ ID NO: 64074 - DNA, 2088 bp, Artificial Sequence
  derived and/or modified sequence
atgagtgaaggggcggccgctgcctcgccacctggtgccgcttcggcagccgccgcctcggccgaggagggcaccgcggcggctgcggcggcggcagcggcgggcgggggcccggacggcggcggcgaaggggcggccgagcccccccgggagttacgctgtagcgactgcatcgtgtggaaccggcagcagacgtggctgtgcgtggtacctctgttcatcggcttcatcggcctggggctcagcctcatgcttctcaaatggatcgtggtgggctccgtcaaggagtacgtgcccaccgacctagtggactccaaggggatgggccaggaccccttcttcctctccaagcccagctctttccccaaggccatggagaccaccaccactaccacttccaccacgtcccccgccaccccctccgccgggggtgccgcctcctccaggacgcccaaccggattagcactcgcctgaccaccatcacgcgggcgcccactcgcttccccgggcaccgggtgcccatccgggccagcccgcgctccaccacagcacggaacactgcggcccctgcgacggtcccgtccaccacggccccgttcttcagtagcagcacgctgggctcccgacccccggtgccaggaactccaagtacccaggcaatgccctcctggcctactgcggcatacgctacctcctcctaccttcacgattctactccctcctggaccctgtctccctttcaggatgctgcctcctcttcttcctcttcttcctcctccgctaccaccaccacaccagaaactagcaccagccccaaatttcatacgacgacatattccacagagcgatccgagcacttcaaaccctgccgagacaaggaccttgcatactgtctcaatgatggcgagtgctttgtgatcgaaaccctgaccggatcccataaacactgtcggtgcaaagaaggctaccaaggagtccgttgtgatcaatttctgccgaaaactgattccatcttatcggatccaacccatataggaattatattcacagagagtgaagaagtttatcaaaggcaggtgctgtcaatttcatgtatcatctttggaattgtcatcgtgggcatgttctgtgcagcattctacttcaaaagcaagaaacaagctaaacaaatccaagagcagctgaaagtgccacaaaatggtaaaagctacagtctcaaagcatccagcacaatggcaaagtcagagaacttggtgaagagccatgtccagctgcaaaattattcaaaggtggaaaggcatcctgtgactgcattggagaaaatgatggagtcaagttttgtcggcccccagtcattccctgaggtcccttctcctgacagaggaagccagtctgtcaaacaccacaggagtctatcctcttgctgcagcccagggcaaagaagtggcatgctccataggaatgccttcagaaggacacccccgtcaccccgaagtaggctaggtggaattgtgggaccagcatatcagcaactcgaagaatcaaggatcccagaccaggatacgataccttgccaagggtattcatccagtggtttaaaaacccaacgaaatacatcaataaatatgcaactgccttcaagagagacaaacccctattttaatagcttggagcaaaaggacctggtgggctattcatccacaagggccagttctgtgcccatcatcccttcagtgggtttagaggaaacctgcctgcaaatgccagggatttctgaagtcaaaagcatcaaatggtgcaaaaactcctattcagctgacgttgtcaatgtgagtattccagtcagcgattgtcttatagcagaacaacaagaagtgaaaatattgctagaaactgtccaggagcagatccgaattctgactgatgccagacggtcagaagactacgaactggccagcgtagaaaccgaggacagtgcaagcgaaaacacagcctttctccccctgagtcccacagccaaatcagaacgagaggcgcaatttgtcttaagaaatgaaatacaaagagactctgcattgaccaagtga

SEQ ID NO: 64075 - DNA, 2088 bp, Artificial Sequence
  derived and/or modified sequence
atgagcgagggggctgcagcagcctccccccctggggcagcatctgcagctgccgcatctgctgaagaggggacagcggctgccgcagcggctgctgcggcagggggtggacccgacggcggaggcgagggagcagccgagcctccccgagaattgcggtgctcggactgtatcgtctggaatcgccaacagacctggctatgcgttgtgccactcttcataggatttattgggcttggcctcagcctaatgctgctcaagtggatcgtcgtgggcagtgtcaaggaatatgtgcctacagacttggtggatagcaagggcatgggccaggaccccttttttctgagcaagcccagtagttttccaaaagccatggaaactactaccaccaccacgagcactactagtcctgcaactcctagtgcgggaggagctgcatctagccggacaccgaaccgaattagcactagactaacaacaatcacccgggctcccacacgatttcccggtcacagggtccctatacgcgcaagtccacggtcaaccacagctaggaataccgccgcacccgcaacagtcccttccaccacagcccctttcttttcaagctctacgctgggatccaggcccccagttccaggtacaccctccactcaggcgatgccatcctggcctacagctgcttacgccacatcttcctatctgcatgatagcacgccttcatggacactcagcccttttcaggacgcggcttctagctcatcttcatcatctagttctgctactactaccacacccgaaacctctaccagccctaagttccacacaactacctacagtaccgagaggtccgaacactttaagccctgtagagacaaggatttggcttattgtctcaatgatggtgagtgcttcgtgatagagactcttacaggatctcacaaacactgccggtgcaaggagggctaccagggtgtgagatgcgaccagttcttgcccaaaaccgacagcattttaagcgatccaacgcacatcggtattatattcaccgagagtgaagaggtctaccagcgtcaggtgctgtctatcagctgcatcatctttggaatcgtcatagtgggtatgttttgtgctgctttctattttaaatccaagaaacaggccaagcagatccaggagcagctaaaggtgccccagaatggcaagtcttattccctgaaggcctcaagtacgatggctaaatccgagaacttagtgaagagtcatgtgcaactgcaaaactacagcaaagtggagcgacatcccgttacagctcttgagaagatgatggagagctcttttgtcggcccacagtcttttcccgaagttccgtcgcccgacagagggagccagtcagtcaaacaccataggagcctcagctcatgttgttctcctggccagcggtcgggaatgctgcaccgcaatgccttccgcaggactcccccttctcccaggtcgcggctgggaggaattgtggggcctgcatatcagcaacttgaggaatctagaatccccgatcaggataccataccctgtcagggttactccagtagcggactgaagactcagcgaaatacttccatcaatatgcaactaccatccagggagacaaacccatattttaattctctggaacagaaagatttggtaggctactcaagtactagagcgtctagcgtgccgatcatcccctcggtgggactcgaggagacttgtctgcagatgcctggcatcagcgaggtgaaaagcattaagtggtgcaagaattcatactctgctgacgtggtgaatgtgtcaatccccgtctcagattgcttgattgctgagcagcaggaggtgaaaattctcctcgagaccgttcaggagcagataaggattctgacagatgcccgacggtccgaggactacgagctcgcttccgttgagacagaagactcagcctccgagaataccgccttcctgcccctctcaccaactgccaaatccgagcgagaagctcagttcgtgcttcgcaatgagatacagagagacagtgcactaaccaagtag

SEQ ID NO: 64076 - DNA, 2088 bp, Artificial Sequence
  derived and/or modified sequence
atgagcgagggcgccgccgccgccagcccccccggcgccgccagcgccgccgccgccagcgccgaggagggcaccgccgccgccgccgccgccgccgccgccggcggcggccccgacggcggcggcgagggcgccgccgagccccccagagagctgagatgcagcgactgcatcgtgtggaacagacagcagacctggctgtgcgtggtgcccctgttcatcggcttcatcggcctgggcctgagcctgatgctgctgaagtggatcgtggtgggcagcgtgaaggagtacgtgcccaccgacctggtggacagcaagggcatgggccaggaccccttcttcctgagcaagcccagcagcttccccaaggccatggagaccaccaccaccaccaccagcaccaccagccccgccacccccagcgccggcggcgccgccagcagcagaacccccaacagaatcagcaccagactgaccaccatcaccagagcccccaccagattccccggccacagagtgcccatcagagccagccccagaagcaccaccgccagaaacaccgccgcccccgccaccgtgcccagcaccaccgcccccttcttcagcagcagcaccctgggcagcagaccccccgtgcccggcacccccagcacccaggccatgcccagctggcccaccgccgcctacgccaccagcagctacctgcacgacagcacccccagctggaccctgagccccttccaggacgccgccagcagcagcagcagcagcagcagcagcgccaccaccaccacccccgagaccagcaccagccccaagttccacaccaccacctacagcaccgagagaagcgagcacttcaagccctgcagagacaaggacctggcctactgcctgaacgacggcgagtgcttcgtgatcgagaccctgaccggcagccacaagcactgcagatgcaaggagggctaccagggcgtgagatgcgaccagttcctgcccaagaccgacagcatcctgagcgaccccacccacatcggcatcatcttcaccgagagcgaggaggtgtaccagagacaggtgctgagcatcagctgcatcatcttcggcatcgtgatcgtgggcatgttctgcgccgccttctacttcaagagcaagaagcaggccaagcagatccaggagcagctgaaggtgccccagaacggcaagagctacagcctgaaggccagcagcaccatggccaagagcgagaacctggtgaagagccacgtgcagctgcagaactacagcaaggtggagagacaccccgtgaccgccctggagaagatgatggagagcagcttcgtgggcccccagagcttccccgaggtgcccagccccgacagaggcagccagagcgtgaagcaccacagaagcctgagcagctgctgcagccccggccagagaagcggcatgctgcacagaaacgccttcagaagaaccccccccagccccagaagcagactgggcggcatcgtgggccccgcctaccagcagctggaggagagcagaatccccgaccaggacaccatcccctgccagggctacagcagcagcggcctgaagacccagagaaacaccagcatcaacatgcagctgcccagcagagagaccaacccctacttcaacagcctggagcagaaggacctggtgggctacagcagcaccagagccagcagcgtgcccatcatccccagcgtgggcctggaggagacctgcctgcagatgcccggcatcagcgaggtgaagagcatcaagtggtgcaagaacagctacagcgccgacgtggtgaacgtgagcatccccgtgagcgactgcctgatcgccgagcagcaggaggtgaagatcctgctggagaccgtgcaggagcagatcagaatcctgaccgacgccagaagaagcgaggactacgagctggccagcgtggagaccgaggacagcgccagcgagaacaccgccttcctgcccctgagccccaccgccaagagcgagagagaggcccagttcgtgctgagaaacgagatccagagagacagcgccctgaccaagtag

SEQ ID NO: 64077 - protein, 499 aa, Artificial Sequence
  derived and/or modified sequence
MECGIPPTLVCVGRGGGLHTINIIIWYYFPSAWRTCFNISSSVGLLLTNSYKFYTTTYSTERSEHFKPCRDKDLAYCLNDGECFVIETLTGSHKHCRCKEGYQGVRCDQFLPKTDSILSDPTDHLGIEFMESEEVYQRQVLSISCIIFGIVIVGMFCAAFYFKSKKQAKQIQEQLKVPQNGKSYSLKASSTMAKSENLVKSHVQLQNYSKVERHPVTALEKMMESSFVGPQSFPEVPSPDRGSQSVKHHRSLSSCCSPGQRSGMLHRNAFRRTPPSPRSRLGGIVGPAYQQLEESRIPDQDTIPCQGIEVRKTISHLPIQLWCVERPLDLKYSSSGLKTQRNTSINMQLPSRETNPYFNSLEQKDLVGYSSTRASSVPIIPSVGLEETCLQMPGISEVKSIKWCKNSYSADVVNVSIPVSDCLIAEQQEVKILLETVQEQIRILTDARRSEDYELASVETEDSASENTAFLPLSPTAKSEREAQFVLRNEIQRDSALTK

SEQ ID NO: 64078 - DNA, 1500 bp, Artificial Sequence
  derived and/or modified sequence
atggagtgtggcatacctcccacactggtatgcgtgggaagaggagggggactgcacacaataaatatcataatatggtactatttcccctcggcatggaggacttgtttcaacatcagcagctccgttggcctattactgacaaatagctacaaattttacacgaccacctacagcacagaaagaagcgagcattttaagccctgtagagacaaggatttggcctactgcctaaacgacggagaatgctttgtcatcgagactcttactggttcccacaagcactgtcggtgcaaggaaggataccagggagtcagatgtgaccagtttttacctaagacagattctatcctctccgacccaaccgaccatctcggcatcgagttcatggagtccgaagaggtgtaccagcgccaagtactatccatctcttgcattatctttgggattgtgatcgtgggcatgttctgcgccgccttctacttcaagagtaagaagcaggcaaagcagatccaggagcaacttaaagtgccgcaaaacggcaaatcttacagcctcaaggcctcttccacaatggccaaaagtgaaaatctcgtcaagagtcatgtccagctccaaaactattcaaaggtcgaacggcatccagtgactgccctagagaagatgatggagtccagcttcgtgggccctcaatcatttcctgaagttcccagtccagatagaggctcccaaagcgtgaaacatcaccgatccctttcatcctgttgttcccccggtcagcggagcggcatgctacatcgcaacgcgtttcgacgcacgccgccctctcctcggtcccggctgggcggtattgtggggcccgcatatcagcagctggaagaaagcaggatcccggaccaggacaccataccctgccaagggattgaagtgaggaaaactatctcacacctgcccattcagctgtggtgtgttgaacggccactcgatttgaagtacagttcgtccgggctgaaaactcaacgtaacacttccattaacatgcaattgccatccagggaaactaacccttattttaatagtttagagcagaaggacttagtaggatatagctcaaccagagcatcctccgtaccaattatcccaagtgtgggcctggaagagacttgccttcagatgccgggcatttcagaggtcaaaagtataaaatggtgtaaaaatagctattccgctgatgtggttaacgtaagcattcctgtaagtgattgcctcattgccgaacaacaagaggtcaagatactgctcgagactgtccaagagcagatcagaattctgacagacgcaagacggtctgaggactacgagctggcatcggtagagacagaagactccgcttctgagaataccgcattcctgcctctgagcccaacagccaaatccgagcgggaagctcagttcgtcttgaggaacgaaatccaaagggatagcgccttgacaaaatag

SEQ ID NO: 64079 - DNA, 1500 bp, Artificial Sequence
  derived and/or modified sequence
atggagtgtggcatcccccccaccctggtgtgtgtgggccggggcggcggcctgcacaccatcaacatcatcatctggtactacttccccagcgcctggaggacctgcttcaacatcagcagctctgtgggcctgctgctgaccaacagctacaagttctacaccaccacctacagcacagagaggtctgagcacttcaagccctgccgggacaaggacctggcctactgcctgaatgatggagagtgcttcgtcatcgagaccctgaccggcagccacaagcactgccgctgcaaggagggctaccagggcgtgcgctgtgaccagttcctgcccaagacagacagcatcctgagtgaccccacagaccacctgggcatcgagttcatggagagcgaggaggtgtaccagaggcaggtgctgagcatcagctgcatcatcttcggcatcgtcatcgtgggcatgttctgtgccgccttctacttcaagagcaagaagcaggccaagcagatccaggagcagctgaaggtgccccagaatggcaagagctacagcctgaaggccagcagcaccatggccaagtctgagaacctggtgaagagccacgtgcagctgcagaactacagcaaggtggagcggcaccctgtgacagccctggagaagatgatggagagcagctttgtgggcccccagagcttccctgaggtgcccagcccagaccggggcagccagagcgtgaagcaccacaggagcctgagcagctgctgcagccctggccagaggagcggcatgctgcacagaaatgccttccggaggaccccacccagccccaggagccggctgggcggcatcgtgggccctgcctaccagcagctggaggagagccgcatcccagaccaggacaccatcccctgccagggcatcgaggtgaggaagaccatcagccacctgcccatccagctgtggtgtgtggagcggcccctggacctgaagtacagcagcagcggcctgaagacccagaggaacaccagcatcaacatgcagctgcccagccgggagaccaacccctacttcaacagcctggagcagaaggacctggtgggctacagcagcacccgggccagctctgtgcccatcatccccagcgtgggcctggaggagacctgcctgcagatgcctggcatcagcgaggtgaagagcatcaagtggtgcaagaacagctacagcgcagatgtggtgaatgtgtccatccctgtgtctgactgcctgattgctgagcagcaggaggtgaagatcctgctggagaccgtgcaggagcagatccgcatcctgacagatgcccggcggagtgaagattatgagctggcctctgtggagacagaagattctgccagcgagaacacagccttcctgcccctgagccccacagccaagtctgagcgggaggcccagtttgtgctgagaaatgagatccagagggacagcgccctgaccaagtag

SEQ ID NO: 64080 - DNA, 1500 bp, Artificial Sequence
  derived and/or modified sequence
atggagtgcggcatcccccccaccctggtgtgcgtgggccggggcggaggactccacacgatcaatatcattatttggtactacttcccaagcgcctggcggacttgtttcaatatttccagctccgtcgggctcctgctcactaatagttacaagttctacacgaccacatactctaccgagcgttccgagcactttaagccttgcagagataaggacctcgcatactgtttgaacgacggcgaatgttttgtgatcgagaccctcacgggcagccataaacactgcagatgcaaggaaggatatcagggggtccgttgcgatcagttcctgccaaagacggattccattctgagcgaccccacagaccacctgggcatagaatttatggaaagtgaggaagtgtaccagaggcaggtgctgagtattagttgtattatattcgggattgttatcgtcggaatgttttgcgcagccttctattttaagtcaaaaaagcaggcaaagcagattcaggagcaattgaaagtcccccagaacggcaagagttattccctgaaggcttcctccacaatggctaaaagcgaaaacttggtgaaaagccacgttcagctccagaactactctaaggttgaacgacatcccgtgacagccttggagaaaatgatggaaagttcctttgttggaccccagagtttcccagaagttcctagccctgaccgcggaagccagtctgttaagcaccatcgctcactctcaagctgctgtagccccggacagagaagtgggatgctacacaggaacgctttccgacgcacaccgccttcaccaaggagcagactgggagggatcgtgggcccagcctatcagcaactggaggaaagcaggatccccgaccaggacactatcccatgtcaaggcatcgaggtgcggaagaccatcagccatctgcccatacagctctggtgtgtcgagaggcctctggacctgaaatactcctctagtggattgaagacccagcgtaacaccagtatcaatatgcagttgccctctagggaaaccaatccctattttaactcgctcgagcagaaggatctggtagggtatagctctactcgggcctccagcgttcccattatcccgtccgtcggtctcgaggagacctgcctccagatgcctgggatcagcgaggtgaagagcattaagtggtgcaagaactcatacagcgcagacgtggttaatgtttcgattcctgtgtccgattgcttgatcgccgagcagcaagaagtaaaaatacttctggaaactgtgcaggagcagatccgaattctgacagacgctaggaggagcgaagactacgagctagcatctgtagagacagaggattcagcatctgaaaacacggcctttttacccttgagtccaacagcaaagagtgagcgggaagctcagtttgtgctgcggaacgagatacaaagagactccgcgttgaccaaatag

SEQ ID NO: 64081 - DNA, 3136 bp, Artificial Sequence
  derived and/or modified sequence
caggaaggagggaaggaaggaatctgccacaaaccagaatggcagtagagccagtaacttgctgcttctctctcctttggctgaagcagtcatttttgagagcacattttcccaggaggtgtttagagcctccactcaacaaatctagcttgtgttttgtagaaggataaaggattcatgagtgtatgtgtgaacatattcaatggattgaaaatgagtctaccctgaagaccccagatttttgatctgctcttttgatgcagttgatagaataatggagtgtggtatacctccaacccttgtatgcgttgggagaggagggggactacacacgatcaatataatcatctggtattattttccttctgcctggaggacttgctttaacatttcaagtagtgtgggtctgctgctgacgaattcatacaaattttatacgacgacatattccacagagcgatccgagcacttcaaaccctgccgagacaaggaccttgcatactgtctcaatgatggcgagtgctttgtgatcgaaaccctgaccggatcccataaacactgtcggtgcaaagaaggctaccaaggagtccgttgtgatcaatttctgccgaaaactgattccatcttatcggatccaacagaccacttggggattgaattcatggagagtgaagaagtttatcaaaggcaggtgctgtcaatttcatgtatcatctttggaattgtcatcgtgggcatgttctgtgcagcattctacttcaaaagcaagaaacaagctaaacaaatccaagagcagctgaaagtgccacaaaatggtaaaagctacagtctcaaagcatccagcacaatggcaaagtcagagaacttggtgaagagccatgtccagctgcaaaattattcaaaggtggaaaggcatcctgtgactgcattggagaaaatgatggagtcaagttttgtcggcccccagtcattccctgaggtcccttctcctgacagaggaagccagtctgtcaaacaccacaggagtctatcctcttgctgcagcccagggcaaagaagtggcatgctccataggaatgccttcagaaggacacccccgtcaccccgaagtaggctaggtggaattgtgggaccagcatatcagcaactcgaagaatcaaggatcccagaccaggatacgataccttgccaagggatagaggtcaggaagactatatcccacctgcctatacagctgtggtgtgttgaaagacccctggacttaaagtattcatccagtggtttaaaaacccaacgaaatacatcaataaatatgcaactgccttcaagagagacaaacccctattttaatagcttggagcaaaaggacctggtgggctattcatccacaagggccagttctgtgcccatcatcccttcagtgggtttagaggaaacctgcctgcaaatgccagggatttctgaagtcaaaagcatcaaatggtgcaaaaactcctattcagctgacgttgtcaatgtgagtattccagtcagcgattgtcttatagcagaacaacaagaagtgaaaatattgctagaaactgtccaggagcagatccgaattctgactgatgccagacggtcagaagactacgaactggccagcgtagaaaccgaggacagtgcaagcgaaaacacagcctttctccccctgagtcccacagccaaatcagaacgagaggcgcaatttgtcttaagaaatgaaatacaaagagactctgcattgaccaagtgacttgagatgtaggaatctgtgcattctatgctttgctcaacaggaaagagaggaaatcaaatacaaattatttatatgcattaatttaagagcatctacttagaagaaaccaaatagtctatcgccctcatatcatagtgttttttaacaaaatatttttttaagggaaagaaatgtttcaggagggataaagcttaccattaaagcttttgggtagaattctgaatccaatttcgtttagtcccaacactgtcctctttggctcttagaagatgtgggcaattcagacccttggccccacagtgccagtgtctcattaaaaaacactggcagttacctggtttcaaaaagaggagagctgcatcccgcaggtggatgcaccagtgagcaggtggctcttgccatttggcttgccagtcccaagccctaaatttctattcacccaatagcctcatcacaggttatgtcatgtcgacacatgtagtgttttctatttgatttttggagaatgccacaaaagactctgcaatgggaaggaggacaggagatagaaggagaaaccgggggcaatcttaactactcttgtgtgccaccttcctctgagatttgaatgcacagatctcagctggaggtatgaaattattacagaaaaagagacaaaaaaatccttatatcgtgtcactaaaatcatgctaatagaaatgtttttccttgagattgtttagaggctctggaggagcgtttctcagtttttgtgtgcctgtgtgcacatgtgtgtgcgagcgtgtgtgtgtgtggacttgctcacgcgggcacatatgctgtaagcacatgtgttcattgtgcgtatgtgtgtgcatgtgtgcgcgtattacgcttgctaaaatttgttctgaaacatcagggaatctactattcagaaaaattatttccctcttagatcttttcactttaaatttttccattaagtataaagttcagttagttcttaaatcaaggtcacttgcatggtggggtcgtataaaactcttgacactgtctagaccattttctgatgtgaatacttttgagaggatcaactattggctcattaatgatatcagtatcataaggtgagttcatcaaggatgtgtgtttattttgaatcatgcctacttaaattattaatacaagacaattaacaaattgacagttaccatttgctttctcatcatcctcattaccatttattttatagcaagtctgctatgtgtggaccaaggcttcggcttctgtggttagtatgggaagaataaattgttgaaataaaaatacccagactattcagttcacaagaagccccccaaaagaacagtaaattgt

SEQ ID NO: 64082 - DNA, 1500 bp, Artificial Sequence
  derived and/or modified sequence
atggagtgtggcattcctccgaccctggtatgcgtgggcaggggcggtgggttacatactatcaatatcatcatttggtattatttcccaagcgcgtggcgcacgtgtttcaatatctcatcctctgtgggacttttgctcactaactcctataagttctataccaccacatattctacagagcgcagcgaacatttcaaaccatgtagggacaaagatctggcctactgcctgaatgacggggagtgctttgtgatagaaaccttaactggatctcataagcattgtcggtgcaaagagggctatcagggcgtacgttgtgaccagttcctgcccaagacagattccattctctctgatcccacagaccacctgggcattgagtttatggagtctgaagaagtctatcaaagacaggtgctgtcaatctcttgcatcattttcggtatcgtgatcgttgggatgttttgcgcggctttttacttcaagtcaaagaagcaggccaagcaaatccaggagcaactgaaggtccctcagaatgggaagagctactccctgaaagcatccagtacgatggctaagtcagaaaatctggttaagagtcatgtccagcttcagaactatagcaaagtggagcgccacccagttacagccctggaaaaaatgatggagagttcctttgtgggccctcagtcctttcccgaggtccctagtccagaccggggatctcaatccgtcaagcaccacaggtctctcagctcgtgttgttcacccggacagcggagcggcatgctccatagaaatgcctttcgccgtacccccccttccccacgcagcaggttgggcggaatcgtgggacccgcatatcagcagctcgaagagagccggatacccgaccaggacacgatcccgtgtcagggcatcgaggtgcgaaagactatcagccatttgcccatacaattgtggtgcgtggagcgccctttggacctgaaatactcatcttccggcttaaagacccagcgcaatacaagcataaatatgcagctgccatctcgggagacaaacccttatttcaactctctggaacagaaagatttagtaggatacagcagtacaagagcctcaagtgtgcccattatcccatccgtcggtctggaggaaacctgccttcagatgccgggaatatccgaagtcaagagtattaaatggtgcaagaattcatacagcgcggatgtagtgaacgtctcaatcccagtgtcagactgcctaatagcagaacaacaggaagtgaaaatcctccttgagaccgtgcaggaacagattaggattctgacagacgcgaggcgctccgaagattacgagctggcctccgtggaaacagaagattctgccagcgagaacacagcatttcttcccctgtccccaacagcaaaatctgaacgcgaggcacagtttgtcctgcgtaatgagatccaacgcgactctgcactgaccaaatag

SEQ ID NO: 64083 - DNA, 1500 bp, Artificial Sequence
  derived and/or modified sequence
atggagtgcggcatcccccccaccctggtgtgcgtgggcagaggcggcggcctgcacaccatcaacatcatcatctggtactacttccccagcgcctggagaacctgcttcaacatcagcagcagcgtgggcctgctgctgaccaacagctacaagttctacaccaccacctacagcaccgagagaagcgagcacttcaagccctgcagagacaaggacctggcctactgcctgaacgacggcgagtgcttcgtgatcgagaccctgaccggcagccacaagcactgcagatgcaaggagggctaccagggcgtgagatgcgaccagttcctgcccaagaccgacagcatcctgagcgaccccaccgaccacctgggcatcgagttcatggagagcgaggaggtgtaccagagacaggtgctgagcatcagctgcatcatcttcggcatcgtgatcgtgggcatgttctgcgccgccttctacttcaagagcaagaagcaggccaagcagatccaggagcagctgaaggtgccccagaacggcaagagctacagcctgaaggccagcagcaccatggccaagagcgagaacctggtgaagagccacgtgcagctgcagaactacagcaaggtggagagacaccccgtgaccgccctggagaagatgatggagagcagcttcgtgggcccccagagcttccccgaggtgcccagccccgacagaggcagccagagcgtgaagcaccacagaagcctgagcagctgctgcagccccggccagagaagcggcatgctgcacagaaacgccttcagaagaaccccccccagccccagaagcagactgggcggcatcgtgggccccgcctaccagcagctggaggagagcagaatccccgaccaggacaccatcccctgccagggcatcgaggtgagaaagaccatcagccacctgcccatccagctgtggtgcgtggagagacccctggacctgaagtacagcagcagcggcctgaagacccagagaaacaccagcatcaacatgcagctgcccagcagagagaccaacccctacttcaacagcctggagcagaaggacctggtgggctacagcagcaccagagccagcagcgtgcccatcatccccagcgtgggcctggaggagacctgcctgcagatgcccggcatcagcgaggtgaagagcatcaagtggtgcaagaacagctacagcgccgacgtggtgaacgtgagcatccccgtgagcgactgcctgatcgccgagcagcaggaggtgaagatcctgctggagaccgtgcaggagcagatcagaatcctgaccgacgccagaagaagcgaggactacgagctggccagcgtggagaccgaggacagcgccagcgagaacaccgccttcctgcccctgagccccaccgccaagagcgagagagaggcccagttcgtgctgagaaacgagatccagagagacagcgccctgaccaagtag

SEQ ID NO: 64084 - protein, 736 aa, Artificial Sequence
  derived and/or modified sequence
MSSLQALCSGLPLRPLPENRGRQAGVPHAPVRTPSLSPVEKQLALRNALRYFPPDVQELLAPEFAQELQLYGHIYMYRFCPDIEMRAYPIEQYPCQTKVAAAIMHMIMNNLDPAVAQFPQELVTYGGNGQVFSNWAQFWLTMFYLSKMTEEQTLVMYSGHPLGLFPSSRSAPRLVITNGMVIPNYSSRTEYEKLFALGVTMYGQMTAGSYCYIGPQGIVHGTVLTVLNAARRYLGIEDLAGKVFVTSGLGGMSGAQAKAAVIVGCIGVIAEVDKAALEKRHRQGWLMEVTDSLDRCIQRLRVLQLGLQQALGWAGLPAALGLCVLSCFVNLAPLGEGRCLAPSGFSRPLLGAPVLLLCPSREARKKKEVLSLGYHGNVVALWERLVHELDTTGECLVDLGSDQTSCHNPFNGGYYPVQLSFTEAQSLMASNPAVFKDLVQESLRRQVSAINRLAEEKFFFWDYGNAFLLEAQRAGADVEKKGAGRTEFRYPSYVQHIMGDIFSQGFGPFRWVCTSGDPQDLAVTDELATSVLEEAIADGVKVSVKLQYMDNIRWIREAARHRLVVGSQARILYSDQKGRVAIAVAINQAIACRRIKAPVVLSRDHHDVSGTDSPFRETSNIYDGSAFCADMAVQNFVGDACRGATWVALHNGGGVGWGEVINGGFGLVLDGTPEAEGRARLMLSWDVSNGVARRCWSGNQKAYEIICQTMQENSTLVVTLPHKVEDERVLQQALQL

SEQ ID NO: 64085 - DNA, 2211 bp, Artificial Sequence
  derived and/or modified sequence
atgagcagcctgcaggccctgtgcagcggcctgcccctgagacccctgcccgagaacagaggcagacaggccggcgtgccccacgcccccgtgagaacccccagcctgagccccgtggagaagcagctggccctgagaaacgccctgagatacttcccccccgacgtgcaggagctgctggcccccgagttcgcccaggagctgcagctgtacggccacatctacatgtacagattctgccccgacatcgagatgagagcctaccccatcgagcagtacccctgccagaccaaggtggccgccgccatcatgcacatgatcatgaacaacctggaccccgccgtggcccagttcccccaggagctggtgacctacggcggcaacggccaggtgttcagcaactgggcccagttctggctgaccatgttctacctgagcaagatgaccgaggagcagaccctggtgatgtacagcggccaccccctgggcctgttccccagcagcagaagcgcccccagactggtgatcaccaacggcatggtgatccccaactacagcagcagaaccgagtacgagaagctgttcgccctgggcgtgaccatgtacggccagatgaccgccggcagctactgctacatcggcccccagggcatcgtgcacggcaccgtgctgaccgtgctgaacgccgccagaagatacctgggcatcgaggacctggccggcaaggtgttcgtgaccagcggcctgggcggcatgagcggcgcccaggccaaggccgccgtgatcgtgggctgcatcggcgtgatcgccgaggtggacaaggccgccctggagaagagacacagacagggctggctgatggaggtgaccgacagcctggacagatgcatccagagactgagagtgctgcagctgggcctgcagcaggccctgggctgggccggcctgcccgccgccctgggcctgtgcgtgctgagctgcttcgtgaacctggcccccctgggcgagggcagatgcctggcccccagcggcttcagcagacccctgctgggcgcccccgtgctgctgctgtgccccagcagagaggccagaaagaagaaggaggtgctgagcctgggctaccacggcaacgtggtggccctgtgggagagactggtgcacgagctggacaccaccggcgagtgcctggtggacctgggcagcgaccagaccagctgccacaaccccttcaacggcggctactaccccgtgcagctgagcttcaccgaggcccagagcctgatggccagcaaccccgccgtgttcaaggacctggtgcaggagagcctgagaagacaggtgagcgccatcaacagactggccgaggagaagttcttcttctgggactacggcaacgccttcctgctggaggcccagagagccggcgccgacgtggagaagaagggcgccggcagaaccgagttcagataccccagctacgtgcagcacatcatgggcgacatcttcagccagggcttcggccccttcagatgggtgtgcaccagcggcgacccccaggacctggccgtgaccgacgagctggccaccagcgtgctggaggaggccatcgccgacggcgtgaaggtgagcgtgaagctgcagtacatggacaacatcagatggatcagagaggccgccagacacagactggtggtgggcagccaggccagaatcctgtacagcgaccagaagggcagagtggccatcgccgtggccatcaaccaggccatcgcctgcagaagaatcaaggcccccgtggtgctgagcagagaccaccacgacgtgagcggcaccgacagccccttcagagagaccagcaacatctacgacggcagcgccttctgcgccgacatggccgtgcagaacttcgtgggcgacgcctgcagaggcgccacctgggtggccctgcacaacggcggcggcgtgggctggggcgaggtgatcaacggcggcttcggcctggtgctggacggcacccccgaggccgagggcagagccagactgatgctgagctgggacgtgagcaacggcgtggccagaagatgctggagcggcaaccagaaggcctacgagatcatctgccagaccatgcaggagaacagcaccctggtggtgaccctgccccacaaggtggaggacgagagagtgctgcagcaggccctgcagctgtag

SEQ ID NO: 64086 - DNA, 2211 bp, Artificial Sequence
  derived and/or modified sequence
atgagctcgcttcaggccctgtgttccggccttcccctgcgccctctacccgagaatagaggccggcaggcaggcgttccccatgccccggttcgcacccctagtctgtccccagtggagaaacagctggcactcaggaacgccctccgatattttcctccagacgtccaagagctcctcgccccagagtttgcccaggaactgcagctctacgggcatatctacatgtataggttctgcccggatatcgaaatgagggcttaccctatagagcagtacccctgtcagaccaaggtggcagctgcaatcatgcacatgattatgaataatctcgaccccgccgtggcccagttcccgcaggagctggtgacatatgggggaaacggacaggtgttttcaaactgggcgcagttttggctgactatgttttacctttctaaaatgaccgaagagcagactctggtgatgtactcaggtcaccccctcggtctgtttccctcaagtcggagtgctccacgtctcgtcataactaacggcatggtcattccaaactactcctctcgaactgaatatgaaaaactctttgctctgggtgtgacaatgtatggccagatgacagccggaagctactgttacatcggcccacaggggattgtccacgggaccgtgctgacagttctgaatgctgctaggagatacctgggaattgaagatctggctggaaaagtattcgtgacctcaggcctcggcggtatgtcaggcgcccaggccaaagccgccgtgattgtgggatgtatcggcgtcattgctgaagtcgacaaggcggcgttggagaagcgccaccgacagggctggctgatggaggtcactgacagcctggaccgttgcattcagaggctgagagtcctccagcttggactccagcaggctctgggatgggcaggattaccagctgccttgggcttgtgcgttctgtcatgttttgtcaatctggctccacttggagaggggcggtgtctcgcaccttcaggcttcagccggcccctgctcggcgctcctgtgttactcctgtgtccgtcacgggaagccagaaaaaaaaaagaggtcctctcattgggctaccacggcaacgtcgtagcactgtgggaaaggctggttcatgagctcgataccactggggagtgcttggtagacctgggctcagaccaaacgagctgtcataacccctttaacggcggatattacccagtgcagctgagtttcacagaggcccagtctctgatggcttctaaccccgcagtcttcaaagacctcgttcaggagtctttacgccgccaagtgagcgccatcaatcgcttggccgaggagaagtttttcttctgggactatggtaacgcctttcttctcgaggcacagcgggccggggccgatgtggaaaaaaagggtgcaggaaggacggaattccgatacccctcatatgtccagcatattatgggcgatattttcagccagggtttcggccctttcagatgggtctgcacctcaggggacccgcaggacttggcggtgacagatgaactcgccacaagtgtgctcgaggaggctattgctgatggcgtgaaagtttccgtcaagttacagtacatggataatatcaggtggattagagaggcggccagacataggctggttgtcggaagccaagcaaggattctttacagtgaccaaaagggccgggtcgctattgcggtggccatcaaccaggcaattgcctgccggcgaatcaaagcccctgtcgtgctgtcacgggatcaccacgacgtatcgggcacagacagtcctttccgggagacctctaatatctatgacggctctgctttctgtgcagatatggccgtgcaaaactttgtaggcgacgcctgtagaggagccacctgggtggcacttcataacggaggtggcgtcggttggggggaggtgattaatggcggttttgggctcgtgctagacgggacccccgaagcagagggcagggccaggctcatgttgagctgggacgtttctaacggcgtggctcgacgatgttggtctggaaaccagaaggcttatgaaattatttgccaaaccatgcaggaaaactccacgctggtggtgacgctgccccataaggtggaagatgaacgggtgctacaacaggctctgcagctgtag

SEQ ID NO: 64087 - DNA, 2211 bp, Artificial Sequence
  derived and/or modified sequence
atgagcagcctgcaggccctgtgcagcggcctgcccctgcggcccctgcctgagaacagaggccggcaggccggcgtgccccacgcccctgtgaggacccccagcctgagccctgtggagaagcagctggccctgagaaatgccctgcgctacttccccccagatgtgcaggagctgctggcccctgagtttgcccaggagctgcagctgtatggccacatctacatgtaccgcttctgcccagacatcgagatgagggcctaccccatcgagcagtacccctgccagaccaaggtggccgccgccatcatgcacatgatcatgaacaacctggaccctgctgtggcccagttcccccaggagctggtgacctatggaggaaatggccaggtgttcagcaactgggcccagttctggctgaccatgttctacctgagcaagatgacagaggagcagaccctggtgatgtacagcggccaccccctgggcctcttccccagcagccgcagcgccccccggctggtgatcaccaacggcatggtgatccccaactacagcagcaggacagaatatgagaagctgtttgccctgggcgtgaccatgtatggccagatgacagctggcagctactgctacatcggcccccagggcatcgtgcacggcaccgtgctgactgtgctgaatgctgcccggcgctacctgggcatcgaggacctggccggcaaggtgtttgtgaccagcggcctgggcggcatgtctggggcccaggccaaggccgccgtcatcgtgggctgcatcggcgtgattgctgaggtggacaaggccgccctggagaagaggcaccggcagggctggctgatggaggtgacagacagcctggaccgctgcatccagaggctgcgggtgctgcagctgggcctgcagcaggccctgggctgggccggcctgcctgctgccctgggcctgtgtgtgctgagctgctttgtgaacctggcccccctgggggagggccgctgcctggcccccagcggcttcagccggcccctgctgggcgcccctgtgctgctgctgtgccccagccgggaggccaggaagaagaaggaggtgctgagcctgggctaccatggaaatgtggtggccctgtgggagcggctggtgcatgagctggacaccaccggggagtgcctggtggacctgggcagtgaccagaccagctgccacaaccccttcaatggaggctactaccctgtgcagctgtccttcacagaggcccagagcctgatggccagcaacccagctgtgttcaaggacctggtgcaggagagcctgcggcggcaggtgtctgccatcaaccggctggccgaggagaagttcttcttctgggactatggaaatgccttcctgctggaggcccagagagctggagcagatgtggagaagaagggagctggccgcacagagttccgctaccccagctatgtgcagcacatcatgggagacatcttcagccagggcttcggccccttccgctgggtgtgcaccagcggggacccccaggacctggccgtgacagatgagctggccacctctgtgctggaggaggccatcgcagatggagtgaaggtgtctgtgaagctgcagtacatggacaacatccgctggatccgggaggccgcccggcaccggctggtggtgggcagccaggcccgcatcctgtacagcgaccagaagggccgggtggccatcgctgtggccatcaaccaggccatcgcctgccgccgcatcaaggcccctgtggtgctgagccgggaccaccatgatgtgtctggaacagacagccccttccgggagaccagcaacatctatgatggcagcgccttctgtgccgacatggctgtgcagaactttgtgggagatgcctgccgcggggccacctgggtggccctgcacaatggaggcggcgtgggctggggcgaggtgatcaatggaggcttcggcctggtgctggatggcaccccagaggccgagggccgggcccggctgatgctgtcctgggatgtgtccaatggagtggcccggcgctgctggagcggcaaccagaaggcctatgagatcatctgccagaccatgcaggagaacagcaccctggtggtgaccctgccccacaaggtggaggatgagcgggtgctgcagcaggccctgcagctgtag

SEQ ID NO: 64088 - DNA, 2211 bp, Artificial Sequence
  derived and/or modified sequence
atgagcagcctgcaggccctgtgcagcggcctgcccctgcggcccttgcctgagaatcgcggcagacaggcaggggtcccccacgccccagtgcgtaccccctctctgagccccgttgagaaacagcttgccctgcgtaacgccttgaggtactttccccctgacgtacaggagctgctcgctcctgagttcgcccaggagctgcagctgtacggtcatatatacatgtacaggttttgcccggacattgaaatgagagcttacccaatagagcagtatccatgccagacaaaggtggccgccgccataatgcacatgatcatgaacaacctggacccggctgtcgctcagtttccccaggagctcgtaacttacgggggcaatgggcaggtattctctaactgggcacagttctggctgacgatgttttatttgagcaagatgaccgaggaacagacactggtgatgtactcaggccatcctttggggctgttcccgagtagtcggtctgccccacgacttgtgattaccaacgggatggtcatcccgaactacagtagcaggactgagtacgagaagctattcgctctgggagttacaatgtatggtcagatgacagcagggtcttattgctacatcggcccgcagggcattgtgcacggcactgttctcacagtgcttaatgccgcacgacggtatctcgggattgaagatcttgctggcaaagtatttgtaacttctgggctgggcggcatgagtggggcacaggcaaaggcagccgtcatcgtgggctgcattggagtgatcgcagaggtggataaggctgctctggagaaacgccaccgccaagggtggttgatggaggtcacagattctttggaccggtgcatccagcggttacgcgtcctgcagctggggctccaacaggcgctcggttgggcagggctgcccgcggccttgggcctgtgcgtcctgtcatgcttcgtgaacctcgccccgcttggagaaggaaggtgtctagctccatccgggttcagcagacccctgctgggagcaccagtcctcctgctttgtccgagccgcgaagcaaggaaaaagaaggaagtgttgtccctcggttaccacggtaacgtggtagccctgtgggagagactggtacacgaactggacaccacaggtgagtgcctggttgacctaggatccgatcaaacctcatgccataatccgttcaacggcggatattatccagtacaactctcctttacagaagctcagtcgcttatggcatccaaccccgccgtgtttaaggatctcgttcaggaaagtctgcgaaggcaggtgtccgccatcaataggctagctgaagagaagttttttttttgggattatggaaacgctttcctcttagaggcacagcgggcaggggcagacgttgagaaaaagggtgccgggcgtacggagttcagatatccatcctatgtgcagcatattatgggcgacatcttttcacagggttttggacccttcaggtgggtctgtacaagtggagaccctcaggatctggccgtcaccgacgagttggccaccagtgtgcttgaagaggccatagcagacggggtcaaggtgtcagtgaagttacagtacatggacaacatcaggtggatccgggaagccgccagacaccggctggttgtaggctctcaggcaaggattttgtactcagatcagaaagggcgagtggccatcgctgtcgccattaaccaagccatcgcctgtcggagaattaaggctccagtcgtcctctcacgtgaccaccacgacgtctccggcactgactctcctttccgtgagacttccaatatatacgatgggagtgcattttgcgcggatatggccgttcagaattttgtgggcgatgcttgcagaggagccacttgggtcgccctgcacaacggcggaggagttggctggggggaagtcatcaatggaggcttcggcctggtgctggatggtacaccagaggccgagggtagggcaagacttatgctgagctgggatgtgtccaatggggtggcaagacggtgctggtccggcaatcagaaggcctacgaaataatctgtcaaactatgcaggagaatagcacgttggtggtaacactcccccacaaagtagaggatgagagagtccttcagcaagccctgcaactgtag

SEQ ID NO: 64089 - DNA, 2211 bp, Artificial Sequence
  derived and/or modified sequence
atgtcctctctgcaggcactttgtagcggcctccccctgagacccctgcccgaaaataggggtcgccaggccggagtgccccatgcaccagtacgaactccaagtctctcccctgtcgagaagcagctggctttacgcaacgctctgcgatacttccccccagatgtccaggaactcctggccccagagttcgcacaagaactgcagctgtatgggcatatttatatgtacagattctgtccggacattgagatgagagcctacccaattgagcaatacccttgccaaacaaaggtggctgcggctatcatgcatatgataatgaacaatctggatcctgccgtggcccagttcccacaggagctggttacgtatggcggtaacggccaggtcttttctaactgggctcaattctggttgactatgttctacctttctaagatgacagaagagcagacattggtgatgtattctggccatccccttgggctgttcccctcatctaggtcagccccacggctggtgatcactaatgggatggtgatacccaactatagttcccgcaccgaatacgaaaaactctttgcccttggtgtcaccatgtacggccaaatgacagccggaagttactgttacataggacctcaaggaattgtgcacggcaccgtgctcacggttttaaacgcagcgagacgctatcttggcatcgaagacctggccggaaaggtttttgttacatctggtctggggggaatgagcggcgcacaggctaaagcagctgtgatcgtgggctgcattggcgtgatcgctgaggtcgacaaagcagccctcgagaagcgtcaccgacagggatggttaatggaagttacggatagtcttgatcggtgcatacagcgattaagagttttgcagctcgggctgcaacaggcgcttgggtgggcgggacttcccgctgccttaggcctttgtgtcctttcctgcttcgttaatttggcccctttgggtgaggggaggtgcctcgcgccatctggattttcccgtcctttattgggtgcacctgtgttgctcctctgtccctcaagggaggcccgtaaaaaaaaagaggtgctgtccctggggtatcatgggaacgtagttgctttgtgggaaaggctggtccacgaattggacaccacaggagagtgtctcgtcgacctcggctccgaccagacttcatgccacaaccctttcaatgggggatattaccccgttcaactttctttcacggaggcacagagtctgatggcctcaaaccctgccgtgtttaaagatttggttcaggagtccttgcgccgacaggtgtcagcaatcaatcggctggcagaagagaaatttttcttttgggattatggtaatgctttcttactggaagcacaaagagctggggctgacgtggaaaagaagggagccggacggactgagttccgctacccatcgtatgtccaacatataatgggcgatatcttcagtcaggggtttggccctttcaggtgggtatgcaccagtggcgacccacaggacctcgcagtaacagacgagctggctacttctgttctggaggaggccatcgccgatggagtcaaagttagtgtaaagttgcaatacatggacaacattagatggatacgcgaggctgccagacatcgattagtggttggcagccaagcgaggatcttgtattcagatcagaagggcagagttgctatagcagtggcaattaaccaggccattgcctgccgccgaatcaaggctcccgtggtgcttagcagagatcaccatgatgtgtcaggcactgactcacctttcagagagacttcaaacatatatgacggatcggccttttgcgccgatatggctgtgcaaaactttgtcggagatgcttgcaggggcgcaacctgggttgccctgcataacggcggaggcgtgggctggggggaggttataaatggaggtttcggactggtcctggatggaactcctgaggccgaaggcagagcgaggctcatgctctcttgggacgtgagtaacggtgtggcccgaaggtgttggtccgggaaccaaaaggcatacgagattatttgtcagacaatgcaagagaatagtaccttggttgtcaccctcccacataaggtggaggacgaacgcgttctgcaacaggccctccagttgtag

SEQ ID NO: 64090 - DNA, 2735 bp, Artificial Sequence
  derived and/or modified sequence
acagtgctggcctctgcctccatctcagtcacacatgtctagcctccaggcgctgtgctctggcctgcccctgcggcccctcccagagaaccggggacgccaggctggggtgccccatgcccctgtcaggacccccagcctcagccctgtggagaaacagctggcgctgaggaacgccctgcgctacttccccccggatgtccaggagctgctggccccagagtttgcccaggagctgcaactgtacggacacatctacatgtaccggttttgccccgacattgaaatgagggcctacccgattgagcagtacccctgccagacgaaagtggctgccgccatcatgcacatgattatgaacaacctggatcctgccgtggcccagtttccccaggagctggtgacctatggaggaaatgggcaggtgttcagcaactgggctcagttctggctgaccatgttctacttgtcgaagatgacagaggagcagactttggtcatgtacagtgggcacccacttggcctctttcccagcagccgcagtgccccacggctcgtcatcaccaatgggatggtcattcccaactactcctcccggacggagtatgagaagctctttgccttgggggttacaatgtacggccagatgacagcaggtagctactgctacatcggtccccagggaatcgttcatggcactgtgctcaccgtgttgaatgctgcacgtcggtacctgggcatcgaggacttggctgggaaggtctttgtcacctctgggctcggcggaatgagtggggctcaggccaaggccgcagtcatcgtggggtgcatcggtgtgatagcagaggtggataaagcagcccttgagaaacgccacaggcagggctggctgatggaagtgactgacagcttggaccgctgcatccagaggctcagggtccttcagctgggattgcaacaagccctgggctgggccggcctccctgctgccctgggactgtgtgtcctttcctgctttgtcaaccttgcacccctgggggaggggaggtgcctggctccctcgggcttctccaggccactcctgggggcacctgttctgcttttgtgtccttccagggaagcaaggaaaaaaaaggaggtgctcagccttggttaccatggcaacgtggtggctctttgggagcgcctggtccacgaattggacacgacgggggagtgcttggtggacctggggtcagatcagacatcctgccacaacccgttcaatggcggctactaccctgtgcagctcagcttcacggaggcccagagcctcatggcctccaaccctgctgtgttcaaggacctggtccaggaaagcctgaggaggcaagtctcagccatcaacaggttggccgaggagaagttcttcttctgggactacggcaatgccttcctcttggaggcccagagagcaggagcggatgtggagaagaaaggtgctggcaggacagagttccgctacccttcctatgtgcagcacatcatgggggacatattctcccagggatttgggcctttccgctgggtgtgcacatcgggggacccccaggacctggcggtcacagacgaactggccacatctgtgctggaggaagccattgctgatggagtgaaggtgtctgtgaagctgcagtacatggacaacatccgctggatccgggaggccgccaggcaccggctggtggtgggctcccaggcaaggatcctgtactcagaccagaagggccgcgtggccatcgctgtggccattaaccaggccatcgcctgcaggaggatcaaggcgccggtggtcctgagccgagatcaccatgacgtgagcggcaccgacagcccctttagggagacctccaacatttacgacggctctgccttctgtgcagacatggctgtgcagaacttcgtgggagatgcctgtcgcggagccacctgggtcgcccttcacaacggagggggcgtgggctggggtgaggtgatcaacgggggattcggcctcgtgctggacggtaccccggaggccgaggggagagccaggctgatgctcagctgggatgtctccaatggtgtggcccggcgctgctggtcagggaaccagaaggcctatgagatcatctgccagaccatgcaggagaacagcaccttggtggtgacactgcctcacaaggtggaggacgagcgggtgctccagcaggccctgcagctctgagggagccaggagtcgcggcccctgcctcccttcctccctggcgatcctcacctgcccagccatggcacacacccttcctgcacacccgcactacctgcacttctcgcacatcctcacgtggcccttatggtgccctgtgcagggtgccaccacagcctcattttacagacagccccctgaggcccagagacatgcagctctctgtccacaaccatgccacttgcatgggagccctgaaggctgtcaaagtccatttagggccaagtcccaagcctgcccgggggccctgcggtgaacactggtcaagctctctccggctgggatgatcacaccctctgcttcctggccacctgccagcctccatgcaactctgtctgtctgctgcccatctgctgtctgtgcaagcaacttctggaccctggcaccctgggctgctggcctggaggagttcgggaaggaggatagaccaggaaataaagggtcaacagag

SEQ ID NO: 64091 - protein, 516 aa, Artificial Sequence
  derived and/or modified sequence
MANPVPVQRSHLQGPILRLRYMVKQLENGEINIEELKKNLEYTASLLEAVYIDETRQILDTEDELQELRSDAVPSEVRDWLASTFTQQARAKGRRAEEKPKFRSIVHAVQAGIFVERMFRRTYTSVGPTYSTAVLNCLKNLDLWCFDVFSLNQAADDHALRTIVFELLTRHNLISRFKIPTVFLMSFLDALETGYGKYKNPYHNQIHAADVTQTVHCFLLRTGMVHCLSEIELLAIIFAAAIHDYEHTGTTNSFHIQTKSECAIVYNDRSVLENHHISSVFRLMQDDEMNIFINLTKDEFVELRALVIEMVLATDMSCHFQQVKTMKTALQQLERIDKPKALSLLLHAADISHPTKQWLVHSRWTKALMEEFFRQGDKEAELGLPFSPLCDRTSTLVAQSQIGFIDFIVEPTFSVLTDVAEKSVQPLADEDSKSKNQPSFQWRQPSLDVEVGDPNPDVVSFRSTWVKRIQENKQKWKERAASGITNQMSIDELSPCEEEAPPSPAEDEHNQNGNLD

SEQ ID NO: 64092 - DNA, 1551 bp, Artificial Sequence
  derived and/or modified sequence
atggctaatcccgtgccagtgcaaaggagccacctgcagggccccattttacgcctgagatacatggtgaagcaactagagaacggggagattaatatagaggagcttaagaaaaacctggaatatacagcttctctgctggaggccgtatacatcgacgaaaccagacagatcctcgacaccgaggacgagctgcaggaacttcgctctgatgctgttccatctgaggtccgcgactggctggcgagtactttcacacagcaggcacgcgcaaaagggagaagggccgaagagaaacctaagttccggtcaatcgtgcacgccgtgcaagcagggatcttcgttgaaagaatgtttaggcgcacctatacaagcgtaggacccacctactctacagcagtgttgaattgtcttaagaacttggacctttggtgctttgatgtcttctccctgaatcaggccgcggacgaccacgctctaagaaccatcgtgttcgagctcctgactagacataatctcatctcacgcttcaagatccctaccgtattcctgatgagttttcttgacgccctggagaccggctacgggaagtacaagaatccttaccataatcagatccacgcagccgacgtgacacagactgtccactgctttcttcttcggaccggcatggtccactgtctcagcgaaattgaactgttggcgatcatctttgctgctgccatacacgattacgaacacaccggaaccacgaattcttttcatatacagaccaagtctgagtgtgcgatcgtgtataatgatcgtagtgtcctggaaaatcatcatatctcctctgttttccgcctaatgcaagacgatgaaatgaacatttttattaatctgacaaaagacgaattcgtggagcttagggccttggtgatcgaaatggtccttgctactgatatgtcttgccattttcagcaggtgaagaccatgaagaccgcgctccagcagcttgagcgcattgacaaaccaaaagccctcagcctgttactgcacgccgccgacatctcacaccccaccaagcaatggctagttcattcacgatggaccaaggccctcatggaagagttctttcgccagggggacaaggaggcggaactcgggctgcccttctctcctctatgtgacaggaccagcacactggtggcacaaagtcaaataggttttattgactttatcgttgaaccgactttctcagtgctgaccgatgtggctgaaaagagcgtgcagccccttgcagacgaggatagcaagagcaaaaaccaaccgagtttccaatggagacagccttccctggatgttgaagttggagaccctaaccccgatgtggtatcattcagaagcacatgggtcaaaagaatccaggaaaacaagcaaaaatggaaggaacgagctgcttccggcatcacaaatcagatgtctatcgacgaactctctccctgcgaggaggaggctcctccttccccagcggaggacgaacacaatcaaaacggtaatctcgactag

SEQ ID NO: 64093 - DNA, 1551 bp, Artificial Sequence
  derived and/or modified sequence
atggccaaccctgtgcctgtgcagaggagccacctgcagggccccatcctgcggctgcgctacatggtgaagcagctggagaatggagagatcaacatcgaggagctgaagaagaacctggagtacacagccagcctgctggaggccgtgtacattgatgagacccggcagatcctggacacagaagatgagctgcaggagctgcggagtgatgctgtgcccagcgaggtgcgggactggctggccagcaccttcacccagcaggcccgggccaagggccggcgggcagaggagaagcccaagttccgcagcatcgtgcatgctgtgcaggccggcatctttgtggagaggatgttccggaggacctacacctctgtgggccccacctacagcacagctgtgctgaactgcctgaagaacctggacctgtggtgctttgatgtgttcagcctgaaccaggccgcagatgaccacgccctgcggaccatcgtgtttgagctgctgaccaggcacaacctgatcagccgcttcaagatccccaccgtcttcctgatgtccttcctggatgccctggagaccggctacggcaagtacaagaacccctaccacaaccagatccacgccgcagatgtgacccagacagtgcactgcttcctgctgaggacaggcatggtgcactgcctgtctgaaattgagctgctggccatcatctttgctgctgccatccatgactatgagcacacaggcaccaccaacagcttccacatccagaccaagtcagaatgtgccatcgtgtacaatgacagatctgtgctggagaaccaccacatcagctctgtgttccggctgatgcaggatgatgagatgaacatcttcatcaacctgaccaaggatgaatttgtggagctgcgggccctggtgattgagatggtgctggccacagacatgagctgccacttccagcaggtgaagaccatgaagacagccctgcagcagctggagagaattgacaagcccaaggccctgagcctgctgctgcacgccgctgacatcagccaccccaccaagcagtggctggtgcacagccgctggaccaaggccctgatggaggagttcttccggcagggcgacaaggaggccgagctgggcctgcccttcagccccctgtgtgacaggaccagcaccctggtggcccagagccagatcggcttcatcgacttcatcgtggagcccaccttctctgtgctgacagatgtggccgagaagtctgtgcagcccctggctgatgaggacagcaagagcaagaaccagcccagcttccagtggaggcagcccagcctggatgtggaggtgggggaccccaacccagatgtggtgtccttccgcagcacctgggtgaagaggatccaggagaacaagcagaagtggaaggagcgggccgccagcggcatcaccaaccagatgagcattgatgagctgagcccctgtgaggaggaggccccacccagccctgcagaagatgagcacaaccagaatggaaacctggactag

SEQ ID NO: 64094 - DNA, 1551 bp, Artificial Sequence
  derived and/or modified sequence
atggccaaccccgtgcccgtgcagcggagccacctgcagggccccattttacgcctgaggtacatggtcaagcaactggagaatggagaaatcaatatcgaggaactgaagaagaacttagagtatactgcatcacttttggaagccgtttatatcgacgaaacccggcaaatcctggacacagaggacgaactgcaggaattacgctctgacgccgtgccctctgaagtgagggattggctagccagcacatttactcagcaggccagagcgaagggccgccgcgccgaggagaagcctaagtttcgctctatcgtgcatgccgtgcaggccggcatcttcgtggaaagaatgtttcggaggacctatacatccgtcggacccacatatagtactgccgtactaaattgccttaagaacctcgacctttggtgcttcgacgtcttttcccttaaccaggccgcagatgatcatgctctgagaacgatcgtgttcgaactgctcactagacataatctcatttcacgattcaagatccctacggtgttcctgatgtctttccttgatgcactcgaaacaggttatggcaaatacaagaacccttaccacaaccagatacacgctgccgatgttactcagacagtgcattgcttcctgctccgcacaggtatggttcactgcctgtccgagatcgagctgctggccatcatcttcgccgccgccatacacgattatgaacacaccgggactaccaacagcttccatattcagaccaagtctgaatgcgctatcgtgtacaacgaccgctccgtgcttgaaaatcaccacatcagctcagtcttcagactgatgcaggacgacgaaatgaatatctttattaatctgactaaagacgaatttgtcgaactgagggctcttgtgatcgaaatggtactggcaactgatatgagctgtcacttccagcaggtgaagaccatgaagactgccctgcagcagttggaacggatcgacaagcccaaggctctctctctattactacatgccgccgacatatctcacccaacaaaacagtggctggtacattcccgctggacaaaagccctcatggaggagttcttcagacaaggcgataaggaggcagaactcggcctgccattttccccattatgcgaccgcacctcaaccttggtggcgcaatcgcagatcgggtttatagacttcatcgtagaaccaaccttctccgtcctgaccgacgtcgcggagaagagcgtgcaacccctggccgacgaggactccaaatcaaagaaccaaccctcattccagtggcggcaaccctctctggatgttgaagtcggggacccaaatcccgacgtggtaagctttcggagcacttgggtaaagaggatccaggagaacaaacaaaagtggaaggaaagagcggcgtcaggcattacgaatcagatgtctatcgatgagcttagtccctgtgaggaagaagcacccccaagtccagctgaagatgagcacaatcagaatgggaatctggattag

SEQ ID NO: 64095 - DNA, 1711 bp, Artificial Sequence
  derived and/or modified sequence
gattctctttggcacagatgttggcaggtgcgaggaagcacggccctgacacgcgtggccaggccacatgtgcaaggcatgtgcggagcaagctggccagttggagcgggcttaggagttgcaaaggctgcgctacatggtgaagcagttggagaatggggagataaacattgaggagctgaagaaaaatctggagtacacagcttctctgctggaagccgtctacatagatgagacacggcaaatcttggacacggaggacgagctgcaggagctgcggtcagatgccgtgccttcggaggtgcgggactggctggcctccaccttcacccagcaggcccgggccaaaggccgccgagcagaggagaagcccaagttccgaagcattgtgcacgctgtgcaggctgggatcttcgtggaacggatgttccggagaacatacacctctgtgggccccacttactctactgcggttctcaactgtctcaagaacctggatctctggtgctttgatgtcttttccttgaaccaggcagcagatgaccatgccctgaggaccattgtttttgagttgctgactcggcataacctcatcagccgcttcaagattcccactgtgtttttgatgagtttcctggatgccttggagacaggctatgggaagtacaagaatccttaccacaaccagatccacgcagccgatgttacccagacagtccattgcttcttgctccgcacagggatggtgcactgcctgtcggagattgagctcctggccatcatctttgctgcagctatccatgattatgagcacacgggcactaccaacagcttccacatccagaccaagtcagaatgtgccatcgtgtacaatgatcgttcagtgctggagaatcaccacatcagctctgttttccgattgatgcaggatgatgagatgaacattttcatcaacctcaccaaggatgagtttgtagaactccgagccctggtcattgagatggtgttggccacagacatgtcctgccatttccagcaagtgaagaccatgaagacagccttgcaacagctggagaggattgacaagcccaaggccctgtctctactgctccatgctgctgacatcagccacccaaccaagcagtggttggtccacagccgttggaccaaggccctcatggaggaattcttccgtcagggtgacaaggaggcagagttgggcctgcccttttctccactctgtgaccgcacttccactctagtggcacagtctcagatagggttcatcgacttcattgtggagcccacattctctgtgctgactgacgtggcagagaagagtgttcagcccctggcggatgaggactccaagtctaaaaaccagcccagctttcagtggcgccagccctctctggatgtggaagtgggagaccccaaccctgatgtggtcagctttcgttccacctgggtcaagcgcattcaggagaataagcagaaatggaaggaacgggcagcaagtggcatcaccaaccagatgtccattgacgagctgtccccctgtgaagaagaggcccccccatcccctgccgaagatgaacacaaccagaatgggaatctggattagccctggggctggcccaggtcttcattgagtccaaagtgtttgatgtcatcagcaccatccatcaggactggctcccccatctgctcc

SEQ ID NO: 64096 - DNA, 2150 bp, Artificial Sequence
  derived and/or modified sequence
agttgctcagttctactgggacctggaggaggaaggcaggggccaaagaggaagttgtcccctcttgggggccctggggctcctggggtcaggattttgatactctgaagcaggaaactttgattcccatggcaaaccctgttcctgttcagaggagccacctccagggccccattctcaggctgcgctacatggtgaagcagttggagaatggggagataaacattgaggagctgaagaaaaatctggagtacacagcttctctgctggaagccgtctacatagatgagacacggcaaatcttggacacggaggacgagctgcaggagctgcggtcagatgccgtgccttcggaggtgcgggactggctggcctccaccttcacccagcaggcccgggccaaaggccgccgagcagaggagaagcccaagttccgaagcattgtgcacgctgtgcaggctgggatcttcgtggaacggatgttccggagaacatacacctctgtgggccccacttactctactgcggttctcaactgtctcaagaacctggatctctggtgctttgatgtcttttccttgaaccaggcagcagatgaccatgccctgaggaccattgtttttgagttgctgactcggcataacctcatcagccgcttcaagattcccactgtgtttttgatgagtttcctggatgccttggagacaggctatgggaagtacaagaatccttaccacaaccagatccacgcagccgatgttacccagacagtccattgcttcttgctccgcacagggatggtgcactgcctgtcggagattgagctcctggccatcatctttgctgcagctatccatgattatgagcacacgggcactaccaacagcttccacatccagaccaagtcagaatgtgccatcgtgtacaatgatcgttcagtgctggagaatcaccacatcagctctgttttccgattgatgcaggatgatgagatgaacattttcatcaacctcaccaaggatgagtttgtagaactccgagccctggtcattgagatggtgttggccacagacatgtcctgccatttccagcaagtgaagaccatgaagacagccttgcaacagctggagaggattgacaagcccaaggccctgtctctactgctccatgctgctgacatcagccacccaaccaagcagtggttggtccacagccgttggaccaaggccctcatggaggaattcttccgtcagggtgacaaggaggcagagttgggcctgcccttttctccactctgtgaccgcacttccactctagtggcacagtctcagatagggttcatcgacttcattgtggagcccacattctctgtgctgactgacgtggcagagaagagtgttcagcccctggcggatgaggactccaagtctaaaaaccagcccagctttcagtggcgccagccctctctggatgtggaagtgggagaccccaaccctgatgtggtcagctttcgttccacctgggtcaagcgcattcaggagaataagcagaaatggaaggaacgggcagcaagtggcatcaccaaccagatgtccattgacgagctgtccccctgtgaagaagaggcccccccatcccctgccgaagatgaacacaaccagaatgggaatctggattagccctggggctggcccaggtcttcattgagtccaaagtgtttgatgtcatcagcaccatccatcaggactggctcccccatctgctccaagggagcgtggtcgtggaagaaacaacccacctgaaggccaaatgccagagatttggggttggggaaagggcccctccccacctgacacccactggggtgcactttaatgttccggcagcaagactggggaacttcaggctcccagtggtcactgtgcccatccctcagcctctggattctcttcatggccaggtggctgccagggagcggggagcttcctggaggcttcccagggccttggggaagggtcagagatgccagccccctgggacctcccccatcctttttgcctccaagtttctaagcaatacattttgggggttccctcagccccccaccccagatcttagctggcaggtctgggtgccccttttcctcccct

SEQ ID NO: 64097 - DNA, 1551 bp, Artificial Sequence
  derived and/or modified sequence
atggctaatccagtcccagtgcagcggtctcacctacagggccctatactaagactccggtacatggtcaaacaactggagaatggagagatcaatatcgaggagttgaaaaaaaatttggaatatacggcgtctctcctggaggccgtgtacattgatgagactcgccaaattttggatactgaagatgaacttcaggagttacggtcagacgccgtgccgagcgaagtgcgggattggctggcatccacctttacacagcaggccagggcgaagggccgtagagctgaggaaaagcccaagttcaggagcatcgtccatgccgtgcaagctgggatctttgtggagcggatgtttaggagaacgtacacaagcgttggcccaacttacagtacagcggtgctgaattgtttgaaaaacctggatctttggtgttttgatgtcttcagcctgaatcaggccgcagatgatcatgctctgagaaccatcgttttcgagttattaaccagacataatctcattagccgatttaaaataccaacggttttcctgatgagctttctggatgcattggagacgggctatggaaaatacaaaaacccctatcacaatcagattcatgccgcagacgttacacagactgttcattgtttcttactgcgaaccggcatggtccactgtttatccgaaattgaactgctagctatcattttcgcggcagctattcatgactatgagcacactggcactacaaactcttttcatatccagacaaaaagcgagtgtgctatcgtgtataacgacagaagtgtactggaaaatcatcacatcagttctgtttttagactaatgcaggatgatgaaatgaacatttttatcaatctgactaaggacgaattcgttgaactgcgggcactggtgatcgagatggtattggcaaccgacatgtcttgtcactttcagcaggtgaaaacaatgaaaaccgccctgcagcagttggagcgcatagataagcccaaggctctgtcattgcttctgcatgccgcagatataagtcatcccacaaagcagtggctggtgcacagcagatggaccaaggcattgatggaggagttctttagacagggtgataaggaggccgagttgggcttacctttcagtcccttgtgtgacagaacatccacacttgtggctcaaagtcaaattgggtttatcgatttcatcgtggagcctactttttcagtgcttactgatgtcgccgagaaaagtgtgcagcctctggctgatgaggatagtaagagtaaaaatcagcccagtttccaatggcgccagcctagtttggatgtggaggtgggggaccctaacccagacgtcgttagtttccggtcaacctgggtcaaaaggatccaagaaaacaagcagaagtggaaagagagggctgccagcggcattactaatcagatgtccatcgacgaactttccccctgcgaggaggaggctccgccttcccccgctgaagacgaacacaaccagaacgggaatctggactag

SEQ ID NO: 64098 - DNA, 1551 bp, Artificial Sequence
  derived and/or modified sequence
atggccaaccccgtgcccgtgcagagaagccacctgcagggccccatcctgagactgagatacatggtgaagcagctggagaacggcgagatcaacatcgaggagctgaagaagaacctggagtacaccgccagcctgctggaggccgtgtacatcgacgagaccagacagatcctggacaccgaggacgagctgcaggagctgagaagcgacgccgtgcccagcgaggtgagagactggctggccagcaccttcacccagcaggccagagccaagggcagaagagccgaggagaagcccaagttcagaagcatcgtgcacgccgtgcaggccggcatcttcgtggagagaatgttcagaagaacctacaccagcgtgggccccacctacagcaccgccgtgctgaactgcctgaagaacctggacctgtggtgcttcgacgtgttcagcctgaaccaggccgccgacgaccacgccctgagaaccatcgtgttcgagctgctgaccagacacaacctgatcagcagattcaagatccccaccgtgttcctgatgagcttcctggacgccctggagaccggctacggcaagtacaagaacccctaccacaaccagatccacgccgccgacgtgacccagaccgtgcactgcttcctgctgagaaccggcatggtgcactgcctgagcgagatcgagctgctggccatcatcttcgccgccgccatccacgactacgagcacaccggcaccaccaacagcttccacatccagaccaagagcgagtgcgccatcgtgtacaacgacagaagcgtgctggagaaccaccacatcagcagcgtgttcagactgatgcaggacgacgagatgaacatcttcatcaacctgaccaaggacgagttcgtggagctgagagccctggtgatcgagatggtgctggccaccgacatgagctgccacttccagcaggtgaagaccatgaagaccgccctgcagcagctggagagaatcgacaagcccaaggccctgagcctgctgctgcacgccgccgacatcagccaccccaccaagcagtggctggtgcacagcagatggaccaaggccctgatggaggagttcttcagacagggcgacaaggaggccgagctgggcctgcccttcagccccctgtgcgacagaaccagcaccctggtggcccagagccagatcggcttcatcgacttcatcgtggagcccaccttcagcgtgctgaccgacgtggccgagaagagcgtgcagcccctggccgacgaggacagcaagagcaagaaccagcccagcttccagtggagacagcccagcctggacgtggaggtgggcgaccccaaccccgacgtggtgagcttcagaagcacctgggtgaagagaatccaggagaacaagcagaagtggaaggagagagccgccagcggcatcaccaaccagatgagcatcgacgagctgagcccctgcgaggaggaggccccccccagccccgccgaggacgagcacaaccagaacggcaacctggactag

SEQ ID NO: 64099 - protein, 834 aa, Artificial Sequence
  derived and/or modified sequence
MKHTLALLAPLLGLGLGLALSQLAAGATDCKFLGPAEHLTFTPAARARWLAPRVRAPGLLDSLYGTVRRFLSVVQLNPFPSELVKALLNELASVKVNEVVRYEAGYVVCAVIAGLYLLLVPTAGLCFCCCRCHRRCGGRVKTEHKALACERAALMVFLLLTTLLLLIGVVCAFVTNQRTHEQMGPSIEAMPETLLSLWGLVSDVPQELQAVAQQFSLPQEQVSEELDGVGVSIGSAIHTQLRSSVYPLLAAVGSLGQVLQVSVHHLQTLNATVVELQAGQQDLEPAIREHRDRLLELLQEARCQGDCAGALSWARTLELGADFSQVPSVDHVLHQLKGVPEANFSSMVQEENSTFNALPALAAMQTSSVVQELKKAVAQQPEGVRTLAEGFPGLEAASRWAQALQEVEESSRPYLQEVQRYETYRWIVGCVLCSVVLFVVLCNLLGLNLGIWGLSARDDPSHPEAKGEAGARFLMAGVGLSFLFAAPLILLVFATFLVGGNVQTLVCQSWENGELFEFADTPGNLPPSMNLSQLLGLRKNISIHQAYQQCKEGAALWTVLQLNDSYDLEEHLDINQYTNKLRQELQSLKVDTQSLDLLSSAARRDLEALQSSGLQRIHYPDFLVQIQRPVVKTSMEQLAQELQGLAQAQDNSVLGQRLQEEAQGLRNLHQEKVVPQQSLVAKLNLSVRALESSAPNLQLETSDVLANVTYLKGELPAWAARILRNVSECFLAREMGYFSQYVAWVREEVTQRIATCQPLSGALDNSRVILCDMMADPWNAFWFCLAWCTFFLIPSIIFAVKTSKYFRPIRKRLSSTSSEETQLFHIPRVTSLKL

SEQ ID NO: 64100 - protein, 785 aa, Artificial Sequence
  derived and/or modified sequence
MKHTLALLAPLLGLGLGLALSQLAAGATDCKFLGPAEHLTFTPAARARWLAPRVRAPGLLDSLYGTVRRFLSVVQLNPFPSELVKALLNELASVKVNEVVRYEAGYVVCAVIAGLYLLLVPTAGLCFCCCRCHRRCGGRVKTEHKALACERAALMVFLLLTTLLLLIGVVCAFVTNQRTHEQMGPSIEAMPETLLSLWGLVSDVPQELQAVAQQFSLPQEQVSEELDGVGVSIGSAIHTQLRSSVYPLLAAVGSLGQVLQVSVHHLQTLNATVVELQAGQQDLEPAIREHRDRLLELLQEARCQGDCAGALSWARTLELGADFSQVPSVDHVLHQLKGVPEANFSSMVQEENSTFNALPALAAMQTSSVVQELKKAVAQQPEGVRTLAEGFPGLEAASRWAQALQEVEESSRPYLQEVQRYETYRWIVGCVLCSVVLFVVLCNLLGLNLGIWGLSARDDPSHPEAKGEAGARFLMAGVGLSFLFAAPLILLVFATFLVGGNVQTLVCQSWENGELFEFADTPGNLPPSMNLSQLLGLRKNISIHQAYQQCKEGAALWTVLQLNDSYDLEEHLDINQIQRPVVKTSMEQLAQELQGLAQAQDNSVLGQRLQEEAQGLRNLHQEKVVPQQSLVAKLNLSVRALESSAPNLQLETSDVLANVTYLKGELPAWAARILRNVSECFLAREMGYFSQYVAWVREEVTQRIATCQPLSGALDNSRVILCDMMADPWNAFWFCLAWCTFFLIPSIIFAVKTSKYFRPIRKRLSSTSSEETQLFHIPRVTSLKL

SEQ ID NO: 64101 - DNA, 2358 bp, Artificial Sequence
  derived and/or modified sequence
atgaagcacaccctggccctgctggcccccctgctgggcctgggccttggcctggccctgagtcaactcgcggccggagccaccgactgcaagttccttggtcccgctgagcacctcactttcacaccagcagccagagcccggtggttagctccgagagtgcgcgcacctggactgcttgactcgttgtacggtaccgtaagaagattcctcagcgttgtgcaactgaacccgttcccctctgagctggtgaaagctttgctgaatgaactggcaagtgtaaaagtaaatgaagtcgtccgttatgaagccgggtacgtagtgtgtgccgtcattgcaggcctttatttacttttagttcccacggctggcctgtgcttctgctgctgccgatgccacagacgatgcggaggtagagtgaaaactgaacacaaggccttggcctgcgaacgggccgcactgatggtatttctactgctgaccacattacttctgctgatcggagtcgtgtgtgccttcgtcacaaaccaacgaacccacgagcagatggggccgagtattgaggcgatgcccgagacactgctgtctttgtggggtctagtgagtgacgtaccacaggagttgcaagctgtcgcacagcagtttagcctgcctcaggaacaagtctcggaggaactcgatggtgtaggtgtgtctattgggtccgctatacacacacagcttcgaagctcagtgtatccacttctcgccgcagtgggcagtctgggtcaagtgctccaggttagcgtccatcatctgcaaactctaaacgccacagtggtggagttacaggctgggcagcaggacttggagccagccattagagagcaccgcgacagattgctcgagttgctccaggaggcaagatgccaaggagactgcgcaggcgccctgagctgggcccggacactcgaacttggggcggattttagtcaggtcccgagcgtcgaccacgtcctgcaccagctgaaaggagtcccggaggctaacttttcgtccatggtgcaggaagaaaattctacgtttaacgcgctcccagcactggctgccatgcagacctccagtgtggtacaggagttgaaaaaggccgtggcgcagcagcccgagggagtgaggactctggcagaggggtttccaggacttgaggctgcctcccggtgggcccaggcactgcaggaggtggaagaatcatctcggccttatctgcaggaggtgcagaggtatgagacctatcggtggattgtcggctgcgtgctgtgttctgttgtgttgtttgtagttctgtgcaacttactgggccttaatttgggcatctgggggctaagcgctagagatgacccctcccatcccgaggcaaaaggcgaggccggagcccgcttcctcatggccggtgtgggcttaagcttcctgtttgctgccccactgatcctgcttgtttttgccacttttctggttggtggcaacgtccagaccctggtctgccagagttgggagaacggggagttgtttgagtttgcagacacgcctgggaatcttccgccttcaatgaatttatcgcagctgttgggtctacgcaaaaatatctctatccatcaggcttaccagcagtgtaaggaaggagcagcgctatggacagtattacagctgaacgatagttatgatcttgaggaacacttggacataaatcagatccagcggcctgttgtcaagacttccatggagcagttggcccaggagctgcaaggcctggcccaggcccaagacaattctgtgctgggacagaggctgcaagaggaggctcaggggctgcgcaatcttcatcaagaaaaagtggtgcctcagcagtccttggtggcgaagttaaatttgtctgtgcgcgccctggagtcttccgcgcctaatttgcagctagaaacgagcgatgtgctggccaacgtcacttacttaaaaggagaactgcctgcttgggccgcccggatccttcgcaacgtgtctgaatgttttcttgcccgcgagatgggatatttctcacaatacgtggcgtgggtcagagaggaggtgactcaaaggattgccacctgccagccattatcgggagctctggacaattctagggtgatcctgtgcgacatgatggctgacccttggaatgccttctggttctgtctagcctggtgcacgttcttcctgatcccttccatcatttttgctgtcaaaacttccaagtacttcaggcctataagaaaaagactttcatcaacctcgagcgaggagacacagctgtttcacattcctagggtgactagcttgaaactgtag

SEQ ID NO: 64102 - DNA, 2505 bp, Artificial Sequence
  derived and/or modified sequence
atgaagcacacactagccttgctggctccactgttgggcctgggtttaggtcttgcgctctctcagctagcagcgggagctacggactgtaagttcttagggcctgccgagcatctaacattcacacctgcggcacgggctagatggttggctcctagagtgagagctcccggattgctagattccctgtacgggaccgttaggcgatttctatctgtggttcagctgaaccctttcccttctgagctggtgaaggccttactgaatgagctcgcatcggtcaaggtgaacgaggtcgtgcggtacgaggccggatacgtggtgtgcgctgtgattgccggactttacctgctgctggtgccaactgccggactctgcttctgctgttgtaggtgccatagaaggtgcgggggacgcgtaaagaccgaacacaaggccctggcctgcgaacgcgcagctcttatggtgttcctgctactaacaacactcctcttgctgatcggtgtcgtctgcgcatttgtgacaaaccagagaacacatgaacaaatgggaccctccatcgaggccatgcctgagaccttgctctccctatgggggctcgtcagcgatgtcccccaggagcttcaggctgtggcccaacaattctcgctccctcaggaacaagtgtcggaggaactcgatggagtcggcgtgtccatcgggtccgccattcacactcagctgagatcatcggtgtaccctctgcttgccgctgttgggagcctgggacaggtgctgcaggtgtctgtccaccatctgcagacactcaacgctaccgtggtggaacttcaggccggtcagcaggacctggagcccgctatacgggagcaccgcgacaggctgttagaactcctgcaggaggccagatgccagggcgattgcgcaggcgcactgtcatgggctcgaaccctggaactgggagctgatttcagccaggttccctccgtagaccacgttctgcaccagctgaagggtgtgcccgaagccaacttcagtagcatggtgcaagaagagaacagcacctttaatgcccttcctgcgttagcagctatgcagacaagcagtgtcgtccaggaactgaagaaggctgttgctcagcagccggagggcgtacgaaccctggccgaagggtttcctgggctagaggctgcttctcggtgggctcaagccttgcaggaggtggaggagtcaagtcgcccatatcttcaggaggtgcaaaggtatgagacctataggtggattgtgggctgcgtcctgtgcagtgtcgttctgttcgttgtcttatgtaaccttctcggcctcaacctggggatctggggtctcagtgccagggacgatcctagccaccctgaggccaagggcgaagcaggagccaggttcttaatggcaggggtggggctgtcatttcttttcgcagcccctttgattctgctggtctttgctaccttcctggtgggcggaaacgtccagacactggtttgccaatcttgggaaaatggcgaactgtttgagttcgccgacacaccagggaatctccccccatccatgaacttaagccagctcctgggactccggaagaatatcagtatccatcaggcttatcaacagtgcaaggaaggggcagcgctttggactgtcctgcagttaaacgattcttatgatctggaggagcacttggatatcaaccaatacaccaacaagctcaggcaggagctccagtcactgaaggttgacacacaaagtttggatctacttagtagtgcggcacgcagagatctggaggcattgcagagcagtgggctgcagaggatccactaccctgattttctggttcagatccaaagacccgtagtgaagacaagcatggagcagctggcccaggaattacaaggcctggcccaggcccaggacaatagcgtcctggggcaaaggcttcaagaagaagcacagggacttcgcaatttgcatcaggagaaggtagtgccccagcaatctcttgtggccaaactcaacctttccgttcgcgctcttgagagcagtgccccaaacctgcagctggagacatcagacgtccttgccaacgtaacatacctgaagggcgaactgcccgcatgggctgctaggattctgcggaatgtgagcgagtgttttctcgctcgcgagatgggctatttctcccagtatgtcgcatgggtcagggaggaagtcacccagaggatcgccacctgtcagccactatccggggctctggataactcacgtgtgatactgtgtgacatgatggctgacccctggaatgccttctggttctgcctggcctggtgtaccttttttctcataccatccattatattcgctgtgaagacatctaagtatttcagacctattcgcaaacgcttaagctctacctcatccgaggaaacacagctgttccatatccccagggtaaccagtttaaaattatag

SEQ ID NO: 64103 - DNA, 2505 bp, Artificial Sequence
  derived and/or modified sequence
atgaagcacacactggccttactcgctcccttactgggcttaggcctggggttggccctgtctcaactagcagcgggagcaacagattgcaaatttctggggccagctgagcacctaaccttcaccccggctgccagggcccgatggctggcccctagagtgagggctccaggactgctggattcgctgtacgggaccgtgcgcagatttctctcggtggtgcagcttaatcccttcccctccgagctggtgaaagctctgctgaatgagctcgccagcgtgaaggtgaacgaggtagtaagatacgaagccggatatgtggtgtgtgctgttattgctggcctgtacctcctcctggttcccaccgcaggattgtgtttctgctgctgcaggtgtcacagaagatgcggtgggagggtcaaaactgagcacaaagccctcgcttgtgagcgggcagcactgatggtgtttctcctcctgactacattgctgctcctcattggcgtcgtgtgtgcttttgtcactaatcagagaacgcacgagcagatgggaccgtccatagaagctatgcccgaaacattgttatccctttgggggctcgtatcagatgtgccacaagagcttcaagccgtggcccaacagttctctctgccccaggagcaagtaagcgaagaactagatggggtgggcgtgtccattggtagcgctattcatacacagctgcggtcttccgtctaccccctactcgccgcagtggggagtctggggcaggttctacaagtctccgtacatcacctgcagaccttaaacgccaccgtcgtggagctgcaggccggtcaacaggatctggaaccggctatcagagagcatagggatcgattactggagctcctgcaggaggccaggtgtcaaggggattgtgcgggagctttgagctgggccaggaccctggaactgggtgccgatttcagccaagttccctctgttgaccatgtgctgcaccagctgaagggggtgcccgaagctaacttctccagcatggtccaagaggaaaattctacctttaatgcgctcccagccttggcagccatgcagacatcgtctgtggtacaagagctgaaaaaggccgtggcccaacagccagagggtgtgcggacactcgcggagggcttccctggtcttgaggccgcaagccggtgggcccaggcactccaggaggtcgaggagagtagccggccatatctgcaggaggttcagaggtatgaaacatacaggtggattgttgggtgtgtgttatgttcagtagtcctctttgtggtgctctgcaatttgctggggctcaatctgggcatttgggggctgtccgcaagagatgatccttctcacccagaagcaaagggggaggccggtgctcgcttcctgatggccggagtcgggctctccttcctcttcgcagctccgcttatactcctggtctttgccacctttctcgtgggcggtaatgtgcagacgctggtgtgccagagctgggaaaatggggagctctttgaattcgcggatactcctggaaacttacccccttcaatgaacctgtcacagctcctgggacttcgcaaaaatatcagcatccatcaggcctaccagcagtgtaaagaaggcgcagcgttatggaccgtgcttcagcttaatgatagttacgatctggaggagcaccttgacataaaccaatacactaacaagctgcggcaggaactacagagtttgaaggttgatactcagagcctggatctcctgagctctgccgctcgccgagacctggaggcactgcaaagctcagggctgcagcgcatccactatcccgacttcctggtacagatccagcgaccagtcgtgaaaaccagtatggaacagctggcacaggagttgcagggcctggctcaagcccaggataactctgtacttggccagagactgcaagaagaagcccagggcctaagaaatttgcatcaggagaaagtggtgcctcagcagtccctggtagcaaaacttaatctatccgtccgggctctagagtccagcgccccaaaccttcaattggagactagcgatgtcctcgcaaacgtcacctatcttaagggagagcttcctgcttgggcagctagaatcctgaggaatgtctccgaatgtttcctggcccgagaaatgggttacttctctcagtatgtggcctgggtcagggaggaagtgacccagcgcatcgctacttgccaaccattgtccggggctctggacaactcacgggtcatcctgtgcgatatgatggccgatccttggaacgcgttctggttttgcctagcttggtgcacgtttttcctgatcccttccatcatctttgccgtaaaaactagtaagtacttcagacccatcaggaagagactgtcttcaacctccagtgaagaaacccagctgttccacatcccgagggtaacaagtctcaaattgtag

SEQ ID NO: 64104 - DNA, 2922 bp, Artificial Sequence
  derived and/or modified sequence
gctcaggaacccaaacctgtcgggcaggttttgagagctgtggagagagggacagaggctggagaaggatgtatggcctgccctgggcttgtctgttccctcctgagcctgagccccttaccttcctgaccccatgaagcacacactggctctgctggctcccctgctgggcctgggcctggggctggccctgagtcagctggctgcaggggccacagactgcaagttccttggcccggcagagcacctgacattcaccccagcagccagggcccggtggctggcccctcgagttcgtgcgccaggactcctggactccctctatggcaccgtgcgccgcttcctctcggtggtgcagctcaatcctttcccttcagagttggtaaaggccctactgaatgagctggcctccgtgaaggtgaatgaggtggtgcggtacgaggcgggctacgtggtatgcgctgtgatcgcgggcctctacctgctgctggtgcccactgccgggctttgcttctgctgctgccgctgccaccggcgctgcgggggacgagtgaagacagagcacaaggcgctggcctgtgagcgcgcggccctcatggtcttcctgctgctgaccaccctcttgctgctgattggtgtggtctgtgcctttgtcaccaaccagcgcacgcatgaacagatgggccccagcatcgaggccatgcctgagaccctgctcagcctctggggcctggtctctgatgtcccccaagagctgcaggccgtggcacagcaattctccctgccccaggagcaagtctcagaggagctggatggtgttggtgtgagcattgggagcgcgatccacactcagctcaggagctccgtgtaccccttgctggcggccgtgggcagtttgggccaggtcctgcaggtctccgtgcaccacctgcaaaccttgaatgctacagtggtagagctgcaggccgggcagcaggacctggagccagccatccgggaacaccgggaccgcctccttgagctgctgcaggaggccaggtgccagggagattgtgcaggggccctgagctgggcccgcaccctggagctgggtgctgacttcagccaggtgccctctgtggaccatgtcctgcaccagctaaaaggtgtccccgaggccaacttctccagcatggtccaggaggagaacagcaccttcaacgcccttccagccctggctgccatgcagacatccagcgtggtgcaagagctgaagaaggcagtggcccagcagccggaaggggtgaggacactggctgaagggttcccgggcttggaggcagcttcccgctgggcccaggcactgcaggaggtggaggagagcagccgcccctacctgcaggaggtgcagagatacgagacctacaggtggatcgtgggctgcgtgctgtgctccgtggtcctattcgtggtgctctgcaacctgctgggcctcaatctgggcatctggggcctgtctgccagggacgaccccagccacccagaagccaagggcgaggctggagcccgcttcctcatggcaggtgtgggcctcagcttcctctttgctgcacccctcatcctcctggtgttcgccaccttcctggtgggtggcaacgtgcagacgctggtgtgccagagctgggagaacggcgagctctttgagtttgcagacaccccagggaacctgcccccgtccatgaacctgtcgcaacttcttggcctgaggaagaacatcagcatccaccaagcctatcagcagtgcaaggaaggggcagcgctctggacagtcctgcagctcaacgactcctacgacctggaggagcacctggatatcaaccagtataccaacaagctacggcaggagttgcagagcctgaaagtagacacacagagcctggacctgctgagctcagccgcccgccgggacctggaggccctgcagagcagtgggcttcagcgcatccactaccccgacttcctcgttcagatccagaggcccgtggtgaagaccagcatggagcagctggcccaggagctgcaaggactggcccaggcccaagacaattctgtgctggggcagcggctgcaggaggaggcccaaggactcagaaaccttcaccaggagaaggtcgtcccccagcagagccttgtggcaaagctcaacctcagcgtcagggccctggagtcctctgccccgaatctccagctggagacctcagatgtcctagccaatgtcacctacctgaaaggagagctgcctgcctgggcagccaggatcctgaggaatgtgagtgagtgtttcctggcccgggagatgggctacttctcccagtacgtggcctgggtgagagaggaggtgactcagcgcattgccacctgccagcccctctccggagccctggacaacagccgtgtgatcctgtgtgacatgatggctgacccctggaatgccttctggttctgcctggcatggtgcaccttcttcctgatccccagcatcatctttgccgtcaagacctccaaatacttccgtcctatccggaaacgcctcagctccaccagctctgaggagactcagctcttccacatcccccgggttacctccctgaagctgtagggccttgtggagacggggttttgccatgttgcccaggctggaagtgtctatgtttaactgcatcttataaaccagcaacaagttttctactgggaattagaatggtgcatacacaatgtattattatcactgtcagatgagcatgcttgaatgtagcatgactgcctctttttgcttttcctagaggttttttttttgcttgttactcatctgttgacctacctgggggaagtagcacccttgcatttcaaaaataaaattgatggcattacaaatggaataga

SEQ ID NO: 64105 - DNA, 2505 bp, Artificial Sequence
  derived and/or modified sequence
atgaaacacaccctggcactgctggcaccactacttggactgggattgggcttggccctgtcccagttggctgctggtgcgacagactgtaaattccttggccctgccgagcatttaactttcacacccgctgccagggccagatggctggcccctcgcgtgcgggcaccaggactcctggactccctatatggtacagtacgacgatttctttctgttgtccagttaaacccgttcccctcggaattagtcaaggcccttctgaacgagctcgcgtcagtcaaagttaacgaagtagttaggtacgaagcagggtacgtggtgtgcgcagtgatcgcaggcctgtaccttctgttagtaccaaccgccggactgtgtttttgctgctgccggtgccataggcggtgcggcggacgtgttaaaaccgagcataaggcgctggcatgcgaacgcgctgccctcatggtcttcctcctattgaccacattgctgttactcattggtgtcgtttgtgcttttgtcacaaatcaacggacccacgaacagatgggtccgtccattgaggcaatgcctgagactctgctgtccctgtggggcctcgtgtctgacgtcccccaggagctgcaggccgtggcacaacagttcagtctgcctcaggagcaggtgtctgaggagctcgacggggtcggagtctccattggatcagctatacacacacagttgcgatcttccgtctacccgcttctggctgcagtggggtcccttggccaggttcttcaggtctctgtgcatcatctgcagactcttaatgctacggttgtggaattacaagctgggcagcaggatttggagcccgctataagagagcacagagacaggctcctagaactactgcaggaggcgaggtgtcagggggactgcgccggagcgctgagttgggcgcgtaccctcgaactgggggcagacttctctcaggttccctcagttgaccacgtactgcaccagctcaagggagttcccgaggccaatttctctagtatggttcaggaggagaactcgactttcaatgctttacctgcactcgccgcaatgcaaactagctccgtggttcaagaactcaaaaaggcagtggctcagcagcccgaaggtgtgcggacactagccgaagggtttccaggcttggaagccgcttctcggtgggcccaggccctccaggaggtcgaggagagttcacgcccttacctgcaggaggtgcagcgctatgaaacttatagatggattgtcggatgtgtcctgtgttctgtggtgctgttcgtggtgttgtgtaacctgctggggctgaatttgggcatatgggggttatctgcccgtgacgatccctcccaccccgaagccaagggcgaggcgggagcacggtttctaatggcaggcgttgggctgagcttcctgtttgccgcacctctgattctgctggtgtttgctacatttctggttggtggtaatgtccagaccctggtctgccagtcctgggaaaacggcgagctgtttgagttcgcagacactccgggtaatctgcctcctagcatgaacctgtcccagcttctgggattaagaaaaaatatctcaattcaccaggcctatcaacaatgtaaggagggggctgctctgtggactgtgctgcagctcaacgatagctacgatctggaagaacacttggatataaaccagtatactaacaaattgagacaggaactgcagtccctgaaagttgacacacaatccctggacctgctgtctagcgccgctcgacgcgacttagaggccctacagtcttcgggattgcagcgcatccattatcccgatttcctggtgcagatccagcggccagtggttaagactagcatggaacagctcgcgcaggagctccagggactggcacaggcgcaggacaattcagttctgggacagaggcttcaagaagaggcacaggggctccggaacctgcatcaagagaaggtggtgccacagcagtctttggtcgcaaaactgaatctgtccgttagagcgctggagagctctgcacctaacctgcagcttgagactagtgacgttttggcaaatgtaacatacctgaaaggggagctgcctgcttgggcagccaggattctgcgtaatgtttccgaatgttttctggccagggaaatgggatacttttcccagtatgtggcttgggtcagggaggaggtgacacagagaattgccacttgccaacccctctccggcgctctcgataattcccgtgtgattctgtgtgatatgatggctgatccctggaacgctttctggttctgcttggcatggtgtactttttttcttataccttcaatcatttttgccgtgaagacttccaagtattttcgcccaatccggaaacgtctctcgtcgacatcatccgaagagacccagctgtttcatatccctcgagttacctctttgaagctctag

SEQ ID NO: 64106 - DNA, 2358 bp, Artificial Sequence
  derived and/or modified sequence
atgaaacacaccctggctcttctggcacctctgttgggcctggggctaggacttgccctctctcagttggctgctggcgctacggactgcaaatttctagggcctgctgaacacttaacttttacacctgccgcaagagccagatggcttgcacctagagttcgggcacccggtctgctcgactccctgtatggtactgtccggaggtttctaagcgtcgtgcagctgaatcctttcccgtcagaactggtgaaagctctgctaaatgagctggccagtgtgaaggtgaatgaagtcgtccgctatgaggccggttacgtggtgtgcgccgtgatcgctggactgtacctattattagtgccgacagcaggtttatgcttctgttgttgccgttgtcaccggcgttgtgggggtcgagttaagacagagcataaagctctggcgtgtgagcgcgcagcgcttatggttttccttctgctaactaccctgctgttgcttataggcgtagtgtgcgcttttgtcactaatcagagaacccacgagcaaatgggccctagtatcgaagcaatgcctgaaactctgttatccctgtggggcctcgtatcagatgttccccaggaacttcaggctgtagctcagcaattttccttgccccaagaacaggttagcgaagagctagatggggtgggcgtctccataggctccgctattcacacccagcttcggtcctccgtctacccactgctggccgcagtaggtagccttggacaagttctccaggtgagcgttcatcacttacagacactcaatgctaccgtggtagagctgcaggcagggcaacaggaccttgaaccagcgattagagagcaccgggaccgtcttttggaacttctgcaggaggctagatgtcagggcgattgtgcaggagctctatcttgggccagaaccctggaattgggagccgacttttctcaagtaccttccgttgaccacgtgttacaccagttaaagggggtgcccgaggctaacttctccagcatggtgcaggaggagaactccacttttaatgcgctacctgctcttgcggcaatgcagacaagcagtgtggtgcaggaactgaagaaggccgtggctcagcagcctgagggcgtcagaaccctcgccgagggctttcctggacttgaagctgcaagtcgctgggcccaggccttgcaagaggtggaagaaagtagccgcccatatcttcaagaagttcagaggtatgagacttaccgatggatcgtcgggtgcgtcctgtgcagcgttgtcctttttgtggtactctgcaacctcctggggctgaacttgggtatctggggattgagtgccagagacgatcccagccaccctgaggccaagggcgaggctggggctcgatttctcatggccggagttgggctgtcatttctgttcgctgcgccacttattcttcttgtatttgccacgtttctcgttggtgggaatgtgcagaccctcgtatgtcagagctgggagaacggcgagctgtttgaatttgctgatacacctggcaatttacctccctccatgaatttaagccagctgctggggttacgcaagaatatatcgattcaccaggcctatcagcagtgcaaggaaggcgctgccttatggacagttttgcagctgaatgactcatacgatttagaagagcatctggatattaatcagatacaacggccagttgtaaagacttcaatggaacagctggcacaggaactccagggtcttgctcaggctcaggacaactcggtactgggacagaggctccaggaagaagctcagggcctgagaaacttgcatcaagagaaggtagtcccacagcagagcctcgttgcaaagctcaacttgtccgtaagagcactcgagagtagcgctcctaatctgcagctagaaacgagcgacgtgctggcaaatgtgacatatctgaagggcgagttacctgcctgggcggcaaggatcctcagaaacgtttcagagtgctttctggctcgcgaaatggggtactttagtcagtacgtggcctgggtgagggaagaggtaacacagcggatcgcaacctgtcagcctctgagcggcgctctggataattccagagttatcttatgcgatatgatggcagatccttggaacgcattttggttttgtctggcttggtgcactttttttctgatcccatccataattttcgcggtcaagaccagcaaatattttcgccctatccgcaaacggttaagctccactagctccgaagaaacacaactttttcacatccctagggtgacttctctcaaactctag

SEQ ID NO: 64107 - DNA, 2505 bp, Artificial Sequence
  derived and/or modified sequence
atgaagcacaccctagcattgctggcccccctccttggcctcgggctgggtctcgccctgtctcagctggctgctggagctactgattgcaaattccttggtcctgcggagcacctgacattcacccctgcagccagggctcgctggctggcccctcgcgttcgtgctcctggacttctggacagcctatacgggacggtgagaagatttctgagcgtggtgcagttaaaccccttcccttctgagctcgtgaaagccctgctcaacgagctagcatcagtcaaggtcaacgaagttgttaggtatgaagctgggtatgtggtctgcgccgttattgcagggctatacctgcttttggtgcctacggctggactgtgtttctgctgttgtaggtgtcacagacgctgtggcggacgcgtcaagactgaacacaaggccttagcctgcgagagggccgcgcttatggtctttctcctcctgaccaccctccttcttctcattggcgtcgtgtgcgctttcgttaccaaccagcgcacgcatgagcagatgggccccagcatagaggcgatgccagagaccctcctttcgctgtggggactggtgtctgacgtgccccaggaattgcaggctgtcgctcagcagttcagcctcccccaggaacaggtctccgaggaactggatggtgttggcgtttcaatcgggagtgctatccatacacaactgcgatccagtgtctatccgctgctggccgcagtgggctcgctgggccaggttcttcaggtatcagtgcaccacttgcaaactttgaacgcaacagtcgtggagctccaggctgggcagcaagaccttgagcctgcaattagggaacaccgggatcgactgctggaacttctgcaggaagcaaggtgtcagggtgactgcgccggcgctttgagttgggcaagaacccttgagttgggggccgacttttctcaggtacccagcgttgatcacgtgctacatcagcttaagggcgtccccgaagccaatttctcctcaatggtgcaggaggaaaattccacattcaacgccctccctgcccttgctgctatgcagacaagttccgtggtacaggaattgaaaaaggccgtagctcagcagccagagggggtgagaacactggccgagggatttcccgggcttgaggctgcaagcagatgggcgcaggctttgcaagaagtcgaggagtcgtctcggccatatcttcaagaggtgcagcgctacgaaacttatcgatggatcgttggatgtgtactctgctcggtggtactgttcgtggttctttgcaatctgttagggcttaacctgggaatttggggcctgtcagcccgcgatgacccttcccatccggaagccaaaggcgaggctggagccaggttccttatggctggagttggacttagtttcttattcgcagccccactgatactcctagttttcgccacctttttagtggggggaaacgttcaaacactcgtgtgtcagtcctgggagaatggcgaactgtttgaattcgccgataccccggggaacctgcccccctcgatgaacctttcccagctgcttggactgcgtaagaacatctctatccaccaagcttatcagcaatgcaaggagggtgctgctctgtggactgtgttgcaacttaatgatagctatgacttggaggaacaccttgatatcaaccagtacacaaacaagcttaggcaggaactacagagccttaaggtagacacgcagagcctggacctactttcctcagctgctcgtcgcgatctggaggctttgcagtcaagtggactacaacggattcactacccagactttcttgtacagattcaacgccccgtggtgaaaacctctatggagcagctcgcacaagagttacagggccttgctcaggcccaggacaatagcgtgctcgggcagcgtctgcaagaggaggcccaaggactgcggaatcttcatcaggaaaaagttgtaccacagcagtctctggtcgcaaagcttaacctctctgtgcgtgccctcgagtcctccgcccccaatctgcaattagaaacaagcgacgtcctagccaatgtaacctatcttaagggagagctccccgcatgggctgctaggatcttacgcaacgtaagtgagtgcttcctggctcgagagatggggtattttagccagtatgtggcctgggtccgcgaggaagtgacacagcgtattgcgacttgtcaacctctgtccggcgctttagataactctagagtcattctctgcgatatgatggccgacccatggaacgcattttggttttgcctcgcttggtgtaccttctttctcattcccagcatcattttcgcggtcaaaactagcaaatattttagacccatccggaagcgactatcctcaacatcctccgaagagacgcagctgtttcatatccctcgtgtgaccagtctgaaactatag

SEQ ID NO: 64108 - DNA, 2505 bp, Artificial Sequence
  derived and/or modified sequence
atgaagcacaccttggctttgcttgcccctctgttgggactagggttaggcttggctctttctcagttggctgccggcgcgactgactgcaagtttctgggacccgccgagcacttaaccttcaccccagccgctagggctcggtggttagctccacgcgtcagggctcctggcttactcgacagcttgtacggcactgtccggcggttcttgtctgttgtacagcttaacccgtttcctagcgaacttgtcaaggccctgcttaatgagctggccagtgtgaaagttaatgaagtggtaaggtacgaggcaggctacgtcgtctgtgcagtgatagctggactgtacctgttattggtgccgactgcagggttatgtttttgctgctgccgctgtcatagacgctgtggggggcgggtaaagacggaacataaggcgctggcgtgtgaaagggccgcgctgatggtattcttgctcctcactacactccttttgcttattggagttgtgtgtgccttcgtcactaatcagcgaacccacgagcagatgggcccatctattgaggcaatgccggagacgctgctttcattgtggggcctggtatctgatgtccctcaggaacttcaggcagtcgctcagcagttcagcctgcctcaggagcaagtcagtgaagagctggatggggtcggcgtcagtatcgggagcgctattcatacgcagttaaggtcctccgtttaccccctattagctgctgtgggctccctgggacaggtattgcaagtcagcgtgcatcatctgcagactctgaacgccacagtggtagagctgcaagctggccaacaagacctcgagcccgccatccgtgaacacagagatagattgctggaactgctacaggaagcacgttgccaaggggattgcgccggggccctctcatgggcgagaactctggagcttggggccgacttcagtcaggtgccttcagttgaccatgtgctgcaccagctaaaaggcgtacccgaagccaacttttccagtatggttcaagaagagaattctaccttcaatgctcttcctgccctcgccgcaatgcaaacttcttccgtggtgcaggagttaaaaaaggccgtggcgcagcagcctgagggtgtgcgtaccctggccgagggatttcctgggctcgaggccgcttcccgctgggcccaggcgctgcaggaagtcgaagaaagctcccggccttacctccaggaggtccagcgatacgaaacttaccgttggattgtgggatgtgtcctctgctccgtggtactgttcgtcgtgttatgtaacctgctgggactaaatctgggcatttggggcttgtcagcccgggacgaccccagtcaccctgaggcaaaaggagaagctggggctaggtttttgatggccggcgttgggctttcttttttatttgccgctccactgattctcctcgtctttgccacctttcttgtcggagggaatgtacagactctggtatgccagtcctgggagaacggagagcttttcgaattcgccgatacaccagggaacctacccccctccatgaacttgtcacagctgttgggcctccgcaagaacattagtatccaccaggcctaccagcagtgtaaggagggtgctgccctatggactgtgctgcagctaaatgattcatacgacttagaggagcacctcgacataaaccagtacacgaataagctacgccaagagctccagtccctgaaggtggatacccagtctctggacctgctttccagcgccgcacggagagacttagaggccttgcagtccagtggtctccagcgtatccactatcccgattttctggtgcaaatccagagacctgtggtgaaaacatctatggagcagctggcgcaggaattgcaaggcttagcccaggctcaggataacagcgtcctcggacagcggctccaggaggaagctcaaggcctgcggaacctgcatcaggagaaggtagtacctcaacagtccctcgtcgcaaagctcaatttgagtgtgcgagccctagaatccagcgctccaaacttacaacttgaaactagtgatgtcctcgcaaacgtcacctatctaaagggcgagctccctgcctgggcagcccggattctgcgcaatgtgagcgagtgcttcctagctagagagatggggtatttctcccagtacgtggcatgggttcgcgaagaggttacacaaaggattgcgacttgtcagccactgagtggagcgctagataatagccgagtaatcctgtgcgatatgatggccgacccgtggaacgcattctggttctgcctcgcttggtgcacctttttccttattcccagtattattttcgctgtgaagacttccaagtatttcagacccatccgtaaaaggctgtcctccacatcttccgaggaaactcagctgtttcatataccccgtgtgacctcgctcaagctctag

SEQ ID NO: 64109 - DNA, 2505 bp, Artificial Sequence
  derived and/or modified sequence
atgaaacatacactggctctgttggcaccactgttgggattaggtctaggattggcactatctcaattagctgctggcgcaaccgactgtaagttcctcggcccagccgaacatctcacctttactcctgccgctcgagccaggtggttagcgcctagggtgagagcacccgggctgctggattcactgtatggtaccgtgcgccgctttctgtcagtcgtccagttgaatccatttccatcggagctagtcaaagcactgttgaacgaactcgcaagcgttaaagtaaacgaggtggtgaggtacgaagctggctacgtggtgtgcgctgtaatcgccgggttgtacctgctcctcgttcccaccgcagggttgtgtttctgttgttgtagatgccatcgacgctgcggaggacgagtaaagaccgaacataaggccctggcttgcgaacgcgccgctctgatggtgttcctgcttcttacaactctattactgctcataggagtggtgtgcgccttcgtgacaaatcagcgaacacatgagcagatgggacccagcatagaggccatgccagagactctgctctctctctgggggctggtatccgatgtcccccaggagctgcaggccgttgcccagcagttttcgctcccccaggaacaggtcagcgaagaacttgatggcgtgggtgtctcaatcggctctgctatccacacccaactcaggtcaagcgtctatcctctgctcgctgcagtgggcagtctaggacaggttctccaggtgtcagtgcatcacttacagacattgaacgctacagtcgtggaactccaggcaggtcagcaagatctggaacctgccatacgagagcatcgtgacaggctcctggaactcctgcaggaggcccgctgccagggagactgtgccggagcgctgagctgggctcgtacactcgagctgggagcagacttttcccaggttcccagtgtagaccatgtgctccaccagttgaagggggtacctgaagctaatttttcatccatggtccaggaagagaactccactttcaatgcccttccagcgctggccgctatgcagactagctcagtggtgcaggagctcaaaaaagctgtggctcaacagccagagggcgttcgcaccttagctgaaggatttcctggcctcgaagccgctagcaggtgggcccaagccttacaggaggtagaagagtcctcacggccttacttgcaagaagtccagaggtacgagacttatcggtggattgtaggatgtgtgctatgctccgtggtcttgtttgtggtgctgtgcaacctgctgggtctcaacctcggtatctggggcctgtcagctagagacgatccctctcatcccgaggcaaaaggagaagctggggctcgctttctaatggccggcgtaggcctttcctttctgtttgctgcccccctgatcctactggtgtttgcaacattcttagtcggtggtaacgtccagaccttagtgtgtcagagctgggagaatggcgagctgttcgagttcgctgatactcccggaaacctgccaccctcaatgaatctctctcagttgcttggactacggaagaacatcagtatacaccaagcttatcagcaatgcaaagaaggcgctgccttgtggaccgtgttgcagctgaatgacagttatgatctggaggagcacctagatatcaaccagtacaccaacaaactgcgccaggagttgcagagtctgaaggtggacacacaatccctggatctcctgtctagcgccgcccggagggatctggaagccttgcagtctagtggcttacagaggattcattaccctgactttctggtgcaaattcagcggccagtggtgaaaacgtctatggagcaactggcccaggaactacagggactcgctcaagcccaggataactctgtgttaggtcagcgtttgcaggaagaagctcaggggctgagaaatctgcaccaggagaaggtcgtcccccagcagtctttagtggctaaactgaatctgtcagtgagggccttggagagcagcgccccaaacctgcagcttgaaactagcgacgtgttggctaatgtcacttacttaaaaggagagttacccgcgtgggcagcacgcatcctgagaaacgtatctgagtgtttcctcgcgagggaaatggggtacttttcacagtatgtcgcttgggtacgggaggaggtcactcagaggatagcaacctgtcaacctctgtcaggagcattagacaacagcagggtgatcctgtgcgatatgatggccgacccatggaacgcgttttggttttgtctcgcatggtgcaccttctttctcattccatccattatctttgcggtgaaaacctccaagtacttccgccctattcgtaagaggctcagctcaacaagtagtgaggagacccagctgtttcacatccctcgagtaacgtcgctgaaactctag

SEQ ID NO: 64110 - DNA, 2358 bp, Artificial Sequence
  derived and/or modified sequence
atgaagcacactttggctctactggctccactgctcggcctggggctgggcttggcgctgtcacagctcgctgctggagctaccgattgcaaatttctcggccccgcggagcaccttacatttacacccgccgctagagcaaggtggctcgctcccagggtcagagcccccggactcttggacagtctgtacggaacagtccggagatttttaagtgtagttcaattgaaccctttccctagcgaacttgttaaggcgttgctcaacgagttggcctctgttaaggttaacgaagtcgtaagatacgaagctgggtacgttgtctgtgcggtgattgcgggactgtacctcctgctcgtgccgaccgctggtctttgcttttgttgttgccgctgccaccgtaggtgtggtggacgggtgaagacggaacataaagccttagcttgcgaacgcgccgccttgatggtgttcctgctacttaccaccctcttgctactgataggtgttgtctgcgcttttgtgacaaaccagagaacacacgaacaaatggggccttctatcgaagctatgccagagactctgcttagtctatggggattagtgtccgatgtacctcaggaacttcaggctgtggcccaacaattcagtctcccccaggagcaagtatcagaggagctggatggagttggtgtgtcgattgggtccgccatccacacacagttgagatctagcgtctaccccctgctggcagccgtggggtccctgggacaggttctgcaagtgtcagttcaccacctgcagacattgaatgccacagtcgtggaactacaagcgggccagcaagatttagaacctgccattcgagagcatcgtgacaggctccttgagttgcttcaggaagcgcgatgccaaggagactgcgccggcgcactcagttgggcgaggacattggagctgggcgcagacttctcacaagtgccatccgtggaccacgtcctgcaccagctcaaaggtgtacccgaagccaatttcagtagtatggtccaggaagaaaatagcacttttaacgccttacctgcactggcagccatgcagacaagtagtgtggtgcaggaactgaaaaaggctgtcgcccagcagcctgaaggggtccgaacgctcgccgaaggttttcctggcctggaggccgcgtcccgatgggctcaggcgttgcaggaagttgaggagagttctcgcccctatttacaagaagttcagcgctacgaaacataccgctggatcgtcggttgtgtgctctgcagtgtggtgctctttgtagtcctgtgcaacctgctgggtctgaatctaggaatctggggattatcagctagagatgacccctcccaccctgaagcaaagggcgaagcaggagctaggtttctgatggctggcgtggggctgtccttcctttttgcagctcccctaatactcttagttttcgccacctttctcgttggggggaatgtgcagacactcgtgtgccagagctgggaaaacggcgagctctttgagttcgctgacactccaggaaatctccccccctcaatgaatttaagccaactattgggcctccgaaaaaacatttctatacaccaggcctatcagcagtgcaaggagggcgcagcactatggaccgttcttcagctgaacgactcctatgatctggaggagcacttagatattaatcagatccagcgcccggtggtgaaaacatcaatggaacaattggcacaggaattgcaaggcctggcccaggcccaggataactctgtgctggggcagagactccaggaggaggcacaaggtctgcgaaatttacatcaggaaaaagtagtgcctcagcagtccctcgtagcaaagttgaatcttagtgtgagggctctggaatcatccgcccccaacctacaactggagacgagcgacgttctggccaacgttacgtacctcaaaggcgaactgccggcatgggcagcccgtattttacgaaatgtaagcgaatgttttctcgcacgcgagatgggctacttctcacagtatgtggcctgggtgcgtgaggaggtgacacaacgaatcgccacttgccagcctctgagcggcgcgctggataactcccgcgtgatcctctgcgacatgatggcggatccctggaatgcgttctggttctgtttggcctggtgtacctttttcttaattccaagtattatcttcgccgttaagacatccaagtatttcaggcccatccgcaaacgactttccagtacatcctcagaagagactcaactctttcatataccaagagttacaagcctgaagctttag

SEQ ID NO: 64111 - DNA, 2505 bp, Artificial Sequence
  derived and/or modified sequence
atgaagcacacactggccctgctggcacctctcctgggtctgggacttggtctcgcactgtcacagcttgccgccggcgcaaccgattgcaaatttctcgggcccgccgagcatttaacttttaccccagctgctcgcgctagatggctggctccacgagtgcgcgcccccggattgctcgatagcttgtatgggacagtcaggcggtttctatcggttgttcaacttaacccattcccctcagagcttgttaaagctttgctgaatgaactcgcctccgttaaggtcaatgaggttgtgagatacgaggccggttatgtcgtgtgtgccgtgatagcgggcctatatctcctcctcgtgccaactgctggactctgcttctgctgctgtcgctgtcatcgccgttgtggtgggagggtcaagacggagcacaaagccctggcctgcgagcgtgccgcacttatggtttttctcttgctcacgacgctgcttctactgattggtgtggtctgtgcatttgtgactaaccaaaggacgcacgaacagatgggtccgtccatcgaagctatgcctgaaacgttgttaagtctctggggtctggtcagcgacgttccacaagaattgcaggctgtagcacagcagtttagtctacctcaagagcaagtgtcagaagaactggatggcgtcggagtctctattggcagtgccatacacacacaattgcgatcaagcgtctaccctcttcttgctgccgtgggctctctaggccaggttctccaggtttctgtacaccatctccaaaccttgaatgcaacagtggtcgaactccaggccggacagcaggatctcgagcccgcgattagggagcatagggatcgattactggagctgctgcaggaggcacgatgtcaaggagactgcgcaggagccctgagctgggcaaggaccctggagctgggtgcagatttctcccaggtccccagtgtcgatcacgtgctccatcagctgaagggcgtaccagaggctaatttctccagcatggtacaagaggagaatagtacctttaatgccctaccagcccttgcggcaatgcagacaagtagtgttgttcaggaactcaaaaaggcagttgcacagcagcctgaaggcgtgcggactctcgccgaaggcttccccggcctcgaagcagcttcacgctgggctcaagcattgcaggaagtggaggaaagtagtcggccatacctccaagaagtacagaggtacgaaacttacaggtggatcgtgggatgtgttttgtgctccgtcgtattgtttgttgtcctatgcaatctcctgggtctaaatctggggatctggggcctcagcgctcgcgatgatccatctcacccagaggccaaaggtgaagccggggctcgatttttgatggcaggggtcggattatcattccttttcgccgcaccattaatactgttagtcttcgctacgttcctggttggaggcaatgtgcaaaccctcgtgtgtcagtcctgggaaaatggtgagcttttcgaatttgcagatacaccaggaaacctgcccccctctatgaatctgagccaactgttgggcctgcggaagaacatctccatccaccaggcatatcagcaatgcaaggaaggtgctgcactttggactgtgctacagctgaatgattcatatgatttggaggagcatcttgacattaaccagtataccaacaagctcagacaggagcttcaatcattgaaagtagacacccagtctttggatctgttgtccagcgcagctagacgggacttagaagcattgcaatccagcggtctgcagcggatccattatccagactttctcgtgcagattcagcggcccgtggtcaagacttctatggaacaactcgcccaggaactccagggcctagcccaggctcaggataactcagtgctcggtcagcggcttcaagaggaggcccagggactgagaaatttgcaccaagaaaaggtcgtacctcagcagagtctggtcgccaagttgaacttatctgtgagagcattagagtccagtgcccctaatttgcagctcgaaacctcagacgtcttagccaacgttacctacctgaagggcgagctgccagcttgggctgcccgaatccttcgtaatgtgtccgagtgctttctggctcgggaaatgggttatttctctcagtatgtcgcctgggtgcgggaagaagtgacacaacggattgcgacttgccaacctctgagtggggctctcgacaatagtagagttatactatgtgacatgatggcggacccgtggaacgccttttggttttgcctggcttggtgtactttcttcttgattccctctatcatctttgctgtgaaaacctcaaaatactttagacctatcagaaagcgcctgagttccacatccagtgaagaaacgcagttgttccatatccctcgagtcacctctctcaaactatag

SEQ ID NO: 64112 - DNA, 2505 bp, Artificial Sequence
  derived and/or modified sequence
atgaaacatacgctggccctgctagcacccttgctgggcctgggactaggtctcgctttgtcacaactcgccgcaggcgccacagactgtaaatttctcggtcctgctgagcatctcacatttaccccagccgcccgtgccagatggctggcccctcgcgtcagagcgcccgggcttctggactccctctatggaaccgtccgtcgttttctaagcgttgttcaactgaatccatttccttcggagttggtgaaagccctgctgaacgaactggcctctgtgaaagttaatgaggtcgtcagatacgaggcaggctacgtggtgtgcgccgtcattgccggattatacttattgttagtaccgactgccgggctctgtttttgctgctgcaggtgccatagaaggtgtggtgggcgagttaagaccgagcacaaagcccttgcttgcgagcgcgcagccctgatggtgtttctgctgctgacaaccctcctgcttctcattggcgtggtatgcgctttcgttacaaatcagagaacacatgagcagatgggccctagtatagaagctatgccagagactcttctttccctctggggactggtcagcgatgtgcctcaggaactccaggccgtggcccagcagttctcattaccccaggaacaggtatccgaagagctcgatggggtcggggtgagcatcggttcagcaattcacacacaactcaggtcctccgtctatcctttactcgccgcagtcgggtccctaggacaggtcctgcaggtgagcgtccaccacctccagaccctgaatgctaccgtcgttgagttgcaggccggccagcaggatcttgagccagcaatccgtgaacacagagatcgcctgctagagttgttacaggaggctcgttgtcagggagactgtgctggtgcgctgtcctgggcacggacgttggagttaggggccgactttagccaggtaccaagtgttgaccacgtcctccatcagctgaaaggcgttcctgaagccaatttctcatccatggtccaagaagagaacagcacattcaacgccctacctgctctagcagctatgcagacaagttctgtggtacaggagctcaaaaaggccgtcgcccaacagccagagggtgtgcgaacactggcggaaggattccccggactggaggctgcatctcgctgggcccaggcgctacaggaggtggaagaatcctctagaccttacttgcaggaggtccaacgctatgaaacctatcgttggatagtcgggtgcgttctgtgcagtgttgtactcttcgtggtgctatgcaatttgctgggtttgaatttgggaatctggggactctcggctcgcgacgacccatcacaccctgaggctaaaggcgaggcgggggcgagatttctgatggcaggtgtcggcttgtcgttcctgttcgcagccccactgatattgctggtgttcgcaacatttctggttggtggcaatgttcaaacccttgtctgtcagtcttgggaaaatggcgagttattcgagttcgctgacactccaggaaatcttccaccgagcatgaatctgtctcagcttctcggccttcgcaagaatattagtatccatcaggcctaccaacaatgtaaggaaggcgccgccttatggaccgtcctgcagctcaacgattcctacgatctggaggagcatctcgatatcaaccaatataccaacaaacttagacaggagcttcaatctctgaaggttgatacccagtctctggacctgctttcctctgcggcgaggagggatctcgaagctttgcagtcctcaggattacaaagaatccattatcctgactttctggtacagatccagagaccagtagttaagaccagtatggagcaattagcgcaagagctgcagggtctcgctcaggctcaggacaattcagtcttgggacagaggcttcaagaagaagctcaaggtctgcgtaacctccatcaggaaaaagtagtaccacaacaatccctagtagccaaacttaacctatcagtacgggctctggaaagctcagcacctaatctgcaactggaaacctccgatgtcctggccaatgtgacatatctgaaaggagaactcccagcatgggcggctaggatcctgcgcaacgtttctgagtgctttcttgcacgcgaaatgggatatttcagtcaatacgtagcctgggtccgcgaagaagtcacccagagaattgctacctgccagcctctgtccggtgctctagacaatagcagagttatcctttgcgatatgatggctgatccgtggaatgctttctggttctgcctggcctggtgtactttttttttaatcccatccatcatattcgcagttaaaacgagcaaatacttccgcccaattagaaaacgtctctccagcacctctagcgaggaaacccaattgtttcatataccaagggtcacaagcttaaaactctag

SEQ ID NO: 64113 - DNA, 2505 bp, Artificial Sequence
  derived and/or modified sequence
atgaagcatactttagccttactcgcccccctgctggggctgggtctcggcttggccctctcacagctcgctgccggcgcaactgactgtaaatttctcgggcccgccgagcatcttacttttactcccgctgccagagccaggtggcttgcaccccgcgtccgcgcccccggactccttgatagcctctacggaactgttcggagattcttaagtgttgtgcaactcaatccctttccttccgaactggtcaaagcactattgaacgaattggcttcggtcaaggttaacgaggtggttcggtatgaggcaggttacgtggtatgtgcggtcattgcaggactctacttactgttagttccaaccgccgggttgtgcttttgttgctgtcgatgccacagacgttgtggtggtagagtgaagaccgaacataaggcccttgcctgcgagcgtgctgcactgatggttttcctacttctaaccacactcctgctcctgattggggttgtttgcgcatttgttaccaatcaaagaacccacgagcagatgggtccaagcatcgaagccatgcccgagactttattatcactctggggactggtgagcgatgtgcctcaggagttacaagcagtcgcacaacaattttccctcccccaagagcaggtgtcggaagaactcgatggggttggcgtctctataggatcagcgatccacacccaattgcgcagctctgtctaccccctcctcgctgccgtcggctcacttggacaggtgctccaggtgtctgttcaccatctacaaaccctaaatgcgaccgtggtagagttacaggctgggcaacaggacttggaacctgctatacgcgagcatcgagaccgtctacttgagttgttgcaggaggcccgttgccagggggactgcgcaggcgccttgtcttgggccagaacactggagttgggggctgacttttcccaagtgccaagcgtagatcacgtgcttcaccagcttaagggggtccccgaagccaatttttcaagcatggtgcaggaggaaaactcaacgttcaatgcccttcccgccttagccgctatgcaaacaagtagcgtcgttcaggaactcaaaaaagccgtggcacagcaacccgagggagtgcgcactctagccgaaggattccccggcctggaggcagctagtcggtgggcccaagccttacaggaggtagaagagtcctcacggccttacttgcaagaagtccagaggtacgagacttatcggtggattgtaggatgtgtgctatgctccgtggtcttgtttgtggtgctgtgcaacctgctgggtctcaacctcggtatctggggcctgtcagctagagacgatccctctcatcccgaggcaaaaggagaagctggggctcgctttctaatggccggcgtaggcctttcctttctgtttgctgcccccctgatcctactggtgtttgcaacattcttagtcggtggtaatgttcagacactagtctgtcagtcgtgggaaaatggagaactctttgagtttgcagataccccagggaatctgcccccctctatgaacctttcacaactgctgggactaaggaaaaatatttcaattcatcaggcttaccagcaatgcaaagaaggtgccgcactgtggactgtgcttcagctgaatgattcctatgacctggaagaacacctggacataaatcaatacaccaataagttacgtcaggaactgcaatctctcaaggtcgacactcagtcactcgatctcctttcttctgcagctaggcgcgatctcgaagcccttcaatctagcggactgcaaaggattcactaccctgactttcttgttcagattcaacgtccggtcgtaaagacctccatggagcaattggcccaagaactacagggtttggctcaagcacaggataattccgttctcggacagcgcctgcaggaggaagctcaggggttgcggaacctccaccaggaaaaggttgtcccccaacagtctctggtcgcaaaactcaacctgtctgtgagagcacttgaaagctcggcccctaacctgcagctagagacctccgacgttctggcaaatgtgacatatctgaaaggcgaactccccgcatgggctgccagaatactgaggaatgtctcagaatgctttctagcgagagagatgggctacttctcacagtatgtcgcctgggtgagggaagaggtcacccagcgtattgctacatgtcagcctctgtccggtgccttagacaactcgcgtgtcattctttgcgatatgatggccgacccatggaacgcattttggttttgcttggcttggtgcactttctttctgattccttctataatctttgcggtgaaaacgtccaagtacttccgccccatccgtaaacgactgtcaagcactagctccgaggaaacccaactatttcatatcccaagagttacgtctctgaaactttag

SEQ ID NO: 64114 - DNA, 2358 bp, Artificial Sequence
  derived and/or modified sequence
atgaagcacacactggcactcttggctccattactcggcttagggttgggacttgcactgtcacaactggccgccggggcaaccgattgtaaatttctcggaccggctgagcacctgacctttaccccagctgcccgggccagatggctggctccccgcgttcgggctccaggattgctcgattcattatacggtacagtgagacggtttctctccgtggtgcaactgaacccctttcccagcgaactcgtgaaagcgctgctaaatgagctggcctctgtaaaagtgaatgaagtagttagatacgaagctgggtacgttgtctgtgcggtgattgcgggactgtacctcctgctcgtgccgaccgctggtctttgcttttgttgttgccgctgccaccgtaggtgtggtggacgggtgaagacggaacataaagccttagcttgcgaacgcgccgccttgatggtgttcctgctacttaccaccctcttgctactgataggtgttgtctgcgcttttgtgacaaaccagagaacacacgaacaaatggggccttctatcgaagctatgccagagactctgcttagtctatggggattagtgagcgacgtaccccaggaactacaggctgtggcccagcagttttccctgccccaggaacaagtcagtgaggaacttgatggagtgggtgtgagcataggatctgccatccatactcagctcagatccagcgtttatcctttattggcagcagtcggcagtttgggacaagtgcttcaggtaagcgtacatcatctgcaaactttaaacgccaccgtggtcgagcttcaagcaggacagcaggacctcgagcctgccattagagagcatcgggataggctccttgagctgcttcaagaggccagatgccagggcgactgcgctggcgccctcagttgggcgcgaacacttgagctcggcgcagatttttcccaggtgccatctgttgaccatgtcctccaccagcttaaaggagtgccagaggcgaacttctcctcaatggtgcaagaagaaaattctacattcaatgctctccccgctctagccgcaatgcagacatcttccgtggtgcaggagctaaaaaaggccgttgcccagcaacccgagggggtgaggactttggctgaagggtttccgggcctcgaagcagcgtcgagatgggcccaagcccttcaggaagtggaagagagcagccgtccatacctgcaggaagtgcaacgctatgagacgtataggtggatagtaggttgtgttctctgctctgtagtgctttttgtggttctgtgtaacctgctgggattgaatttaggcatctggggtctatcagcacgagacgacccatctcatccggaagccaaaggcgaggccggcgcaaggtttctgatggccggggttggattgtcattcctcttcgccgcaccactgattctgctagtgtttgcaactttccttgtcgggggtaatgttcaaacactcgtttgccagagctgggaaaatggtgaacttttcgaattcgccgatactcctggcaatctgcctccgagcatgaatcttagtcagctgttgggactgcgcaagaatatttcaatccatcaagcatatcagcagtgtaaggagggggctgcattgtggaccgtgctgcagcttaacgattcctatgatctagaggaacacctcgacattaatcagatccaaagacccgtcgtgaagacttcaatggaacagttagcacaagagttgcaaggcttggctcaggcccaggacaatagcgtgttagggcaacgtctccaggaggaagcccagggcttgcgaaacttacaccaggagaaagttgtgccacagcagtcactggttgccaaactgaatcttagcgtgagagctctagagtcgtccgcaccaaacttacagctggaaacttccgacgtcttggccaacgtaacctacctcaaaggagagcttccggcctgggctgcacgaatcttacggaatgtctctgaatgtttcctggcccgcgagatgggatatttttctcagtacgttgcctgggtgagagaagaggtgactcaaagaatcgccacctgccagccactgagcggcgcactggataattcaagggtgatactgtgtgacatgatggctgacccttggaacgctttttggttctgtctagcgtggtgcacattcttcctcatcccttccattatcttcgcagtcaagacatccaaatactttagacccatcagaaaaagactttcctccacatcttcagaggaaacccagctcttccatatacctcgcgtaacatccctcaagctgtag

SEQ ID NO: 64115 - DNA, 3547 bp, Artificial Sequence
  derived and/or modified sequence
gagagggacagaggctggagaaggatgtatggcctgccctgggcttgtctgttccctcctgagcctgagccccttaccttcctgaccccatgaagcacacactggctctgctggctcccctgctgggcctgggcctggggctggccctgagtcagctggctgcaggggccacagactgcaagttccttggcccggcagagcacctgacattcaccccagcagccagggcccggtggctggcccctcgagttcgtgcgccaggactcctggactccctctatggcaccgtgcgccgcttcctctcggtggtgcagctcaatcctttcccttcagagttggtaaaggccctactgaatgagctggcctccgtgaaggtgaatgaggtggtgcggtacgaggcgggctacgtggtatgcgctgtgatcgcgggcctctacctgctgctggtgcccactgccgggctttgcttctgctgctgccgctgccaccggcgctgcgggggacgagtgaagacagagcacaaggcgctggcctgtgagcgcgcggccctcatggtcttcctgctgctgaccaccctcttgctgctgattggtgtggtctgtgcctttgtcaccaaccagcgcacgcatgaacagatgggccccagcatcgaggccatgcctgagaccctgctcagcctctggggcctggtctctgatgtcccccaagagctgcaggccgtggcacagcaattctccctgccccaggagcaagtctcagaggagctggatggtgttggtgtgagcattgggagcgcgatccacactcagctcaggagctccgtgtaccccttgctggcggccgtgggcagtttgggccaggtcctgcaggtctccgtgcaccacctgcaaaccttgaatgctacagtggtagagctgcaggccgggcagcaggacctggagccagccatccgggaacaccgggaccgcctccttgagctgctgcaggaggccaggtgccagggagattgtgcaggggccctgagctgggcccgcaccctggagctgggtgctgacttcagccaggtgccctctgtggaccatgtcctgcaccagctaaaaggtgtccccgaggccaacttctccagcatggtccaggaggagaacagcaccttcaacgcccttccagccctggctgccatgcagacatccagcgtggtgcaagagctgaagaaggcagtggcccagcagccggaaggggtgaggacactggctgaagggttcccgggcttggaggcagcttcccgctgggcccaggcactgcaggaggtggaggagagcagccgcccctacctgcaggaggtgcagagatacgagacctacaggtggatcgtgggctgcgtgctgtgctccgtggtcctattcgtggtgctctgcaacctgctgggcctcaatctgggcatctggggcctgtctgccagggacgaccccagccacccagaagccaagggcgaggctggagcccgcttcctcatggcaggtgtgggcctcagcttcctctttgctgcacccctcatcctcctggtgttcgccaccttcctggtgggtggcaacgtgcagacgctggtgtgccagagctgggagaacggcgagctctttgagtttgcagacaccccagggaacctgcccccgtccatgaacctgtcgcaacttcttggcctgaggaagaacatcagcatccaccaagcctatcagcagtgcaaggaaggggcagcgctctggacagtcctgcagctcaacgactcctacgacctggaggagcacctggatatcaaccagatccagaggcccgtggtgaagaccagcatggagcagctggcccaggagctgcaaggactggcccaggcccaagacaattctgtgctggggcagcggctgcaggaggaggcccaaggactcagaaaccttcaccaggagaaggtcgtcccccagcagagccttgtggcaaagctcaacctcagcgtcagggccctggagtcctctgccccgaatctccagctggagacctcagatgtcctagccaatgtcacctacctgaaaggagagctgcctgcctgggcagccaggatcctgaggaatgtgagtgagtgtttcctggcccgggagatgggctacttctcccagtacgtggcctgggtgagagaggaggtgactcagcgcattgccacctgccagcccctctccggagccctggacaacagccgtgtgatcctgtgtgacatgatggctgacccctggaatgccttctggttctgcctggcatggtgcaccttcttcctgatccccagcatcatctttgccgtcaagacctccaaatacttccgtcctatccggaaacgcctcagctccaccagctctgaggagactcagctcttccacatcccccgggttacctccctgaagctgtagggccttgtggggtgaggtgaccctgaggctgcctgtcctcccctttgatttagcctgggccacaggacttcggtagctcttgccccagagcccaggctggcatccaggcctggactgtccccagttccggcttacctggccccaccttgcctgctcctttccacccctttctgctcacgacccccatcattcacgctcagaatcacatgggacttctgtgcagctgcagagccagcaagtccctccaggtgtcaccccttacccccatgctggtggcatcctcacaggaagagcctgttctccacctgctggagcctggaccctggggtgggacagaggcctcgtccaaccccactccccttcccgtgtgtcttccccctgccaagcctccccctgccaagcctccccctgcccctctctgagcccctcgccccccacaccgtcctcatctggcctcccccctggcccccacttccctcttatgcccttcctggccctttgcttcctcccttagtcccctcttcaccatatctccactgctaccttgctggccccagagaccaccctgcccaaccaaaccactcaggtaacgccactaatcaggcaggggccaccatggcctaggtctgggctggctgcaggccctgcctcatggcctctgagccctccactgccccagggccttgggccctctgcagatctcatccaggatttattggtgtccagtggggtgagggaggcctgtctgaaggccgagcctccctgcctgcacccaagttagaaatgggggtaccagcacttagcttctctctgagtgctggctcccaaggaagggacctgggacctgggccacagtgggggcttgcccttacctcttcagaaggaagcatcttccacagcccccacccaactttcttaggagtgatctggtggccagaacaggattttgcacggccccttttatcctgcgcatgtggcctagggtcatccccagcccatccctgtgtcagccctgagtgctggacactgcgttccagaaatgaggaagaggagagagaagagatggacagacctcagatccattaaagtgttctcacttc

SEQ ID NO: 64116 - DNA, 2505 bp, Artificial Sequence
  derived and/or modified sequence
atgaagcacaccctggccctgctggcccccctgctgggcctgggcctgggcctggccctgagccagctggccgccggcgccaccgactgcaagttcctgggccccgccgagcacctgaccttcacccccgccgccagagccagatggctggcccccagagtgagagcccccggcctgctggacagcctgtacggcaccgtgagaagattcctgagcgtggtgcagctgaaccccttccccagcgagctggtgaaggccctgctgaacgagctggccagcgtgaaggtgaacgaggtggtgagatacgaggccggctacgtggtgtgcgccgtgatcgccggcctgtacctgctgctggtgcccaccgccggcctgtgcttctgctgctgcagatgccacagaagatgcggcggcagagtgaagaccgagcacaaggccctggcctgcgagagagccgccctgatggtgttcctgctgctgaccaccctgctgctgctgatcggcgtggtgtgcgccttcgtgaccaaccagagaacccacgagcagatgggccccagcatcgaggccatgcccgagaccctgctgagcctgtggggcctggtgagcgacgtgccccaggagctgcaggccgtggcccagcagttcagcctgccccaggagcaggtgagcgaggagctggacggcgtgggcgtgagcatcggcagcgccatccacacccagctgagaagcagcgtgtaccccctgctggccgccgtgggcagcctgggccaggtgctgcaggtgagcgtgcaccacctgcagaccctgaacgccaccgtggtggagctgcaggccggccagcaggacctggagcccgccatcagagagcacagagacagactgctggagctgctgcaggaggccagatgccagggcgactgcgccggcgccctgagctgggccagaaccctggagctgggcgccgacttcagccaggtgcccagcgtggaccacgtgctgcaccagctgaagggcgtgcccgaggccaacttcagcagcatggtgcaggaggagaacagcaccttcaacgccctgcccgccctggccgccatgcagaccagcagcgtggtgcaggagctgaagaaggccgtggcccagcagcccgagggcgtgagaaccctggccgagggcttccccggcctggaggccgccagcagatgggcccaggccctgcaggaggtggaggagagcagcagaccctacctgcaggaggtgcagagatacgagacctacagatggatcgtgggctgcgtgctgtgcagcgtggtgctgttcgtggtgctgtgcaacctgctgggcctgaacctgggcatctggggcctgagcgccagagacgaccccagccaccccgaggccaagggcgaggccggcgccagattcctgatggccggcgtgggcctgagcttcctgttcgccgcccccctgatcctgctggtgttcgccaccttcctggtgggcggcaacgtgcagaccctggtgtgccagagctgggagaacggcgagctgttcgagttcgccgacacccccggcaacctgccccccagcatgaacctgagccagctgctgggcctgagaaagaacatcagcatccaccaggcctaccagcagtgcaaggagggcgccgccctgtggaccgtgctgcagctgaacgacagctacgacctggaggagcacctggacatcaaccagtacaccaacaagctgagacaggagctgcagagcctgaaggtggacacccagagcctggacctgctgagcagcgccgccagaagagacctggaggccctgcagagcagcggcctgcagagaatccactaccccgacttcctggtgcagatccagagacccgtggtgaagaccagcatggagcagctggcccaggagctgcagggcctggcccaggcccaggacaacagcgtgctgggccagagactgcaggaggaggcccagggcctgagaaacctgcaccaggagaaggtggtgccccagcagagcctggtggccaagctgaacctgagcgtgagagccctggagagcagcgcccccaacctgcagctggagaccagcgacgtgctggccaacgtgacctacctgaagggcgagctgcccgcctgggccgccagaatcctgagaaacgtgagcgagtgcttcctggccagagagatgggctacttcagccagtacgtggcctgggtgagagaggaggtgacccagagaatcgccacctgccagcccctgagcggcgccctggacaacagcagagtgatcctgtgcgacatgatggccgacccctggaacgccttctggttctgcctggcctggtgcaccttcttcctgatccccagcatcatcttcgccgtgaagaccagcaagtacttcagacccatcagaaagagactgagcagcaccagcagcgaggagacccagctgttccacatccccagagtgaccagcctgaagctgtag

SEQ ID NO: 64117 - DNA, 4728 bp, Artificial Sequence
  derived and/or modified sequence
gctcaggaacccaaacctgtcgggcaggttttgagagctgtggagagagggacagaggctggagaaggatgtatggcctgccctgggcttgtctgttccctcctgagcctgagccccttaccttcctgaccccatgaagcacacactggctctgctggctcccctgctgggcctgggcctggggctggccctgagtcagctggctgcaggggccacagactgcaagttccttggcccggcagagcacctgacattcaccccagcagccagggcccggtggctggcccctcgagttcgtgcgccaggactcctggactccctctatggcaccgtgcgccgcttcctctcggtggtgcagctcaatcctttcccttcagagttggtaaaggccctactgaatgagctggcctccgtgaaggtgaatgaggtggtgcggtacgaggcgggctacgtggtatgcgctgtgatcgcgggcctctacctgctgctggtgcccactgccgggctttgcttctgctgctgccgctgccaccggcgctgcgggggacgagtgaagacagagcacaaggcgctggcctgtgagcgcgcggccctcatggtcttcctgctgctgaccaccctcttgctgctgattggtgtggtctgtgcctttgtcaccaaccagcgcacgcatgaacagatgggccccagcatcgaggccatgcctgagaccctgctcagcctctggggcctggtctctgatgtcccccaagagctgcaggccgtggcacagcaattctccctgccccaggagcaagtctcagaggagctggatggtgttggtgtgagcattgggagcgcgatccacactcagctcaggagctccgtgtaccccttgctggcggccgtgggcagtttgggccaggtcctgcaggtctccgtgcaccacctgcaaaccttgaatgctacagtggtagagctgcaggccgggcagcaggacctggagccagccatccgggaacaccgggaccgcctccttgagctgctgcaggaggccaggtgccagggagattgtgcaggggccctgagctgggcccgcaccctggagctgggtgctgacttcagccaggtgccctctgtggaccatgtcctgcaccagctaaaaggtgtccccgaggccaacttctccagcatggtccaggaggagaacagcaccttcaacgcccttccagccctggctgccatgcagacatccagcgtggtgcaagagctgaagaaggcagtggcccagcagccggaaggggtgaggacactggctgaagggttcccgggcttggaggcagcttcccgctgggcccaggcactgcaggaggtggaggagagcagccgcccctacctgcaggaggtgcagagatacgagacctacaggtggatcgtgggctgcgtgctgtgctccgtggtcctattcgtggtgctctgcaacctgctgggcctcaatctgggcatctggggcctgtctgccagggacgaccccagccacccagaagccaagggcgaggctggagcccgcttcctcatggcaggtgtgggcctcagcttcctctttgctgcacccctcatcctcctggtgttcgccaccttcctggtgggtggcaacgtgcagacgctggtgtgccagagctgggagaacggcgagctctttgagtttgcagacaccccagggaacctgcccccgtccatgaacctgtcgcaacttcttggcctgaggaagaacatcagcatccaccaagcctatcagcagtgcaaggaaggggcagcgctctggacagtcctgcagctcaacgactcctacgacctggaggagcacctggatatcaaccagtataccaacaagctacggcaggagttgcagagcctgaaagtagacacacagagcctggacctgctgagctcagccgcccgccgggacctggaggccctgcagagcagtgggcttcagcgcatccactaccccgacttcctcgttcagatccagaggcccgtggtgaagaccagcatggagcagctggcccaggagctgcaaggactggcccaggcccaagacaattctgtgctggggcagcggctgcaggaggaggcccaaggactcagaaaccttcaccaggagaaggtcgtcccccagcagagccttgtggcaaagctcaacctcagcgtcagggccctggagtcctctgccccgaatctccagctggagacctcagatgtcctagccaatgtcacctacctgaaaggagagctgcctgcctgggcagccaggatcctgaggaatgtgagtgagtgtttcctggcccgggagatgggctacttctcccagtacgtggcctgggtgagagaggaggtgactcagcgcattgccacctgccagcccctctccggagccctggacaacagccgtgtgatcctgtgtgacatgatggctgacccctggaatgccttctggttctgcctggcatggtgcaccttcttcctgatccccagcatcatctttgccgtcaagacctccaaatacttccgtcctatccggaaacgcctcagctccaccagctctgaggagactcagctcttccacatcccccgggttacctccctgaagctgtagggccttgtggggtgaggtgaccctgaggctgcctgtcctcccctttgatttagcctgggccacaggacttcggtagctcttgccccagagcccaggctggcatccaggcctggactgtccccagttccggcttacctggccccaccttgcctgctcctttccacccctttctgctcacgacccccatcattcacgctcagaatcacatgggacttctgtgcagctgcagagccagcaagtccctccaggtgtcaccccttacccccatgctggtggcatcctcacaggaagagcctgttctccacctgctggagcctggaccctggggtgggacagaggcctcgtccaaccccactccccttcccgtgtgtcttccccctgccaagcctccccctgccaagcctccccctgcccctctctgagcccctcgccccccacaccgtcctcatctggcctcccccctggcccccacttccctcttatgcccttcctggccctttgcttcctcccttagtcccctcttcaccatatctccactgctaccttgctggccccagagaccaccctgcccaaccaaaccactcaggtaacgccactaatcaggcaggggccaccatggcctaggtctgggctggctgcaggccctgcctcatggcctctgagccctccactgccccagggccttgggccctctgcagatctcatccaggatttattggtgtccagtggggtgagggaggcctgtctgaaggccgagcctccctgcctgcacccaagttagaaatgggggtaccagcacttagcttctctctgagtgctggctcccaaggaagggacctgggacctgggccacagtgggggcttgcccttacctcttcagaaggaagcatcttccacagcccccacccaactttcttaggagtgatctggtggccagaacaggattttgcacggccccttttatcctgcgcatgtggcctagggtcatccccagcccatccctgtgtcagccctgagtgctggacactgcgttccagaaatgaggaagaggagagagaagagatggacagacctcagatccattaaagtgttctcacttccctgagacttggttctgggtccttaaaaccaggtttcctaggctgggaccctgtacatagttggtgtttaatgagtgtttatggagaggagagttctaaggtcacctctggctgcaggcatccagggattattccagcaatctgcaggtagggagtgggtcccagcctgggagcctgctgtcaggagcaggcagacctggactcacagcctggctgtgatgcttgttcgctcagcttctccatttatgagatggggagaatagtcacagcctcctcaaagggttgtgaaaatcaaatgtgataatttgtggaaagcccttagcagtggcctggcacaaaacaaatgctcagtggatggaagctgcctattattattgtcgttgttgttgtttgccatgactgctctgggccgggggtagagctagcatccgggcatgtacgagggaagagggaggcaggcctctattcaaaggcagaaattcctttaagattgtggtctgctgggtttcagggagtgtctgtgttgtttgtttttgtttgtttgtttgttttgagacagggtctcgctctgtcacccaggctggagtgtagtggtgcagtcttggctcactgcaacctccacctcctgggctcaagcgattctcatgcctcagcctcccgagtagctgggactacaggtgtgtgccactatgcctggctaatttttgtattttttgtagagacggggttttgccatgttgcccaggctggaagtgtctatgtttaactgcatcttataaaccagcaacaagttttctactgggaattagaatggtgcatacacaatgtattattatcactgtcagatgagcatgcttgaatgtagcatgactgcctctttttgcttttcctagaggttttttttttgcttgttactcatctgttgacctacctgggggaagtagcacccttgcatttcaaaaataaaattgatggcattacaaatggaat

SEQ ID NO: 64118 - DNA, 3824 bp, Artificial Sequence
  derived and/or modified sequence
gctcaggaacccaaacctgtcgggcaggttttgagagctgtggagagagggacagaggctggagaaggatgtatggcctgccctgggcttgtctgttccctcctgagcctgagccccttaccttcctgaccccatgaagcacacactggctctgctggctcccctgctgggcctgggcctggggctggccctgagtcagctggctgcaggggccacagactgcaagttccttggcccggcagagcacctgacattcaccccagcagccagggcccggtggctggcccctcgagttcgtgcgccaggactcctggactccctctatggcaccgtgcgccgcttcctctcggtggtgcagctcaatcctttcccttcagagttggtaaaggccctactgaatgagctggcctccgtgaaggtgaatgaggtggtgcggtacgaggcgggctacgtggtatgcgctgtgatcgcgggcctctacctgctgctggtgcccactgccgggctttgcttctgctgctgccgctgccaccggcgctgcgggggacgagtgaagacagagcacaaggcgctggcctgtgagcgcgcggccctcatggtcttcctgctgctgaccaccctcttgctgctgattggtgtggtctgtgcctttgtcaccaaccagcgcacgcatgaacagatgggccccagcatcgaggccatgcctgagaccctgctcagcctctggggcctggtctctgatgtcccccaagagctgcaggccgtggcacagcaattctccctgccccaggagcaagtctcagaggagctggatggtgttggtgtgagcattgggagcgcgatccacactcagctcaggagctccgtgtaccccttgctggcggccgtgggcagtttgggccaggtcctgcaggtctccgtgcaccacctgcaaaccttgaatgctacagtggtagagctgcaggccgggcagcaggacctggagccagccatccgggaacaccgggaccgcctccttgagctgctgcaggaggccaggtgccagggagattgtgcaggggccctgagctgggcccgcaccctggagctgggtgctgacttcagccaggtgccctctgtggaccatgtcctgcaccagctaaaaggtgtccccgaggccaacttctccagcatggtccaggaggagaacagcaccttcaacgcccttccagccctggctgccatgcagacatccagcgtggtgcaagagctgaagaaggcagtggcccagcagccggaaggggtgaggacactggctgaagggttcccgggcttggaggcagcttcccgctgggcccaggcactgcaggaggtggaggagagcagccgcccctacctgcaggaggtgcagagatacgagacctacaggtggatcgtgggctgcgtgctgtgctccgtggtcctattcgtggtgctctgcaacctgctgggcctcaatctgggcatctggggcctgtctgccagggacgaccccagccacccagaagccaagggcgaggctggagcccgcttcctcatggcaggtgtgggcctcagcttcctctttgctgcacccctcatcctcctggtgttcgccaccttcctggtgggtggcaacgtgcagacgctggtgtgccagagctgggagaacggcgagctctttgagtttgcagacaccccagggaacctgcccccgtccatgaacctgtcgcaacttcttggcctgaggaagaacatcagcatccaccaagcctatcagcagtgcaaggaaggggcagcgctctggacagtcctgcagctcaacgactcctacgacctggaggagcacctggatatcaaccagtataccaacaagctacggcaggagttgcagagcctgaaagtagacacacagagcctggacctgctgagctcagccgcccgccgggacctggaggccctgcagagcagtgggcttcagcgcatccactaccccgacttcctcgttcagatccagaggcccgtggtgaagaccagcatggagcagctggcccaggagctgcaaggactggcccaggcccaagacaattctgtgctggggcagcggctgcaggaggaggcccaaggactcagaaaccttcaccaggagaaggtcgtcccccagcagagccttgtggcaaagctcaacctcagcgtcagggccctggagtcctctgccccgaatctccagctggagacctcagatgtcctagccaatgtcacctacctgaaaggagagctgcctgcctgggcagccaggatcctgaggaatgtgagtgagtgtttcctggcccgggagatgggctacttctcccagtacgtggcctgggtgagagaggaggtgactcagcgcattgccacctgccagcccctctccggagccctggacaacagccgtgtgatcctgtgtgacatgatggctgacccctggaatgccttctggttctgcctggcatggtgcaccttcttcctgatccccagcatcatctttgccgtcaagacctccaaatacttccgtcctatccggaaacgcctcagctccaccagctctgaggagactcagctcttccacatcccccgggttacctccctgaagctgtagggccttgtgggagtgatctggtggccagaacaggattttgcacggccccttttatcctgcgcatgtggcctagggtcatccccagcccatccctgtgtcagccctgagtgctggacactgcgttccagaaatgaggaagaggagagagaagagatggacagacctcagatccattaaagtgttctcacttccctgagacttggttctgggtccttaaaaccaggtttcctaggctgggaccctgtacatagttggtgtttaatgagtgtttatggagaggagagttctaaggtcacctctggctgcaggcatccagggattattccagcaatctgcaggtagggagtgggtcccagcctgggagcctgctgtcaggagcaggcagacctggactcacagcctggctgtgatgcttgttcgctcagcttctccatttatgagatggggagaatagtcacagcctcctcaaagggttgtgaaaatcaaatgtgataatttgtggaaagcccttagcagtggcctggcacaaaacaaatgctcagtggatggaagctgcctattattattgtcgttgttgttgtttgccatgactgctctgggccgggggtagagctagcatccgggcatgtacgagggaagagggaggcaggcctctattcaaaggcagaaattcctttaagattgtggtctgctgggtttcagggagtgtctgtgttgtttgtttttgtttgtttgtttgttttgagacagggtctcgctctgtcacccaggctggagtgtagtggtgcagtcttggctcactgcaacctccacctcctgggctcaagcgattctcatgcctcagcctcccgagtagctgggactacaggtgtgtgccactatgcctggctaatttttgtattttttgtagagacggggttttgccatgttgcccaggctggaagtgtctatgtttaactgcatcttataaaccagcaacaagttttctactgggaattagaatggtgcatacacaatgtattattatcactgtcagatgagcatgcttgaatgtagcatgactgcctctttttgcttttcctagaggttttttttttgcttgttactcatctgttgacctacctgggggaagtagcacccttgcatttcaaaaataaaattgatggcattacaaatggaatagaaa

SEQ ID NO: 64119 - DNA, 2358 bp, Artificial Sequence
  derived and/or modified sequence
atgaagcacaccctggccctgctggcccccctgctgggcctgggcctgggcctggccctgagccagctggccgccggcgccaccgactgcaagttcctgggccccgccgagcacctgaccttcacccccgccgccagagccagatggctggcccccagagtgagagcccccggcctgctggacagcctgtacggcaccgtgagaagattcctgagcgtggtgcagctgaaccccttccccagcgagctggtgaaggccctgctgaacgagctggccagcgtgaaggtgaacgaggtggtgagatacgaggccggctacgtggtgtgcgccgtgatcgccggcctgtacctgctgctggtgcccaccgccggcctgtgcttctgctgctgcagatgccacagaagatgcggcggcagagtgaagaccgagcacaaggccctggcctgcgagagagccgccctgatggtgttcctgctgctgaccaccctgctgctgctgatcggcgtggtgtgcgccttcgtgaccaaccagagaacccacgagcagatgggccccagcatcgaggccatgcccgagaccctgctgagcctgtggggcctggtgagcgacgtgccccaggagctgcaggccgtggcccagcagttcagcctgccccaggagcaggtgagcgaggagctggacggcgtgggcgtgagcatcggcagcgccatccacacccagctgagaagcagcgtgtaccccctgctggccgccgtgggcagcctgggccaggtgctgcaggtgagcgtgcaccacctgcagaccctgaacgccaccgtggtggagctgcaggccggccagcaggacctggagcccgccatcagagagcacagagacagactgctggagctgctgcaggaggccagatgccagggcgactgcgccggcgccctgagctgggccagaaccctggagctgggcgccgacttcagccaggtgcccagcgtggaccacgtgctgcaccagctgaagggcgtgcccgaggccaacttcagcagcatggtgcaggaggagaacagcaccttcaacgccctgcccgccctggccgccatgcagaccagcagcgtggtgcaggagctgaagaaggccgtggcccagcagcccgagggcgtgagaaccctggccgagggcttccccggcctggaggccgccagcagatgggcccaggccctgcaggaggtggaggagagcagcagaccctacctgcaggaggtgcagagatacgagacctacagatggatcgtgggctgcgtgctgtgcagcgtggtgctgttcgtggtgctgtgcaacctgctgggcctgaacctgggcatctggggcctgagcgccagagacgaccccagccaccccgaggccaagggcgaggccggcgccagattcctgatggccggcgtgggcctgagcttcctgttcgccgcccccctgatcctgctggtgttcgccaccttcctggtgggcggcaacgtgcagaccctggtgtgccagagctgggagaacggcgagctgttcgagttcgccgacacccccggcaacctgccccccagcatgaacctgagccagctgctgggcctgagaaagaacatcagcatccaccaggcctaccagcagtgcaaggagggcgccgccctgtggaccgtgctgcagctgaacgacagctacgacctggaggagcacctggacatcaaccagatccagagacccgtggtgaagaccagcatggagcagctggcccaggagctgcagggcctggcccaggcccaggacaacagcgtgctgggccagagactgcaggaggaggcccagggcctgagaaacctgcaccaggagaaggtggtgccccagcagagcctggtggccaagctgaacctgagcgtgagagccctggagagcagcgcccccaacctgcagctggagaccagcgacgtgctggccaacgtgacctacctgaagggcgagctgcccgcctgggccgccagaatcctgagaaacgtgagcgagtgcttcctggccagagagatgggctacttcagccagtacgtggcctgggtgagagaggaggtgacccagagaatcgccacctgccagcccctgagcggcgccctggacaacagcagagtgatcctgtgcgacatgatggccgacccctggaacgccttctggttctgcctggcctggtgcaccttcttcctgatccccagcatcatcttcgccgtgaagaccagcaagtacttcagacccatcagaaagagactgagcagcaccagcagcgaggagacccagctgttccacatccccagagtgaccagcctgaagctgtag

SEQ ID NO: 64120 - DNA, 2505 bp, Artificial Sequence
  derived and/or modified sequence
atgaagcacacattagccctcctggcccctcttttgggactgggcctgggcctggccttatcacagctggcagctggcgccaccgactgtaagttcctgggaccagctgagcaccttacttttacaccagcggcacgtgctcgatggttggccccaagagtacgcgctcccgggctgttagattcactttacggcaccgtccgtagattcctgagtgtggtgcaactgaatcccttcccttccgaactcgtcaaggcactgctgaacgagcttgctagcgtcaaagtgaatgaggtggtccgatacgaggctggctatgttgtgtgcgctgtgatcgctggcctgtacctgctgttagtgcctacggctggcctgtgcttctgctgttgtagatgccacaggcgctgtggagggagggtcaagacagagcacaaggccctggcgtgcgagcgggcagccttaatggtatttctactgctgacaaccctgttgctgctgatcggcgtggtatgcgcttttgtgacaaatcagaggacccacgaacaaatgggaccttccattgaagccatgcctgagaccctcctgtcactgtgggggttagtcagtgacgtgccacaggagctccaagccgtggcccagcaattctctttgccccaggaacaggtaagtgaggaacttgacggagtcggcgtgtcaattggaagtgctattcacacacagttgcgctcatctgtttaccctctgttggccgccgtggggagcctggggcaggtgctgcaagttagcgtacaccatctgcagactttaaatgcaaccgtagtcgagttgcaggcggggcagcaggatttggaaccagccatacgagagcatcgggatcggctgcttgagctactccaggaagcccgttgtcagggggactgtgctggggccctaagttgggctcgaactttggagctaggggccgacttctcacaggtcccctccgtcgatcatgtgctgcaccagctcaagggggtgccagaggctaacttcagcagcatggtgcaagaggagaactccacattcaacgctctacccgctctagccgccatgcagacaagcagcgtcgtgcaggagttgaaaaaagccgtggcccaacaacctgaaggagtgcgtactctggcagagggattccctggcctggaagccgcctcgcggtgggcacaggctctgcaagaagtggaagaatcttcacgtccctacttacaagaggtgcagcggtacgaaacatatcgctggatcgtaggctgtgtcctttgtagtgttgtcctgttcgtagtcctgtgcaacttgttaggcctgaacctcggtatctggggcctctccgcacgcgatgatcctagccatccagaagcaaagggagaggcaggcgcgaggtttcttatggctggcgtgggcctgtcttttctgttcgccgcacccctcatcttgctagttttcgctacgttccttgttggtggaaacgttcagacactggtgtgtcaaagttgggaaaacggggagttatttgaattcgcggacacacccggcaatctgccacctagcatgaacctctcccagcttcttggccttcggaaaaacatcagcatccaccaggcgtaccagcagtgcaaagagggggcggccctgtggactgtgctccagctcaatgattcatatgatcttgaggaacacctggatatcaatcaatacacaaacaagcttcgtcaggagttacagagcctgaaggttgacactcagagtctcgacctcctgtcctctgccgcccgccgtgacctcgaggcccttcaatcgagtgggctgcagagaatccattacccagatttcctcgtccagattcagcgacccgtcgtcaagacgtctatggagcagctggctcaggagctacaaggactcgctcaggcccaggataactccgtgctcggacaacggctgcaagaagaggcgcagggcctccggaacctgcaccaggaaaaagttgtcccgcagcagagcctggtagcaaaacttaatctatctgtccgcgcactagaatcctccgctccaaatttgcagctggaaacttctgacgtgctggccaatgtcacctacctgaaaggggaactccctgcatgggctgcacgcattctaagaaacgtttccgaatgctttctcgctcgggagatgggctacttcagtcagtacgtggcgtgggtgcgggaagaggtcacccagagaattgctacctgtcagcctctcagcggcgccttagacaacagcagagttatcctgtgcgacatgatggcggatccatggaatgccttttggttctgcctggcttggtgcaccttttttttaatccctagcataatcttcgctgtcaagacctcaaagtattttcggcccattcgcaaaaggctgtcaagtacttccagtgaggagacccagctgtttcacattccccgagttactagccttaagttgtag

SEQ ID NO: 64121 - DNA, 2505 bp, Artificial Sequence
  derived and/or modified sequence
atgaaacataccttagcgctgctcgccccgttgctgggactcgggcttggcttggccctctcacagctcgccgccggagcaacagactgtaaattcctcgggcccgccgaacatctcacctttactccggctgcccgagcacgctggctcgctccacgggttagagcccctggcttactagattcactgtatggcacagtccgcagatttttgagcgtagtacagctgaatcccttcccttcagagctcgtaaaagccctcctaaatgagctggcctccgtgaaagtgaacgaagtggttcgctatgaggcaggatatgtagtctgcgctgtgatcgctgggctctacctgttactggtacccaccgcaggattatgcttctgttgttgccggtgtcacaggaggtgtggtggccgggtcaaaacagagcataaggctctggcttgcgagcgagccgcgctgatggtgtttctcctgttgactacactcttattactgatcggcgtggtgtgcgcattcgtcactaatcagaggactcacgaacagatggggccaagtattgaagccatgccagagactctattgtccctgtgggggttagtttccgatgtgccgcaagaactgcaagctgtggcacagcaattttctttgcctcaggagcaggtttcagaggagctggatggcgtgggtgtatctattgggtccgccatacacactcagctcagatctagtgtttacccactgcttgcagccgttggcagtctgggtcaggtgctgcaggtgagcgtgcatcacctgcaaacattaaacgccaccgtagtggagctgcaggctggtcagcaagatctggagccagcaatccgggaacatcgggatcggctgctcgagctcctccaagaagcacgctgccagggagactgcgccggagctctctcatgggccaggacccttgaactcggagcggacttttcacaagtaccctcggtcgaccatgtgcttcatcagttgaagggagtgccagaggctaactttagtagcatggttcaagaggagaatagcacattcaacgctttaccagccttagcggccatgcaaacgagcagcgtggtccaggagctgaaaaaggccgttgcacagcaaccggagggcgttcgcaccctcgctgagggattccctgggcttgaagctgcaagccgatgggcacaggctctccaggaggtggaggaaagctcccggccctaccttcaggaagtgcagcgctacgaaacgtatagatggatcgtcggatgtgtgctgtgcagcgtggtgctgttcgtcgtgctgtgcaacctgctgggtctcaatctgggcatttggggtctaagtgcccgcgacgatcctagccaccccgaagctaagggagaggcaggggccaggttcctgatggccggagtgggtctcagcttcctgtttgcagctccgctgatcctgctggtgtttgctacgtttctagtcgggggaaatgtccagaccctggtttgtcagtcgtgggagaatggggagctgtttgaattcgcagatacaccagggaacttacctccctccatgaatctgtcacagcttctcggacttcggaagaacatatctatccaccaagcttaccaacagtgtaaggaaggcgccgctctgtggaccgtgttgcaacttaatgattcctatgacctggaggagcacctggacatcaatcagtatactaataaactccgccaggagttacagagtttaaaggtggatacacagtccctggaccttctgtcaagcgccgccagacgggatctggaagctttgcagagctccggtctgcagcgaatacactaccccgatttcctggtccaaatccagcgacctgtagtgaaaacctccatggaacagttggcccaggaacttcagggcttggctcaggcccaggataactcggttctggggcaacgattgcaggaagaggcacagggtctccggaatttgcatcaggaaaaagtagtaccccagcagtcgttagtcgctaagcttaacttgagtgttcgtgccctcgaaagctctgcaccaaaccttcagctggagacatctgacgttttagctaacgtcacctatttgaagggcgaactgcccgcctgggccgcgcgtatccttcggaacgtcagcgagtgcttcctggcaagggaaatgggctatttcagccagtatgttgcatgggtccgtgaagaggtgacacagaggattgcaacctgccagccccttagcggtgcgctcgacaattcacgtgtgatactttgcgacatgatggcagacccatggaacgcgttttggttctgcctggcttggtgcacgtttttcctcatcccctctattatctttgctgtcaagacgtctaagtactttcggccaatccgaaagagactgtcctccacctcaagcgaggaaacacagttgttccacattcctagagtgactagcctcaaactttag

SEQ ID NO: 64122 - DNA, 2505 bp, Artificial Sequence
  derived and/or modified sequence
atgaagcacaccttggccctgctggcccctctccttggtctggggctgggtctggcactatcccagttagcagcgggtgcaacagactgtaagttcttgggcccggccgagcacctgactttcactcctgccgctagagcccgatggctggcccccagagtgcgagctccaggtcttctggattccttatatgggacagtgagaagattcctgagcgtggtccagctaaacccttttccttctgaactcgtaaaggctctgctgaacgaacttgccagcgtgaaggtaaatgaggtggtgaggtatgaagccggctacgtggtgtgtgccgtgatcgcgggcctttacttactgctagttccaaccgcaggtttgtgcttctgctgttgcaggtgccataggaggtgcggtggaagggtaaaaaccgagcacaaggcactcgcctgtgaaagagctgccctgatggtgttcttgctcctgaccacactcttactgctgatcggcgtcgtctgcgccttcgtcaccaaccagcgcactcatgaacagatgggtccctccatcgaggccatgccggaaacgttgttatccttatgggggcttgtgagtgacgtcccccaggaactgcaagcagttgcccagcagttcagtctacctcaggagcaggtgtctgaggagttagatggcgttggcgtctccataggaagtgcaatccacacccagctacggtcctcagtgtatcctctgttggcagccgtggggagccttggccaggtgctgcaagttagtgtgcaccatctgcagaccctcaatgcgacagtggtagagctgcaagccggccaacaggatctggaaccggcgatcagggagcatcgggaccggctgctggaacttctccaggaagcgcgttgtcaaggtgactgtgccggcgcactctcttgggcgaggacactggagctgggagctgacttttctcaggtgccaagcgttgaccacgtgctacatcagttaaagggcgtgccagaagccaatttttcctcaatggtacaagaggagaatagcacttttaacgcactgcctgctttggccgctatgcagacatccagcgttgttcaggaactgaagaaggcggtggctcaacagcccgagggagttcggacattggcggaaggatttccaggcctggaagcagcaagccggtgggcacaggccctccaggaggtcgaagagagttcaagaccctacctgcaggaggttcagagatacgaaacttatcggtggattgttggttgtgtgctatgttccgtcgtgctttttgtggtgctttgcaacctcctgggtctgaacctcggtatctggggactctccgcccgagacgatccgtcccaccctgaagcaaagggagaagccggggcaagatttctgatggcgggagtcggactttctttcctgttcgcagcccccctaatactgctcgtgtttgcaacctttcttgtcggtggaaacgttcagacgctagtgtgccagagttgggagaatggcgaactcttcgaattcgctgacacgcctggcaaccttcccccgagtatgaacctgtcccagctgctgggcctgagaaaaaacatcagtatccatcaggcataccaacagtgcaaggagggagccgccctgtggacagttctgcagctgaacgactcctacgatctagaggaacatctagacataaaccagtatacaaacaagctgaggcaggagctgcagtctcttaaagtggacacgcagtcactagatctgctgtccagcgccgctcgacgcgacttagaagccctacaatcgtctggccttcagagaattcattatcccgacttcctcgtgcagattcagagacccgtggttaagactagcatggaacaactcgcccaagaactgcaaggcctagctcaagcacaggacaattccgtactcggccaacggctccaggaagaggctcagggactgcgtaacctgcatcaggagaaggttgtgccccaacagtctctcgtggcgaaactgaacctgagcgtccgtgccctggaaagctcagctccgaacttgcagttagagacctccgatgtactcgccaatgtgacatacttaaagggggaactcccagcatgggcagctcggatcctccgcaacgtctcagaatgtttcctagccagggaaatggggtatttttcgcagtacgtggcatgggtccgtgaagaagtcactcagcgcatcgctacctgccagccactgagtggggcactggataatagccgggttattctctgcgacatgatggcggacccttggaatgcattctggttttgcctagcttggtgtacctttttcctgatcccatccatcatttttgccgtgaaaacgtcaaagtacttccggcctatccgcaaacgactgagttcaaccagcagtgaggagacccagcttttccatatcccacgcgtgacatccctcaaactctag

SEQ ID NO: 64123 - DNA, 2358 bp, Artificial Sequence
  derived and/or modified sequence
atgaaacacacgcttgcgctgctggcccctctgctgggtctcgggttgggcctggcacttagtcaattagcagcgggcgccacagattgcaaatttttagggcccgcagagcacctgactttcacacctgctgcacgtgcccgctggttggctcctagggttcgcgcccccggattgcttgatagcctctatgggacagtaaggagatttctgagtgtggtgcagctcaatccttttccttccgagcttgtcaaggcacttttgaatgaactggccagcgtgaaggttaatgaagttgtgcggtacgaagccggctacgttgtctgtgcagtcatcgcaggactctacctcctgctcgtgccaacagcaggcctatgtttttgttgctgtcggtgtcatcggaggtgcggcggtcgcgtcaagacagaacataaagccctggcttgcgagagggctgctcttatggtattcttactgttgactacgcttctcctgttgattggggtggtgtgcgccttcgtgacgaaccagaggacccacgaacaaatgggacccagcattgaggccatgccagaaacactcctgtctctttgggggctggtgtccgacgttccacaggaactgcaggcagtggcgcagcagtttagcctgcctcaggagcaggttagtgaagaacttgacggcgtcggcgtgtctatagggtccgctatccatactcagcttagaagtagtgtctaccccctgctcgcggctgtcgggagtcttgggcaagtacttcaagtctcagttcatcacctgcaaacactgaatgctaccgttgtcgaactgcaggccggacagcaggatttggaaccagctattcgtgaacatcgggatcggctgcttgagctcctccaggaagctcggtgccagggggattgtgcaggtgccctgtcatgggcgcggacgttggagttaggcgccgattttagtcaggttccctcagtggaccacgtgctccaccagcttaagggggtccccgaagccaacttttcatctatggttcaggaagaaaattcgactttcaacgcactgccagcactggccgctatgcagacatcatctgtggtgcaggaactgaaaaaggccgttgcccagcagcctgagggggtcagaacattggccgagggtttccccgggctcgaagctgcatctagatgggctcaggccctgcaggaagtagaagagagctccagaccttacttacaggaggtacagcgatacgagacctaccgctggatcgttgggtgcgtcctttgttcagtggttctattcgttgtgctgtgtaatctattgggtctcaacctgggaatctggggccttagcgccagggacgatccctcccacccagaggcaaaaggggaggccggcgcccggtttctgatggccggcgtggggctttctttcttgttcgccgctccccttattctgctggtttttgcaacttttcttgtgggtggaaacgtgcagacgcttgtgtgccagtcttgggagaatggcgaacttttcgagtttgccgacacccccgggaatttacctcctagtatgaatctgtcccagttgctgggacttaggaagaatatatctatccatcaggcttaccaacagtgtaaagaaggtgcggcactgtggacagttctgcagcttaacgattcttacgatctggaagagcacttggacatcaaccagatccagagacctgttgttaaaaccagcatggaacagttggcccaggagctgcaaggcctcgctcaggcacaggacaatagtgtgctgggtcagagactccaagaagaagcgcaggggcttcgtaatttacaccaagagaaggtggtgccacaacagagcctagttgctaagctgaatctgtccgtgcgagccctggagtcctctgcccccaatctacagcttgagacctccgacgtactggccaatgtaacttacctcaagggcgaattgccagcatgggctgcccgcattctgcggaatgtgtccgaatgttttcttgctagggagatgggatacttctcccagtacgtagcatgggtcagagaagaagtgacgcagcgcattgccacctgtcaacctctttccggcgctctggataatagccgtgttattctctgcgatatgatggccgacccttggaacgctttttggttttgcctggcttggtgtacattctttctcataccttctattattttcgccgtgaagacaagcaagtacttccgtcccatacgcaagcggcttagcagcaccagtagtgaagagactcagctgttccacatacctcgggtaacaagccttaagctctag

SEQ ID NO: 64124 - DNA, 2505 bp, Artificial Sequence
  derived and/or modified sequence
atgaagcacaccctggccctgctggcccccctgctgggcctgggcctgggcctggccctgagccagctggccgccggggccacagactgcaagttcctgggccctgctgagcacctgaccttcaccccagctgcccgggcccgctggctggccccccgggtgcgggcccctggcctgctggacagcctgtatggcaccgtgcggcgcttcctgtctgtggtgcagctgaaccccttccccagcgagctggtgaaggccctgctgaatgagctggcctctgtgaaggtgaatgaggtggtgcgctatgaggccggctacgtggtgtgtgctgtgattgctggcctgtacctgctgctggtgcccacagctggcctgtgcttctgctgctgccgctgccaccggcgctgtggcggccgggtgaagacagagcacaaggccctggcctgtgagcgggccgccctgatggtgttcctgctgctgaccaccctgctgctgctgattggagtggtgtgtgcctttgtgaccaaccagaggacccatgagcagatgggccccagcattgaggccatgcctgagaccctgctgagcctgtggggcctggtgtctgatgtgccccaggagctgcaggccgtggcccagcagttcagcctgccccaggagcaggtgtctgaggagctggatggagtgggcgtgtccatcggcagcgccatccacacccagctgcggagctctgtgtaccccctgctggccgctgtgggcagcctgggccaggtgctgcaggtgtctgtgcaccacctgcagaccctgaatgccaccgtggtggagctgcaggccggccagcaggacctggagcccgccatccgggagcaccgggaccggctgctggagctgctgcaggaggcccgctgccagggcgactgtgccggggccctgtcctgggcccggaccctggagctgggcgctgacttcagccaggtgcccagcgtggaccacgtgctgcaccagctgaagggcgtgcctgaggccaacttcagctccatggtgcaggaggagaacagcaccttcaatgccctgcctgccctggccgccatgcagaccagctctgtggtgcaggagctgaagaaggctgtggcccagcagcctgagggcgtgaggaccctggccgagggcttccctggcctggaggccgccagccgctgggcccaggccctgcaggaggtggaggagagcagccggccctacctgcaggaggtgcagagatatgagacctaccgctggatcgtgggctgtgtgctgtgcagcgtggtgctgtttgtggtgctgtgcaacctgctgggcctgaacctgggcatctggggcctgagcgccagagatgaccccagccaccctgaggccaagggggaggccggggcccgcttcctgatggccggcgtgggcctgtccttcctgtttgctgcccccctcatcctgctggtgtttgccaccttcctggtgggcggcaatgtgcagaccctggtgtgccagagctgggagaatggagagctgtttgaatttgctgacaccccaggcaacctgccccccagcatgaacctgagccagctgctgggcctgaggaagaacatcagcatccaccaggcctaccagcagtgcaaggagggcgccgccctgtggacagtgctgcagctgaatgacagctatgacctggaggagcacctggacatcaaccagtacaccaacaagctgcggcaggagctgcagagcctgaaggtggacacccagagcctggacctgctgagcagcgctgcccggcgggacctggaggccctgcagagcagcggcctgcagaggatccactacccagacttcctggtgcagatccagaggcctgtggtgaagacctccatggagcagctggcccaggagctgcagggcctggcccaggcccaggacaacagcgtgctgggccagaggctgcaggaggaggcccagggcctgaggaacctgcaccaggagaaggtggtgccccagcagagcctggtggccaagctgaacctgtctgtgcgggccctggagagcagcgcccccaacctgcagctggagaccagtgatgtgctggccaacgtgacctacctgaagggggagctgcctgcctgggccgcccgcatcctgagaaatgtgtctgagtgcttcctggcccgggagatgggctacttcagccagtatgtggcctgggtgcgggaggaggtgacccagagaattgccacctgccagcccctgagcggggccctggacaacagcagggtcatcctgtgtgacatgatggctgacccctggaatgccttctggttctgcctggcctggtgcaccttcttcctgatccccagcatcatctttgctgtgaagaccagcaagtacttccggcccatcaggaagaggctgagcagcaccagcagcgaggagacccagctgttccacatcccccgggtgaccagcctgaagctgtag

SEQ ID NO: 64125 - DNA, 2358 bp, Artificial Sequence
  derived and/or modified sequence
atgaagcacaccctggccctgctggcccccctgctgggcctgggcctgggcctggccctgagccagctggccgccggggccacagactgcaagttcctgggccctgctgagcacctgaccttcaccccagctgcccgggcccgctggctggccccccgggtgcgggcccctggcctgctggacagcctgtatggcaccgtgcggcgcttcctgtctgtggtgcagctgaaccccttccccagcgagctggtgaaggccctgctgaatgagctggcctctgtgaaggtgaatgaggtggtgcgctatgaggccggctacgtggtgtgtgctgtgattgctggcctgtacctgctgctggtgcccacagctggcctgtgcttctgctgctgccgctgccaccggcgctgtggcggccgggtgaagacagagcacaaggccctggcctgtgagcgggccgccctgatggtgttcctgctgctgaccaccctgctgctgctgattggagtggtgtgtgcctttgtgaccaaccagaggacccatgagcagatgggccccagcattgaggccatgcctgagaccctgctgagcctgtggggcctggtgtctgatgtgccccaggagctgcaggccgtggcccagcagttcagcctgccccaggagcaggtgtctgaggagctggatggagtgggcgtgtccatcggcagcgccatccacacccagctgcggagctctgtgtaccccctgctggccgctgtgggcagcctgggccaggtgctgcaggtgtctgtgcaccacctgcagaccctgaatgccaccgtggtggagctgcaggccggccagcaggacctggagcccgccatccgggagcaccgggaccggctgctggagctgctgcaggaggcccgctgccagggcgactgtgccggggccctgtcctgggcccggaccctggagctgggcgctgacttcagccaggtgcccagcgtggaccacgtgctgcaccagctgaagggcgtgcctgaggccaacttcagctccatggtgcaggaggagaacagcaccttcaatgccctgcctgccctggccgccatgcagaccagctctgtggtgcaggagctgaagaaggctgtggcccagcagcctgagggcgtgaggaccctggccgagggcttccctggcctggaggccgccagccgctgggcccaggccctgcaggaggtggaggagagcagccggccctacctgcaggaggtgcagagatatgagacctaccgctggatcgtgggctgtgtgctgtgcagcgtggtgctgtttgtggtgctgtgcaacctgctgggcctgaacctgggcatctggggcctgagcgccagagatgaccccagccaccctgaggccaagggggaggccggggcccgcttcctgatggccggcgtgggcctgtccttcctgtttgctgcccccctcatcctgctggtgtttgccaccttcctggtgggcggcaatgtgcagaccctggtgtgccagagctgggagaatggagagctgtttgaatttgctgacaccccaggcaacctgccccccagcatgaacctgagccagctgctgggcctgaggaagaacatcagcatccaccaggcctaccagcagtgcaaggagggcgccgccctgtggacagtgctgcagctgaatgacagctatgacctggaggagcacctggacatcaaccagatccagaggcctgtggtgaagacctccatggagcagctggcccaggagctgcagggcctggcccaggcccaggacaacagcgtgctgggccagaggctgcaggaggaggcccagggcctgaggaacctgcaccaggagaaggtggtgccccagcagagcctggtggccaagctgaacctgtctgtgcgggccctggagagcagcgcccccaacctgcagctggagaccagtgatgtgctggccaacgtgacctacctgaagggggagctgcctgcctgggccgcccgcatcctgagaaatgtgtctgagtgcttcctggcccgggagatgggctacttcagccagtatgtggcctgggtgcgggaggaggtgacccagagaattgccacctgccagcccctgagcggggccctggacaacagcagggtcatcctgtgtgacatgatggctgacccctggaatgccttctggttctgcctggcctggtgcaccttcttcctgatccccagcatcatctttgctgtgaagaccagcaagtacttccggcccatcaggaagaggctgagcagcaccagcagcgaggagacccagctgttccacatcccccgggtgaccagcctgaagctgtag

SEQ ID NO: 64126 - DNA, 2505 bp, Artificial Sequence
  derived and/or modified sequence
atgaagcacaccctggccctgctggcccccctgctgggcctgggccttggcctggcactgtctcagttggctgcgggggcaacagactgcaagttcctagggcccgcggagcacttaacattcaccccagccgctagggctaggtggcttgcccctcgggtaagagcacccggtcttcttgactcattgtatggaacagtaagaaggtttctgagcgtcgttcagctgaatcctttcccttcagagcttgtgaaggctcttctgaatgagctggcatccgtaaaagtaaatgaggtggtccgatacgaggctggatacgtggtctgcgctgtgatcgccggcctctacctgctccttgttcctaccgccggcttgtgcttttgctgctgcaggtgtcacagaaggtgtggcggcagagtcaagacggaacacaaagccctggcatgcgagcgtgctgccttgatggtgttcctcctgctgaccaccctcctgcttttgatcggggttgtctgcgccttcgtgaccaaccagaggacccacgaacaaatggggccctcaattgaggccatgccagagaccctcctgagcctttgggggttggtttccgacgttcctcaggaattgcaggctgtcgcccagcagttctctctcccacaggagcaagtatcagaggaacttgatggagtgggagtcagtattgggagcgctatccacacccaactgagatctagcgtctatcccctgttggcagcagttggcagtctaggccaggtgctccaggtgagtgtgcatcacctgcagacactaaatgccactgttgtggagctccaggcagggcagcaggacctggaaccagcgattcgggagcaccgtgaccgccttttagaactgctgcaggaagcaagatgtcagggagactgtgctggtgccctgagctgggcccggacgctggaactcggagcagacttctctcaggtcccaagtgtggatcacgtgctacaccagctgaaaggcgttcctgaagcaaacttcagttctatggtacaagaggagaactctaccttcaacgctctgccagctctcgccgcaatgcagaccagcagtgtagtgcaggagctgaagaaggccgttgcacagcagcctgagggtgtacggacgcttgctgaaggctttcctggattggaggctgccagcagatgggcccaggcactgcaggaagtcgaagagtcctcccgaccatatttgcaggaagtgcagcgctacgaaacctatcggtggatcgtcggatgtgtcctgtgctccgtggtactatttgtggtactgtgtaatctgctggggctcaatctgggaatatggggcttgagcgcccgcgatgatcctagtcacccagaggccaaaggggaggccggggcgagatttcttatggctggagtcggtttatcattcctttttgcagcccccctgatcctgcttgtgtttgctactttcctcgtggggggtaacgtgcagacccttgtatgtcaatcctgggaaaacggtgaactttttgaatttgctgatactcctgggaacctgcctccctcaatgaacctgagtcagttgctgggactgcggaaaaacataagtattcatcaggcatatcagcagtgcaaagagggggcggctctgtggactgttctccaactgaatgacagctacgacttggaagaacaccttgatataaaccagtacacaaacaaactgaggcaggaactgcagtcactgaaagtcgatacccaatccctggaccttctttcctctgcagcacggagggacctggaggctctgcaaagcagtggtttgcaaaggatccactacccggatttcctggtccaaatccaaagacctgttgtgaagacgagcatggagcaactggctcaggagctgcaaggcctcgcacaggcccaggacaacagcgtgctgggacagaggttgcaagaagaggcacagggactgaggaatctgcatcaggagaaggtggtcccccagcagtctctggtggccaagctgaatttatccgtcagggctctagagtcatccgctcccaacttacaattggaaacctccgacgtgctggccaacgtaacctacctaaagggcgaactgcccgcctgggcggcacggatactgcgcaacgtttcagagtgctttctggcccgcgagatggggtacttcagccagtatgtggcatgggtccgagaggaagtgacccagcgtatagctacctgtcagcctctctctggcgccctagacaattctagagtgatcctgtgcgatatgatggctgacccatggaacgctttctggttttgtctggcttggtgtacgttcttcctgatccccagcataattttcgccgtgaaaacctccaaatatttcagaccaatcaggaagcgtttatcttctacctccagcgaggaaacccagctgttccatatcccccgcgtgacatcattgaagctatag

SEQ ID NO: 64127 - DNA, 2505 bp, Artificial Sequence
  derived and/or modified sequence
atgaagcacaccctggccctgctggcccccctgctgggcctgggcttgggcctagcgttatctcagctagcggcgggggctacagattgcaaatttttgggccccgccgagcacctgacattcacacccgccgccagggcgaggtggcttgccccccgcgtgagggcgcccgggctgctcgacagtctctatggtactgtgcggcgcttcctgtccgtcgtccagctaaacccatttccatctgaactcgttaaagctcttcttaacgaattggcctccgtgaaagtgaacgaagtggttcggtatgaggccgggtatgtcgtgtgtgcggttatagccggtctctatcttctgctcgtccctactgccggactgtgtttttgctgttgtagatgtcaccgaagatgtggcggtagagtaaagactgagcacaaagcactggcctgcgaacgggctgctttgatggtgttcttgctcttgaccaccctcctcctgctgattggagtggtgtgtgccttcgtgaccaaccagcgaacccacgagcaaatgggaccatccattgaggccatgcccgaaacccttctgtccctgtggggcttagtcagcgacgtgccccaggaactccaagccgtcgctcagcagttcagcttaccgcaggaacaggtctctgaagagctggacggtgttggagtgagcatcgggagtgccatccatacgcagctgcgcagttccgtgtaccctctgctcgccgcagtaggctctctgggccaggtcttgcaagtgtcagtgcaccacctgcagacattaaatgccacagtggtagagctgcaggcgggccagcaggatttagaacctgcaatccgcgaacaccgcgacagactgctggaactgcttcaggaggcacggtgccagggcgattgcgccggggcactgagctgggcacgaacgctggagctaggcgccgatttctcccaggtccctagcgtggatcacgtgttacatcagctcaagggagtgcccgaagcaaacttctcgtctatggtccaggaggagaacagcactttcaacgcactgcctgccttggcagccatgcagacatcctcggtggttcaggagttgaaaaaagctgtggctcagcagcctgaaggggttagaacgcttgccgaggggtttcccggtctagaggcagcatccagatgggcccaagcactgcaggaggtggaggaaagctcacgcccttacttgcaggaagtgcaacgatacgaaacttaccggtggattgtgggctgtgtcctctgctcggtggtacttttcgtggtgctctgtaacctgctgggcctcaacctcggaatttggggtctatccgcacgagatgatccctcccacccggaggccaaaggcgaggccggagctagattcctgatggctggcgttgggttgagcttcctatttgctgcccctcttattctcttggtctttgctacatttttggtaggtggaaacgtgcaaacgctggtgtgtcagagctgggagaatggcgagctgttcgagtttgcagacacacccggcaatctgcccccaagtatgaacttgtcgcagctcctgggcctgcggaagaacatctcaatccatcaggcttatcagcaatgtaaagaaggcgcagccttatggaccgtgcttcagctcaacgactcctatgatctggaagagcacctcgacatcaatcagtacacaaacaaactgagacaggaactgcagtccttaaaggtggacacacagtcccttgatctcctctcttctgccgcaaggcgggatctggaggcccttcagtcatccggattgcagcgaatacattatcctgatttcctggttcagatccaaaggccagtggtgaaaacctccatggagcagttggcgcaagagcttcagggcctcgcccaggcacaggacaattccgttctcgggcagaggctgcaggaggaggctcagggtttgcggaacttgcatcaggagaaagttgtgcctcagcagagcttagtggctaagctcaacttgagcgtcagggcactcgagtcatcagcacctaatctgcagctggagacatctgacgtgctcgctaatgtcacctacctgaaaggagagctgccagcttgggctgcacgcattctgcgcaacgtatcggagtgtttcttggctagagagatgggctacttctctcaatacgttgcatgggtgagggaggaggtgacgcagcgcatcgccacttgtcagcccctgagtggtgcgctggataactctagggtcatcctctgtgatatgatggccgatccatggaacgcattttggttctgcctggcatggtgtactttttttctgatcccgtccatcattttcgctgtgaagaccagcaagtatttccgacctatcagaaagagactgagcagcacgtcgtccgaagaaacccaactgttccacattccgcgtgtgactagcctgaagctttag

SEQ ID NO: 64128 - DNA, 2505 bp, Artificial Sequence
  derived and/or modified sequence
atgaagcacaccctggccctgctggcccccctgctgggcctgggccttggcctagccctgtctcagctagccgcgggcgccacagactgtaaatttctcggacctgcagagcacttaactttcaccccagcggcacgtgcgagatggctggcccctcgggtcagggcacctggcctgctcgattctctttatggtactgtcaggcgtttcttaagtgttgtgcagctcaacccctttcctagtgagttagtgaaagccctgcttaacgagctggcgtccgtaaaggtgaacgaggttgtgcgttatgaagccggctacgtggtgtgtgctgtaatcgccggactttatctccttctggtccccaccgccggcctgtgcttctgctgctgccggtgccaccggagatgtggcggacgggttaagaccgagcacaaagctcttgcttgcgagcgggctgccctcatggtttttcttttgctgacaaccctactgctgttaatcggtgtggtgtgtgctttcgtgacaaaccagaggactcacgagcagatgggcccaagcattgaggccatgcccgaaactctactctcgctgtgggggttggtgagtgacgtcccacaggaactgcaggccgtggcccagcaatttagtctaccacaggagcaggtgtccgaagagctcgatggggttggcgtgtctatcggctcagccatacatacgcagttgaggagctcagtttacccactgctggccgctgtcggctcccttggacaggtgcttcaagtcagcgtgcaccacctccagacactgaatgccaccgtggtggagctgcaagcaggccaacaggacctcgagcccgctatccgtgaacatcgggaccgccttctggaactgctgcaggaggcaagatgccagggagactgcgcgggagccctgagctgggccagaactctcgagctgggcgccgacttctcccaggtcccatcggtcgaccatgttctccaccagctcaagggggtccctgaagcaaatttcagctccatggtccaggaggaaaacagtacattcaatgcactgccggccctggcagcaatgcagacatcaagtgtggtccaggagttgaagaaggctgtcgcacaacagccagagggcgtgcggaccttggcagaagggttccccggtctagaagcagctagccggtgggctcaggccctccaagaggtggaggagagttcacgcccttatctccaggaagtgcagcgctatgaaacttatcgatggatcgtaggatgcgtcctttgttccgtggtcttgtttgtcgtgctgtgtaacttgctcggactgaatctggggatttgggggttgtctgcgcgagatgatccttctcatcctgaggcaaagggagaggccggagctaggtttcttatggccggggtaggtttgtcgtttctgttcgccgcacccctgattctccttgtttttgccacctttttggtgggtgggaatgtgcagacccttgtgtgccagagctgggagaacggggagctctttgaatttgccgacacaccggggaacctgccacccagcatgaacttaagtcagcttctggggcttcgtaaaaacatcagcatccaccaagcataccagcagtgcaaggagggtgcagccctttggactgtcctgcagttgaatgacagttacgaccttgaagaacacctggacatcaatcagtatactaacaagttacggcaagaactccaaagcttaaaagtcgatacccagagccttgatcttttgagctcagcggcgagaagggaccttgaggccctccagagctcaggcctgcaacggatccattatcccgatttcctcgtgcagatacagcggccggtcgtcaagacctccatggagcagctggcccaggagctgcaaggccttgctcaagcacaggataattctgtcctagggcaaagattgcaggaggaggctcaaggacttcggaatttacatcaggagaaggtcgtgcctcaacaaagtctggtcgctaaactgaatttatctgtacgtgccctggaaagttctgcgcctaacctacaacttgaaacttccgacgtcctggctaatgtgacatacctgaagggggagctaccggcatgggccgcccgaatcttgcggaacgtgtccgagtgttttctggctagggagatgggttatttctcccagtatgtggcttgggttcgggaggaggtaacccaaagaatcgcaacatgccagccccttagcggagcactggataattcccgtgtcatcctgtgtgatatgatggccgacccatggaatgcgttttggttttgtttagcctggtgcacgttcttcttgataccaagtatcatctttgccgtcaaaacatccaagtatttcaggcctattcggaagagactgtcttccacttcctcagaggaaacccagctgttccatatccccagagtaacctccctgaagctctag

SEQ ID NO: 64129 - RNA, 2505 nt, Artificial Sequence
  derived and/or modified sequence
augaagcacacccuagcauugcuggccccccuccuuggccucgggcugggucucgcccugucucagcuggcugcuggagcuacugauugcaaauuccuugguccugcggagcaccugacauucaccccugcagccagggcucgcuggcuggccccucgcguucgugcuccuggacuucuggacagccuauacgggacggugagaagauuucugagcguggugcaguuaaaccccuucccuucugagcucgugaaagcccugcucaacgagcuagcaucagucaaggucaacgaaguuguuagguaugaagcuggguauguggucugcgccguuauugcagggcuauaccugcuuuuggugccuacggcuggacuguguuucugcuguuguaggugucacagacgcuguggcggacgcgucaagacugaacacaaggccuuagccugcgagagggccgcgcuuauggucuuucuccuccugaccacccuccuucuucucauuggcgucgugugcgcuuucguuaccaaccagcgcacgcaugagcagaugggccccagcauagaggcgaugccagagacccuccuuucgcuguggggacuggugucugacgugccccaggaauugcaggcugucgcucagcaguucagccucccccaggaacaggucuccgaggaacuggaugguguuggcguuucaaucgggagugcuauccauacacaacugcgauccagugucuauccgcugcuggccgcagugggcucgcugggccagguucuucagguaucagugcaccacuugcaaacuuugaacgcaacagucguggagcuccaggcugggcagcaagaccuugagccugcaauuagggaacaccgggaucgacugcuggaacuucugcaggaagcaaggugucagggugacugcgccggcgcuuugaguugggcaagaacccuugaguugggggccgacuuuucucagguacccagcguugaucacgugcuacaucagcuuaagggcguccccgaagccaauuucuccucaauggugcaggaggaaaauuccacauucaacgcccucccugcccuugcugcuaugcagacaaguuccgugguacaggaauugaaaaaggccguagcucagcagccagagggggugagaacacuggccgagggauuucccgggcuugaggcugcaagcagaugggcgcaggcuuugcaagaagucgaggagucgucucggccauaucuucaagaggugcagcgcuacgaaacuuaucgauggaucguuggauguguacucugcucggugguacuguucgugguucuuugcaaucuguuagggcuuaaccugggaauuuggggccugucagcccgcgaugacccuucccauccggaagccaaaggcgaggcuggagccagguuccuuauggcuggaguuggacuuaguuucuuauucgcagccccacugauacuccuaguuuucgccaccuuuuuaguggggggaaacguucaaacacucgugugucaguccugggagaauggcgaacuguuugaauucgccgauaccccggggaaccugccccccucgaugaaccuuucccagcugcuuggacugcguaagaacaucucuauccaccaagcuuaucagcaaugcaaggagggugcugcucuguggacuguguugcaacuuaaugauagcuaugacuuggaggaacaccuugauaucaaccaguacacaaacaagcuuaggcaggaacuacagagccuuaagguagacacgcagagccuggaccuacuuuccucagcugcucgucgcgaucuggaggcuuugcagucaaguggacuacaacggauucacuacccagacuuucuuguacagauucaacgccccguggugaaaaccucuauggagcagcucgcacaagaguuacagggccuugcucaggcccaggacaauagcgugcucgggcagcgucugcaagaggaggcccaaggacugcggaaucuucaucaggaaaaaguuguaccacagcagucucuggucgcaaagcuuaaccucucugugcgugcccucgaguccuccgcccccaaucugcaauuagaaacaagcgacguccuagccaauguaaccuaucuuaagggagagcuccccgcaugggcugcuaggaucuuacgcaacguaagugagugcuuccuggcucgagagaugggguauuuuagccaguauguggccuggguccgcgaggaagugacacagcguauugcgacuugucaaccucuguccggcgcuuuagauaacucuagagucauucucugcgauaugauggccgacccauggaacgcauuuugguuuugccucgcuugguguaccuucuuucucauucccagcaucauuuucgcggucaaaacuagcaaauauuuuagacccauccggaagcgacuauccucaacauccuccgaagagacgcagcuguuucauaucccucgugugaccagucugaaacuauag

SEQ ID NO: 64130 - RNA, 2505 nt, Artificial Sequence
  derived and/or modified sequence
augaagcacaccuuggcuuugcuugccccucuguugggacuaggguuaggcuuggcucuuucucaguuggcugccggcgcgacugacugcaaguuucugggacccgccgagcacuuaaccuucaccccagccgcuagggcucggugguuagcuccacgcgucagggcuccuggcuuacucgacagcuuguacggcacuguccggcgguucuugucuguuguacagcuuaacccguuuccuagcgaacuugucaaggcccugcuuaaugagcuggccagugugaaaguuaaugaagugguaagguacgaggcaggcuacgucgucugugcagugauagcuggacuguaccuguuauuggugccgacugcaggguuauguuuuugcugcugccgcugucauagacgcuguggggggcggguaaagacggaacauaaggcgcuggcgugugaaagggccgcgcugaugguauucuugcuccucacuacacuccuuuugcuuauuggaguugugugugccuucgucacuaaucagcgaacccacgagcagaugggcccaucuauugaggcaaugccggagacgcugcuuucauuguggggccugguaucugaugucccucaggaacuucaggcagucgcucagcaguucagccugccucaggagcaagucagugaagagcuggauggggucggcgucaguaucgggagcgcuauucauacgcaguuaagguccuccguuuacccccuauuagcugcugugggcucccugggacagguauugcaagucagcgugcaucaucugcagacucugaacgccacagugguagagcugcaagcuggccaacaagaccucgagcccgccauccgugaacacagagauagauugcuggaacugcuacaggaagcacguugccaaggggauugcgccggggcccucucaugggcgagaacucuggagcuuggggccgacuucagucaggugccuucaguugaccaugugcugcaccagcuaaaaggcguacccgaagccaacuuuuccaguaugguucaagaagagaauucuaccuucaaugcucuuccugcccucgccgcaaugcaaacuucuuccguggugcaggaguuaaaaaaggccguggcgcagcagccugagggugugcguacccuggccgagggauuuccugggcucgaggccgcuucccgcugggcccaggcgcugcaggaagucgaagaaagcucccggccuuaccuccaggagguccagcgauacgaaacuuaccguuggauugugggauguguccucugcuccgugguacuguucgucguguuauguaaccugcugggacuaaaucugggcauuuggggcuugucagcccgggacgaccccagucacccugaggcaaaaggagaagcuggggcuagguuuuugauggccggcguugggcuuucuuuuuuauuugccgcuccacugauucuccucgucuuugccaccuuucuugucggagggaauguacagacucugguaugccaguccugggagaacggagagcuuuucgaauucgccgauacaccagggaaccuaccccccuccaugaacuugucacagcuguugggccuccgcaagaacauuaguauccaccaggccuaccagcaguguaaggagggugcugcccuauggacugugcugcagcuaaaugauucauacgacuuagaggagcaccucgacauaaaccaguacacgaauaagcuacgccaagagcuccagucccugaagguggauacccagucucuggaccugcuuuccagcgccgcacggagagacuuagaggccuugcaguccaguggucuccagcguauccacuaucccgauuuucuggugcaaauccagagaccuguggugaaaacaucuauggagcagcuggcgcaggaauugcaaggcuuagcccaggcucaggauaacagcguccucggacagcggcuccaggaggaagcucaaggccugcggaaccugcaucaggagaagguaguaccucaacagucccucgucgcaaagcucaauuugagugugcgagcccuagaauccagcgcuccaaacuuacaacuugaaacuagugauguccucgcaaacgucaccuaucuaaagggcgagcucccugccugggcagcccggauucugcgcaaugugagcgagugcuuccuagcuagagagaugggguauuucucccaguacguggcauggguucgcgaagagguuacacaaaggauugcgacuugucagccacugaguggagcgcuagauaauagccgaguaauccugugcgauaugauggccgacccguggaacgcauucugguucugccucgcuuggugcaccuuuuuccuuauucccaguauuauuuucgcugugaagacuuccaaguauuucagacccauccguaaaaggcuguccuccacaucuuccgaggaaacucagcuguuucauauaccccgugugaccucgcucaagcucuag

SEQ ID NO: 64131 - RNA, 2505 nt, Artificial Sequence
  derived and/or modified sequence
augaaacauacacuggcucuguuggcaccacuguugggauuaggucuaggauuggcacuaucucaauuagcugcuggcgcaaccgacuguaaguuccucggcccagccgaacaucucaccuuuacuccugccgcucgagccaggugguuagcgccuagggugagagcacccgggcugcuggauucacuguaugguaccgugcgccgcuuucugucagucguccaguugaauccauuuccaucggagcuagucaaagcacuguugaacgaacucgcaagcguuaaaguaaacgagguggugagguacgaagcuggcuacguggugugcgcuguaaucgccggguuguaccugcuccucguucccaccgcaggguuguguuucuguuguuguagaugccaucgacgcugcggaggacgaguaaagaccgaacauaaggcccuggcuugcgaacgcgccgcucugaugguguuccugcuucuuacaacucuauuacugcucauaggaguggugugcgccuucgugacaaaucagcgaacacaugagcagaugggacccagcauagaggccaugccagagacucugcucucucucugggggcugguauccgaugucccccaggagcugcaggccguugcccagcaguuuucgcucccccaggaacaggucagcgaagaacuugauggcgugggugucucaaucggcucugcuauccacacccaacucaggucaagcgucuauccucugcucgcugcagugggcagucuaggacagguucuccaggugucagugcaucacuuacagacauugaacgcuacagucguggaacuccaggcaggucagcaagaucuggaaccugccauacgagagcaucgugacaggcuccuggaacuccugcaggaggcccgcugccagggagacugugccggagcgcugagcugggcucguacacucgagcugggagcagacuuuucccagguucccaguguagaccaugugcuccaccaguugaaggggguaccugaagcuaauuuuucauccaugguccaggaagagaacuccacuuucaaugcccuuccagcgcuggccgcuaugcagacuagcucaguggugcaggagcucaaaaaagcuguggcucaacagccagagggcguucgcaccuuagcugaaggauuuccuggccucgaagccgcuagcaggugggcccaagccuuacaggagguagaagaguccucacggccuuacuugcaagaaguccagagguacgagacuuaucgguggauuguaggaugugugcuaugcuccguggucuuguuuguggugcugugcaaccugcugggucucaaccucgguaucuggggccugucagcuagagacgaucccucucaucccgaggcaaaaggagaagcuggggcucgcuuucuaauggccggcguaggccuuuccuuucuguuugcugccccccugauccuacugguguuugcaacauucuuagucggugguaacguccagaccuuagugugucagagcugggagaauggcgagcuguucgaguucgcugauacucccggaaaccugccacccucaaugaaucucucucaguugcuuggacuacggaagaacaucaguauacaccaagcuuaucagcaaugcaaagaaggcgcugccuuguggaccguguugcagcugaaugacaguuaugaucuggaggagcaccuagauaucaaccaguacaccaacaaacugcgccaggaguugcagagucugaagguggacacacaaucccuggaucuccugucuagcgccgcccggagggaucuggaagccuugcagucuaguggcuuacagaggauucauuacccugacuuucuggugcaaauucagcggccaguggugaaaacgucuauggagcaacuggcccaggaacuacagggacucgcucaagcccaggauaacucuguguuaggucagcguuugcaggaagaagcucaggggcugagaaaucugcaccaggagaaggucgucccccagcagucuuuaguggcuaaacugaaucugucagugagggccuuggagagcagcgccccaaaccugcagcuugaaacuagcgacguguuggcuaaugucacuuacuuaaaaggagaguuacccgcgugggcagcacgcauccugagaaacguaucugaguguuuccucgcgagggaaaugggguacuuuucacaguaugucgcuuggguacgggaggaggucacucagaggauagcaaccugucaaccucugucaggagcauuagacaacagcagggugauccugugcgauaugauggccgacccauggaacgcguuuugguuuugucucgcauggugcaccuucuuucucauuccauccauuaucuuugcggugaaaaccuccaaguacuuccgcccuauucguaagaggcucagcucaacaaguagugaggagacccagcuguuucacaucccucgaguaacgucgcugaaacucuag

SEQ ID NO: 64132 - RNA, 2358 nt, Artificial Sequence
  derived and/or modified sequence
augaagcacacuuuggcucuacuggcuccacugcucggccuggggcugggcuuggcgcugucacagcucgcugcuggagcuaccgauugcaaauuucucggccccgcggagcaccuuacauuuacacccgccgcuagagcaagguggcucgcucccagggucagagcccccggacucuuggacagucuguacggaacaguccggagauuuuuaaguguaguucaauugaacccuuucccuagcgaacuuguuaaggcguugcucaacgaguuggccucuguuaagguuaacgaagucguaagauacgaagcuggguacguugucugugcggugauugcgggacuguaccuccugcucgugccgaccgcuggucuuugcuuuuguuguugccgcugccaccguaggugugguggacgggugaagacggaacauaaagccuuagcuugcgaacgcgccgccuugaugguguuccugcuacuuaccacccucuugcuacugauagguguugucugcgcuuuugugacaaaccagagaacacacgaacaaauggggccuucuaucgaagcuaugccagagacucugcuuagucuauggggauuaguguccgauguaccucaggaacuucaggcuguggcccaacaauucagucucccccaggagcaaguaucagaggagcuggauggaguuggugugucgauuggguccgccauccacacacaguugagaucuagcgucuacccccugcuggcagccguggggucccugggacagguucugcaagugucaguucaccaccugcagacauugaaugccacagucguggaacuacaagcgggccagcaagauuuagaaccugccauucgagagcaucgugacaggcuccuugaguugcuucaggaagcgcgaugccaaggagacugcgccggcgcacucaguugggcgaggacauuggagcugggcgcagacuucucacaagugccauccguggaccacguccugcaccagcucaaagguguacccgaagccaauuucaguaguaugguccaggaagaaaauagcacuuuuaacgccuuaccugcacuggcagccaugcagacaaguaguguggugcaggaacugaaaaaggcugucgcccagcagccugaagggguccgaacgcucgccgaagguuuuccuggccuggaggccgcgucccgaugggcucaggcguugcaggaaguugaggagaguucucgccccuauuuacaagaaguucagcgcuacgaaacauaccgcuggaucgucgguugugugcucugcaguguggugcucuuuguaguccugugcaaccugcugggucugaaucuaggaaucuggggauuaucagcuagagaugaccccucccacccugaagcaaagggcgaagcaggagcuagguuucugauggcuggcguggggcuguccuuccuuuuugcagcuccccuaauacucuuaguuuucgccaccuuucucguuggggggaaugugcagacacucgugugccagagcugggaaaacggcgagcucuuugaguucgcugacacuccaggaaaucucccccccucaaugaauuuaagccaacuauugggccuccgaaaaaacauuucuauacaccaggccuaucagcagugcaaggagggcgcagcacuauggaccguucuucagcugaacgacuccuaugaucuggaggagcacuuagauauuaaucagauccagcgcccgguggugaaaacaucaauggaacaauuggcacaggaauugcaaggccuggcccaggcccaggauaacucugugcuggggcagagacuccaggaggaggcacaaggucugcgaaauuuacaucaggaaaaaguagugccucagcagucccucguagcaaaguugaaucuuagugugagggcucuggaaucauccgcccccaaccuacaacuggagacgagcgacguucuggccaacguuacguaccucaaaggcgaacugccggcaugggcagcccguauuuuacgaaauguaagcgaauguuuucucgcacgcgagaugggcuacuucucacaguauguggccugggugcgugaggaggugacacaacgaaucgccacuugccagccucugagcggcgcgcuggauaacucccgcgugauccucugcgacaugauggcggaucccuggaaugcguucugguucuguuuggccugguguaccuuuuucuuaauuccaaguauuaucuucgccguuaagacauccaaguauuucaggcccauccgcaaacgacuuuccaguacauccucagaagagacucaacucuuucauauaccaagaguuacaagccugaagcuuuag

SEQ ID NO: 64133 - RNA, 2505 nt, Artificial Sequence
  derived and/or modified sequence
augaagcacacacuggcccugcuggcaccucuccugggucugggacuuggucucgcacugucacagcuugccgccggcgcaaccgauugcaaauuucucgggcccgccgagcauuuaacuuuuaccccagcugcucgcgcuagauggcuggcuccacgagugcgcgcccccggauugcucgauagcuuguaugggacagucaggcgguuucuaucgguuguucaacuuaacccauuccccucagagcuuguuaaagcuuugcugaaugaacucgccuccguuaaggucaaugagguugugagauacgaggccgguuaugucgugugugccgugauagcgggccuauaucuccuccucgugccaacugcuggacucugcuucugcugcugucgcugucaucgccguuguggugggagggucaagacggagcacaaagcccuggccugcgagcgugccgcacuuaugguuuuucucuugcucacgacgcugcuucuacugauugguguggucugugcauuugugacuaaccaaaggacgcacgaacagauggguccguccaucgaagcuaugccugaaacguuguuaagucucuggggucuggucagcgacguuccacaagaauugcaggcuguagcacagcaguuuagucuaccucaagagcaagugucagaagaacuggauggcgucggagucucuauuggcagugccauacacacacaauugcgaucaagcgucuacccucuucuugcugccgugggcucucuaggccagguucuccagguuucuguacaccaucuccaaaccuugaaugcaacaguggucgaacuccaggccggacagcaggaucucgagcccgcgauuagggagcauagggaucgauuacuggagcugcugcaggaggcacgaugucaaggagacugcgcaggagcccugagcugggcaaggacccuggagcugggugcagauuucucccagguccccagugucgaucacgugcuccaucagcugaagggcguaccagaggcuaauuucuccagcaugguacaagaggagaauaguaccuuuaaugcccuaccagcccuugcggcaaugcagacaaguaguguuguucaggaacucaaaaaggcaguugcacagcagccugaaggcgugcggacucucgccgaaggcuuccccggccucgaagcagcuucacgcugggcucaagcauugcaggaaguggaggaaaguagucggccauaccuccaagaaguacagagguacgaaacuuacagguggaucgugggauguguuuugugcuccgucguauuguuuguuguccuaugcaaucuccugggucuaaaucuggggaucuggggccucagcgcucgcgaugauccaucucacccagaggccaaaggugaagccggggcucgauuuuugauggcaggggucggauuaucauuccuuuucgccgcaccauuaauacuguuagucuucgcuacguuccugguuggaggcaaugugcaaacccucgugugucaguccugggaaaauggugagcuuuucgaauuugcagauacaccaggaaaccugccccccucuaugaaucugagccaacuguugggccugcggaagaacaucuccauccaccaggcauaucagcaaugcaaggaaggugcugcacuuuggacugugcuacagcugaaugauucauaugauuuggaggagcaucuugacauuaaccaguauaccaacaagcucagacaggagcuucaaucauugaaaguagacacccagucuuuggaucuguuguccagcgcagcuagacgggacuuagaagcauugcaauccagcggucugcagcggauccauuauccagacuuucucgugcagauucagcggcccguggucaagacuucuauggaacaacucgcccaggaacuccagggccuagcccaggcucaggauaacucagugcucggucagcggcuucaagaggaggcccagggacugagaaauuugcaccaagaaaaggucguaccucagcagagucuggucgccaaguugaacuuaucugugagagcauuagaguccagugccccuaauuugcagcucgaaaccucagacgucuuagccaacguuaccuaccugaagggcgagcugccagcuugggcugcccgaauccuucguaauguguccgagugcuuucuggcucgggaaauggguuauuucucucaguaugucgccugggugcgggaagaagugacacaacggauugcgacuugccaaccucugaguggggcucucgacaauaguagaguuauacuaugugacaugauggcggacccguggaacgccuuuugguuuugccuggcuugguguacuuucuucuugauucccucuaucaucuuugcugugaaaaccucaaaauacuuuagaccuaucagaaagcgccugaguuccacauccagugaagaaacgcaguuguuccauaucccucgagucaccucucucaaacuauag

SEQ ID NO: 64134 - RNA, 2505 nt, Artificial Sequence
  derived and/or modified sequence
augaaacauacgcuggcccugcuagcacccuugcugggccugggacuaggucucgcuuugucacaacucgccgcaggcgccacagacuguaaauuucucgguccugcugagcaucucacauuuaccccagccgcccgugccagauggcuggccccucgcgucagagcgcccgggcuucuggacucccucuauggaaccguccgucguuuucuaagcguuguucaacugaauccauuuccuucggaguuggugaaagcccugcugaacgaacuggccucugugaaaguuaaugaggucgucagauacgaggcaggcuacguggugugcgccgucauugccggauuauacuuauuguuaguaccgacugccgggcucuguuuuugcugcugcaggugccauagaagguguggugggcgaguuaagaccgagcacaaagcccuugcuugcgagcgcgcagcccugaugguguuucugcugcugacaacccuccugcuucucauuggcgugguaugcgcuuucguuacaaaucagagaacacaugagcagaugggcccuaguauagaagcuaugccagagacucuucuuucccucuggggacuggucagcgaugugccucaggaacuccaggccguggcccagcaguucucauuaccccaggaacagguauccgaagagcucgauggggucggggugagcaucgguucagcaauucacacacaacucagguccuccgucuauccuuuacucgccgcagucgggucccuaggacagguccugcaggugagcguccaccaccuccagacccugaaugcuaccgucguugaguugcaggccggccagcaggaucuugagccagcaauccgugaacacagagaucgccugcuagaguuguuacaggaggcucguugucagggagacugugcuggugcgcuguccugggcacggacguuggaguuaggggccgacuuuagccagguaccaaguguugaccacguccuccaucagcugaaaggcguuccugaagccaauuucucauccaugguccaagaagagaacagcacauucaacgcccuaccugcucuagcagcuaugcagacaaguucugugguacaggagcucaaaaaggccgucgcccaacagccagagggugugcgaacacuggcggaaggauuccccggacuggaggcugcaucucgcugggcccaggcgcuacaggagguggaagaauccucuagaccuuacuugcaggagguccaacgcuaugaaaccuaucguuggauagucgggugcguucugugcaguguuguacucuucguggugcuaugcaauuugcuggguuugaauuugggaaucuggggacucucggcucgcgacgacccaucacacccugaggcuaaaggcgaggcgggggcgagauuucugauggcaggugucggcuugucguuccuguucgcagccccacugauauugcugguguucgcaacauuucugguugguggcaauguucaaacccuugucugucagucuugggaaaauggcgaguuauucgaguucgcugacacuccaggaaaucuuccaccgagcaugaaucugucucagcuucucggccuucgcaagaauauuaguauccaucaggccuaccaacaauguaaggaaggcgccgccuuauggaccguccugcagcucaacgauuccuacgaucuggaggagcaucucgauaucaaccaauauaccaacaaacuuagacaggagcuucaaucucugaagguugauacccagucucuggaccugcuuuccucugcggcgaggagggaucucgaagcuuugcaguccucaggauuacaaagaauccauuauccugacuuucugguacagauccagagaccaguaguuaagaccaguauggagcaauuagcgcaagagcugcagggucucgcucaggcucaggacaauucagucuugggacagaggcuucaagaagaagcucaaggucugcguaaccuccaucaggaaaaaguaguaccacaacaaucccuaguagccaaacuuaaccuaucaguacgggcucuggaaagcucagcaccuaaucugcaacuggaaaccuccgauguccuggccaaugugacauaucugaaaggagaacucccagcaugggcggcuaggauccugcgcaacguuucugagugcuuucuugcacgcgaaaugggauauuucagucaauacguagccuggguccgcgaagaagucacccagagaauugcuaccugccagccucuguccggugcucuagacaauagcagaguuauccuuugcgauaugauggcugauccguggaaugcuuucugguucugccuggccugguguacuuuuuuuuuaaucccauccaucauauucgcaguuaaaacgagcaaauacuuccgcccaauuagaaaacgucucuccagcaccucuagcgaggaaacccaauuguuucauauaccaagggucacaagcuuaaaacucuag

SEQ ID NO: 64135 - RNA, 2505 nt, Artificial Sequence
  derived and/or modified sequence
augaagcauacuuuagccuuacucgccccccugcuggggcugggucucggcuuggcccucucacagcucgcugccggcgcaacugacuguaaauuucucgggcccgccgagcaucuuacuuuuacucccgcugccagagccagguggcuugcaccccgcguccgcgcccccggacuccuugauagccucuacggaacuguucggagauucuuaaguguugugcaacucaaucccuuuccuuccgaacuggucaaagcacuauugaacgaauuggcuucggucaagguuaacgaggugguucgguaugaggcagguuacgugguaugugcggucauugcaggacucuacuuacuguuaguuccaaccgccggguugugcuuuuguugcugucgaugccacagacguuguggugguagagugaagaccgaacauaaggcccuugccugcgagcgugcugcacugaugguuuuccuacuucuaaccacacuccugcuccugauugggguuguuugcgcauuuguuaccaaucaaagaacccacgagcagauggguccaagcaucgaagccaugcccgagacuuuauuaucacucuggggacuggugagcgaugugccucaggaguuacaagcagucgcacaacaauuuucccucccccaagagcaggugucggaagaacucgaugggguuggcgucucuauaggaucagcgauccacacccaauugcgcagcucugucuacccccuccucgcugccgucggcucacuuggacaggugcuccaggugucuguucaccaucuacaaacccuaaaugcgaccgugguagaguuacaggcugggcaacaggacuuggaaccugcuauacgcgagcaucgagaccgucuacuugaguuguugcaggaggcccguugccagggggacugcgcaggcgccuugucuugggccagaacacuggaguugggggcugacuuuucccaagugccaagcguagaucacgugcuucaccagcuuaaggggguccccgaagccaauuuuucaagcauggugcaggaggaaaacucaacguucaaugcccuucccgccuuagccgcuaugcaaacaaguagcgucguucaggaacucaaaaaagccguggcacagcaacccgagggagugcgcacucuagccgaaggauuccccggccuggaggcagcuagucggugggcccaagccuuacaggagguagaagaguccucacggccuuacuugcaagaaguccagagguacgagacuuaucgguggauuguaggaugugugcuaugcuccguggucuuguuuguggugcugugcaaccugcugggucucaaccucgguaucuggggccugucagcuagagacgaucccucucaucccgaggcaaaaggagaagcuggggcucgcuuucuaauggccggcguaggccuuuccuuucuguuugcugccccccugauccuacugguguuugcaacauucuuagucggugguaauguucagacacuagucugucagucgugggaaaauggagaacucuuugaguuugcagauaccccagggaaucugccccccucuaugaaccuuucacaacugcugggacuaaggaaaaauauuucaauucaucaggcuuaccagcaaugcaaagaaggugccgcacuguggacugugcuucagcugaaugauuccuaugaccuggaagaacaccuggacauaaaucaauacaccaauaaguuacgucaggaacugcaaucucucaaggucgacacucagucacucgaucuccuuucuucugcagcuaggcgcgaucucgaagcccuucaaucuagcggacugcaaaggauucacuacccugacuuucuuguucagauucaacguccggucguaaagaccuccauggagcaauuggcccaagaacuacaggguuuggcucaagcacaggauaauuccguucucggacagcgccugcaggaggaagcucagggguugcggaaccuccaccaggaaaagguugucccccaacagucucuggucgcaaaacucaaccugucugugagagcacuugaaagcucggccccuaaccugcagcuagagaccuccgacguucuggcaaaugugacauaucugaaaggcgaacuccccgcaugggcugccagaauacugaggaaugucucagaaugcuuucuagcgagagagaugggcuacuucucacaguaugucgccugggugagggaagaggucacccagcguauugcuacaugucagccucuguccggugccuuagacaacucgcgugucauucuuugcgauaugauggccgacccauggaacgcauuuugguuuugcuuggcuuggugcacuuucuuucugauuccuucuauaaucuuugcggugaaaacguccaaguacuuccgccccauccguaaacgacugucaagcacuagcuccgaggaaacccaacuauuucauaucccaagaguuacgucucugaaacuuuag

SEQ ID NO: 64136 - RNA, 2358 nt, Artificial Sequence
  derived and/or modified sequence
augaagcacacacuggcacucuuggcuccauuacucggcuuaggguugggacuugcacugucacaacuggccgccggggcaaccgauuguaaauuucucggaccggcugagcaccugaccuuuaccccagcugcccgggccagauggcuggcuccccgcguucgggcuccaggauugcucgauucauuauacgguacagugagacgguuucucuccguggugcaacugaaccccuuucccagcgaacucgugaaagcgcugcuaaaugagcuggccucuguaaaagugaaugaaguaguuagauacgaagcuggguacguugucugugcggugauugcgggacuguaccuccugcucgugccgaccgcuggucuuugcuuuuguuguugccgcugccaccguaggugugguggacgggugaagacggaacauaaagccuuagcuugcgaacgcgccgccuugaugguguuccugcuacuuaccacccucuugcuacugauagguguugucugcgcuuuugugacaaaccagagaacacacgaacaaauggggccuucuaucgaagcuaugccagagacucugcuuagucuauggggauuagugagcgacguaccccaggaacuacaggcuguggcccagcaguuuucccugccccaggaacaagucagugaggaacuugauggagugggugugagcauaggaucugccauccauacucagcucagauccagcguuuauccuuuauuggcagcagucggcaguuugggacaagugcuucagguaagcguacaucaucugcaaacuuuaaacgccaccguggucgagcuucaagcaggacagcaggaccucgagccugccauuagagagcaucgggauaggcuccuugagcugcuucaagaggccagaugccagggcgacugcgcuggcgcccucaguugggcgcgaacacuugagcucggcgcagauuuuucccaggugccaucuguugaccauguccuccaccagcuuaaaggagugccagaggcgaacuucuccucaauggugcaagaagaaaauucuacauucaaugcucuccccgcucuagccgcaaugcagacaucuuccguggugcaggagcuaaaaaaggccguugcccagcaacccgagggggugaggacuuuggcugaaggguuuccgggccucgaagcagcgucgagaugggcccaagcccuucaggaaguggaagagagcagccguccauaccugcaggaagugcaacgcuaugagacguauagguggauaguagguuguguucucugcucuguagugcuuuuugugguucuguguaaccugcugggauugaauuuaggcaucuggggucuaucagcacgagacgacccaucucauccggaagccaaaggcgaggccggcgcaagguuucugauggccgggguuggauugucauuccucuucgccgcaccacugauucugcuaguguuugcaacuuuccuugucggggguaauguucaaacacucguuugccagagcugggaaaauggugaacuuuucgaauucgccgauacuccuggcaaucugccuccgagcaugaaucuuagucagcuguugggacugcgcaagaauauuucaauccaucaagcauaucagcaguguaaggagggggcugcauuguggaccgugcugcagcuuaacgauuccuaugaucuagaggaacaccucgacauuaaucagauccaaagacccgucgugaagacuucaauggaacaguuagcacaagaguugcaaggcuuggcucaggcccaggacaauagcguguuagggcaacgucuccaggaggaagcccagggcuugcgaaacuuacaccaggagaaaguugugccacagcagucacugguugccaaacugaaucuuagcgugagagcucuagagucguccgcaccaaacuuacagcuggaaacuuccgacgucuuggccaacguaaccuaccucaaaggagagcuuccggccugggcugcacgaaucuuacggaaugucucugaauguuuccuggcccgcgagaugggauauuuuucucaguacguugccugggugagagaagaggugacucaaagaaucgccaccugccagccacugagcggcgcacuggauaauucaagggugauacugugugacaugauggcugacccuuggaacgcuuuuugguucugucuagcguggugcacauucuuccucaucccuuccauuaucuucgcagucaagacauccaaauacuuuagacccaucagaaaaagacuuuccuccacaucuucagaggaaacccagcucuuccauauaccucgcguaacaucccucaagcuguag

SEQ ID NO: 64137 - protein, 1994 aa, Artificial Sequence
  derived and/or modified sequence
MVSEGSAAGRDFAGMEEVRQLHVRFCKGIKIWHQAWFLCSLLGREPQEREAGCQLWLCTLSAVLKVGWLFPLSEVPNFTLLKDGCGCWRLKEDQIYNAVRREETENTVGSLLHFLTKLPASETAHGRISVGPCLKQCVRDTVCEYRATLQRTSISQYITGSLLEATTSLGARSGLLSTFGGSTGRMMLKERQPGPSVANSNALPSSSAGISKELIDLQPLIQFPEEVASILMEQEQTIYRRVLPVDYLCFLTRDLGTPECQSSLPCLKASISASILTTQNGEHNALEDLVMRFNEVSSWVTWLILTAGSMEEKREVFSYLVHVAKCCWNMGNYNAVMEFLAGLRSRKVLKMWQFMDQSDIETMRSLKDAMAQHESSCEYRKVVTRALHIPGCKVVPFCGVFLKELCEVLDGASGLMKLCPRYNSQEETLEFVADYSGQDNFLQRVGQNGLKNSEKESTVNSIFQVIRSCNRSLETDEEDSPSEGNSSRKSSLKDKSRWQFIIGDLLDSDNDIFEQSKEYDSHGSEDSQKAFDHGTELIPWYVLSIQADVHQFLLQGATVIHYDQDTHLSARCFLQLQPDNSTLTWVKPTTASPASSKAKLGVLNNTAEPGKFPLLGNAGLSSLTEGVLDLFAVKAVYMGHPGIDIHTVCVQNKLGSMFLSETGVTLLYGLQTTDNRLLHFVAPKHTAKMLFSGLLELTRAVRKMRKFPDQRQQWLRKQYVSLYQEDGRYEGPTLAHAVELFGGRRWSARNPSPGTSAKNAEKPNMQRNNTLGISTTKKKKKILMRGESGEVTDDEMATRKAKMHKECRSRSGSDPQDINEQEESEVNAIANPPNPLPSRRAHSLTTAGSPNLAAGTSSPIRPVSSPVLSSSNKSPSSAWSSSSWHGRIKGGMKGFQSFMVSDSNMSFVEFVELFKSFSVRSRKDLKDLFDVYAVPCNRSGSESAPLYTNLTIDENTSDLQPDLDLLTRNVSDLGLFIKSKQQLSDNQRQISDAIAAASIVTNGTGIESTSLGIFGVGILQLNDFLVNCQGEHCTYDEILSIIQKFEPSISMCHQGLMSFEGFARFLMDKENFASKNDESQENIKELQLPLSYYYIESSHNTYLTGHQLKGESSVELYSQVLLQGCRSVELDCWDGDDGMPIIYHGHTLTTKIPFKEVVEAIDRSAFINSDLPIIISIENHCSLPQQRKMAEIFKTVFGEKLVTKFLFETDFSDDPMLPSPDQLRKKVLLKNKKLKAHQTPVDILKQKAHQLASMQVQAYNGGNANPRPANNEEEEDEEDEYDYDYESLSDDNILEDRPENKSCNDKLQFEYNEEIPKRIKKADNSACNKGKVYDMELGEEFYLDQNKKESRQIAPELSDLVIYCQAVKFPGLSTLNASGSSRGKERKSRKSIFGNNPGRMSPGETASFNKTSGKSSCEGIRQTWEESSSPLNPTTSLSAIIRTPKCYHISSLNENAAKRLCRRYSQKLTQHTACQLLRTYPAATRIDSSNPNPLMFWLHGIQLVALNYQTDDLPLHLNAAMFEANGGCGYVLKPPVLWDKNCPMYQKFSPLERDLDSMDPAVYSLTIVSGQNVCPSNSMGSPCIEVDVLGMPLDSCHFRTKPIHRNTLNPMWNEQFLFHVHFEDLVFLRFAVVENNSSAVTAQRIIPLKALKRGYRHLQLRNLHNEVLEISSLFINSRRMEENSSGNTMSASSMFNTEERKCLQTHRVTVHGVPGPEPFTVFTINGGTKAKQLLQQILTNEQDIKPVTTDYFLMEEKYFISKEKNECRKQPFQRAIGPEEEIMQILSSWFPEEGYMGRIVLKTQQENLEEKNIVQDDKEVILSSEEESFFVQVHDVSPEQPRTVIKAPRVSTAQDVIQQTLCKAKYSYSILSNPNPSDYVLLEEVVKDTTNKKTTTPKSSQRVLLDQECVFQAQSKWKGAGKFILKLKEQVQASREDKKKGISFASELKKLTKSTKQPRGLTSPSQLLTSESIQTKEEKPVGGLSSSDTMDYRQ

SEQ ID NO: 64138 - DNA, 5985 bp, Artificial Sequence
  derived and/or modified sequence
atggttagtgaaggcagtgctgctggcagagattttgctggaatggaggaggtcagacaactgcacgttcgtttttgcaaggggattaagatctggcaccaagcttggtttctgtgcagcctgctggggcgagagccgcaggagcgagaggcaggatgccaattatggctttgtactctgtctgctgtgctgaaggtgggctggctgttccccctgtcagaggtccctaactttacactgcttaaggatggctgtgggtgttggcgtctgaaagaagatcagatttacaatgcggtcagaagggaagagactgagaacaccgtcgggagccttctgcatttcctcactaagttgccagcttctgaaacggcgcacgggcggatttctgtaggtccttgtctcaaacagtgcgtgcgcgataccgtttgcgagtatagagctaccttgcagcgaactagcatctctcagtacattacgggctctttgctggaagccacgacatcgctaggggcccgctcggggctcctctctacatttggcggaagcactggtcgcatgatgctgaaggaaaggcagcccggaccctccgtcgccaacagtaacgctctcccttcttccagtgcaggaattagtaaagagctcatcgacctgcagcccctgattcagtttcctgaagaggtcgcttcaatcctgatggaacaggagcaaaccatctatagacgggtgctgcccgtggattatctatgtttcctgacgcgtgacttgggaaccccagaatgtcaatcttctctgccatgtttaaaggcgagtatctctgcttccattctaacaactcaaaacggcgaacacaatgccctggaggaccttgtcatgagattcaacgaagtgtcatcttgggtgacatggttgatcttaactgctggaagcatggaggagaagcgcgaggttttttcgtacctggtacatgtggccaagtgttgttggaacatggggaattataacgccgtcatggagttccttgcgggcctgagaagtcgtaaagtgctgaagatgtggcaattcatggatcagagtgatatagagaccatgcgatcactgaaggatgcaatggctcaacatgaatccagctgcgaatacagaaaggtggtcacaagggcgctacacattccgggatgtaaggtcgtccccttctgcggcgtcttcctcaaggagctgtgtgaggtgctggacggcgcgagcggactgatgaaactgtgtccacgttacaattcccaggaggaaacactcgaattcgtggcagactattccggccaggacaatttcctgcaacgcgtcgggcagaatggcctcaagaatagtgaaaaggagtccacagtgaattcaatctttcaagtgataaggtcttgtaacaggagtttggagaccgatgaagaggattcccccagcgaaggcaatagctcccggaagagctcattgaaagacaaatcccggtggcagtttataatcggtgatctcctcgactctgataacgacatctttgagcagtctaaggagtacgattcccatggatcagaggactcacagaaagcttttgatcatggcaccgagctaattccctggtacgttctaagtatccaggccgatgttcaccagtttttactgcaaggggcgacagtcatccattacgatcaggatacgcacttaagcgctcgatgttttttacaattgcagcccgataattctacactgacctgggtgaaaccaacaacagccagcccagcgtcatcaaaagccaaactgggtgtcttaaataatacagcagaaccgggcaagttcccactgttgggcaatgccggtctgtctagtctcactgaaggagtgctagacctcttcgcggtgaaggctgtgtacatgggtcatcccggaattgacatacatactgtttgtgtgcaaaataagcttggtagcatgtttctgagcgaaacaggggtcacattgctgtatggtctacagacaactgacaatagactcctgcacttcgtagccccaaaacacacagccaaaatgctgtttagcggtctgcttgagctgaccagagccgtgcgaaaaatgcgcaaatttcctgaccaaagacaacagtggcttcgtaagcagtacgttagcctgtatcaggaggatgggcgttacgaaggccctactttagctcacgccgtggagcttttcggcggcaggagatggtccgctagaaatcccagtcccggtactagcgccaagaatgctgagaagcctaacatgcagagaaacaatactctgggcatcagtaccaccaagaaaaagaaaaagatacttatgaggggagagtctggggaagtcacagatgacgaaatggctacccggaaagcgaagatgcataaagagtgccgaagcagatccggctcagatcctcaggacatcaatgaacaggaggagtctgaagtcaatgcaattgcaaatccacccaaccctttaccttcacgtagagcccattctctgacgactgctgggtctcctaatctggctgcgggcacgtcctcccccataagacctgtgagcagtcctgttctgtcatccagtaataagagcccgagttctgcctggtcatcaagcagttggcacggccgaatcaagggtggtatgaaggggtttcaaagctttatggtctccgattccaacatgagttttgtcgaattcgtggaactcttcaagtcattctccgttagatccagaaaggacctcaaagacctgtttgacgtctacgccgttccttgcaatcgaagcggcagcgagtccgctcctctctatactaatttgactattgatgaaaatacgagcgaccttcagcccgaccttgaccttctgacaaggaacgtctctgacctgggcctctttattaagtctaaacagcaactgtctgataaccagcggcaaatatcggatgctattgccgccgcttctattgtcaccaacgggacgggaatcgagagtacgagtctgggcatcttcggagtcggtatactgcagttgaacgattttctggtgaattgccagggcgaacactgcacctatgacgaaatactaagcatcatccagaagtttgagccatccattagcatgtgtcatcaaggcctcatgagttttgagggcttcgctcggttcctcatggacaaggaaaattttgcgagtaagaatgacgagagtcaggagaacatcaaggagctgcaactgccgctttcctactactatatcgaatcttcacataatacatatctgactgggcaccagttgaagggcgagtctagtgttgaattgtacagtcaggtgctgctgcagggctgcagatcagtcgagctggactgctgggatggagacgacggcatgccaatcatctaccacggccacacccttaccactaagatccctttcaaggaggtcgtagaggccatcgacaggagcgccttcattaactccgatctgcctattataattagcatcgagaatcattgctcgcttccacaacagcgcaagatggccgaaatcttcaaaactgtgttcggagagaaacttgtcaccaagttcctctttgaaacagattttagtgacgacccaatgctgcctagtcctgaccagcttaggaagaaggttctgcttaaaaacaagaagctgaaagctcatcagaccccagtggacattctgaaacagaaagcccaccagctcgcaagtatgcaggttcaggcttataacggcgggaatgccaaccccaggcccgctaacaacgaggaagaagaggacgaggaagatgaatatgattatgactatgagtccttgagtgatgacaacattttagaagaccgccctgagaataagtcgtgcaacgacaaactgcagtttgaatataatgaagagataccgaaacggatcaaaaaggccgacaattccgcctgcaataagggaaaagtatatgacatggaactgggggaggagttctatttagatcaaaataaaaaggagtcaagacagattgctcctgagctaagcgatcttgtgatttattgccaggccgtgaagtttccaggtttaagcacgttgaatgcctctggcagctcacgtggtaaagagagaaagagcaggaagagcatctttgggaataatccaggcaggatgtctcccggggaaacggctagtttcaataagacgagcggtaaaagcagctgcgagggcattcgccagacttgggaagagtcaagctcccctttgaatcctaccacatcactcagcgccatcatcaggacaccaaagtgctatcatatctcatccctgaatgaaaacgcagccaaacggctgtgccggcggtactcacagaagctcacccagcatactgcctgccagcttctgcgaacctaccctgccgctactcgtatcgattcgtccaaccccaacccgctcatgttctggctgcatgggattcagctcgtggctctcaattatcagaccgatgatctaccgctacatctcaacgctgctatgtttgaagccaatggaggctgtgggtacgtgttgaagcccccggtgctgtgggacaagaactgtcccatgtaccaaaaatttagccccttagagcgtgacctggacagtatggacccagccgtgtacagtctgacaatagtctcaggccagaatgtctgcccctcaaacagcatgggctctccttgtattgaggtcgatgtgctgggaatgcccctcgactcatgccatttccgtactaaacccattcaccgcaataccttgaatcccatgtggaatgagcagtttctgttccatgtgcactttgaagatctggtctttctgcgctttgctgtggttgaaaacaatagttcagcggtgacagcccagagaatcattccattgaaagccctgaaacggggctatcgtcatctgcagctacggaacttgcataatgaagtgctggaaattagtagcctctttatcaatagtcgacgcatggaggagaatagcagtggaaacacaatgtcagccagctccatgttcaatactgaggagaggaaatgtctccagacacacagggttacggtccatggagtgccgggaccagagccattcacagttttcacgatcaacgggggaacgaaggccaagcagcttctgcaacaaatacttacaaatgagcaggatatcaagcccgtaactactgactactttctgatggaagaaaagtatttcatttctaaagaaaagaatgagtgtagaaagcaaccattccaaagagcaataggacccgaggaggaaatcatgcagattctgtcctcgtggttccccgaagagggatatatggggagaatcgtcctgaaaactcagcaggagaacctcgaagaaaagaacattgtacaagatgacaaggaggtgatcctttcctccgaagaggagagtttttttgtccaagtgcacgacgtctcacccgaacaacctagaacggttatcaaggcccccagagttagtaccgcgcaagatgtgatccagcaaaccctctgcaaggctaaatactcatactctattctgagcaatccaaatccgtcagactatgtattgctcgaagaggtagtgaaagatactactaataagaaaaccaccacaccgaagagtagccaacgcgttctgctggaccaggaatgtgtctttcaggctcagagtaagtggaaaggggctggaaaattcattctgaaactgaaggagcaggtgcaagcatcccgggaggataagaaaaagggcatttctttcgcttccgagcttaaaaaactcaccaagtcgaccaagcagccccggggcctgacctccccaagccagctgctgacttctgagtccattcagacaaaggaagagaagcccgtaggcggactaagcagctcggacacaatggactacagacaatag

SEQ ID NO: 64139 - DNA, 5985 bp, Artificial Sequence
  derived and/or modified sequence
atggtgagcgaaggctctgccgcaggccgggacttcgcgggcatggaagaagtgagacagctacatgtgaggttttgtaaggggatcaagatatggcaccaggcctggttcctgtgcagcctcctagggagggagccccaggagcgagaggcaggttgtcagctgtggctgtgcactctttctgccgtgctaaaggtgggctggcttttccccctgtctgaggtgccgaattttacgctcttgaaagatggatgcggttgctggaggctgaaggaggaccagatttataatgctgtccgtagggaggaaacggagaatacagtggggagcttgctgcacttcctgacaaagctgcccgccagtgagacggctcacgggagaatttccgtcggcccctgtctgaagcagtgtgttcgcgacactgtgtgcgaatacagagcaaccctacagcgaactagcatcagtcagtacatcactggaagtctgctcgaggcgaccacctctctaggtgccaggagcgggttgctcagcacatttggcggcagcacaggcaggatgatgttaaaagaacggcagcctggaccatcagtggccaatagtaatgctctcccgtcatcttctgccggcattagcaaggagcttattgacctgcaaccactgatacaattccctgaggaggtcgctagcatcctgatggagcaggaacagaccatctacagaagagttttgccagtagactatctctgctttcttaccagagaccttggcacacccgaatgtcagtcgtctctgccatgcttgaaagcctcaatatctgcctcaattctgacaacccaaaacggggagcataatgccctggaagacctcgtgatgagatttaatgaggtatcgtcttgggtgacctggctgattctcactgctggctctatggaggaaaagagggaagtgttctcctatttagtccacgtggcaaagtgctgttggaatatgggtaattataatgccgtgatggagtttttggccggattacgcagtcgaaaggtccttaaaatgtggcaattcatggaccagtcagatatcgaaaccatgagaagtctgaaggacgccatggcacaacacgaatccagttgcgaatacaggaaggtagtcaccagagccctgcatatcccaggttgtaaagttgtcccgttttgcggggttttcctcaaagaactctgtgaagttctggatggggctagcggcctgatgaaattatgtcccagatataacagtcaggaagagacccttgagtttgtggctgactactcaggccaagacaacttcctacagagggtgggacagaacggtctgaaaaattctgagaaagagagcactgtaaactcaatttttcaggttattagatcatgcaatagatccctagaaacggatgaagaggatagcccaagtgagggtaatagctcacgtaagagctctcttaaagataagagtaggtggcagttcattatcggcgatctgctcgattcagacaatgatatctttgaacaatccaaggagtatgactcccatgggagtgaagatagccaaaaggctttcgaccacggaacagagctgattccgtggtatgtgctgtctatccaagccgacgtccaccagtttctcttgcagggcgcgaccgtcattcactacgatcaggacacccatctctccgcccggtgttttttacaactgcagcctgacaacagcactctgacatgggtgaagcctaccacagcctccccagcctcatccaaagcaaagctcggagttctaaataacaccgccgagccgggcaaatttccactcttagggaatgccggactctccagtttgacagaaggtgtgctcgatctcttcgcagtcaaggctgtgtacatgggccacccaggcattgatatccacactgtgtgtgtccaaaacaaattgggctccatgttcctatcagagactggtgtgacactgctgtacggactccagacgacagacaatagactgctgcattttgtcgcacccaagcataccgcaaaaatgctcttttccggcttacttgagctgaccagagctgtgcgaaagatgcggaagtttccagaccagcgtcagcagtggctccggaagcaatacgtatcactatatcaggaagacgggcgctacgaggggccaacactggcgcacgcagttgaactgttcggcgggcgccgatggagcgcccgaaaccccagtcctggaacaagtgccaaaaatgccgagaaacccaacatgcaaagaaacaacacactagggatttcgaccactaaaaaaaaaaagaagatcctgatgcgaggcgagagcggagaggtgaccgacgatgaaatggctaccagaaaagccaagatgcataaggagtgtcggtcccgatccggctcagatccacaggatatcaacgagcaagaggaaagcgaagtgaatgctattgccaatccacctaatccgctcccgtctcggcgggcccactcactaaccaccgctggttctcccaatctggccgccggcaccagctctcccatcaggccagtgtcctcccctgttttgtcctcctctaataaatctccgagcagcgcctggagttcttcttcatggcacggtagaatcaaggggggaatgaagggcttccagtcttttatggtgtctgatagcaatatgtcattcgtggaatttgtggagttgtttaagagttttagtgtgcggtcccgcaaagatcttaaagatttattcgatgtatacgcagtgccatgcaaccgcagtgggagtgaatccgctccgttgtacaccaatttaactattgacgagaataccagcgacctccagccagatctggatctcttaacgcggaatgttagtgacctcggcctattcattaaatcgaaacagcaattgagtgacaatcaaagacagattagcgacgcgatagcagccgccagtatcgtgaccaatggcactggaatcgaatccacatcactgggaatcttcggggtcggtattctacagctgaacgactttctggtgaactgccagggtgaacattgtacctacgacgagatcctgagcattattcagaagtttgaaccctccatctctatgtgccaccagggactcatgagcttcgaaggcttcgcgagattcttaatggataaggagaactttgcatcaaagaatgatgagagccaggaaaatatcaaagagttgcagctccctctttcctactactatattgagagcagccacaacacctaccttactggtcatcaactgaaaggggaatcttcagtagagctatacagccaggttttgctgcagggttgccgcagcgtggagctggattgctgggacggtgatgatggtatgccgatcatctaccacggccataccctcaccacaaaaatcccattcaaagaagtcgtcgaggcgatagaccgaagcgccttcattaactccgatcttcctataattatttccattgaaaaccactgtagtctgccccagcagcggaagatggcggagatctttaaaacagtctttggcgagaaactagtcaccaagttcctgtttgagaccgattttagcgacgaccctatgcttccttctcctgaccagctccggaaaaaagtgctactgaagaacaagaagttgaaggcccaccagacacccgttgacattctaaagcagaaagcccaccagctggcatcaatgcaagttcaggcatacaatggcggcaatgccaatcccagacccgccaataacgaagaggaggaagacgaagaggatgagtacgactatgattatgaaagcttgtcggacgataatatcttggaggatagacccgagaacaagtcctgcaacgacaaattgcagtttgaatataatgaagagatcccgaagcgcatcaaaaaggcggataacagcgcctgtaacaagggcaaggtgtatgacatggaactgggagaggagttctacctagaccagaataagaaggagtctagacagattgcgcctgagctgtcggatcttgttatttattgtcaggccgtgaaatttcccgggttatccaccctgaacgcaagtggtagctcccgaggcaaagaacgaaaaagtcgtaaatctatcttcggcaacaatccaggtagaatgtcccctggagagacggcctcatttaataagacgagcggcaaaagctcttgcgaagggatacgacagacctgggaggagtcgtcttcacctttgaaccccacaacctctctgagtgcaattattaggaccccaaaatgttatcacatctcgagcctgaatgaaaacgctgcaaagaggttatgtaggcgatatagccagaaattaactcaacacacagcctgtcagttgctccgaacgtatcctgctgctacaaggattgattccagcaaccctaatccattgatgttttggcttcacggcattcagctcgtggctcttaactaccagactgatgaccttccactacatctaaacgccgccatgttcgaggcgaatgggggatgcggctatgtcctcaaaccgcccgtcttgtgggataagaactgtcctatgtaccagaagttttcccctcttgaacgggatttggactctatggacccggccgtgtattctttgacaattgtaagcggccagaacgtctgtcccagtaatagtatggggagcccttgcatcgaggtggatgtattagggatgccactggactcctgccattttcgaaccaagccgatccataggaatacactcaaccccatgtggaatgaacagtttctctttcacgtgcactttgaggatcttgtgtttctccgcttcgcggtcgttgagaacaacagttctgccgtcacagcccagcgcatcatccccctgaaagccctaaagcggggttaccgacacctacaacttcggaatctccataacgaggtacttgagatctcctcactgttcataaattctagaaggatggaagagaacagtagtggaaataccatgtcggccagctccatgtttaacacagaggagcgtaagtgtctgcagacccacagggtgacggtccatggtgtgccagggcccgagcctttcactgttttcacgataaatggcggcaccaaagcaaagcagctcctgcagcagattcttaccaatgagcaagatattaaacctgtgaccactgattactttctaatggaggagaagtacttcatctccaaggaaaaaaacgagtgtcggaagcagccttttcagagggcgattgggcctgaagaggagattatgcagatcctgtctagttggtttccagaggagggctatatgggccgcatcgtgcttaagactcagcaagagaacctcgaagagaaaaacatcgtgcaggatgataaagaggtgattctgtcctcagaggaagagtcattttttgtccaggttcatgacgtaagccctgagcagcctcgcaccgttatcaaagccccaagagtgagtacggcacaggatgttattcaacagactctgtgtaaagcgaagtatagctacagcattctatccaacccaaaccccagcgactatgtcctgctcgaggaagtggtgaaagatactaccaataagaaaactacaactccgaaaagctcccagcgcgtcctgctcgatcaggaatgtgtctttcaagcgcagtccaagtggaagggcgcaggcaaatttatcttgaaacttaaagagcaagtgcaagcctctcgtgaggacaaaaagaagggcatcagctttgcctcagagctgaaaaagctcaccaaatcaactaagcaaccaagaggtctgacctcccccagccagctgctcacctctgagagtatccaaactaaggaggagaaacctgtcggaggtctgtcatctagtgacacaatggactacaggcagtag

SEQ ID NO: 64140 - DNA, 5985 bp, Artificial Sequence
  derived and/or modified sequence
atggtgtctgagggcagcgctgctggccgggactttgctggcatggaggaggtgcggcagctgcacgtgcgcttctgcaagggcatcaagatctggcaccaggcctggttcctgtgcagcctgctgggccgggagccccaggagcgggaggccggctgccagctgtggctgtgcaccctgtctgctgtgctgaaggtgggctggctgttccccctgtctgaggtgcccaacttcaccctgctgaaggatggctgcggctgctggaggctgaaggaggaccagatctacaatgctgtgcggcgggaggagacagaaaatacagtgggcagcctgctgcacttcctgaccaagctgcctgccagcgagacagcccacggccgcatctctgtgggcccctgcctgaagcagtgtgtgcgggacacagtgtgtgagtaccgggccaccctgcagaggaccagcatcagccagtacatcaccggcagcctgctggaggccaccaccagcctgggcgcccggagcggcctgctgagcacctttggaggcagcactggaaggatgatgctgaaggagcggcagcccggccccagcgtggccaacagcaatgccctgcccagcagcagcgctggcatcagcaaggagctgattgacctgcagcccctcatccagtttcctgaggaggtggccagcatcctgatggagcaggagcagaccatctaccgccgggtgctgcctgtggactacctgtgcttcctgacccgggacctgggcaccccagagtgccagagcagcctgccctgcctgaaggccagcatcagcgccagcatcctgaccacccagaatggagagcacaatgccctggaggacctggtgatgaggttcaatgaggtgtcctcctgggtgacctggctgatcctgacagctggctccatggaggagaagcgggaggtgttctcctacctggtgcacgtggccaagtgctgctggaacatgggcaactacaatgctgtgatggagttcctggccggcctgcggagcaggaaggtgctgaagatgtggcagttcatggaccagagcgacatcgagaccatgaggagcctgaaggatgccatggcccagcacgagagcagctgtgagtacaggaaggtggtgacccgggccctgcacatccctggctgcaaggtggtgcccttctgtggggtcttcctgaaggagctgtgtgaggtgctggatggagccagcggcctgatgaagctgtgcccccgctacaacagccaggaggagaccctggagtttgtggccgactacagcggccaggacaacttcctgcagagggtgggccagaatggcctgaagaacagcgagaaggagagcacagtgaacagcatcttccaggtgatccgcagctgcaacagaagcctggagacagatgaggaggacagccccagcgagggcaacagcagcaggaagagcagcctgaaggacaagagccgctggcagttcatcatcggggacctgctggacagcgacaatgacatctttgagcagagcaaggagtatgacagccacggcagcgaggacagccagaaggcctttgaccatggaacagagctgatcccctggtacgtgctgagcatccaggctgatgtgcaccagttcctgctgcagggcgccaccgtcatccactatgaccaggacacccacctgagcgcccgctgcttcctgcagctgcagcctgacaacagcaccctgacctgggtgaagcccaccacagccagccctgccagcagcaaggccaagctgggcgtgctgaacaacacagctgagcccgggaagttccccctgctgggcaatgccggcctgagcagcctgacagagggcgtgctggacctgtttgctgtgaaggctgtgtacatgggccaccctggcatcgacatccacacagtgtgtgtgcagaacaagctgggctccatgttcctgtctgagaccggggtgaccctgctgtatggcctgcagaccacagacaaccggctgctgcactttgtggcccccaagcacacagccaagatgctgttcagcggcctgctggagctgaccagggctgtgaggaagatgaggaagttcccagaccagaggcagcagtggctgaggaagcagtatgtgtccctgtaccaggaggatggccgctatgagggccccaccctggcccatgctgtggagctgtttggaggccgccgctggagcgccaggaaccccagccctggcaccagcgccaagaatgctgagaagcccaacatgcagaggaacaacaccctgggcatcagcaccaccaagaagaagaagaagatcctgatgagaggagagagcggggaggtgacagatgatgagatggccaccaggaaggccaagatgcacaaggagtgccgcagccgcagcggcagtgacccccaggacatcaatgagcaggaggagagcgaggtgaatgccatcgccaacccccccaaccccctgcccagcagaagagcccacagcctgaccacagctggcagccccaacctggccgccggcaccagcagccccatccggcctgtgagcagccctgtgctgagcagcagcaacaagagccccagcagcgcctggagcagcagctcctggcacggccgcatcaagggcggcatgaagggcttccagagcttcatggtgtctgacagcaacatgagctttgtggagtttgtggagctgttcaagagcttctctgtgcgcagcaggaaggacctgaaggacctgtttgatgtgtatgctgtgccctgcaacagaagtggcagcgagagcgcccccctgtacaccaacctgaccattgatgagaacaccagtgacctgcagcctgacctggacctgctgaccagaaatgtgtctgacctgggcctcttcatcaagagcaagcagcagctgagtgacaaccagaggcagatcagtgatgccatcgccgccgccagcatcgtgaccaacggcaccggcatcgagagcaccagcctgggcatcttcggcgtgggcatcctgcagctgaatgacttcctggtgaactgccagggcgagcactgcacctatgatgagatcctgagcatcatccagaagtttgagcccagcatctccatgtgccaccagggcctgatgagctttgagggctttgcccgcttcctgatggacaaggagaactttgccagcaagaatgatgagagccaggagaacatcaaggagctgcagctgcccctgagctactactacatcgagagcagccacaacacctacctgaccggccaccagctgaagggggagagctctgtggagctgtacagccaggtgctgctgcagggctgccgctctgtggagctggactgctgggatggagatgatggcatgcccatcatctaccacggccacaccctgaccaccaagatccccttcaaggaggtggtggaggccatcgacagaagtgccttcatcaacagcgacctgcccatcatcatcagcattgagaaccactgcagcctgccccagcagaggaagatggccgagatcttcaagacagtgtttggagagaagctggtgaccaagttcctgtttgaaacagacttcagtgatgaccccatgctgcccagcccagaccagctgaggaagaaggtgctgctgaagaacaagaagctgaaggcccaccagacccctgtggacatcctgaagcagaaggcccaccagctggcctccatgcaggtgcaggcctacaacggcggcaatgccaaccccaggcctgccaacaatgaggaggaggaggatgaggaggatgaatatgactatgactatgagagcctgagtgatgacaacatcctggaggacaggcctgagaacaagagctgcaatgacaagctgcagtttgagtacaatgaggagatccccaagaggatcaagaaggctgacaacagcgcctgcaacaagggcaaggtgtatgacatggagctgggggaggagttctacctggaccagaacaagaaggagagccggcagatcgcccctgagctgagtgacctggtgatctactgccaggccgtgaagtttcctggcctgagcaccctgaatgccagcggcagcagccggggcaaggagaggaagagcaggaagagcatctttggaaacaaccctggccgcatgagccctggagaaacagccagcttcaacaagaccagcggcaagagcagctgtgagggcatccggcagacctgggaggagagcagcagccccctgaaccccaccaccagcctgagcgccatcatccgcacccccaagtgctaccacatcagcagcctgaatgaaaatgctgccaagaggctgtgccgccgctacagccagaagctgacccagcacacagcctgccagctgctgcggacctacccagctgccaccagaattgacagcagcaaccccaaccccctgatgttctggctgcacggcatccagctggtggccctgaactaccagacagatgacctgcccctgcacctgaatgctgccatgtttgaggccaatggaggctgcggctacgtgctgaagccccctgtgctgtgggacaagaactgccccatgtaccagaagttcagccccctggagcgggacctggacagcatggaccctgctgtgtacagcctgaccatcgtgtctggccagaatgtgtgccccagcaacagcatgggcagcccctgcatcgaggtggatgtgctgggcatgcccctggacagctgccacttccgcaccaagcccatccacaggaacaccctgaaccccatgtggaatgagcagttcctgttccacgtgcactttgaggacctggtgttcctgcgctttgctgtggtggagaacaacagcagcgctgtgacagcccagaggatcatccccctgaaggccctgaagaggggctaccgccacctgcagctgaggaacctgcacaatgaggtgctggagatcagcagcctcttcatcaacagcaggaggatggaggagaacagcagcggcaacaccatgtctgccagctccatgttcaacacagaggagaggaagtgcctgcagacccaccgggtgacagtgcatggagtgcccggccctgagcccttcaccgtcttcaccatcaatggaggcaccaaggccaagcagctgctgcagcagatcctgaccaatgagcaggacatcaagcctgtgaccacagactacttcctgatggaggagaagtacttcatcagcaaggagaagaatgaatgtaggaagcagcccttccagagggccatcggccctgaggaggagatcatgcagatcctgagctcctggttccctgaggagggctacatgggcagaattgtgctgaagacccagcaggagaacctggaggagaagaacatcgtgcaggatgacaaggaggtgatcctgagcagcgaggaggagagcttctttgtgcaggtgcatgatgtgtccccagagcagcccaggacagtcatcaaggccccccgggtgtccacagcccaggatgtgatccagcagaccctgtgcaaggccaagtacagctacagcatcctgagcaaccccaaccccagcgactatgtgctgctggaggaggtggtgaaggacaccaccaacaagaagaccaccacccccaagagcagccagagggtgctgctggaccaggagtgtgtgttccaggcccagagcaagtggaagggggccggcaagttcatcctgaagctgaaggagcaggtgcaggccagccgggaggacaagaagaagggcatcagctttgccagcgagctgaagaagctgaccaagagcaccaagcagccccggggcctgaccagccccagccagctgctgaccagcgagagcatccagaccaaggaggagaagcctgtgggcggcctgagcagcagtgacaccatggactaccggcagtag

SEQ ID NO: 64141 - DNA, 5985 bp, Artificial Sequence
  derived and/or modified sequence
atggtgagcgagggcagcgccgccggccgggacttcgccggcatggaggaggttcgccagttacacgttaggttttgcaaggggattaaaatctggcaccaggcttggttcctttgcagtctgctcgggagagagccacaggaaagagaggctggatgccaactgtggctgtgcacactgagtgcagttctgaaagttgggtggctgttcccgctctccgaggtccccaattttaccctgctgaaggatggctgcggatgctggaggctcaaagaagaccagatctacaatgcagtccgcagagaggagaccgagaatacggtggggtctcttttgcatttcttaaccaagttgcccgcctcggaaactgcccacggtcgcatttctgttggtccctgtctgaaacagtgtgtgcgggatacagtgtgtgagtacagggccactcttcagagaactagtatatcacagtacatcaccgggtctttactggaagccactacatccctgggggcccgcagcggcttactaagcacgtttggaggttccacggggcgcatgatgctcaaggagcgacagcccggaccctctgtggctaacagtaatgccttgccctcctcttcagccggaatcagcaaagaactgatcgacttgcagccattgatccagtttccagaagaggtggcctctatccttatggaacaggagcaaacaatttaccggagagtgctgccggtggactacctgtgcttcttaacacgagatttaggcacaccagaatgccagtctagtttgccctgtctcaaagcttctattagcgcaagtatcttaacaactcagaacggggaacacaatgccttggaggacttagtgatgagattcaatgaagtgtccagttgggtcacctggctcatcctgacggcaggtagtatggaggagaagcgggaagtcttctcttatctcgtgcacgtggctaaatgctgctggaacatggggaattacaacgctgttatggaattcttagccggactgagatcacgaaaggtcctgaagatgtggcagtttatggaccagtctgacatcgagacaatgcggtcgctgaaggatgccatggcccaacatgaaagtagttgcgagtatagaaaggtcgtaacacgggccttgcacatcccaggttgtaaagtggtgcctttttgtggcgtgttcctgaaagaattatgtgaggtgcttgatggtgcatcgggcctgatgaaactgtgcccgaggtacaactcgcaggaggagactctcgagtttgtggctgattactctgggcaggacaactttttgcagagggtcgggcagaacggcctgaaaaacagcgagaaagaaagtaccgtgaactctatcttccaggtaattcggagctgtaaccggtctcttgaaactgatgaagaagatagtcccagcgaggggaactccagccgcaagagttccttaaaggacaagagccgatggcagttcatcattggcgacctgctcgactctgacaacgacatcttcgagcaaagtaaagagtacgatagtcacggttcagaggactcacaaaaggccttcgaccatggcacagagctgattccttggtacgtgctttcaatccaggccgacgtgcatcagttccttcttcagggcgctaccgtgattcactacgaccaagatacacacctatcagccagatgtttcctgcagcttcagcccgacaattcgacactgacttgggtgaagcccaccaccgcttccccagccagcagcaaggccaaactcggggtattaaataacacagcagaaccaggcaagtttccgctgctgggaaacgctggcctgtcctctctcacagagggcgttcttgatctgttcgctgtaaaagccgtttatatgggccaccccggtattgatatccacactgtctgcgtgcagaacaagcttggctcaatgttcctaagcgagaccggggtcaccctactttacggcctgcagactactgataatagactgctccatttcgtcgctccaaaacacaccgctaagatgctgttctccgggttactggaactgacccgcgctgttagaaagatgcgaaagtttcctgaccagcgccagcaatggctgaggaagcaatacgtgagcctgtaccaagaagacggccgatatgagggccctacccttgcacacgccgtggagctgtttggaggcagaagatggagtgctcggaacccttcccccggaacctctgcgaagaatgccgagaagcctaacatgcagcgcaataatacactgggaatctcaaccactaaaaaaaaaaagaagattcttatgagaggtgagagcggtgaggtcaccgacgacgagatggccaccaggaaagctaagatgcacaaagagtgccgctctcgttctggatcggatcctcaggacatcaacgagcaggaagaatctgaggtcaatgccatagctaatcccccgaatcctctcccatcccggagagcgcactctctgacaactgcaggttcacccaaccttgcggccggcactagctcgcctattcgacccgtttcttctccggtattatctagcagcaataaatctccatctagcgcctggagcagctcgagttggcatggcaggattaagggcggtatgaagggcttccagtcgttcatggtttctgacagcaatatgtcctttgtggagttcgtggaactgtttaagtccttctcggtacgtagtagaaaggacttaaaagatctctttgatgtgtacgccgtcccatgtaacaggtccggatcagagagcgcacctctgtacaccaacctgaccatcgatgagaatacaagcgacctgcagcctgatctggacctactgactaggaacgtgtctgatctgggattatttatcaaaagcaagcagcaacttagcgacaatcagcgccaaatctccgatgctatcgcagctgccagtattgttactaacgggacaggaatcgaatccacgtctctgggaatctttggggttgggattctccagctgaacgacttcctggtgaattgccaaggggagcattgcacttacgatgagatactctccattatccagaagttcgaaccttcaattagcatgtgccatcagggactgatgtcttttgaggggtttgcaagattcctgatggacaaggaaaattttgcttctaagaacgacgagtctcaagaaaatatcaaggaactgcagcttcctctgtcttattattacattgagtcctcccacaatacttacctgaccgggcaccaactgaaaggtgaatcttccgtcgagctatattcgcaggtcctcctgcaaggttgcagatccgtggagctggactgctgggacggtgatgatggaatgcccattatctaccacggtcacacactgactaccaagattccatttaaggaagtggtggaagcgatcgaccggagcgcctttattaactcagacctccccatcatcataagtatagagaaccattgtagtctccctcaacaaaggaaaatggccgaaattttcaaaaccgtgtttggcgagaaactcgtaacaaagtttttgttcgagaccgacttcagtgacgacccgatgctgccttccccggatcagctgcggaaaaaagtactgttgaagaacaaaaaactcaaagctcatcagacacctgttgacatcctgaagcagaaagctcatcagcttgcatccatgcaggtacaggcctacaatggcgggaacgctaaccctcggccggcgaacaacgaggaggaggaggatgaggaggatgagtatgactacgattacgaatcactcagtgatgacaacattctggaggaccgccctgagaacaagtcctgtaacgataagctgcagtttgagtacaatgaagaaatacctaagcggatcaagaaagccgataacagcgcctgcaataaaggaaaagtgtatgatatggaactgggggaagagttttatctagatcagaacaagaaggagtcccgacagatcgccccagaactgagcgaccttgtgatttattgtcaggctgtgaaattccctggattgtctaccttgaatgcatccgggagttccagaggtaaggagagaaaaagtcggaagagcatcttcggaaacaaccccggccgcatgtcccccggagagacagcatcgtttaataagacgtcaggcaagtcttcctgtgaagggattcggcagacctgggaggaaagctcctctccacttaatcctaccacctccttatcagcgatcattcggacccccaaatgctaccacatttcaagccttaatgaaaacgccgctaagcgcctgtgtcggaggtatagtcaaaagttgactcagcacaccgcatgccagctacttcgtacgtacccagccgccaccagaattgacagctcgaacccaaatccccttatgttttggctacacggcattcagcttgtcgcactaaactaccagactgacgacttacctctgcatctgaacgctgccatgttcgaagccaacggcgggtgcgggtatgttctgaaaccgcctgttctctgggacaagaattgccccatgtatcaaaagttctccccactagagagggacctggacagtatggatcccgccgtgtattcgttgacaatcgtaagtggccagaatgtgtgtccctcaaactcaatgggaagcccttgcatcgaagttgatgtgctcgggatgcccctggactcttgccacttccgaaccaagccaatccatcgaaatactctgaaccctatgtggaacgagcagttcctctttcatgtccactttgaagaccttgtgtttctccgattcgctgtggtggaaaataattcttcagcagtcactgcccagagaattatacctcttaaagcactgaagagagggtacagacatttgcagttgcgcaatcttcacaatgaagtgttggagatatccagcctcttcatcaacagtagacgtatggaagagaactctagcggcaataccatgtctgcttcctcaatgtttaacactgaggagcgcaaatgtctgcaaacacatcgtgtcactgtgcacggtgtgccggggcccgaaccatttactgtctttactatcaatggaggcaccaaggccaagcagcttctccagcaaatcttaacgaatgaacaggatattaaacccgtgacaactgattatttcctgatggaagaaaagtatttcatatctaaggaaaagaacgagtgcagaaaacaacctttccagagggccataggtcccgaggaggagataatgcaaattttgtctagctggttcccagaagagggctacatgggcaggattgtgctgaaaacacaacaggagaatcttgaagagaagaacattgttcaggacgataaggaggtcatcctgtcctctgaagaagaaagcttcttcgtgcaggtacacgacgtttccccagagcagccccgaacagtgattaaagccccgcgagtatccaccgcccaagacgtaatccaacagacactctgtaaagcaaagtacagttattccatcctgagcaatcccaatccgtccgactatgtcctgctagaagaagtcgtaaaggacactactaacaaaaagactactacgcccaagtcatcacaaagggtcctgctggaccaggagtgcgtcttccaggcgcagtcaaagtggaagggcgctgggaaattcattctcaaactcaaggagcaggtacaggcaagcagagaagataagaagaaaggtatttcctttgcctccgaactgaagaagctgaccaaatcaactaaacaacctagagggctcacgagcccaagccaactgctgactagcgagtccatccaaacaaaagaggagaaacccgttggcggattgtcatccagcgacactatggattatcgccagtag

SEQ ID NO: 64142 - DNA, 5985 bp, Artificial Sequence
  derived and/or modified sequence
atggtgagcgagggcagcgccgccggccgggacttcgccggcatggaagaagttaggcaactgcacgttcggttctgtaagggaatcaagatttggcaccaggcatggttcctctgctccctcctcgggcgtgagccccaagagcgggaggccggttgccaactgtggctgtgcacactgtccgccgtgctgaaagtgggatggttgtttcctctttccgaggtgcctaatttcaccctcctcaaggacggctgcggctgttggcgcttaaaggaagaccagatctacaacgccgtccggagggaagagaccgagaacaccgtaggcagcttgctgcactttcttacaaagctgcccgcttctgagacagcacacgggaggattagtgtaggcccctgtctcaagcagtgcgttagagataccgtgtgcgaatatagggccactctgcagaggacgtccatttcacagtacataaccggtagcctgctggaagctaccacatccctgggtgctagaagtgggctactcagcaccttcggcggatcaaccgggagaatgatgctgaaggaacgacaaccagggccatctgtcgccaactctaacgccctccctagttcgtcagctggaatctccaaggagttgatcgatcttcagccgctcattcagtttcccgaagaagtcgctagtatactgatggagcaggagcaaaccatttatcggcgggtgctgccggtggattatctgtgctttctcactcgggatctgggcacgccagagtgtcagtcgtctcttccctgtcttaaagcaagcatctctgctagcatcttaaccactcaaaatggggaacataatgcccttgaagacctggtgatgcgctttaacgaggtctcttcctgggtgacgtggttaatcctgacagccggtagtatggaagaaaagcgagaggtcttcagctatctcgtgcacgtggccaagtgctgctggaacatggggaactataacgcagtaatggaattcctggccggacttcgatccagaaaggtgttgaagatgtggcagtttatggaccagtccgacattgagactatgcggtctttgaaggatgctatggcacagcatgaaagctcatgtgagtataggaaagttgttactagagcactccacattcccggctgcaaggtggtgcccttctgtggtgtgttcctgaaagagctgtgtgaagttctagatggtgcatcaggccttatgaaactgtgcccacgctataactcacaggaggagaccttggagttcgtggcggattactcaggccaggacaacttcctgcaacgagtgggacagaacggactgaagaattctgagaaggagtccacagtgaactctatatttcaggtgataagaagctgcaatcgctctctcgagactgatgaggaggactctccctcagagggcaatagctctcgtaaatcgagcctgaaggataaatcccgatggcaattcatcataggagatctactagactctgacaacgatatttttgagcagtccaaggagtatgacagtcatggaagcgaggactctcaaaaagcctttgaccatggcaccgagctaattccctggtatgtcctgagcatccaagctgacgtgcatcaatttctgctgcagggagctaccgttatccattatgatcaggacacccatttgtccgcaaggtgcttcctacagcttcagcccgataattcaaccctgacctgggttaaacctaccacagccagcccagccagttccaaggctaaacttggagtcctgaacaacactgcagagccaggtaagtttcctctgttgggaaatgctggacttagcagcctgactgaaggtgtgctggacttgttcgcagtcaaagctgtttacatgggtcatccgggcattgacatccacaccgtgtgtgtccagaataaacttggctctatgttcttgtcagaaacaggagttactctcctatacggcctgcagacaacagacaacaggctgttgcacttcgtcgcccccaagcataccgctaaaatgctgtttagtggactgttagagctcactagagctgtgcgtaagatgcgcaagtttcccgatcagagacaacagtggcttaggaaacaatacgtcagtctgtatcaggaggatggacggtatgagggtccaacactggcccatgccgtagagctgttcggcggcagacgttggtcagctaggaacccatccccagggacttcagccaagaatgccgaaaagcccaacatgcaaagaaacaacacgctcggcatttcaaccactaagaagaaaaaaaaaattctgatgagaggggagagtggagaggtgacagacgacgaaatggccacccggaaggctaaaatgcacaaggagtgcagatcccggtcaggaagcgacccgcaagacataaatgaacaagaagaaagtgaagtcaacgccattgcgaatcctcctaatccgttaccctcacggcgcgcgcatagtctgactaccgccggcagccctaatctggctgccggtacgagttctcctatccggcctgtgagctcccctgtgctgagcagttccaacaagtcaccatcatcagcatggagcagttccagctggcacgggcggatcaagggtgggatgaaggggttccagtctttcatggtaagcgactcaaacatgtcgttcgtggaatttgtggagctgttcaaaagctttagcgtgagaagcagaaaagacttaaaagatttgtttgatgtgtacgccgttccctgcaatcgttctgggtctgaatctgcacccctctacacgaatttaactatcgacgagaacacctctgacttacagccggacctcgacttacttacccgtaatgtttctgacctcgggcttttcatcaagagtaaacagcagctgagtgataatcagcgacagatatcagatgctattgctgcagccagcattgtgacaaatgggacgggtatcgagagtacatccttgggtatcttcggcgtgggaatacttcaactgaatgattttcttgttaactgtcaaggggagcattgcacatatgacgagattctctctataatccaaaaatttgaaccgtctatttcaatgtgccatcaaggcctgatgtccttcgaaggcttcgctagatttctcatggataaagagaacttcgcctcgaaaaatgacgaatctcaggaaaacatcaaggaacttcaactgccattgtcatactattatatagagtcaagccacaacacctatctgactggccaccagctgaagggtgaatcatcggtggaactgtacagccaggtactccttcagggatgccgctcagtagagctggattgttgggacggtgatgacgggatgcctataatttaccacggtcataccctgactaccaaaataccattcaaggaagtggtagaggccatagaccgctctgcttttattaatagcgatctgcccatcattatatctattgagaaccactgctcattaccacaacagaggaaaatggccgagattttcaaaacggtttttggcgagaagttggttacaaaattcttattcgaaacagatttcagtgatgaccctatgttgccaagcccagaccaactgagaaaaaaagtcctgctgaagaataaaaagctgaaagcacatcagactcctgtcgatatcctgaagcagaaggcacaccagctggctagcatgcaggtgcaagcatataatgggggcaatgctaacccaagacccgcaaacaacgaggaggaggaggatgaagaggatgaatatgactatgactatgagtccctctctgatgacaatatcctggaggatcggcctgaaaataagagctgtaacgataagctgcagttcgagtataacgaggaaataccaaaacggatcaagaaagcggataattccgcgtgtaataagggcaaagtgtatgacatggaacttggtgaggagttttaccttgaccaaaataaaaaagaaagcagacaaattgctcccgaactcagtgacttggtcatctactgccaggccgtgaaatttcctgggctgtccacgctgaacgcttcaggctcttctcgcggcaaggaacgcaagtcaagaaaatccattttcggaaataatccaggtcgcatgagcccgggcgagaccgcctcatttaataaaacctccgggaaatcttcatgcgaaggcataagacaaacttgggaggaaagcagctcccctctgaaccctaccacatcactgtctgccattatccgcaccccaaagtgttaccacatttccagtctgaatgaaaatgcggccaagcgactgtgtagacgctactcccagaaactcacacagcacaccgcttgccaactgcttcgtacttaccctgccgccaccagaattgactcttctaaccccaatcccctcatgttttggctccatggaatccagttagtggcactcaactaccagacagacgaccttcctcttcaccttaacgccgctatgtttgaggcgaacggcggttgtgggtatgtgctgaaaccaccagtgctttgggacaaaaactgtcctatgtaccaaaaatttagtcccctagaaagggacttagacagcatggacccagctgtctacagtttgacaatcgtgtctgggcagaatgtctgtccatctaattctatgggctctccatgcatagaagtggacgtcctgggcatgcctctcgattcctgccacttccgcacaaagcccattcatcggaacaccctgaaccccatgtggaacgagcaatttctcttccatgtccacttcgaggatcttgtgttcctgagatttgccgtggtagagaataactctagcgcagtgacggcccagaggattattcctctcaaagccctgaaaagaggctatagacatcttcagctcaggaaccttcacaacgaagtgctggaaatctcatcacttttcatcaacagccggcgtatggaggagaactcctccggaaatacgatgtcagcctcctccatgttcaacactgaagagaggaagtgcctacaaacccaccgtgtaacagtgcacggggtaccggggccagagccatttaccgtgttcacaataaatggaggaacgaaagcaaagcaactgctccagcaaattctaacgaacgagcaggatatcaagcccgtgactaccgattactttctcatggaggagaagtatttcatttcaaaggaaaaaaacgaatgtagaaaacagcccttccagagagcaattgggcctgaagaggagataatgcagattctcagctcatggttccccgaggaagggtacatgggccgaattgtcctaaagacccaacaggagaatcttgaagagaagaacattgtgcaagatgataaggaggtcatcctctctagtgaagaggaaagttttttcgtacaggttcacgacgtgtctcctgagcagcctaggacagtcatcaaagcaccgagagtgagtacagctcaggatgtgattcagcagacgctttgcaaagctaagtactcatactctatcctaagtaatccaaacccttcagactacgttctcctggaagaagtcgtgaaagataccacaaacaaaaagaccacaacccccaagtcctctcagagggtcctgttggatcaagaatgcgtcttccaagcccagtccaaatggaagggagccgggaagtttattctgaagctgaaagaacaagtccaggcctcacgtgaggacaagaaaaaaggtatcagttttgctagcgaactcaagaagttgaccaagtccaccaagcagccacgtgggctgacctccccgagccagctgttaacttctgaaagtattcagacgaaagaagagaaacctgttggaggtctatcgagtagcgacacaatggactataggcagtag

SEQ ID NO: 64143 - DNA, 6514 bp, Artificial Sequence
  derived and/or modified sequence
atggtttcagaaggaagtgcagcaggaagagactttgcaggaatggaagaggtgaggcagctccacgtgagattctgcaaagggattaagatttggcaccaggcttggtttctgtgcagcctcttaggcagagagccccaggagagggaagcaggctgtcagctgtggctttgcacgctctcagctgtcttgaaggttggttggctcttcccgctctctgaggtacccaattttaccttgttaaaggatggatgtggatgctggaggcttaaagaagaccagatctacaatgcagtgagaagagaagaaacagaaaatacagttggatctctactccatttcctcaccaagctcccagcctccgagacagcccatggaaggataagcgttggtccatgcttaaagcaatgtgtccgagacactgtatgtgagtatcgcgccaccctccaaaggacttcaatatcgcagtacatcaccggttctctcctagaagcaaccacgtctttgggagcaagaagtggccttctcagtacttttggaggatccactggacgaatgatgctgaaagaacgccagccaggcccctctgtggccaattccaatgccctcccttcaagttcagctgggatcagcaaggagctgatcgatctgcagcctctcatccagttcccagaggaagtcgccagcatcctgatggagcaagagcagactatttaccgcagggtcttgccagtcgactacctttgcttcttaacacgggacttgggcactcctgaatgccagagctccttgccctgcctcaaagcatccatctcagcgtcgattcttaccactcagaatggagagcacaatgcccttgaagatctggtgatgaggtttaatgaggtgagctcctgggtgacatggctgatcctcacggcaggctccatggaggagaagcgagaagtcttttcatatttggtgcatgtggccaaatgctgctggaacatgggcaactacaacgctgtcatggagttcttggctggcctcaggtcaagaaaagttttaaaaatgtggcagttcatggaccagtctgatattgagaccatgaggagcctgaaggatgctatggcccagcatgagtcctcttgtgagtacagaaaggtggtgacacgtgccctgcacatccctggctgtaaggtggttccattctgtggggtgtttctgaaggagctctgtgaagtgcttgacggcgcctccggtctcatgaagctttgcccgcggtacaattcccaagaagaaactttagagtttgtagcagattacagtggacaagataatttcttacaacgagtgggacaaaatggcttaaagaattcggagaaggagtccactgtcaacagcatctttcaggtcatccggagctgcaatcgaagtctggagacagacgaggaggacagccccagtgaaggaaacagctccaggaaaagctccttgaaggataaaagccgatggcagtttataattggagatttgttggattcagacaatgacatctttgagcaatccaaagaatacgactctcatggttcagaggactcacagaaggccttcgaccatgggacggagctcatcccttggtacgtgctgtccatccaagccgatgtgcaccagttcctgctgcagggggccacggtcatccactacgaccaggacacacacctctctgcccgctgcttcctccagcttcagcccgacaatagcaccttgacctgggtaaagcccacaactgcctccccagccagcagtaaagcaaaacttggtgtacttaataacacagctgagcctggaaaattcccactactgggtaatgctggattaagtagcctgacggaaggggtcttggatctttttgcagtgaaggctgtatacatgggccaccctggcattgatatacacactgtgtgtgttcagaacaaactgggtagcatgttcctgtcagagactggtgtgacattgctctatgggcttcagaccacagacaacagattattgcacttcgtggcaccaaagcacacagctaaaatgctcttcagcggattattggaactcactagagctgtgagaaagatgaggaaattccctgaccaaagacagcagtggctgcggaaacagtacgtcagcctttatcaggaggatggacggtatgaaggcccaactttggctcacgctgtggagttgtttggtggcagacggtggagtgctcgaaaccccagccccggaacatcagcaaagaatgctgagaagcccaatatgcagagaaacaataccctgggcataagcactaccaagaaaaagaagaaaatcctcatgaggggtgagagtggagaggtaactgacgatgagatggcaacccgaaaggccaagatgcacaaagagtgtcgaagccggagtggttctgatcctcaagacattaatgaacaagaagaatcagaggtgaatgccatcgctaaccctccaaaccccctcccttccagaagagcccactctttgaccacagctgggtcccccaacttggctgccgggacgtcatctcccatcaggccagtgtcctcccctgtgctgtcttcttcaaacaagagcccatccagtgcttggagcagtagtagctggcacgggcggatcaaaggcggcatgaagggatttcagagcttcatggtttcagatagcaacatgagttttgttgaatttgttgagctgttcaaatcattcagtgtcaggagccgcaaggacctgaaggatctgtttgatgtctatgcagtgccctgcaaccgatctggctccgagtcagccccactctacaccaacctgacaattgatgaaaacaccagcgatcttcagcctgacctagatctgttgaccagaaatgtctcggatttggggttgttcattaagagtaaacagcagctatcggacaaccagaggcagatatctgatgccattgctgctgcaagcattgtgacaaatggcactgggattgagagcacatctctgggcatttttggggtgggcatacttcagctcaacgatttcctcgtgaattgccaaggagaacactgcacttatgatgaaatcctcagcatcatccagaagttcgagcctagcatcagtatgtgtcatcagggactaatgtcatttgaagggtttgccaggtttctgatggataaagaaaattttgcctcaaaaaatgatgagtcacaggagaacattaaagaactgcagctacccctctcatactattacatcgaatcttcgcacaatacctacctcacgggccatcagctcaaaggagaatcctcggtagaactctacagccaggtccttttgcaaggctgtcgaagtgtagaattggactgctgggacggagacgatgggatgcccatcatttatcatggacatacgctgacaaccaagatccccttcaaggaagtggttgaagccattgatcgcagtgccttcatcaactctgacctgccaatcatcatatcgattgagaaccactgttcattgcctcagcaacgaaaaatggcagaaattttcaagactgtgtttggagaaaagctggtgactaaattcttatttgagactgatttctcagatgatccaatgcttccttcacctgaccaactcagaaagaaagttcttcttaaaaacaagaagctaaaagcccatcagacgccagtggatatcttaaagcaaaaggctcatcagttagcatctatgcaagtgcaggcttataatggtgggaatgccaacccccgacctgccaataatgaggaagaggaagatgaggaggacgaatatgattatgactatgaatccctttctgatgacaacattctggaagacagacctgaaaataaatcatgtaatgacaagcttcagtttgaatataatgaagaaatcccaaagaggataaagaaagcagataactctgcttgcaacaaaggaaaggtttatgatatggaactgggagaagaattttatcttgatcagaataaaaaggaaagcagacagattgcaccagagctttctgaccttgtaatctattgtcaagcagtaaaatttccaggactgtcaactctaaatgcatctggctctagcagaggaaaagaaaggaaaagcaggaagtccatttttggcaacaatccgggcagaatgagcccaggggagacagcatcatttaacaaaacatctggaaaaagttcctgtgaaggcattcgacagacctgggaggaatcttcttcccctctcaacccaaccacgtccctcagtgctatcattagaactcccaaatgttatcatatctcgtcgctgaatgaaaatgccgccaaacgtctgtgtcgcaggtattctcagaaactgacccagcacaccgcctgtcagctgctgagaacttaccctgctgccacccgcatcgactcttccaacccgaaccccctcatgttctggctccatgggatacagcttgtggcactcaactaccagactgatgatctccctttacatttaaatgctgcaatgtttgaggcaaatggtggttgtggttatgtattgaaacctccagttctgtgggacaagaactgccccatgtatcagaagttttctccactagaaagagatctggacagcatggatcctgcagtctattctttaactattgtctctggtcagaatgtgtgccccagtaatagcatgggaagcccgtgcattgaagtcgacgtcctgggcatgcctctggacagctgccatttccgcacaaagcccatccatcgaaacaccctgaaccccatgtggaacgagcagtttctgttccacgttcacttcgaagatcttgtatttcttcgttttgcagttgtggaaaacaatagttcagcggtaactgctcagagaatcattccactgaaagctttaaaacgaggatatcgacatcttcagctgcgaaaccttcacaatgaagtcttggagatttctagtttattcattaacagcagaaggatggaagaaaattcctctggcaataccatgtcagcctcttcgatgtttaatacagaagaaagaaaatgtttgcagactcacagagtcacggtgcatggggtcccagggccagagccctttaccgttttcactattaatggaggcaccaaggcaaagcagcttctgcagcaaattctgacaaatgaacaagacatcaaacctgttaccacagactattttttgatggaagaaaaatattttatatctaaagaaaagaatgaatgtaggaaacaaccattccagagagccattggtccagaagaggagatcatgcaaattttaagcagctggtttccagaagagggatacatgggcaggattgtcttaaaaacccagcaggaaaacctagaagagaaaaacattgttcaagatgacaaagaggtgatcttgagctcagaggaggagagtttctttgtccaagtgcatgatgtttctccagagcaacctcgaacagtcatcaaagcaccccgcgtcagcactgcacaggatgtcattcagcagaccttatgcaaagccaaatattcctacagcatcctgagcaaccccaatccaagcgactatgtgcttttggaagaggtggtgaaagacactaccaacaagaagactaccacaccaaagtcctctcagcgggtccttctggatcaggagtgtgtgtttcaagcccaaagcaagtggaaaggtgcaggaaaattcatccttaagctaaaggagcaggtgcaggcatctcgagaagataaaaagaaaggcatttctttcgcaagtgaactcaagaagctcaccaagtcaactaaacagccccgaggacttacatcaccttctcagctcttgacctcagaaagtatccaaaccaaggaggagaaacctgtgggtggcttgtcctccagtgacacaatggattaccgacagtgactaagggcagcatgtttaacccaggtatagtaagtcattgcaccatcctggaacagggcttaacttaaactactttgtaaggaaggcataattagtacaatgtcttttatcttttccaacaggaggatgtcccttgaaggcaggtaggaatgggaccttaaaacaggaaaagggctctgaagatatgtgtaacatgatatgctattgaacaccgcctataaagaaaaagggaaagaggctgggcgtggtggcgcatgcctgtaatcccagcactttgggaggccaaggcaggcagatcacctgaggtcagttcaagaccagcctgaccaacatggagaaaccccgtctctactaaaaatacaaaattagctgggcatggtggtgcatgcctataatcccagctactggggaggctgaggcaggagaatcacttgaacttggaaggcagaggttgcagtgagctgagatcacaccattgcactccagcctgggcaatgagagtgaaaactccgtctcaaaaaaaaaaaaa

SEQ ID NO: 64144 - DNA, 6456 bp, Artificial Sequence
  derived and/or modified sequence
attcagtgggtcgtggtgattaatggtttcagaaggaagtgcagcaggaagagactttgcaggaatggaagaggtgaggcagctccacgtgagattctgcaaagggattaagatttggcaccaggcttggtttctgtgcagcctcttaggcagagagccccaggagagggaagcaggctgtcagctgtggctttgcacgctctcagctgtcttgaaggttggttggctcttcccgctctctgaggtacccaattttaccttgttaaaggatggatgtggatgctggaggcttaaagaagaccagatctacaatgcagtgagaagagaagaaacagaaaatacagttggatctctactccatttcctcaccaagctcccagcctccgagacagcccatggaaggataagcgttggtccatgcttaaagcaatgtgtccgagacactgtatgtgagtatcgcgccaccctccaaaggacttcaatatcgcagtacatcaccggttctctcctagaagcaaccacgtctttgggagcaagaagtggccttctcagtacttttggaggatccactggacgaatgatgctgaaagaacgccagccaggcccctctgtggccaattccaatgccctcccttcaagttcagctgggatcagcaaggagctgatcgatctgcagcctctcatccagttcccagaggaagtcgccagcatcctgatggagcaagagcagactatttaccgcagggtcttgccagtcgactacctttgcttcttaacacgggacttgggcactcctgaatgccagagctccttgccctgcctcaaagcatccatctcagcgtcgattcttaccactcagaatggagagcacaatgcccttgaagatctggtgatgaggtttaatgaggtgagctcctgggtgacatggctgatcctcacggcaggctccatggaggagaagcgagaagtcttttcatatttggtgcatgtggccaaatgctgctggaacatgggcaactacaacgctgtcatggagttcttggctggcctcaggtcaagaaaagttttaaaaatgtggcagttcatggaccagtctgatattgagaccatgaggagcctgaaggatgctatggcccagcatgagtcctcttgtgagtacagaaaggtggtgacacgtgccctgcacatccctggctgtaaggtggttccattctgtggggtgtttctgaaggagctctgtgaagtgcttgacggcgcctccggtctcatgaagctttgcccgcggtacaattcccaagaagaaactttagagtttgtagcagattacagtggacaagataatttcttacaacgagtgggacaaaatggcttaaagaattcggagaaggagtccactgtcaacagcatctttcaggtcatccggagctgcaatcgaagtctggagacagacgaggaggacagccccagtgaaggaaacagctccaggaaaagctccttgaaggataaaagccgatggcagtttataattggagatttgttggattcagacaatgacatctttgagcaatccaaagaatacgactctcatggttcagaggactcacagaaggccttcgaccatgggacggagctcatcccttggtacgtgctgtccatccaagccgatgtgcaccagttcctgctgcagggggccacggtcatccactacgaccaggacacacacctctctgcccgctgcttcctccagcttcagcccgacaatagcaccttgacctgggtaaagcccacaactgcctccccagccagcagtaaagcaaaacttggtgtacttaataacacagctgagcctggaaaattcccactactgggtaatgctggattaagtagcctgacggaaggggtcttggatctttttgcagtgaaggctgtatacatgggccaccctggcattgatatacacactgtgtgtgttcagaacaaactgggtagcatgttcctgtcagagactggtgtgacattgctctatgggcttcagaccacagacaacagattattgcacttcgtggcaccaaagcacacagctaaaatgctcttcagcggattattggaactcactagagctgtgagaaagatgaggaaattccctgaccaaagacagcagtggctgcggaaacagtacgtcagcctttatcaggaggatggacggtatgaaggcccaactttggctcacgctgtggagttgtttggtggcagacggtggagtgctcgaaaccccagccccggaacatcagcaaagaatgctgagaagcccaatatgcagagaaacaataccctgggcataagcactaccaagaaaaagaagaaaatcctcatgaggggtgagagtggagaggtaactgacgatgagatggcaacccgaaaggccaagatgcacaaagagtgtcgaagccggagtggttctgatcctcaagacattaatgaacaagaagaatcagaggtgaatgccatcgctaaccctccaaaccccctcccttccagaagagcccactctttgaccacagctgggtcccccaacttggctgccgggacgtcatctcccatcaggccagtgtcctcccctgtgctgtcttcttcaaacaagagcccatccagtgcttggagcagtagtagctggcacgggcggatcaaaggcggcatgaagggatttcagagcttcatggtttcagatagcaacatgagttttgttgaatttgttgagctgttcaaatcattcagtgtcaggagccgcaaggacctgaaggatctgtttgatgtctatgcagtgccctgcaaccgatctggctccgagtcagccccactctacaccaacctgacaattgatgaaaacaccagcgatcttcagcctgacctagatctgttgaccagaaatgtctcggatttggggttgttcattaagagtaaacagcagctatcggacaaccagaggcagatatctgatgccattgctgctgcaagcattgtgacaaatggcactgggattgagagcacatctctgggcatttttggggtgggcatacttcagctcaacgatttcctcgtgaattgccaaggagaacactgcacttatgatgaaatcctcagcatcatccagaagttcgagcctagcatcagtatgtgtcatcagggactaatgtcatttgaagggtttgccaggtttctgatggataaagaaaattttgcctcaaaaaatgatgagtcacaggagaacattaaagaactgcagctacccctctcatactattacatcgaatcttcgcacaatacctacctcacgggccatcagctcaaaggagaatcctcggtagaactctacagccaggtccttttgcaaggctgtcgaagtgtagaattggactgctgggacggagacgatgggatgcccatcatttatcatggacatacgctgacaaccaagatccccttcaaggaagtggttgaagccattgatcgcagtgccttcatcaactctgacctgccaatcatcatatcgattgagaaccactgttcattgcctcagcaacgaaaaatggcagaaattttcaagactgtgtttggagaaaagctggtgactaaattcttatttgagactgatttctcagatgatccaatgcttccttcacctgaccaactcagaaagaaagttcttcttaaaaacaagaagctaaaagcccatcagacgccagtggatatcttaaagcaaaaggctcatcagttagcatctatgcaagtgcaggcttataatggtgggaatgccaacccccgacctgccaataatgaggaagaggaagatgaggaggacgaatatgattatgactatgaatccctttctgatgacaacattctggaagacagacctgaaaataaatcatgtaatgacaagcttcagtttgaatataatgaagaaatcccaaagaggataaagaaagcagataactctgcttgcaacaaaggaaaggtttatgatatggaactgggagaagaattttatcttgatcagaataaaaaggaaagcagacagattgcaccagagctttctgaccttgtaatctattgtcaagcagtaaaatttccaggactgtcaactctaaatgcatctggctctagcagaggaaaagaaaggaaaagcaggaagtccatttttggcaacaatccgggcagaatgagcccaggggagacagcatcatttaacaaaacatctggaaaaagttcctgtgaaggcattcgacagacctgggaggaatcttcttcccctctcaacccaaccacgtccctcagtgctatcattagaactcccaaatgttatcatatctcgtcgctgaatgaaaatgccgccaaacgtctgtgtcgcaggtattctcagaaactgacccagcacaccgcctgtcagctgctgagaacttaccctgctgccacccgcatcgactcttccaacccgaaccccctcatgttctggctccatgggatacagcttgtggcactcaactaccagactgatgatctccctttacatttaaatgctgcaatgtttgaggcaaatggtggttgtggttatgtattgaaacctccagttctgtgggacaagaactgccccatgtatcagaagttttctccactagaaagagatctggacagcatggatcctgcagtctattctttaactattgtctctggtcagaatgtgtgccccagtaatagcatgggaagcccgtgcattgaagtcgacgtcctgggcatgcctctggacagctgccatttccgcacaaagcccatccatcgaaacaccctgaaccccatgtggaacgagcagtttctgttccacgttcacttcgaagatcttgtatttcttcgttttgcagttgtggaaaacaatagttcagcggtaactgctcagagaatcattccactgaaagctttaaaacgaggatatcgacatcttcagctgcgaaaccttcacaatgaagtcttggagatttctagtttattcattaacagcagaaggatggaagaaaattcctctggcaataccatgtcagcctcttcgatgtttaatacagaagaaagaaaatgtttgcagactcacagagtcacggtgcatggggtcccagggccagagccctttaccgttttcactattaatggaggcaccaaggcaaagcagcttctgcagcaaattctgacaaatgaacaagacatcaaacctgttaccacagactattttttgatggaagaaaaatattttatatctaaagaaaagaatgaatgtaggaaacaaccattccagagagccattggtccagaagaggagatcatgcaaattttaagcagctggtttccagaagagggatacatgggcaggattgtcttaaaaacccagcaggaaaacctagaagagaaaaacattgttcaagatgacaaagaggtgatcttgagctcagaggaggagagtttctttgtccaagtgcatgatgtttctccagagcaacctcgaacagtcatcaaagcaccccgcgtcagcactgcacaggatgtcattcagcagaccttatgcaaagccaaatattcctacagcatcctgagcaaccccaatccaagcgactatgtgcttttggaagaggtggtgaaagacactaccaacaagaagactaccacaccaaagtcctctcagcgggtccttctggatcaggagtgtgtgtttcaagcccaaagcaagtggaaaggtgcaggaaaattcatccttaagctaaaggagcaggtgcaggcatctcgagaagataaaaagaaaggcatttctttcgcaagtgaactcaagaagctcaccaagtcaactaaacagccccgaggacttacatcaccttctcagctcttgacctcagaaagtatccaaaccaaggaggagaaacctgtgggtggcttgtcctccagtgacacaatggattaccgacagtgactaagggcagcatgtttaacccaggtgaagatctttaagcaagaagttaaagagtgaacatggtggaaaaaatataattattttcatcagacttaaactggaaattgatgatttctgaactgaagccttcacacatgtgagatccatgctgaggagaagcaaaatggcacagggctagttgccaccaaccaatttactgatgaatgaagcccaggggactgccattttataaatgtcagcagttggaaaaatcgtcacgaattgacttagagcaagggtcagcaagcttgtctgtaaagggccaaacagtaaatattttagggctgggggccataaaatatgttgcaaccacccaattctgccattgtagtgcaaaagcagccatagacaacacatacatgaacgaacgtggctgtattccaataaaactttatttatggacactgaaa

SEQ ID NO: 64145 - DNA, 5985 bp, Artificial Sequence
  derived and/or modified sequence
atggtgagcgaaggctctgctgccggacgtgactttgcaggcatggaagaagtgaggcaactccatgtgaggttctgtaaaggtattaaaatatggcaccaggcctggtttctgtgctctctgctggggagagagcctcaagagcgggaggccggttgccagttgtggctttgtacactgtccgctgtgctgaaggtggggtggctgttccccctgagtgaggttcccaattttacccttctcaaagatgggtgcggctgctggaggctgaaggaagatcaaatttacaatgcagtgcggagggaagagactgagaatacggtgggaagtttgctgcatttccttaccaaactcccagcaagtgagaccgcgcacggcaggatatcagtcgggccttgtctgaagcagtgcgtcagagatacggtatgcgagtatagagcgacacttcagcgcacatcgatcagccaatacattacaggcagtctgctggaggcaacaacttcgttgggagctaggtccgggctgctgtcgacttttggaggctctaccggcaggatgatgttaaaggagagacagcctggacccagtgtggcgaacagcaatgccctcccaagtagctctgccggtatcagtaaggaactgatcgacttgcagccactcatccagtttccggaagaagtcgctagtatactgatggagcaagaacagacaatttatcggagggtccttccagtggactacctctgtttcttaacccgcgacttagggacacctgagtgccagagctctcttccctgcctgaaggcctcaatctccgccagcattctcactacacagaacggggagcataacgccctggaagacctagtcatgcggtttaacgaggtcagcagctgggtgacatggctcatcctcaccgcaggatccatggaggaaaaacgcgaagtattcagttacctggtacacgtcgcgaagtgttgttggaacatgggcaattacaatgcagtgatggagttcttggccggtttgcgctcaaggaaagttctgaagatgtggcaattcatggatcagtctgatatcgagacaatgagaagtcttaaagatgccatggctcagcacgaaagtagctgtgagtaccggaaggtcgtgacacgcgctttgcatattccaggctgcaaagtggtgcctttctgtggagtatttcttaaggagctttgtgaagtgttggatggcgcttctggccttatgaagctctgtcctagatataactcccaggaggagacacttgaattcgtcgcggattacagcggccaagacaacttcctgcagcgggtgggtcagaacggacttaaaaatagcgaaaaggaatctactgtgaatagcatctttcaggtcatccgcagctgcaaccggtcccttgagaccgacgaggaggattccccctccgagggcaactcctccaggaagagtagcctgaaagacaagagcagatggcagtttattattggggatcttctggactccgataatgatattttcgaacagagtaaagagtacgacagccacggctctgaggacagccagaaggcgttcgatcacgggactgagctaattccatggtacgtgctgagcatccaggctgatgtacaccagttcttactgcagggagcaactgttattcactatgaccaggatacccacctgagcgcgagatgctttcttcagctgcagccggataacagtactctgacgtgggtaaaacctaccacagcatcccccgcttcttctaaggcaaagctaggcgtacttaataacaccgcagagccaggaaagttcccgctcctggggaatgccggattgtcctcacttacagagggggtactggacttatttgccgtgaaggcagtctatatgggccaccctgggattgacatccacactgtctgcgttcagaataaattgggctcaatgtttttgtccgagacaggtgtgacactgctttatggattacaaacaactgataatagactgctgcacttcgtggcacccaaacacaccgccaagatgctgttctccggcctgttggaactaacgcgggcagtacgcaagatgcggaagtttcccgatcagcgtcagcagtggcttaggaaacagtacgtctccctgtatcaggaggacggcaggtatgagggtccaaccctggcccacgctgtagagcttttcgggggacgtagatggtcagccaggaacccaagcccgggaacaagtgcaaagaacgcggagaaacccaacatgcagcgaaataacaccctcggtatttcgactacaaagaaaaagaaaaagattctgatgagaggggagagcggggaggtaactgacgacgaaatggccactcggaaagctaagatgcataaagaatgcaggtcccggtcggggagtgacccacaggacattaatgaacaggaggagtcagaggtgaatgcgatcgccaacccaccaaatcccctgcccagccggcgtgcacactccttaacaaccgctggctctcctaacctagccgcaggcacctctagccctatcagacctgtgtcctcacctgtccttagctctagcaataagagtccctcatccgcttggagcagctccagctggcacggtcggatcaagggaggcatgaagggattccagtccttcatggtgtcggattccaatatgagtttcgtcgagttcgtggagttgtttaagtctttctcggtgaggtctcggaaagatctgaaggatctcttcgatgtctatgcagtgccctgcaacagaagcggctccgagtctgctcctctctacacaaatctgactatcgatgaaaatacttccgacttgcaacctgatttggacctgctgacgagaaacgtttcagacctaggcctctttatcaagagcaagcagcaactctcagataaccagcgccagatctcagacgctattgctgccgcatcaatcgtcactaatggaactggtatcgagtccacatctctggggatattcggggtcgggatccttcagcttaacgattttctggtcaactgccaaggtgaacactgcacctacgacgaaatactgtccataatccagaagttcgaaccttcaataagcatgtgtcaccaaggactgatgtcatttgaggggttcgccagattcctgatggacaaagagaattttgcttcaaagaatgatgaaagccaggagaacataaaagaacttcaactgcccctgtcctactactatattgagagctcacacaatacatatctcaccgggcatcagctcaagggtgagtcttccgtcgaattgtattcacaggtgctgcttcagggatgtcgctcagtggaattagattgctgggacggcgatgatggcatgcctatcatctaccacggccatactttgactactaagatcccctttaaagaggtggttgaggcaatcgaccgctcagcatttattaactccgacctgccaataatcatttccatcgagaatcattgctcacttccgcagcagcggaaaatggccgaaatattcaagaccgtattcggtgagaagctggttaccaagttcttatttgaaacagatttctccgatgatcccatgcttccttcacccgatcagttaagaaagaaagtgttgcttaaaaacaaaaagttaaaagcccaccagacgccagttgacatactgaaacagaaggcacatcagctcgccagcatgcaagtccaggcttacaacgggggaaatgcaaacccgagaccagctaataacgaagaggaggaagacgaggaagatgagtacgattatgattacgagagccttagcgatgacaatattctggaggatcgtccagagaacaagtcttgtaacgataagctacagttcgagtataacgaggaaattccaaagcggataaagaaagctgataattctgcctgtaataagggcaaggtctacgacatggaactcggggaagagttttaccttgaccagaacaagaaagagagccgtcaaatcgccccagaattgtctgacctggtcatctattgccaggcagtcaaatttcccggtttatccacactgaatgcatcgggcagcagtcggggaaaggaacggaagtctagaaagagtatattcggaaacaatccgggtcgaatgtcccccggtgagacagccagtttcaataaaaccagtggcaaatcaagttgcgaggggattcggcagacgtgggaggagtcttcttcaccgctcaaccctactactagcttatctgccatcattagaactcccaagtgttaccacattagctctcttaacgaaaacgccgcaaagaggctctgccgtcgttacagtcagaagttaacccagcacactgcttgccaactgctgcggacatatcctgcagcgacgcggatcgatagttcaaaccctaaccccttaatgttctggttgcacggcattcaactcgtggctttgaactaccagacggacgacttgccgctgcaccttaacgctgccatgttcgaagcaaacggcggatgcggatacgtacttaagcccccagtcctctgggataagaattgtcctatgtaccaaaagttttcccccctggaacgcgacctggactctatggacccggctgtttactctttaacaatagtgtccggccagaacgtttgcccatcaaacagtatgggaagtccttgcattgaagtggacgtattaggaatgccccttgacagttgtcactttaggaccaagcctattcataggaatacactcaaccctatgtggaacgagcagttcttatttcacgtacacttcgaagatctggtttttcttagatttgccgtggtggaaaataactcctctgcagtgaccgcacagagaatcatccccctgaaggctctgaaacgaggatacagacatttgcaacttagaaacctccataacgaagtgctcgagatctcgagcctgttcattaattccagacggatggaagaaaatagttccggcaacaccatgtctgcctccagcatgtttaataccgaagagcgcaagtgtttgcaaactcacagggtgacggtccatggcgttccaggccctgaaccgttcaccgtgttcactattaatgggggaaccaaagccaagcagctgttacagcagatattaaccaatgagcaggacattaagccagtgaccaccgactactttctgatggaggagaagtatttcatttccaaggagaaaaacgagtgcagaaaacagccattccagcgggctattggccctgaggaggaaatcatgcagatcctgtcttcctggttccctgaagagggctacatggggagaattgtcttgaagacccaacaagagaacctggaggaaaagaatatcgtgcaggatgacaaagaggttatactgtcgtccgaagaggagagctttttcgtgcaggtgcatgacgtcagccccgaacaaccgaggacagtcataaaggcgccaagagttagcactgcccaggatgttattcagcagactctgtgtaaagccaaatattcatacagcatactgagcaatcctaatccgtccgattatgtgctactagaagaagtcgtgaaggacacgaccaataaaaagacaacaacacccaaaagtagtcagcgagtgctgctggatcaggaatgcgtcttccaagctcaatccaagtggaaaggtgctggcaaatttattctgaaattgaaggaacaggtgcaggccagtcgggaggacaagaaaaagggaatctcgttcgcgagtgagctgaagaaactcactaaaagtactaagcaaccccgtggactgacttccccttcccagctgctgacttccgaatccattcaaactaaggaagaaaagcctgtaggcggtctgagtagctctgatacaatggactaccggcaatac

SEQ ID NO: 64146 - DNA, 5985 bp, Artificial Sequence
  derived and/or modified sequence
atggtctccgaaggcagtgccgcaggtcgtgatttcgccggtatggaggaagtgagacagttgcacgtgcgtttttgcaagggtatcaagatttggcaccaggcatggtttctatgtagtctgctgggcagagagccacaggaacgagaagcaggctgtcagctgtggctgtgcacactgtccgccgtgctcaaggtcggatggctgttcccactttccgaagtgcccaacttcacacttctgaaggacgggtgtggctgttggaggctgaaagaggaccagatatacaacgcagtgagacgcgaagaaacggagaacaccgtgggctctctattacacttcctgaccaaactgcccgcttcagagacggcacacgggagaatcagcgtcggcccatgccttaaacagtgcgttagagacacggtgtgcgaataccgagctactctgcaaaggaccagtatttcccaatacatcaccggctccctgctcgaggcaacgacttccttaggggctcggtcagggctactgagcactttcggagggtcaactgggaggatgatgctcaaagaaaggcagccaggtccttcagtggcgaattctaatgccttgccttcttctagtgccggaatttccaaagagctaatagacctgcagcccctcattcagttcccagaagaggtggcctctatcctgatggagcaagagcagactatctatagacgagtgttgcccgtggattatctttgctttctgacacgggacctcggcacccctgagtgccagtcgtcactgccatgtctgaaggcctccatcagtgcctctattctcactacgcagaacggagaacacaacgcccttgaggatttggtaatgaggtttaacgaggttagctcttgggtgacttggctgatcctgacagcgggaagtatggaggaaaaaagggaggttttcagctaccttgtccatgtggcaaaatgttgctggaacatgggcaactataacgccgtgatggaatttcttgctggcctgcgctccaggaaagttcttaaaatgtggcagttcatggatcagtcggacatcgagactatgcgttccctgaaggatgcaatggctcagcatgaatccagctgtgagtatagaaaggtggttacacgagctttgcacataccaggctgcaaagtagttcccttttgtggggtcttcctcaaagagctgtgtgaagtgctggatggagcctcaggcttaatgaaactgtgcccacgctacaacagccaggaagaaaccctggagttcgttgcagattacagcggacaagataatttcctccagagggtgggccagaacggccttaagaatagcgagaaggagtccacagtgaattctattttccaggtgatcagatcttgtaataggtcactcgagacagatgaagaggatagcccatctgagggaaattcgtcgcgcaagagctcactcaaagacaaaagccgctggcagttcatcatcggcgatctgctggattccgacaatgacatattcgagcagagtaaagaatatgatagccacggtagcgaggacagtcagaaggcattcgaccacggcaccgagttaataccgtggtacgttctttcgattcaggctgacgtccaccaatttctgctacaaggagccaccgttatccactatgatcaggatacccacctaagtgcaagatgctttcttcaacttcagccagataactcaaccctgacatgggtgaaacctacgacagcctcaccagcatcgagcaaggctaaattgggagttctgaacaacaccgccgaacccggaaaatttcccctcttaggaaacgccggactgtcctcgctgacggagggagtcctggacctcttcgccgtgaaggcggtgtatatgggccacccgggaatcgatattcacaccgtatgtgtgcaaaataagctagggtcgatgttcctcagtgagacaggagtgaccttgctgtatggtctgcagacgaccgataaccggctgttacacttcgtggcgccaaaacacacggccaaaatgctcttttcaggcctgctagagttaactcgagcggtaaggaaaatgagaaagtttcctgaccagcgccagcaatggctgcgtaagcaatacgtctcactatatcaggaggacggtagatatgaaggaccgactctcgcccacgcagtggagctgtttggaggacggaggtggagcgccagaaaccccagccccggtacgtcagctaagaacgcggagaaaccaaatatgcaaagaaacaacacactgggaatttctactactaagaaaaagaagaagattctgatgcgcggtgaatccggcgaggtgactgacgatgagatggccactagaaaggcaaaaatgcacaaggaatgcaggtctcgctctggaagtgacccacaggacattaatgaacaagaggagagtgaggtgaatgccatagctaatccacccaacccgctcccctcaaggcgcgcacactctctcacaacagctggctcgcccaatcttgctgccggaacttcatcccccatcaggccagttagcagtcccgtcctaagttcttctaacaagtctccgtcttctgcctggtcttcctcgtcttggcacgggagaattaaaggaggcatgaaggggtttcagtcctttatggtaagcgatagcaacatgtcgttcgtcgaattcgtggaattatttaagtctttctcagtgaggagtagaaaagatctgaaggatttgttcgacgtgtatgcggttccttgtaaccgatctggctctgagagtgccccactgtataccaatttgacaatcgacgagaacacctccgacctccagccggaccttgatctgttgacaaggaacgtgagcgacctgggtctttttatcaaatcgaagcaacagctcagcgataatcagaggcagatctccgatgctatagccgctgcttccattgtaacaaatgggacaggtatcgagagcacatccctcggaattttcggcgttggtatcctccagctcaacgatttcctggtcaattgtcagggggaacactgcacatacgacgagatcctgtccattatccagaagttcgagccttctatatctatgtgtcaccagggactgatgtcctttgagggtttcgcaagattcctgatggacaaagagaacttcgcatccaaaaacgacgagagccaggaaaatataaaagagctacagttgccacttagctactactacattgaatcgtcccacaacacctacctaacaggtcaccagctgaaaggggagtctagcgtggagctttattcccaagtccttctgcaggggtgtcgatcagtagagctagattgctgggatggagatgatggcatgccgatcatataccacggacacactctgactacgaagatcccgtttaaggaagtagtagaggcgatcgacagatctgcttttataaactctgatctccctattatcatatctatcgagaaccactgcagcctaccacagcaacgcaagatggccgaaatctttaagacagttttcggggagaaattagtcacgaaatttttgtttgaaactgatttcagtgatgatcctatgctccccagccctgaccagctgagaaaaaaggtattgctaaagaacaagaagttaaaggcacaccagacaccggtggacatcctcaagcagaaggctcatcagctcgccagcatgcaggtgcaggcatataacggaggcaacgcgaacccaagaccagctaacaacgaggaggaagaagatgaagaggatgagtacgactatgactatgagtccctgtctgatgacaatattttggaagacagaccagaaaacaagagttgtaacgacaagctccagtttgagtacaatgaggagattcccaagcgtattaaaaaagctgacaacagcgcttgtaacaagggtaaagtgtatgatatggaattgggcgaggagttctatctggatcagaacaagaaagagtcacggcagattgcacccgagttaagcgatctggttatctactgccaagcagtaaaattcccagggctgtccactctcaacgccagcggctcaagccgtggcaaggagaggaaatctcgaaaatctatcttcgggaacaacccgggtagaatgagcccaggcgaaacagcttcctttaacaaaactagcggcaagagctcttgcgagggcatccgccagacctgggaggaatctagttcgcccctcaatcctaccacaagtttgtctgctataattagaacccctaaatgctaccatatatccagcctgaatgagaacgcagctaagcggctctgcaggcgatactcccagaagcttactcagcatacagcatgtcagctcctgcggacatatcccgcagccacccgtatcgattcatctaatcccaacccactcatgttttggctgcacgggatccagcttgtggcgctcaactaccaaacagacgacctgccactccacctaaacgcagccatgttcgaggccaacggcggttgcgggtatgtgctaaagccccctgtgctgtgggacaagaattgtccgatgtaccagaaattttcaccacttgagcgagatctcgattcaatggacccagctgtgtactccctgaccatcgtgtccggacagaatgtgtgtcccagcaactctatggggtccccgtgtatcgaagtggatgtcttggggatgcctctagactcgtgccacttccgcaccaagccaatccataggaacaccctcaacccaatgtggaacgagcagtttctgttccacgtccatttcgaagatctggttttccttcggtttgctgtggtcgaaaacaatagctcggccgtcactgctcagaggatcatccccctaaaagccctcaagcgcggttatagacacttacagctccgcaacctgcacaacgaggtattggaaatcagctctcttttcattaactccaggaggatggaagaaaactcatcaggaaacaccatgagcgcttcttcgatgttcaacactgaagaacgcaagtgtctccagactcacagagttactgtacatggggtgcctggcccagagccattcacggtcttcaccataaacgggggaaccaaggctaaacagctcttgcagcagatcctcacaaatgagcaagatattaagcccgtgacaactgattacttcctgatggaggaaaagtacttcatcagtaaggaaaagaatgaatgtcgaaaacagcccttccagcgcgcaattggcccagaagaggagataatgcagatcctatcttcttggttccctgaagaaggctacatgggtcgcatcgtccttaagacccagcaggagaaccttgaggaaaaaaacattgtccaggatgataaggaagtgatcctgtcctccgaagaagagtccttctttgtgcaggtacatgatgtcagtcccgagcagccacgcactgtgattaaagctccacgcgtgtctacggctcaagacgtcattcagcagactttgtgcaaagctaaatactcatacagcatcctctccaaccctaacccgagcgactacgttcttctggaggaagttgtcaaagatactaccaataaaaaaaccacaactcctaaaagttcacaacgtgtcttgctggatcaggagtgcgtctttcaggcacaatctaagtggaaaggggctggaaagttcatcctgaaactcaaggaacaggtgcaggcaagcagggaagataagaagaaaggcataagcttcgctagcgaattaaagaaattaaccaaaagtactaaacagccacgcggtcttacttccccttctcaattgctgacgtcagaaagtatccagacaaaggaggaaaagcccgtggggggtctttcaagcagcgataccatggattatcgacaatat

SEQ ID NO: 64147 - DNA, 5985 bp, Artificial Sequence
  derived and/or modified sequence
atggtgagcgagggcagcgccgccggcagagacttcgccggcatggaggaggtgagacagctgcacgtgagattctgcaagggcatcaagatctggcaccaggcctggttcctgtgcagcctgctgggcagagagccccaggagagagaggccggctgccagctgtggctgtgcaccctgagcgccgtgctgaaggtgggctggctgttccccctgagcgaggtgcccaacttcaccctgctgaaggacggctgcggctgctggagactgaaggaggaccagatctacaacgccgtgagaagagaggagaccgagaacaccgtgggcagcctgctgcacttcctgaccaagctgcccgccagcgagaccgcccacggcagaatcagcgtgggcccctgcctgaagcagtgcgtgagagacaccgtgtgcgagtacagagccaccctgcagagaaccagcatcagccagtacatcaccggcagcctgctggaggccaccaccagcctgggcgccagaagcggcctgctgagcaccttcggcggcagcaccggcagaatgatgctgaaggagagacagcccggccccagcgtggccaacagcaacgccctgcccagcagcagcgccggcatcagcaaggagctgatcgacctgcagcccctgatccagttccccgaggaggtggccagcatcctgatggagcaggagcagaccatctacagaagagtgctgcccgtggactacctgtgcttcctgaccagagacctgggcacccccgagtgccagagcagcctgccctgcctgaaggccagcatcagcgccagcatcctgaccacccagaacggcgagcacaacgccctggaggacctggtgatgagattcaacgaggtgagcagctgggtgacctggctgatcctgaccgccggcagcatggaggagaagagagaggtgttcagctacctggtgcacgtggccaagtgctgctggaacatgggcaactacaacgccgtgatggagttcctggccggcctgagaagcagaaaggtgctgaagatgtggcagttcatggaccagagcgacatcgagaccatgagaagcctgaaggacgccatggcccagcacgagagcagctgcgagtacagaaaggtggtgaccagagccctgcacatccccggctgcaaggtggtgcccttctgcggcgtgttcctgaaggagctgtgcgaggtgctggacggcgccagcggcctgatgaagctgtgccccagatacaacagccaggaggagaccctggagttcgtggccgactacagcggccaggacaacttcctgcagagagtgggccagaacggcctgaagaacagcgagaaggagagcaccgtgaacagcatcttccaggtgatcagaagctgcaacagaagcctggagaccgacgaggaggacagccccagcgagggcaacagcagcagaaagagcagcctgaaggacaagagcagatggcagttcatcatcggcgacctgctggacagcgacaacgacatcttcgagcagagcaaggagtacgacagccacggcagcgaggacagccagaaggccttcgaccacggcaccgagctgatcccctggtacgtgctgagcatccaggccgacgtgcaccagttcctgctgcagggcgccaccgtgatccactacgaccaggacacccacctgagcgccagatgcttcctgcagctgcagcccgacaacagcaccctgacctgggtgaagcccaccaccgccagccccgccagcagcaaggccaagctgggcgtgctgaacaacaccgccgagcccggcaagttccccctgctgggcaacgccggcctgagcagcctgaccgagggcgtgctggacctgttcgccgtgaaggccgtgtacatgggccaccccggcatcgacatccacaccgtgtgcgtgcagaacaagctgggcagcatgttcctgagcgagaccggcgtgaccctgctgtacggcctgcagaccaccgacaacagactgctgcacttcgtggcccccaagcacaccgccaagatgctgttcagcggcctgctggagctgaccagagccgtgagaaagatgagaaagttccccgaccagagacagcagtggctgagaaagcagtacgtgagcctgtaccaggaggacggcagatacgagggccccaccctggcccacgccgtggagctgttcggcggcagaagatggagcgccagaaaccccagccccggcaccagcgccaagaacgccgagaagcccaacatgcagagaaacaacaccctgggcatcagcaccaccaagaagaagaagaagatcctgatgagaggcgagagcggcgaggtgaccgacgacgagatggccaccagaaaggccaagatgcacaaggagtgcagaagcagaagcggcagcgacccccaggacatcaacgagcaggaggagagcgaggtgaacgccatcgccaacccccccaaccccctgcccagcagaagagcccacagcctgaccaccgccggcagccccaacctggccgccggcaccagcagccccatcagacccgtgagcagccccgtgctgagcagcagcaacaagagccccagcagcgcctggagcagcagcagctggcacggcagaatcaagggcggcatgaagggcttccagagcttcatggtgagcgacagcaacatgagcttcgtggagttcgtggagctgttcaagagcttcagcgtgagaagcagaaaggacctgaaggacctgttcgacgtgtacgccgtgccctgcaacagaagcggcagcgagagcgcccccctgtacaccaacctgaccatcgacgagaacaccagcgacctgcagcccgacctggacctgctgaccagaaacgtgagcgacctgggcctgttcatcaagagcaagcagcagctgagcgacaaccagagacagatcagcgacgccatcgccgccgccagcatcgtgaccaacggcaccggcatcgagagcaccagcctgggcatcttcggcgtgggcatcctgcagctgaacgacttcctggtgaactgccagggcgagcactgcacctacgacgagatcctgagcatcatccagaagttcgagcccagcatcagcatgtgccaccagggcctgatgagcttcgagggcttcgccagattcctgatggacaaggagaacttcgccagcaagaacgacgagagccaggagaacatcaaggagctgcagctgcccctgagctactactacatcgagagcagccacaacacctacctgaccggccaccagctgaagggcgagagcagcgtggagctgtacagccaggtgctgctgcagggctgcagaagcgtggagctggactgctgggacggcgacgacggcatgcccatcatctaccacggccacaccctgaccaccaagatccccttcaaggaggtggtggaggccatcgacagaagcgccttcatcaacagcgacctgcccatcatcatcagcatcgagaaccactgcagcctgccccagcagagaaagatggccgagatcttcaagaccgtgttcggcgagaagctggtgaccaagttcctgttcgagaccgacttcagcgacgaccccatgctgcccagccccgaccagctgagaaagaaggtgctgctgaagaacaagaagctgaaggcccaccagacccccgtggacatcctgaagcagaaggcccaccagctggccagcatgcaggtgcaggcctacaacggcggcaacgccaaccccagacccgccaacaacgaggaggaggaggacgaggaggacgagtacgactacgactacgagagcctgagcgacgacaacatcctggaggacagacccgagaacaagagctgcaacgacaagctgcagttcgagtacaacgaggagatccccaagagaatcaagaaggccgacaacagcgcctgcaacaagggcaaggtgtacgacatggagctgggcgaggagttctacctggaccagaacaagaaggagagcagacagatcgcccccgagctgagcgacctggtgatctactgccaggccgtgaagttccccggcctgagcaccctgaacgccagcggcagcagcagaggcaaggagagaaagagcagaaagagcatcttcggcaacaaccccggcagaatgagccccggcgagaccgccagcttcaacaagaccagcggcaagagcagctgcgagggcatcagacagacctgggaggagagcagcagccccctgaaccccaccaccagcctgagcgccatcatcagaacccccaagtgctaccacatcagcagcctgaacgagaacgccgccaagagactgtgcagaagatacagccagaagctgacccagcacaccgcctgccagctgctgagaacctaccccgccgccaccagaatcgacagcagcaaccccaaccccctgatgttctggctgcacggcatccagctggtggccctgaactaccagaccgacgacctgcccctgcacctgaacgccgccatgttcgaggccaacggcggctgcggctacgtgctgaagccccccgtgctgtgggacaagaactgccccatgtaccagaagttcagccccctggagagagacctggacagcatggaccccgccgtgtacagcctgaccatcgtgagcggccagaacgtgtgccccagcaacagcatgggcagcccctgcatcgaggtggacgtgctgggcatgcccctggacagctgccacttcagaaccaagcccatccacagaaacaccctgaaccccatgtggaacgagcagttcctgttccacgtgcacttcgaggacctggtgttcctgagattcgccgtggtggagaacaacagcagcgccgtgaccgcccagagaatcatccccctgaaggccctgaagagaggctacagacacctgcagctgagaaacctgcacaacgaggtgctggagatcagcagcctgttcatcaacagcagaagaatggaggagaacagcagcggcaacaccatgagcgccagcagcatgttcaacaccgaggagagaaagtgcctgcagacccacagagtgaccgtgcacggcgtgcccggccccgagcccttcaccgtgttcaccatcaacggcggcaccaaggccaagcagctgctgcagcagatcctgaccaacgagcaggacatcaagcccgtgaccaccgactacttcctgatggaggagaagtacttcatcagcaaggagaagaacgagtgcagaaagcagcccttccagagagccatcggccccgaggaggagatcatgcagatcctgagcagctggttccccgaggagggctacatgggcagaatcgtgctgaagacccagcaggagaacctggaggagaagaacatcgtgcaggacgacaaggaggtgatcctgagcagcgaggaggagagcttcttcgtgcaggtgcacgacgtgagccccgagcagcccagaaccgtgatcaaggcccccagagtgagcaccgcccaggacgtgatccagcagaccctgtgcaaggccaagtacagctacagcatcctgagcaaccccaaccccagcgactacgtgctgctggaggaggtggtgaaggacaccaccaacaagaagaccaccacccccaagagcagccagagagtgctgctggaccaggagtgcgtgttccaggcccagagcaagtggaagggcgccggcaagttcatcctgaagctgaaggagcaggtgcaggccagcagagaggacaagaagaagggcatcagcttcgccagcgagctgaagaagctgaccaagagcaccaagcagcccagaggcctgaccagccccagccagctgctgaccagcgagagcatccagaccaaggaggagaagcccgtgggcggcctgagcagcagcgacaccatggactacagacagtag

SEQ ID NO: 64148 - protein, 182 aa, Artificial Sequence
  derived and/or modified sequence
MALLTAETFRLQFNNKRRLRRPYYPRKALLCYQLTPQNGSTPTRGYFENKKKCHAEICFINEIKSMGLDETQCYQVTCYLTWSPCSSCAWELVDFIKAHDHLNLGIFASRLYYHWCKPQQKGLRLLCGSQVPVEVMGFPKFADCWENFVDHEKPLSFNPYKMLEELDKNSRAIKRRLERIKS

SEQ ID NO: 64149 - DNA, 549 bp, Artificial Sequence
  derived and/or modified sequence
atggcattgctaacagctgaaacatttaggttgcagtttaacaataagcgcaggctccgtcggccttactacccaaggaaggccctgctgtgttatcaactgactccacagaacggctctaccccaactaggggatactttgagaacaagaagaaatgtcacgccgaaatctgctttattaatgagatcaaatctatgggcctggatgagacccagtgctaccaagtgacgtgttacttgacctggtcgccgtgctcttcctgtgcctgggaactcgtggactttatcaaagcacacgaccatttgaacctgggcattttcgcgtctcgtctgtattatcattggtgcaagccacagcagaaaggcctaaggcttctatgtggaagccaggtgccagttgaggtcatgggatttccaaagtttgccgactgttgggaaaattttgtggaccacgagaaaccgctttcattcaatccgtataaaatgttagaggagctggataaaaattcccgggccatcaaacggcgtctcgaaagaatcaagtcctag

SEQ ID NO: 64150 - DNA, 549 bp, Artificial Sequence
  derived and/or modified sequence
atggccctgctgacagctgagaccttccggctgcagttcaacaacaagaggcggctgcggcggccctactaccccaggaaggccctgctgtgctaccagctgaccccccagaatggcagcacccccacccggggctactttgagaacaagaagaagtgccacgccgagatctgcttcatcaatgagatcaagtccatgggcctggatgagacccagtgctaccaggtgacctgctacctgacctggagcccctgcagcagctgtgcctgggagctggtggacttcatcaaggcccatgaccacctgaacctgggcatctttgccagccggctgtactaccactggtgcaagccccagcagaagggcctgcggctgctgtgtggcagccaggtgcctgtggaggtgatgggcttccccaagtttgctgactgctgggagaactttgtggaccacgagaagcccctgtccttcaacccctacaagatgctggaggagctggacaagaacagccgggccatcaagaggcggctggagcgcatcaagagctag

SEQ ID NO: 64151 - DNA, 549 bp, Artificial Sequence
  derived and/or modified sequence
atggccctgctgaccgccgagaccttccggctgcagttcaacaacaaaagaagactccggaggccgtattaccctcggaaggccctgttatgctaccaactaaccccccagaacgggtctaccccaacaaggggctattttgaaaataaaaagaagtgtcatgcggagatctgcttcataaacgagatcaagtctatgggtttagacgaaactcaatgttatcaggtcacttgctacctgacctggagcccatgttcaagctgtgcatgggagctcgtcgacttcataaaagctcacgaccacctgaacttaggtatctttgcctcgcgactctactatcattggtgcaaaccgcaacagaagggcctgcgcttactgtgtggcagccaggtgcctgtggaggtcatgggatttcccaagtttgcagattgttgggagaatttcgtggaccacgagaaacctctgagcttcaacccttataaaatgctagaggagctggacaagaactcccgcgccataaagcgcagactagaacgcattaagtcttag

SEQ ID NO: 64152 - DNA, 549 bp, Artificial Sequence
  derived and/or modified sequence
atggccttgttgaccgccgaaacttttaggttgcagttcaataacaagcggagacttcggcgaccatactaccctcgaaaggctctcttatgctaccagctgacaccacagaacggcagtacgcctacccgcggttacttcgagaataagaaaaaatgtcacgctgaaatttgcttcattaacgagataaaatcaatgggactggatgagacccaatgctaccaggtgacttgctatctgacctggagcccatgttcgagctgtgcatgggaactcgtagatttcatcaaagcccacgaccacctgaatctgggaatttttgctagccgcctctattatcattggtgtaagcctcagcagaagggcctgagactattatgcggatcccaggtgccagtcgaggtgatgggctttcctaaattcgctgactgctgggagaactttgtagaccatgagaagccccttagttttaatccatataagatgctcgaggagctagacaagaattcccgtgcaatcaagaggaggctggagagaataaaaagctag

SEQ ID NO: 64153 - DNA, 1046 bp, Artificial Sequence
  derived and/or modified sequence
tgacttttgggagagctgaccttttgtgacttttgggagagctgccaaaagtgaaacttagtgcctcagacaagcaggggcaagtctgctaaggaagctgtggccagaagcacagatcagaaacacgatggctctgttaacagccgaaacattccgcttacagtttaacaacaagcgccgcctcagaaggccttactacccgaggaaggccctcttgtgttaccagctgacgccgcagaatggctccacgcccacgagaggctactttgaaaacaagaaaaagtgccatgcagaaatttgctttattaacgagatcaagtccatgggactggacgaaacgcagtgctaccaagtcacctgttacctcacgtggagcccctgctcctcctgtgcctgggagctggttgacttcatcaaggctcacgaccatctgaacctgggcatcttcgcctcccgcctgtactaccactggtgcaagccccagcagaaggggctgcggcttctgtgtggatcccaggtcccggtggaggtcatgggcttcccaaagtttgctgactgctgggaaaactttgtggaccacgagaaaccgctttccttcaacccctataagatgttagaggagctagataaaaacagtcgagccataaagcgacggcttgagaggataaagtcctgaagtgtggatgttttagagaatgacttaagaagtttgcagcttggacccgtatcccactcattatcaagaagcaactcaagatgactttccctggggcatgtcagttgcctcatagcctgctggtcctgtaagcaagcactaagctccacagtgccagttccttgccccaacctggccccatccaagtacagaagaccttcctttcctcctttttccatattgctttctgttctaagtgggtgaataattttataattgaaaaaataaagataaagtctgtaaatccagccgggtacggtggctcacgcctgtaatcctagcactttgggaggctgagatgctcggccaataaatttctattgtttatgaa

SEQ ID NO: 64154 - DNA, 549 bp, Artificial Sequence
  derived and/or modified sequence
atggccctgctgaccgccgagaccttcagactgcagttcaacaacaagagaagactgagaagaccctactaccccagaaaggccctgctgtgctaccagctgaccccccagaacggcagcacccccaccagaggctacttcgagaacaagaagaagtgccacgccgagatctgcttcatcaacgagatcaagagcatgggcctggacgagacccagtgctaccaggtgacctgctacctgacctggagcccctgcagcagctgcgcctgggagctggtggacttcatcaaggcccacgaccacctgaacctgggcatcttcgccagcagactgtactaccactggtgcaagccccagcagaagggcctgagactgctgtgcggcagccaggtgcccgtggaggtgatgggcttccccaagttcgccgactgctgggagaacttcgtggaccacgagaagcccctgagcttcaacccctacaagatgctggaggagctggacaagaacagcagagccatcaagagaagactggagagaatcaagagctag

SEQ ID NO: 64155 - protein, 154 aa, Artificial Sequence
  derived and/or modified sequence
MALLTAETFRLQFNNKRRLRRPYYPRKALLCYQLTPQNGSTPTRGYFENKKKCHAEICFINEIKSMGLDETQCYQVTCYLTWSPCSSCAWELVDFIKAHDHLNLGIFASRLYYHWCKPQQKGLRLLCGSQVPVEVMGFPNSRGTCAGSLHGYIV

SEQ ID NO: 64156 - DNA, 465 bp, Artificial Sequence
  derived and/or modified sequence
atggcactgttgaccgcagaaacctttagactacagttcaataataaacgtcgactaagaaggccctattatccaagaaaagccctgctttgttatcagttaactccgcaaaatggatcaacccctacccggggttattttgagaacaagaagaagtgccatgctgaaatttgttttattaacgaaattaagtcaatgggccttgatgagacccagtgttaccaggtcacatgctatctgacatggtcaccctgttcctcctgcgcctgggagttggttgatttcatcaaggcccacgaccatctgaacttggggatcttcgcctccaggctgtactaccattggtgcaagccccagcagaaaggtctgcgcctgctgtgcgggtctcaggttccggttgaggtgatggggtttcctaattctagaggcacctgcgccggaagtctgcacggttatatcgtatag

SEQ ID NO: 64157 - DNA, 465 bp, Artificial Sequence
  derived and/or modified sequence
atggccctgctgacagctgagaccttccggctgcagttcaacaacaagaggcggctgcggcggccctactaccccaggaaggccctgctgtgctaccagctgaccccccagaatggcagcacccccacccggggctactttgagaacaagaagaagtgccacgccgagatctgcttcatcaatgagatcaagtccatgggcctggatgagacccagtgctaccaggtgacctgctacctgacctggagcccctgcagcagctgtgcctgggagctggtggacttcatcaaggcccatgaccacctgaacctgggcatctttgccagccggctgtactaccactggtgcaagccccagcagaagggcctgcggctgctgtgtggcagccaggtgcctgtggaggtgatgggcttccccaacagccggggcacctgtgccggcagcctgcacggctacatcgtgtag

SEQ ID NO: 64158 - DNA, 465 bp, Artificial Sequence
  derived and/or modified sequence
atggccctgctgaccgccgagaccttccggctgcagttcaacaacaagcgcagactgcgtagaccctattacccccggaaagccctgctctgttaccaactgaccccccagaatgggtcaacacccacgcgcggttactttgagaacaagaaaaagtgtcacgcagaaatctgcttcataaacgagatcaaaagtatggggctggacgaaacgcaatgctatcaagttacatgttacctcacatggtccccctgctccagctgcgcttgggagctcgtggacttcattaaggcacacgaccacctgaatttgggcattttcgcatctcgtctgtattatcattggtgtaagccacagcaaaaaggactgcgtttgctgtgcggttcgcaagtgcccgtcgaggtcatgggcttccccaatagtaggggcacatgtgccggctccctgcacggatatatcgtttag

SEQ ID NO: 64159 - DNA, 465 bp, Artificial Sequence
  derived and/or modified sequence
atggccttgctcactgctgaaacattccggctgcagtttaacaacaagagacggctgcgacgcccttactaccccagaaaagctcttctatgctaccagcttaccccccagaatggatcgacccctacaaggggttacttcgaaaataagaaaaaatgccatgctgagatctgctttattaacgagattaaaagcatgggattggacgagactcagtgctaccaggtcacctgttatctcacctggagcccttgtagttcttgtgcctgggagttggtggacttcataaaggctcacgatcatctcaacctggggatatttgccagcaggctctactaccactggtgcaagccccagcagaaaggcttgagactgttgtgcggctcacaagtcccagtcgaggtgatgggattccctaattccaggggcacttgcgccggaagtctccacggctatatcgtttag

SEQ ID NO: 64160 - DNA, 639 bp, Artificial Sequence
  derived and/or modified sequence
tgacttttgggagagctgaccttttgtgacttttgggagagctgccaaaagtgaaacttagtgcctcagacaagcaggggcaagtctgctaaggaagctgtggccagaagcacagatcagaaacacgatggctctgttaacagccgaaacattccgcttacagtttaacaacaagcgccgcctcagaaggccttactacccgaggaaggccctcttgtgttaccagctgacgccgcagaatggctccacgcccacgagaggctactttgaaaacaagaaaaagtgccatgcagaaatttgctttattaacgagatcaagtccatgggactggacgaaacgcagtgctaccaagtcacctgttacctcacgtggagcccctgctcctcctgtgcctgggagctggttgacttcatcaaggctcacgaccatctgaacctgggcatcttcgcctcccgcctgtactaccactggtgcaagccccagcagaaggggctgcggcttctgtgtggatcccaggtcccggtggaggtcatgggcttcccaaattccaggggtacgtgcgcagggtcgttacatggatatattgtgtgatgctgaggtctgagtcacccaatctactggaacatagcacccaatag

SEQ ID NO: 64161 - DNA, 465 bp, Artificial Sequence
  derived and/or modified sequence
atggccctgctgaccgccgagaccttcagactgcagttcaacaacaagagaagactgagaagaccctactaccccagaaaggccctgctgtgctaccagctgaccccccagaacggcagcacccccaccagaggctacttcgagaacaagaagaagtgccacgccgagatctgcttcatcaacgagatcaagagcatgggcctggacgagacccagtgctaccaggtgacctgctacctgacctggagcccctgcagcagctgcgcctgggagctggtggacttcatcaaggcccacgaccacctgaacctgggcatcttcgccagcagactgtactaccactggtgcaagccccagcagaagggcctgagactgctgtgcggcagccaggtgcccgtggaggtgatgggcttccccaacagcagaggcacctgcgccggcagcctgcacggctacatcgtgtag

SEQ ID NO: 64162 - protein, 655 aa, Artificial Sequence
  derived and/or modified sequence
MSALLQDPMIAGQVSKPLLSVRSEMNAELRGEDKAATSDSELNEPLLAPVESNDSEDTPSKLFGARGNPALSDPGTPDQHQASQTHPPFPVGPQPLLTAQQLASAVAGVMPGGPPALNQPILIPFNMAGQLGGQQGLVLTLPTANLTNIQGLVAAAAAGGIMTLPLQNLQATSSLNSQLQQLQLQLQQQQQQQQQQPPPSTNQHPQPAPQAPSQSQQQPLQPTPPQQPPPASQQPPAPTSQLQQAPQPQQHQPHSHSQNQNQPSPTQQSSSPPQKPSQSPGHGLPSPLTPPNPLQLVNNPLASQAAAAAAAMSSIASSQAFGNALSSLQGVTGQLVTNAQGQIIGTIPLMPNPGPSSQAASGTQGLQVQPITPQLLTNAQGQIIATVIGNQILPVINTQGITLSPIKPGQQLHQPSQTSVGQAASQGNLLHLAHSQASMSQSPVRQASSSSSSSSSSSALSVGQLVSNPQTAAGEVDGVNLEEIREFAKAFKIRRLSLGLTQTQVGQALSATEGPAYSQSAICRFEKLDITPKSAQKIKPVLERWMAEAEARHRAGMQNLTEFIGSEPSKKRKRRTSFTPQALEILNAHFEKNTHPSGQEMTEIAEKLNYDREVVRVWFCNKRQALKNTIKRLKQHEPATAVPLEPLTDSLEENS

SEQ ID NO: 64163 - DNA, 582 bp, Artificial Sequence
  derived and/or modified sequence
atgaacatcttcatgaccttcgtgatcaacgtgctgagaaagaacctgttccacggcttcatggtgatcacccaggcccccgtgagaatcctgcccagccaggagagaatcagaaccccctgccacagccccgccatcctgctgagcagctgcagagtgctgagcggcaacaactgcatcatggccgccctgaccagcgtgatcaagagaaacctgctgttcttcagactggacctgttccccctgtggctgatcttcctgtacatcgtgaagatgggcgacttccccagcgcccccacccacctgaacaccgccgccatctgcacctgcctgctgcccatccccctgggcacccacagcgacctgctgagcgtgagctgcagctggttccacctgttcgagaagggcccccccctgagctacaagcacctggtgagacaggtgcaccccctgatgaacgccgacaccgccgccggcggcttcgtgtacacctgcaaggacaagctgagaagcctgctgttcggcgaggtgaaggaggacggcaacggctgcttcatctgcatgagcctggagcagtgctag

SEQ ID NO: 64164 - DNA, 1968 bp, Artificial Sequence
  derived and/or modified sequence
atgtctgccttactccaggatcccatgattgccggccaagtttctaaacccctgctgtctgtccggagcgaaatgaacgcggagctgcgcggtgaggataaagccgctacttccgatagtgagcttaatgagcctcttctggctcccgtagaatccaatgattcagaggatactcccagcaaactctttggggcccggggcaatcctgctctgtccgatccgggcacccctgatcagcaccaggcttcccagacccacccaccttttcccgtggggccccagcccctcctgacagctcagcaactcgcgtccgccgtggctggcgtgatgcctgggggcccaccggcattgaaccagccaatcctgattccattcaatatggccggccagctaggaggacagcaggggctagtgctaaccttacctactgctaatctgacaaacatccagggtctggtagccgcggccgcggccggcggaattatgacactaccccttcagaacctgcaggccacgtcatcactgaattctcagctgcaacagctgcaattacagctgcagcagcaacagcagcagcagcagcagcagccacccccatccactaatcaacatccccagcccgccccccaggcgccctcacagagccagcagcagccactacagccaactccccctcagcagccccctcccgcaagccagcagcctcctgcgccgacctctcagctgcagcaggcacctcagcctcagcagcaccagccgcactcgcactcacagaatcagaatcagccgtcccccactcaacagtcatcatccccgccacagaaaccgagtcagtctcctggtcacggtctgccttcaccattgacgccgccgaatcccctccagctggtgaacaacccattggcatctcaggccgccgccgcagccgcagccatgagttctatcgcgagctcacaggccttcggtaacgcactgtccagcctgcaaggcgtgactgggcagctggtgaccaacgcacagggccagatcataggtacaatcccactgatgcctaaccccggcccatcttctcaggccgcctcaggcacacaagggttgcaggtgcagccaatcactccacaactgctgaccaatgcccaggggcagatcatcgctaccgtcatcgggaaccaaatcctaccagtgatcaatactcaaggtatcaccctgagtcccattaaaccagggcagcaattgcatcaaccatcccagacgtccgtgggacaggctgctagtcagggcaacctgttacatctggctcacagccaggcctccatgtcccagagccctgtgcggcaggccagctcctcatcaagttcctcaagctccagttccgccctttccgtagggcagcttgtgtctaatccgcaaacagctgctggcgaggttgacggagttaatctggaggaaatcagagaatttgccaaagccttcaagataagaaggctgtctctggggctaacacagacacaagtcgggcaagcactgtccgccactgagggtccagcctacagccagtccgctatctgccgttttgagaaactggacatcacacccaaaagcgcccagaaaattaagcctgtcctcgagcgatggatggccgaggctgaagcacggcaccgggccggtatgcagaatttgactgagttcattggcagcgaaccttccaagaagcgaaagcgacgaacctcctttaccccacaggccctcgaaatcctaaatgctcattttgaaaaaaatactcacccatcgggtcaggagatgaccgagattgccgagaaactaaattacgaccgggaggtggtgagggtgtggttttgcaacaagaggcaggccctgaagaacaccatcaaacggctaaaacagcatgaacccgcaaccgcagtaccactcgaacccttaactgactcactcgaagagaattcatag

SEQ ID NO: 64165 - DNA, 1968 bp, Artificial Sequence
  derived and/or modified sequence
atgtctgccctgctgcaggaccccatgattgctggccaggtgtccaagcccctgctgtctgtgcgctctgagatgaatgctgagctgcggggggaggacaaggccgccaccagtgacagcgagctgaatgagcccctgctggcccctgtggagagcaatgattctgaggacacccccagcaagctgtttggagcccggggcaacccagccctgagtgaccccggcaccccagaccagcaccaggccagccagacccacccccccttccctgtgggcccccagcccctgctgacagcccagcagctggccagcgctgtggccggcgtgatgcctgggggccccccagccctgaaccagcccatcctgatccccttcaacatggccggccagctgggcggccagcagggcctggtgctgaccctgcccacagccaacctgaccaacatccagggcctggtggccgctgctgctgctgggggcatcatgaccctgcccctgcagaacctgcaggccaccagcagcctgaacagccagctgcagcagctgcagctgcagctgcagcagcagcagcagcagcagcagcagcagcccccacccagcaccaaccagcacccccagcctgccccccaggcccccagccagagccagcagcagcccctgcagcccaccccaccccagcagcccccaccagccagccagcagcccccagcccccaccagccagctgcagcaggccccccagccccagcagcaccagccccacagccacagccagaaccagaaccagcccagccccacccagcagagcagcagccccccccagaagcccagccagagccctggccacggcctgcccagccccctgaccccacccaaccccctgcagctggtgaacaaccccctggccagccaggccgctgctgctgctgctgccatgagcagcatcgccagcagccaggcctttggaaatgccctgagcagcctgcagggcgtgacaggccagctggtgaccaatgcccagggccagatcatcggcaccatccccctgatgcccaaccctggccccagcagccaggccgccagcggcacccagggcctgcaggtgcagcccatcaccccccagctgctgaccaatgcccagggccagatcatcgccaccgtcatcggcaaccagatcctgcccgtcatcaacacccagggcatcaccctgagccccatcaagccaggccagcagctgcaccagcccagccagacctctgtgggccaggccgccagccagggcaacctgctgcacctggcccacagccaggcctccatgagccagagccctgtgcggcaggccagcagcagcagcagcagcagcagcagcagcagcgccctgtctgtgggccagctggtgagcaacccccagacagctgctggggaggtggatggagtgaacctggaggagatccgggagtttgccaaggccttcaagatccggcggctgagcctgggcctgacccagacccaggtgggccaggccctgagcgccacagagggccctgcctacagccagagcgccatctgccgctttgagaagctggacatcacccccaagagcgcccagaagatcaagcctgtgctggagcgctggatggccgaggccgaggcccggcacagagctggcatgcagaacctgacagagttcatcggcagcgagcccagcaagaagaggaagaggaggaccagcttcaccccccaggccctggagatcctgaatgcccactttgagaagaacacccaccccagcggccaggagatgacagaaattgctgagaagctgaactatgaccgggaggtggtgcgggtgtggttctgcaacaagaggcaggccctgaagaacaccatcaagaggctgaagcagcacgagcccgccacagctgtgcccctggagcccctgacagacagcctggaggagaacagctag

SEQ ID NO: 64166 - DNA, 1968 bp, Artificial Sequence
  derived and/or modified sequence
atgagcgccctgctgcaggaccccatgatcgccggccaggtgagcaagccactgctctcagtccgttctgagatgaatgcagaactccgcggcgaagacaaggcagctacaagcgacagtgagctcaatgaacctttactggctcctgtggaaagcaatgattctgaagacacaccatctaagctgtttggcgcccgcggaaaccctgccttgagcgatcccgggacgcccgaccagcaccaagcctcacagacacatccaccgtttcctgtgggccctcagccacttctcacagcccagcaattggcgtctgctgtcgccggggtgatgccaggcggtccacccgctctcaaccagccgatactcatccctttcaatatggctggacaactgggcggtcaacagggtttggtcttgaccctacccactgctaacctgacaaacattcagggcttggtggccgctgctgccgccggagggataatgactctgcccttgcagaacttacaggctacctcatccctgaactcccagctgcaacaactgcagttgcagctgcagcagcagcagcagcagcagcaacagcagccacctccatctacaaaccagcatccccaacctgcaccccaagcgccttctcaaagccagcagcagcccttgcaacctacgcctccccagcagcctcctcctgcttctcagcagcccccagcccctacgtcacaactgcagcaggctcctcagccccaacaacatcagccacacagccactcacagaaccaaaaccagccttctcccacacaacaatcctcgtcccccccccaaaaaccctctcagtcccccggacacggccttcccagcccactgactccacctaacccgctgcaattggtgaacaatcccctcgctagtcaagcagcagccgcagcagccgccatgtcttccatcgcttccagccaggcatttggcaatgcactgtcaagccttcagggcgtgactggtcagctcgtcactaacgcccagggtcaaatcatcgggactattccactgatgccgaacccaggccccagcagccaggcggcttccgggactcaaggcttacaggtacagccaatcaccccccaactactcaccaacgcccagggacaaattatcgcaaccgtgatcggtaaccaaattttgcctgtgattaacactcaggggatcaccctgagcccaattaaacctggccaacagctacatcagccatcacaaacgtcagtcggacaagctgcctcccagggaaacctgttgcatctcgcccatagccaagcctcaatgtctcagagcccagttcgccaggccagcagctcatccagttctagctctagttcatcggcccttagcgtgggtcagctcgtcagcaatccacagacggccgccggcgaggtagatggtgtgaatctggaggaaatccgagagtttgccaaagcattcaaaattcggcgcctgagcctaggactgacacagacacaagtcggacaggccttgagtgccacggaagggccagcctactcacagtcagccatttgcagatttgaaaagctggacattacacctaaatcagctcagaagataaagcccgtccttgagcgctggatggcggaagccgaggcccgccatcgggcaggaatgcagaatcttaccgagttcattggttcggagcccagcaagaagcgcaaaagacgcaccagcttcacacctcaggcgttagagatactgaatgcacattttgagaaaaacacacacccatcggggcaggagatgacggagattgccgagaagctgaactacgaccgtgaggtcgttagggtatggttctgcaataaaagacaagcgttaaagaatactattaagcgactcaagcaacatgagcccgccacagccgtgccgctggaaccactcacagactccctcgaagaaaattcatag

SEQ ID NO: 64167 - DNA, 5925 bp, Artificial Sequence
  derived and/or modified sequence
gctgaaagaatgttcttataatgatccaagaggaagtggcaaatgagtgctcttcttcaggatccaatgatagctggacaagtcagtaagcccttgctgtcagtgcggagtgaaatgaatgcggagttgagaggtgaggacaaggctgctacttcagacagcgagctgaatgagcccctgcttgcgcctgtggaatcaaatgacagcgaggacactcccagcaagctcttcggggctagaggaaacccagcattatcagacccaggcactcctgaccaacaccaggccagtcagacccaccccccatttccagttgggccacagccacttctgacggcacagcagttagcttctgctgtggccggcgtgatgccgggaggccccccagccctcaaccagccaatcctcattcccttcaacatggcgggacagctaggaggccagcaaggactggttctcacactgccaacagcgaatctcaccaacatccaagggctggtggcagcagctgcagccggaggcattatgactctgccactgcaaaatctacaagctacctcatccctgaactcccagctccagcagctccagctccagctccagcagcagcagcagcagcagcagcagcagcctcccccgtcaaccaaccagcacccgcaaccagccccacaggcgccctcgcagtcccagcagcagccgctgcagcccaccccaccccagcagccaccacccgcctctcagcagccgccagctcctacatctcagctgcaacaggcgcctcagccccagcagcaccaaccccactcccactcccagaaccagaaccaaccatctccaacccagcagagctccagccccccgcagaaacctagtcagtctccaggacatggcctgccttcaccgctcacgccacccaatcctctacagctggttaataatccactagcaagtcaggctgcagcggctgcagcagccatgagctccatagcaagctcacaggcctttggcaatgccctctccagtcttcagggggtcacaggtcaactagttactaatgcacaaggacagattatcgggaccattccactgatgcctaatccagggccatcgagccaagcagcaagcggcactcagggcttgcaagtgcagccaatcaccccccagctcctcacaaacgcccagggccagatcatcgccacagtcattgggaaccagatcctgcccgtgatcaacacccagggcatcacgctgtcacccatcaagcccggccagcagctccaccaaccctcccagacgtcagtgggtcaagcagcctcccaaggcaaccttctgcacctggctcacagccaagcatccatgtctcaaagtcccgtccggcaggcttcctcttcttcctcctcatcctcctcttcttcagctttgagcgtgggccagttagtcagcaatcctcaaacggcagcgggtgaggtggatggggttaatctggaggagatccgagaatttgccaaagcttttaaaatccggcgcctgtcccttggcctgacccagactcaggtgggacaggctctcagtgctacagagggccccgcgtacagccagtcggccatctgcaggtttgaaaagctggacatcacccctaaaagtgcccagaagatcaagccggtgcttgagcggtggatggctgaggctgaggcccgccatcgagcaggtatgcagaacctgaccgagtttatcgggagtgaaccatccaaaaagcgcaagcggcgcacctccttcacaccccaggcccttgagatcctcaatgcccactttgagaagaacacacacccttctgggcaggaaatgaccgaaattgctgagaagctgaactatgaccgagaagtagttagagtttggttctgcaataagaggcaagccctgaagaacacaattaaacgcttaaaacagcacgagccggccacggcagtccctttggagcccttaacagactctctggaagaaaactcctaaagagatgcccacccataatcagaagcaaaattcacagaaactaaactccacccttgggactccacaacaacaacaacaacaaaatttaatttaatttaaaaatagccccagtcgtcatcacccttgtaagtaaatgactaagaaaactaccaagtggacagaatggtttctacatgtccgttggttttccaaaaaggaaagaagaaaatttttagaaaatttttaaacaaggaatacaccacactgaaggtgtgtgtggtaggatagttcccttcccccacctgtctcccccaaagccagttttttaatggacttaaagcaaaccaaataaccacgtacttttttctgtatattatgaaaatgtgaacacattttaaggaaaaagaaaaaaaaaaactaaaccaaaaaccaacaacgaaggaacaaaaactttgatctgttcaaagcgaatacaagcctgccacctggaggaaggactgcaccccttcaggtactaagtgctgattcactatgaaacctattaaccaaagtcagaaacatggcattgcaacgcgatcgttcgtctacgcttctccgcacgtaaagttgtgttacgaatttttacatttgtactaacagaacaataggaagcctgatttctcccatctttcccatctactgtctccacccatggggtgggtaccattgttgaagccattctgtgaggctcactattgggtttttttgtgggggtggtagggagggtggtcttttttctttgtctttctttttgacgggagggcatcctggatcgtgtgccaaagcatttgttgcttttttctcactatgacttgtgggtttgagaaaagaaaatggagctcgcatttctctcttttcctccatttctccatctccctcgcgcgtggctcctggggtctgctggaaggccacagaagtggggagaagcagtgtcttttccactcagatcctagtgaaatgcaggagagactccaaaataactagggctttgctcgatgaactgtcaacactggcataagctgtaattgtgctcactgtccacaccagagcttgggatttttctcagtctgttggccacgtacatggagagctgaccaaaactaattttgtaatataaacataagctgcacatttggttcaatacttacatctatgttatgcttctgtgcaaagcaatttctctcagaagtctgatagccaaagaaatgtctcaagatttcagtcaaatacacacatgacatgcacacacccataaacacacacacaaagaaacaggctaaaaagaaagtgatagcaactggatcattaaaggccatcgtgtatcctgttaatctcatcttttctgctacttctttcattccaatagcgatggcagacttttttcagggggaataattactcttcgggatatataaatggagcagaaaggtggcgggcaaatttaaacaactggaattgggggccaggttcttcaggggaaaggaagtttgaagaagctttcaccaaaagaaaaaaatatagaaggggcttatctaacaatcagaatagcctgcaatatgagaactagaggattatttcctttaaaaaaaataacttaaaagatctgtgggccacaataacctaataagcaaggacatgttgggatgtgaggacggctgtgcaggtgagcacttggcagctgccactggtgttttcacccaggtacaggcagacggtgttccattaaaggagcaggcaaaagagagctgtcaatttgcttgctgttgaaatgtacatatttatgcataatttataatcatgctaatgtattatctagaagtaagttgtgaaagaaaaaagagaaacccaatctcaagttgcccaactgattagaaatgccatctccttcccctaatacactccctctccctggggagtttgagtttcttctgttggctcctttgctgtttgtgtaaatgctacagtataattgtcccctccaatgattcatgcagcaatcaagagactaccagcaaggaaactctaaaaggaatcctggaagtggaacaagtcactcgtaaaggtgtttccattttaccagtcaatgctaactggaccacagctaacttgatcttcaatgccaacatcacagagcccctttcgccacctcaaaaactgcacaaacatggacaacccagaaacccaaaactttattgattaaaacagattttggattctcctaggacctgctccaaattccatcaagaaaagctccctgcgaagagaagttaacaagataacatatgatggatgctaaatatttaaatatatgccggcagcggttacataaggcctgctcagttctgagatctataattgggagggtctaactaggacagggaaaatataaaataaaagtaatcttccagagtggaacaaaaaagaaatatattcatccgacagtcgtaacaccattcatgtgcagtgatttttttatagttttataattttgtattgttttataaattatttataaggtgttgtaatgcttcttatattaattttttacagataaattttttgctacaaggcataaaaaggtgcctgaaccgattcttaggaatataaattatactgtgtaactcataagtctttgggaccacacctaatgcttaattttatgatgacatttctcatgtctacttgtaaacaacttcatatgccaatggcgtttaagtgtcttttatgtttccatgaactgaaggttaaggttgccacccacaaaaaataaaagccactttgggcatatgtgattgtatttcaagcttcagtatttttctcacataatttttaattattgttatctgcattttcattacttcatgaaaaaatgacagtggatattacattttacacttgtttatagattttctttctttttcaaccaagaaaatattttgaacaattgaaacttttaattgcatttgcaaggttttggcttctttatgttgtcatcacacagatgcacacacacatacacatacaacacaaaagagagaacaaaaaagcaaaaggagctaggaaaaaaacaaaacaaaacaagtagaggtgtatcaaagaactcaagctataaccaaaaagaaatcgtaaaatgcctttgctcgtttctctacgctggaccaaagctcaatatttgtaggtatatgcacattgtatagatatggctaaatgttgctgacaatctcgcaatactaaactgttcctattttaagaaaaaaaaaagaaatacaaactgttcatcaatgttttacctcagcactctacttgtacccagttaatgaccaagcttaaaaaaaaattgagataaaggaaattgattttcatttcaatgtttgactgtaaaatctgtttggataacattttgtaatgagctttttgtcatgtgatttgcttgtcttcaacttgaaattatgtgaggcacatttgtttatttgttgttaagaaagtgatttttttttttttttgtcctatgtgctgtgatctagactggtcaccggggtcacttatgaggcaccacaaagagatctgcttctccgtgcccggagcaggcagcaggagggagggcaggaaacaggactgggttgctttggaaaaatcatcatgacaagaagttgacatgatagacttgtgaccaagaagccaaactgaatatttaaaagctccttacttgctctgacattgaaaccaaagctgattttatctgcacaggttgcttaatatttaaaaaaaaaaaaaactgtacttaatctagagcaatatctgtatggtcagtaaagctgcactttgtgtatttcttaacagcttcagatctgtcacttttaatttgtaccataaaaaataaataattgtttgacatga

SEQ ID NO: 64168 - DNA, 1968 bp, Artificial Sequence
  derived and/or modified sequence
atgagcgccttactgcaggatcctatgattgctggacaggtttcaaagccactgctctctgtcagatcggaaatgaatgccgaactacgcggtgaagataaggccgctacatccgactccgagctgaacgaacctctactcgcacctgttgagtctaatgattctgaggacactccttcaaaacttttcggggcacgtggtaaccctgcactgtctgacccaggcacgccagaccaacaccaggcatcacagacacacccaccatttccggttgggccacaaccactgctgaccgcccagcagctcgcgtctgctgtagctggggtcatgcccggagggcctcccgctctgaaccaacctattctcatcccttttaacatggcgggacaattgggaggccagcaggggttagtgctgacgcttcccactgctaacctgacgaatattcaagggctggtggccgctgcagctgctggcggaataatgactttgccattacagaatcttcaggcaacttctagcctgaacagccaactgcaacagctgcagcttcagctgcagcagcagcagcagcagcaacaacaacagcctcccccaagtactaatcagcacccgcagccggcaccacaggcccctagtcagagccaacagcaacccttgcaacccactccacctcagcagccaccccctgcgagccagcaaccccctgcccctacatcccagcttcaacaggcccctcagccacagcagcatcagccacacagccactcgcagaatcagaatcagcccagcccaactcagcagtcaagcagcccgccacagaaaccttctcaatcaccgggtcacgggctgccctcccccctgacgccacccaaccctctgcagctggttaacaatccactggctagccaagccgcagcggctgctgccgctatgtcaagtattgctagttcccaggcctttggtaacgccctttcttcattgcagggtgtcacaggccagctcgttactaacgcccagggtcagatcatcggtaccattcctctgatgccaaaccccggtccatccagccaggcagcaagcgggactcaaggattacaggtacagcccatcacgccacagttgctcacgaacgctcagggccaaatcatcgcaacagtaatcggaaaccagatactgcccgtgatcaacacccagggcataaccctcagtcccattaagccaggccagcagctgcaccagcctagtcagaccagcgtgggacaagccgcaagccagggcaatctcctccacctggcgcactctcaggcctcgatgtcccagagtccagtgcgccaggcatccagcagctcctcttcctcttcaagcagcagcgctctatcagtaggccaactggtatctaatccacaaacggctgcaggagaggtagacggggtcaatctcgaggagattagggaatttgctaaggcatttaagatacggagactgagcctgggcctgacacaaactcaggtgggacaagccctgtccgcaactgaagggccagcatattcacagtctgctatttgcaggtttgagaagctcgacataaccccgaagtctgcgcagaagatcaaaccggttctggaaagatggatggccgaagcagaggcccgacaccgcgctggtatgcaaaacctcacggagtttatcggtagcgagccctcaaagaagaggaaaagacgcacctcatttacgcctcaggccttggagatcctgaacgcccattttgagaaaaacacccacccaagcggccaggaaatgaccgagatcgccgagaaattgaattatgacagagaggtggtacgagtctggttctgcaataagagacaggccctgaagaacacaatcaaaaggctcaaacagcatgaaccagctaccgcggtacccctggagcccctcaccgactcactggaggaaaacagttag

SEQ ID NO: 64169 - DNA, 1968 bp, Artificial Sequence
  derived and/or modified sequence
atgagcgccctgctgcaggaccccatgatcgccggccaggtgagcaagcccctgctgagcgtgagaagcgagatgaacgccgagctgagaggcgaggacaaggccgccaccagcgacagcgagctgaacgagcccctgctggcccccgtggagagcaacgacagcgaggacacccccagcaagctgttcggcgccagaggcaaccccgccctgagcgaccccggcacccccgaccagcaccaggccagccagacccacccccccttccccgtgggcccccagcccctgctgaccgcccagcagctggccagcgccgtggccggcgtgatgcccggcggcccccccgccctgaaccagcccatcctgatccccttcaacatggccggccagctgggcggccagcagggcctggtgctgaccctgcccaccgccaacctgaccaacatccagggcctggtggccgccgccgccgccggcggcatcatgaccctgcccctgcagaacctgcaggccaccagcagcctgaacagccagctgcagcagctgcagctgcagctgcagcagcagcagcagcagcagcagcagcagcccccccccagcaccaaccagcacccccagcccgccccccaggcccccagccagagccagcagcagcccctgcagcccacccccccccagcagcccccccccgccagccagcagccccccgcccccaccagccagctgcagcaggccccccagccccagcagcaccagccccacagccacagccagaaccagaaccagcccagccccacccagcagagcagcagccccccccagaagcccagccagagccccggccacggcctgcccagccccctgaccccccccaaccccctgcagctggtgaacaaccccctggccagccaggccgccgccgccgccgccgccatgagcagcatcgccagcagccaggccttcggcaacgccctgagcagcctgcagggcgtgaccggccagctggtgaccaacgcccagggccagatcatcggcaccatccccctgatgcccaaccccggccccagcagccaggccgccagcggcacccagggcctgcaggtgcagcccatcaccccccagctgctgaccaacgcccagggccagatcatcgccaccgtgatcggcaaccagatcctgcccgtgatcaacacccagggcatcaccctgagccccatcaagcccggccagcagctgcaccagcccagccagaccagcgtgggccaggccgccagccagggcaacctgctgcacctggcccacagccaggccagcatgagccagagccccgtgagacaggccagcagcagcagcagcagcagcagcagcagcagcgccctgagcgtgggccagctggtgagcaacccccagaccgccgccggcgaggtggacggcgtgaacctggaggagatcagagagttcgccaaggccttcaagatcagaagactgagcctgggcctgacccagacccaggtgggccaggccctgagcgccaccgagggccccgcctacagccagagcgccatctgcagattcgagaagctggacatcacccccaagagcgcccagaagatcaagcccgtgctggagagatggatggccgaggccgaggccagacacagagccggcatgcagaacctgaccgagttcatcggcagcgagcccagcaagaagagaaagagaagaaccagcttcaccccccaggccctggagatcctgaacgcccacttcgagaagaacacccaccccagcggccaggagatgaccgagatcgccgagaagctgaactacgacagagaggtggtgagagtgtggttctgcaacaagagacaggccctgaagaacaccatcaagagactgaagcagcacgagcccgccaccgccgtgcccctggagcccctgaccgacagcctggaggagaacagctag

SEQ ID NO: 64170 - protein, 919 aa, Artificial Sequence
  derived and/or modified sequence
MTDSKYFTTTKKGEIFELKAELNSDKKEKKKEAVKKVIASMTVGKDVSALFPDVVNCMQTDNLELKKLVYLYLMNYAKSQPDMAIMAVNTFVKDCEDPNPLIRALAVRTMGCIRVDKITEYLCEPLRKCLKDEDPYVRKTAAVCVAKLHDINAQLVEDQGFLDTLKDLISDSNPMVVANAVAALSEIAESHPSSNLLDLNPQSINKLLTALNECTEWGQIFILDCLANYMPKDDREAQSICERVTPRLSHANSAVVLSAVKVLMKFMEMLSKDLDYYGTLLKKLAPPLVTLLSAEPELQYVALRNINLIVQKRPEILKHEMKVFFVKYNDPIYVKLEKLDIMIRLASQANIAQVLAELKEYATEVDVDFVRKAVRAIGRCAIKVEQSAERCVSTLLDLIQTKVNYVVQEAIVVIKDIFRKYPNKYESVIATLCENLDSLDEPEARAAMIWIVGEYAERIDNADELLESFLEGFHDESTQVQLQLLTAIVKLFLKKPTETQELVQQVLSLATQDSDNPDLRDRGYIYWRLLSTDPVAAKEVVLAEKPLISEETDLIEPTLLDELICYIGTLASVYHKPPSAFVEGGRGVVHKSLPPRTASSESAESPETAPTGAPPGEQPDVIPAQGDLLGDLLNLDLGPPVSGPPLATSSVQMGAVDLLGGGLDSLIGGTNFVAPPTAAVPANLGAPIGSGLSDLFDLTSGVGTLSGSYVAPKAVGSISMDLQLTNKALQVMTDFAIQFNRNSFGLAPATPLQVHAPLSPNQTVEISLPLSTVGSVMKMEPLNNLQVAVKNNIDVFYFSTLYPLHILFVEDGKMDRQMFLATWKDIPNENEAQFQIRDCPLNAEAASSKLQSSNIFTVAKRNVEGQDMLYQSLKLTNGIWVLAELRIQPGNPSCTLSLKCRAPEVSQHVYQAYETILKN

SEQ ID NO: 64171 - DNA, 3903 bp, Artificial Sequence
  derived and/or modified sequence
cccgcgcgcgggcagctcacttccgcccggcaggtgacagccgcggggctccgagccgccggcagcccggacgcaccgggagagcgagaggtggaggccgcggacattttggtgccaagccgaaccgagccggggcgccgggagctattgggacctgcggaagcctggctacagataagggaccaaaatgactgactcaaaatatttcaccacgaccaagaaaggggagatcttcgagctgaaggcagagctcaacagtgacaagaaggagaagaagaaggaggcagtgaagaaagtgattgcatcgatgaccgtgggcaaagatgtcagtgccctcttccccgatgtggtcaactgcatgcagacggacaacctggagctgaagaagctagtatacctctacttgatgaattacgccaagagtcagcctgacatggccattatggccgtcaacacctttgtgaaggactgtgaggaccccaaccccctcatccgagccctggcagtgcggaccatgggctgcatccgcgttgacaagatcacagagtacctgtgcgagccactccggaagtgcctgaaggacgaggatccatatgtgcgcaagacagcagctgtgtgcgtggccaagctccacgacatcaacgcccagctggtggaggaccagggcttcctggacacccttaaagacctcatctccgactctaaccccatggtggtggccaatgcagtggcagcgctctcagaaattgccgagtctcaccccagcagcaacctgctcgatctgaacccacagtccatcaacaagctgctgacagccctcaatgagtgcaccgagtggggccagatcttcatcctggactgcctcgccaactatatgcccaaggacgaccgcgaggcccagagcatctgtgagcgggtcacccccaggctctcccatgccaactccgctgtggtgctctctgctgtgaaggtgctgatgaagttcatggagatgttgtctaaggacttggactactacggcacactgctcaagaagctggccccacccctggtcacactgctgtcagccgagccagagctgcagtatgtggccctgcgcaacatcaatctcatcgtgcagaaaaggcctgagatcctgaagcatgagatgaaggtgttcttcgtgaagtacaacgaccctatctacgtgaagctggagaagctggacatcatgatccgcctggcctctcaggccaacatcgcccaggtgttggcagagctgaaagagtacgcaacagaagtggatgtggactttgtacggaaggctgtgcgtgctattggccgctgcgccatcaaggtggagcaatctgcggagcgctgtgtgagcacgctgctcgacctcatccagaccaaggtcaactatgtggtccaggaggccatcgtggtcatcaaggacatcttccgcaagtaccccaacaagtatgagagtgtgattgccacactgtgtgagaatctggactccctggatgagcctgaggcccgggctgccatgatctggattgtgggcgagtacgcggaacggatcgacaacgcagatgagctgctggagagcttcctcgagggcttccatgacgagagcacacaggtccagctgcagctgctgacagccattgtgaaactctttctaaagaagccaacagagacccaggagctggtgcagcaggtcctcagtttggccactcaggactcagataacccagacctgcgggaccgtggctacatctactggcgcctgctgtccacggacccggtggcagccaaggaggtggtgttggctgagaagccactcatctctgaagagacggacctcatcgagcccacactgttagacgagcttatctgctacatcggcacgctggcttccgtctaccataagcctcccagtgcctttgtggaggggggccggggcgtcgtgcacaagagcctgccacctcgcacggcctcgagtgagagcgcagagagccctgagacagcccctactggagcacctcctggggagcagccagatgtcatccccgcccagggcgacctgctgggtgacctcctcaacctggacctcggccccccagtgagcggcccacccctggccacctcctcggtgcagatgggagctgtggaccttcttggcggtggccttgacagcctgattgggggcaccaacttcgtggcacctccaacagcagcagtaccagccaatcttggagcacccatcggcagtggcctgagtgacctctttgacctgaccagtggcgtgggcaccctgtcaggatcatatgtggcccccaaagcagtgggctccatctccatggacctgcagctgaccaacaaggccttgcaggtcatgaccgactttgccatccagttcaaccgcaacagctttggcctggcccccgccacccccctccaggtccacgcgccactcagccccaaccagacagtggagatctccctgcctctcagcacggtgggctcggtcatgaagatggagcctctgaacaacctccaggtggccgtgaagaacaacatcgatgtcttctacttcagcaccttgtacccactgcacatcctctttgtggaggacgggaagatggaccggcagatgttcctggccacatggaaggatattcccaatgagaatgaggcccagttccagatcagagactgccccctcaatgcagaggctgcgagcagcaagctgcagagcagcaacatcttcactgtcgccaagaggaacgtggagggccaggacatgctctaccagtccctgaagctgaccaacggcatctgggtgctggcggagctgcggatccagccgggcaaccccagctgcacgctgtccctgaagtgtcgagcaccagaggtgtcccagcacgtgtaccaggcctacgagaccatcctcaagaactgagaccccggccagcgcccaccccagccttctgcccgccccatcgaggaggcccctcgggggcagcacatcttcctcctcgcaggagggaccaggcggggctccaggccactcagtgggctccctggtcctgatggcagaacccacccgatccctggggtagggcaccaccccctcctggggtgagagcgcagtgcactcccgtgctctgggacacccctgctcctgtggctgtgatgtggggttaagtgaggtggggaccaaaggaaacagagccagagcagccacagaagctgtgcctgaagggtgagtgtggagcttgcccctccggctcacagccccggcagcccctggctccttggtctctccggttggtgttaaagggccctccactgccacctctcatgggatggaccctgccaacctggcctgggtgtgcagggaggggttccccttggtaccaggagagctgctcacttagggcctggggctcaaggagctgtaggtgccggcagaggggcagagctaggctgggaggagcccagggcctgcaccacccacttgcaaccaccaggctggtgccctgcagctgtgccagttgggccacagcctcccgagtgctgacccacatggtcaagaccaggcagaagctcccagagcccctgtctcgggctccccaccgactggcagctgcactatccccaactccccacttctgccccaagggtggtcactgcctgtgatacattcctcagtgtcgcctctgagcccaggcctcctgccacaaagactgggccgagagatggggctgggtaagcgggtgcgcctcctgtttgggtttcttcggggtttctctgtagtgtctgctgccctcctcctggcctcccaggtttcagttgtgtctgacagagcattaggttttcctgttactgctgtgtaataataaagaaagattcggc

SEQ ID NO: 64172 - DNA, 2760 bp, Artificial Sequence
  derived and/or modified sequence
atgacagacagtaaatactttacaactacaaagaaaggcgagatcttcgaactcaaggccgagctaaattctgataagaaagaaaagaagaaagaggccgtgaaaaaggtcatagcatccatgacggtgggcaaggacgtcagcgctctattccccgacgtcgttaactgtatgcagaccgacaatctggagctgaagaaactcgtctacctgtacctgatgaactatgccaagagccaacctgatatggctatcatggccgtcaacactttcgtgaaggactgcgaagatccaaacccattgatccgcgcacttgccgtccgcacaatgggttgtatccgagtggataagataactgagtatctatgcgagcccctgcgtaagtgtctcaaagatgaggatccttatgtccgtaagactgcggccgtttgtgtggcaaagttgcatgatatcaatgcccaattggtggaagatcagggcttcctggacactttgaaggatctgatttcggactcgaacccaatggtggtagccaatgccgtggccgcactctcagaaatagccgagtctcatcccagctcaaacctgttggaccttaacccccaatctatcaataaactcctgacagccctcaacgaatgtaccgagtggggacagatattcatcctggactgcctcgcaaactacatgccgaaagacgaccgcgaggctcagtccatctgcgagcgcgtaactcctagactgtcacatgcaaactctgccgtggtcctcagcgctgtgaaagttctgatgaagttcatggaaatgctgtccaaggacttggactactacgggaccctactcaaaaagctggctccacctctggtgaccttgttgtctgccgaacccgagcttcagtacgtggctctccggaacatcaatctcatcgttcagaagcgcccagaaatactgaagcatgagatgaaagtcttcttcgtcaagtacaatgatccaatttacgtgaagctggagaaactcgatatcatgattcgtttggcaagtcaggctaatatcgcacaggtacttgccgagctgaaggagtacgccaccgaagtggacgtggacttcgtccgtaaggctgtgcgggccatcgggaggtgcgcaattaaagtagaacaatcggccgagcgatgcgtgagcaccctgctggacctaattcaaacaaaggtgaattatgtggtccaggaagcaatcgtggtgatcaaagacattttccggaaatacccaaacaaatatgagtcagtgatagctactctctgcgaaaatctcgacagtctggacgagcccgaggccagggcggcaatgatttggatagttggagagtacgccgagcggattgacaatgctgacgagctactggaatcattcttagagggtttccatgatgaatccacacaagtgcagctgcagctgcttactgcaattgtaaagctgtttcttaagaaacccacagaaacacaagagctggtgcagcaggtcctgtccctggccactcaggactctgacaaccctgatctgcgtgacagaggatatatctactggcgacttttgagtacagaccctgttgcagccaaagaggttgtgttagcagagaagccgttgatctccgaagagactgatctcatcgaacccaccctgctggacgaactaatctgttacataggaaccctagcttcagtgtaccataaaccgccatccgccttcgtcgagggggggaggggcgtcgttcataagtccctgccacctaggactgctagtagtgagagcgctgagtctccagagaccgccccaacaggtgctcctcctggggaacaaccagatgtgatccctgctcagggtgacctgcttggtgatttactaaacctggacctaggtcccccagtttcggggccccccctggccacatcatccgtgcaaatgggagccgtcgatctcttgggcggcggcctggactccctgattggcggtacgaattttgtggcacctcctacagccgccgtgccagcaaatctcggtgcgcccataggttcgggcctttcggacctcttcgacctgacatccggcgtgggcactctgtcgggcagctatgtggcgccaaaggcagtcggatctataagtatggatctgcagcttaccaataaggcccttcaggtaatgacagattttgcaatccagttcaacaggaacagcttcgggctagcccccgcaacccctctccaagtgcatgctcctctgtcccccaaccagaccgtcgagatcagtctgcccctttccaccgtcggctccgtcatgaagatggagcctttgaacaacttgcaggtggccgtgaagaacaatattgacgtgttctatttttctaccctgtatcccctgcatattctgtttgtggaggatggaaagatggacagacagatgtttttggccacgtggaaggatattcctaacgaaaatgaagctcaattccagattcgggattgcccactcaatgctgaggccgccagcagtaagctgcaatcaagtaatattttcactgttgccaaacggaacgttgaaggtcaggacatgctctaccaatcgctcaaactgacaaatggcatctgggtgctggcagaattacgtattcagccgggcaacccatcttgcaccttatcgctcaagtgtagggcacctgaggtcagtcagcacgtgtatcaagcctatgagaccatcttaaagaattag

SEQ ID NO: 64173 - DNA, 2760 bp, Artificial Sequence
  derived and/or modified sequence
atgacagacagcaagtacttcaccaccaccaagaagggggagatctttgagctgaaggccgagctgaacagcgacaagaaggagaagaagaaggaggccgtgaagaaggtgattgcctccatgacagtgggcaaggatgtgtctgccctcttcccagatgtggtgaactgcatgcagacagacaacctggagctgaagaagctggtgtacctgtacctgatgaactatgccaagagccagcctgacatggccatcatggctgtgaacacctttgtgaaggactgtgaggaccccaaccccctcatccgggccctggccgtgaggaccatgggctgcatccgggtggacaagatcacagagtacctgtgtgagcccctgaggaagtgcctgaaggatgaggacccctacgtgaggaagacagctgctgtgtgtgtggccaagctgcatgacatcaatgcccagctggtggaggaccagggcttcctggacaccctgaaggacctgatcagtgacagcaaccccatggtggtggccaatgctgtggccgccctgtctgaaattgctgagagccaccccagcagcaacctgctggacctgaacccccagagcatcaacaagctgctgacagccctgaatgaatgtacagagtggggccagatcttcatcctggactgcctggccaactacatgcccaaggatgaccgggaggcccagagcatctgtgagcgggtgaccccccggctgagccacgccaacagcgctgtggtgctgtctgctgtgaaggtgctgatgaagttcatggagatgctgagcaaggacctggactactacggcaccctgctgaagaagctggccccacccctggtgaccctgctgtctgctgagcctgagctgcagtatgtggccctgaggaacatcaacctgattgtgcagaagaggcctgagatcctgaagcatgagatgaaggtgttctttgtgaagtacaatgaccccatctacgtgaagctggagaagctggacatcatgatccggctggccagccaggccaacatcgcccaggtgctggccgagctgaaggagtatgccacagaggtggatgtggactttgtgaggaaggctgtgcgggccatcggccgctgtgccatcaaggtggagcagagcgctgagcgctgtgtgtccaccctgctggacctgatccagaccaaggtgaactacgtggtgcaggaggccatcgtggtgatcaaggacatcttcaggaagtaccccaacaagtatgaatctgtgattgccaccctgtgtgagaacctggacagcctggatgagcctgaggcccgggccgccatgatctggatcgtgggggagtatgcagagagaattgacaatgctgatgagctgctggagagcttcctggagggcttccatgatgagagcacccaggtgcagctgcagctgctgacagccatcgtgaagctgttcctgaagaagcccacagagacccaggagctggtgcagcaggtgctgagcctggccacccaggacagcgacaacccagacctgcgggaccggggctacatctactggaggctgctgagcacagatcctgtggccgccaaggaggtggtgctggccgagaagcccctcatcagcgaggagacagacctgattgagcccaccctgctggatgagctgatctgctacatcggcaccctggcctctgtgtaccacaagcccccatctgcctttgtggagggcggccggggcgtggtgcacaagagcctgccccccaggacagccagcagcgagagcgctgagagccctgagacagcccccactggagcccctcctggagagcagccagatgtgatcccagcccagggcgacctgctgggggacctgctgaacctggacctgggcccccctgtgtctggcccccccctggccaccagctctgtgcagatgggcgctgtggacctgctgggcggcggcctggacagcctgattggaggcaccaactttgtggccccacccacagctgctgtgcctgccaacctgggcgcccccatcggcagcggcctgagtgacctgtttgacctgaccagcggcgtgggcaccctgagcggcagctatgtggcccccaaggctgtgggcagcatctccatggacctgcagctgaccaacaaggccctgcaggtgatgacagactttgccatccagttcaacagaaattcctttggcctggccccagccacccccctgcaggtgcacgcccccctgagccccaaccagacagtggagatcagcctgcccctgagcacagtgggctctgtgatgaagatggagcccctgaacaacctgcaggtggccgtgaagaacaacattgatgtgttctacttcagcaccctgtaccccctgcacatcctgtttgtggaggatggcaagatggaccggcagatgttcctggccacctggaaggacatccccaatgaaaatgaggcccagttccagatccgggactgccccctgaatgctgaggccgccagcagcaagctgcagagcagcaacatcttcaccgtggccaagagaaatgtggagggccaggacatgctgtaccagagcctgaagctgaccaacggcatctgggtgctggccgagctgcgcatccagcccggcaaccccagctgcaccctgagcctgaagtgccgggcccctgaggtgtcccagcacgtgtaccaggcctatgagaccatcctgaagaactag

SEQ ID NO: 64174 - DNA, 2760 bp, Artificial Sequence
  derived and/or modified sequence
atgaccgacagcaagtacttcaccaccaccaagaagggcgagatctttgagcttaaagctgagttgaattcagacaagaaggagaaaaaaaaggaagccgtcaagaaagtgatcgcaagtatgaccgtgggcaaggatgtgtcagccttgttccccgacgtcgtgaactgtatgcagacagacaatttggaactgaaaaaattggtgtacctgtacctcatgaactacgccaaaagtcagcctgacatggctatcatggccgtgaatactttcgtgaaagactgcgaagatcccaaccctctgatccgggctctggccgttcgcactatgggctgcattcgagtggacaaaatcacagaatatctgtgtgagcctctccggaagtgcttaaaggacgaggacccctatgtgcggaaaaccgcggcagtttgtgttgccaaactgcacgacatcaatgctcagctggttgaggaccaggggttcctggacacgttgaaggacctcatcagtgactccaaccccatggtcgtggcgaacgcagtggccgctctgtctgaaattgctgaatcccacccatctagcaatctactggatctgaatccccaatcaattaataaactgttaacagccctgaatgaatgcaccgagtggggtcagatatttatcctcgactgcctggctaactacatgccaaaggacgacagagaggctcagagcatttgcgaaagggtgacccctaggttatctcacgctaactcggccgtcgttctcagtgccgtaaaggtgcttatgaaattcatggagatgttgtcaaaagatctagattactatggtacgctgcttaaaaaactggccccacctttagtgactctgctaagtgctgagccagagctacagtacgtcgcccttaggaatattaacctcatcgttcagaaacgcccggaaatcttgaaacatgagatgaaagtgttcttcgtcaagtacaatgatccaatttacgttaagctggagaaactggacatcatgattcgcctagcttcccaagccaatatcgcccaagtcctggcagagctgaaagagtacgcaacagaggttgatgtggactttgtgagaaaagccgtcagagctattgggagatgcgccatcaaagtcgagcaatccgcggagcggtgtgtgtcaacacttttagacctgatccaaacaaaggtgaactatgtcgtccaagaggccatcgtcgttattaaggatatattccggaaatacccaaacaagtacgaatctgttatagcaactctgtgtgagaacctggattccctggatgagccagaggcccgggccgcaatgatatggattgttggtgagtatgctgaacggatcgataatgcggatgaactactcgaaagctttcttgagggctttcacgatgagagtacccaggtgcagctccagctgttgaccgccatcgtgaaattattcctcaagaaacctacagaaacacaggaactggtgcagcaggtccttagcctcgcaactcaggatagcgacaatcccgacctcagagacagggggtatatctactggcgattgttgtcaacagatcccgtcgcagccaaggaagtagtgctggccgaaaaacctttaatctcagaagagactgatctgatcgagcctaccctgctggatgaactcatatgttacattggaacgctggcatcagtgtaccataagcctccgagcgctttcgtcgaaggtggtcgcggagtggtccataaaagcctgccacctcgcacggcgagctctgagtccgcggagtctcccgaaaccgctcctaccggtgctcctccaggggagcagcccgatgtgattccggctcagggtgacctcctaggggatctgctcaatctggacctggggccccccgtgagtggtcctcccctggcgacctcttcagtgcagatgggtgccgtggatctcctgggtggcgggctagattctctgatcggcgggactaactttgttgcaccaccaaccgctgcagttccggccaaccttggggcccctatcggatccggattatccgacctgtttgatctcacatcaggggtcggaaccctgagcggctcctatgtggctcctaaggcagtggggagcattagcatggacctgcaacttaccaacaaggcgttgcaagtgatgacagatttcgcaattcagtttaaccgcaatagcttcggccttgctcctgccaccccgctgcaggttcatgcccccctgtctcctaatcagacggtcgaaattagcctgccgctcagcacggttgggtccgtgatgaagatggaacctctgaacaacctgcaggtagcagtgaaaaataatatcgacgtcttctacttcagcactctctacccactgcacatcctgttcgttgaggacggtaagatggatcggcaaatgttcctagctacgtggaaagatattcccaatgagaacgaagcacagttccagattcgcgactgcccattgaacgcagaggccgccagctccaagttgcagagcagcaatatcttcacggtggctaaacggaacgtcgagggccaagatatgttgtatcaatctctgaagctgaccaatggcatctgggttctggccgagctacgcattcagccgggaaatcccagctgtaccttgagcctgaagtgcagagctccagaagtgtcacagcacgtatatcaagcctatgaaactattctcaagaattag

SEQ ID NO: 64175 - DNA, 2760 bp, Artificial Sequence
  derived and/or modified sequence
atgaccgattcaaagtatttcaccaccaccaagaagggggaaattttcgagttgaaggccgagctcaatagcgataagaaggagaagaagaaggaggcagtgaagaaggttatagcttcgatgactgttggcaaggacgtctctgcattgtttcccgatgtcgtgaactgcatgcagactgacaacctggaactcaagaaactggtttacctgtatctgatgaactatgcgaagagtcagccagacatggcaataatggcagtgaataccttcgtcaaggattgtgaggatccaaaccccttaatcagggcactagcagtgcgaaccatgggttgtattagggttgataagataaccgagtatctttgcgaacccttgcggaagtgcctaaaggatgaggatccatatgttaggaaaaccgccgctgtgtgtgtcgctaagctgcacgatatcaatgctcagctagtggaggatcaagggtttctggatactctcaaggacctgatcagcgacagtaacccaatggtcgtggctaatgccgtggctgccctttcagagatagccgaatcccatccctcctccaacttactggacctgaacccccagtccattaataagcttctcacggccctgaacgagtgtactgaatggggacagatctttattttagattgtttggctaactatatgcctaaggatgatcgcgaggcacaatctatatgtgagagagtcacccctcgactatcacacgctaactcagcagtggtgctgagcgctgtgaaagtcctcatgaaattcatggaaatgctgtccaaagacctcgattactacggcacactgttgaagaaattggcccctccactagtgacactattatcagcagaacctgaactccagtacgtcgctttacgcaacatcaacttaatcgtacaaaagcggccagaaattctaaagcacgagatgaaggtgttctttgtgaagtataacgacccgatctacgtgaagctggagaagctcgatatcatgataagactggcatcccaggccaacatagctcaggtgctggccgaattaaaggaatacgcaaccgaagtggacgttgatttcgttaggaaggctgttagggccattggtcgatgcgccattaaagtcgagcaatcagccgagagatgcgtgtccaccctgctggatctgatacagacaaaggtgaactatgtcgtccaggaggctattgtggttattaaagacatcttccgcaagtaccccaacaagtatgagagtgtcatcgctaccctgtgtgagaacctggatagcctggatgaacccgaggccagagctgccatgatctggattgtgggcgagtacgccgaaaggatcgataatgctgacgagctgctcgaatccttcttggagggctttcacgatgaaagcacccaggtgcagctgcagctgctgacagcaatagttaagctctttctcaaaaagcctaccgaaacgcaagagttagtacagcaggtgctatcgcttgccactcaggactctgacaatcctgatctgagagatcgtggttatatctactggagattactctctacggaccctgtggcagccaaagaggtcgtactggcggagaaacctctgatctctgaagagacagatttgattgaacccaccctgttagatgaactgatctgctatatcgggaccctggcaagcgtatatcacaaacctccctcagccttcgtagagggtgggagaggcgtcgtgcataaaagtctgcctccaagaaccgcttctagcgaatccgccgagtcgccagagacagcaccaacaggcgcaccacctggcgagcagccggatgttatccctgctcagggcgatttacttggggatttactgaacttggatctcggaccacctgtgtcgggccctcccctggccaccagctccgttcagatgggcgctgttgatctgttaggcggaggactcgacagcctaataggtggtactaactttgtcgccccacccacagccgctgttccggctaatctgggggctcccataggctccggtttgagcgacttgtttgacctgacctccggagttggcacactatctggcagttatgtagcacccaaggccgtgggcagcattagtatggatctgcaactcacgaataaagctcttcaagtgatgaccgactttgccattcaatttaaccggaactctttcggactcgcccctgccactcctttgcaggtgcacgcccctttgtccccaaatcaaactgttgagatctccctgcctctgtcgactgtagggtccgtaatgaagatggagccacttaacaacttgcaggtcgcggttaagaacaacatagatgtcttttatttttctaccctgtacccactccacattctgtttgtggaggacgggaaaatggatcggcagatgtttctggccacgtggaaagatattccaaacgagaatgaggcacagttccagattagggattgtcctctgaacgcagaggccgctagcagtaagctacagtcatccaatatttttaccgttgccaagagaaatgtagaaggccaggacatgctgtatcagagtctgaagttgacgaacggaatctgggttctggctgaacttcgtatccaacccggtaacccttcttgcacactctcactcaaatgccgggcacccgaggtttcacagcacgtgtaccaggcatatgagactattttaaagaactag

SEQ ID NO: 64176 - DNA, 2760 bp, Artificial Sequence
  derived and/or modified sequence
atgaccgacagcaagtacttcaccaccaccaagaagggcgagatcttcgagctgaaggccgagctgaacagcgacaagaaggagaagaagaaggaggccgtgaagaaggtgatcgccagcatgaccgtgggcaaggacgtgagcgccctgttccccgacgtggtgaactgcatgcagaccgacaacctggagctgaagaagctggtgtacctgtacctgatgaactacgccaagagccagcccgacatggccatcatggccgtgaacaccttcgtgaaggactgcgaggaccccaaccccctgatcagagccctggccgtgagaaccatgggctgcatcagagtggacaagatcaccgagtacctgtgcgagcccctgagaaagtgcctgaaggacgaggacccctacgtgagaaagaccgccgccgtgtgcgtggccaagctgcacgacatcaacgcccagctggtggaggaccagggcttcctggacaccctgaaggacctgatcagcgacagcaaccccatggtggtggccaacgccgtggccgccctgagcgagatcgccgagagccaccccagcagcaacctgctggacctgaacccccagagcatcaacaagctgctgaccgccctgaacgagtgcaccgagtggggccagatcttcatcctggactgcctggccaactacatgcccaaggacgacagagaggcccagagcatctgcgagagagtgacccccagactgagccacgccaacagcgccgtggtgctgagcgccgtgaaggtgctgatgaagttcatggagatgctgagcaaggacctggactactacggcaccctgctgaagaagctggccccccccctggtgaccctgctgagcgccgagcccgagctgcagtacgtggccctgagaaacatcaacctgatcgtgcagaagagacccgagatcctgaagcacgagatgaaggtgttcttcgtgaagtacaacgaccccatctacgtgaagctggagaagctggacatcatgatcagactggccagccaggccaacatcgcccaggtgctggccgagctgaaggagtacgccaccgaggtggacgtggacttcgtgagaaaggccgtgagagccatcggcagatgcgccatcaaggtggagcagagcgccgagagatgcgtgagcaccctgctggacctgatccagaccaaggtgaactacgtggtgcaggaggccatcgtggtgatcaaggacatcttcagaaagtaccccaacaagtacgagagcgtgatcgccaccctgtgcgagaacctggacagcctggacgagcccgaggccagagccgccatgatctggatcgtgggcgagtacgccgagagaatcgacaacgccgacgagctgctggagagcttcctggagggcttccacgacgagagcacccaggtgcagctgcagctgctgaccgccatcgtgaagctgttcctgaagaagcccaccgagacccaggagctggtgcagcaggtgctgagcctggccacccaggacagcgacaaccccgacctgagagacagaggctacatctactggagactgctgagcaccgaccccgtggccgccaaggaggtggtgctggccgagaagcccctgatcagcgaggagaccgacctgatcgagcccaccctgctggacgagctgatctgctacatcggcaccctggccagcgtgtaccacaagccccccagcgccttcgtggagggcggcagaggcgtggtgcacaagagcctgccccccagaaccgccagcagcgagagcgccgagagccccgagaccgcccccaccggcgccccccccggcgagcagcccgacgtgatccccgcccagggcgacctgctgggcgacctgctgaacctggacctgggcccccccgtgagcggcccccccctggccaccagcagcgtgcagatgggcgccgtggacctgctgggcggcggcctggacagcctgatcggcggcaccaacttcgtggccccccccaccgccgccgtgcccgccaacctgggcgcccccatcggcagcggcctgagcgacctgttcgacctgaccagcggcgtgggcaccctgagcggcagctacgtggcccccaaggccgtgggcagcatcagcatggacctgcagctgaccaacaaggccctgcaggtgatgaccgacttcgccatccagttcaacagaaacagcttcggcctggcccccgccacccccctgcaggtgcacgcccccctgagccccaaccagaccgtggagatcagcctgcccctgagcaccgtgggcagcgtgatgaagatggagcccctgaacaacctgcaggtggccgtgaagaacaacatcgacgtgttctacttcagcaccctgtaccccctgcacatcctgttcgtggaggacggcaagatggacagacagatgttcctggccacctggaaggacatccccaacgagaacgaggcccagttccagatcagagactgccccctgaacgccgaggccgccagcagcaagctgcagagcagcaacatcttcaccgtggccaagagaaacgtggagggccaggacatgctgtaccagagcctgaagctgaccaacggcatctgggtgctggccgagctgagaatccagcccggcaaccccagctgcaccctgagcctgaagtgcagagcccccgaggtgagccagcacgtgtaccaggcctacgagaccatcctgaagaactag

SEQ ID NO: 64177 - protein, 590 aa, Artificial Sequence
  derived and/or modified sequence
MHLARLVGSCSLLLLLGALSGWAASDDPIEKVIEGINRGLSNAEREVGKALDGINSGITHAGREVEKVFNGLSNMGSHTGKELDKGVQGLNHGMDKVAHEINHGIGQAGKEAEKLGHGVNNAAGQVGKEADKLIHHGVHHGANQAGSEAGKFGQGVDNAAGQAGNEAGRFGQGVHHAAGQAGNEAGRFGQGVHHAAGQAGNEAGRFGQGAHHGLSEGWKETEKFGQGIHHAAGQVGKEAEKFGQGAHHAAGQAGNEAGRFGQGVHHGLSEGWKETEKFGQGVHHTAGQVGKEAEKFGQGAHHAAGQAGNEAGRFGQGAHHAAGQAGNEAGRFGQGVHHGLSEGWKETEKFGQGVHHAASQFGKETEKLGHGVHHGVNEAWKEAEKFGQGVHHAASQVGKEEDRVVQGLHHGVSQAGREAGQFGHDIHHTAGQAGKEGDIAVHGVQPGVHEAGKEAGQFGQGVHHTLEQAGKEADKAVQGFHTGVHQAGKEAEKLGQGVNHAADQAGKEVEKLGQGAHHAAGQAGKELQNAHNGVNQASKEANQLLNGNHQSGSSSHQGGATTTPLASGASVNTPFINLPALWRSVANIMP

SEQ ID NO: 64178 - DNA, 1773 bp, Artificial Sequence
  derived and/or modified sequence
atgcacctggccagactggtgggcagctgcagcctgctgctgctgctgggcgccctgagcggctgggccgccagcgacgaccccatcgagaaggtgatcgagggcatcaacagaggcctgagcaacgccgagagagaggtgggcaaggccctggacggcatcaacagcggcatcacccacgccggcagagaggtggagaaggtgttcaacggcctgagcaacatgggcagccacaccggcaaggagctggacaagggcgtgcagggcctgaaccacggcatggacaaggtggcccacgagatcaaccacggcatcggccaggccggcaaggaggccgagaagctgggccacggcgtgaacaacgccgccggccaggtgggcaaggaggccgacaagctgatccaccacggcgtgcaccacggcgccaaccaggccggcagcgaggccggcaagttcggccagggcgtggacaacgccgccggccaggccggcaacgaggccggcagattcggccagggcgtgcaccacgccgccggccaggccggcaacgaggccggcagattcggccagggcgtgcaccacgccgccggccaggccggcaacgaggccggcagattcggccagggcgcccaccacggcctgagcgagggctggaaggagaccgagaagttcggccagggcatccaccacgccgccggccaggtgggcaaggaggccgagaagttcggccagggcgcccaccacgccgccggccaggccggcaacgaggccggcagattcggccagggcgtgcaccacggcctgagcgagggctggaaggagaccgagaagttcggccagggcgtgcaccacaccgccggccaggtgggcaaggaggccgagaagttcggccagggcgcccaccacgccgccggccaggccggcaacgaggccggcagattcggccagggcgcccaccacgccgccggccaggccggcaacgaggccggcagattcggccagggcgtgcaccacggcctgagcgagggctggaaggagaccgagaagttcggccagggcgtgcaccacgccgccagccagttcggcaaggagaccgagaagctgggccacggcgtgcaccacggcgtgaacgaggcctggaaggaggccgagaagttcggccagggcgtgcaccacgccgccagccaggtgggcaaggaggaggacagagtggtgcagggcctgcaccacggcgtgagccaggccggcagagaggccggccagttcggccacgacatccaccacaccgccggccaggccggcaaggagggcgacatcgccgtgcacggcgtgcagcccggcgtgcacgaggccggcaaggaggccggccagttcggccagggcgtgcaccacaccctggagcaggccggcaaggaggccgacaaggccgtgcagggcttccacaccggcgtgcaccaggccggcaaggaggccgagaagctgggccagggcgtgaaccacgccgccgaccaggccggcaaggaggtggagaagctgggccagggcgcccaccacgccgccggccaggccggcaaggagctgcagaacgcccacaacggcgtgaaccaggccagcaaggaggccaaccagctgctgaacggcaaccaccagagcggcagcagcagccaccagggcggcgccaccaccacccccctggccagcggcgccagcgtgaacacccccttcatcaacctgcccgccctgtggagaagcgtggccaacatcatgccctag

SEQ ID NO: 64179 - DNA, 1773 bp, Artificial Sequence
  derived and/or modified sequence
atgcatctcgccaggctggtggggagctgcagcctcctgctcctacttggagccctgtcgggctgggcagcctccgatgatcctatcgaaaaagttattgaagggatcaaccggggtctcagcaacgctgagagagaagtgggcaaggccctggacggaatcaattccgggattacacacgccggtagggaagtggaaaaggtctttaacggtctttcaaatatgggctctcacactggtaaggagttggataaaggggtgcaggggctgaaccatggaatggataaggtcgcccatgagattaatcatggaataggccaagcaggcaaagaagctgagaagctgggccacggtgtgaataatgcggccgggcaagtggggaaggaagccgacaagctgatccaccacggggtgcatcacggagcaaaccaggcggggtccgaggcaggcaaattcggacaaggggtggacaacgctgcaggtcaggctggtaacgaagcgggccgtttcgggcagggagtacatcatgccgcagggcaagccgggaatgaggcagggcgatttggccagggcgtacatcacgcggctggtcaggccgggaacgaagcaggccggttcggacagggcgcacatcacgggctgagcgaaggctggaaggagaccgaaaagtttggccaggggatccaccacgccgccggacaggttggcaaagaggccgaaaaattcggtcagggtgcccaccatgcggcaggtcaagcaggaaacgaggcaggtcgtttcggacagggtgtacaccatggcctgagcgagggctggaaggaaacagaaaagttcgggcaaggagtccaccacacagcaggccaggtaggtaaggaggcagagaaatttggccaaggggcccatcatgccgccgggcaggctggcaatgaggccggtcgatttggccaaggcgcacaccacgctgctggacaagcaggaaacgaggccggtaggttcggacaaggggtccatcatggtttgtcggaaggctggaaagagacagaaaaattcggccagggggtacatcatgccgcttcacagttcggaaaagagaccgagaagttagggcatggcgtgcaccacggagtgaatgaggcctggaaggaggcagagaaatttggtcaaggcgttcaccacgcagcaagccaggtggggaaggaggaggaccgggttgtacaaggcctccatcatggcgtcagccaagccggaagagaggcaggccagtttggtcacgacattcatcataccgcgggacaggccggcaaggagggggatatcgcggtgcatggagtccaaccaggcgtgcacgaggccgggaaagaggccggccagttcggtcagggagtgcatcatacccttgagcaggccggaaaagaagccgacaaggccgtgcagggatttcatactggagtgcatcaggccggaaaggaggctgagaagttgggccagggtgtcaatcacgctgccgatcaggccgggaaagaagtggaaaaactcggccagggagctcaccatgccgctggacaggccgggaaggagcttcagaatgcgcataatggggtgaatcaggcttctaaggaggcgaaccagctcctgaacggcaatcatcagtcaggaagctcttctcatcaggggggcgccacgaccactcccctggcaagtggggcctctgttaatacacccttcattaatctgccagccctgtggaggagcgtggccaatataatgccctag

SEQ ID NO: 64180 - DNA, 1773 bp, Artificial Sequence
  derived and/or modified sequence
atgcacctggcccggctggtgggcagctgcagcctgctgctgctgctgggcgccctgagcggctgggccgccagtgatgaccccatcgagaaggtgattgagggcatcaacagaggcctgagcaatgctgagcgggaggtgggcaaggccctggatggcatcaacagcggcatcacccatgctggccgggaggtggagaaggtgttcaacggcctgagcaacatgggcagccacacaggcaaggagctggacaagggcgtgcagggcctgaaccacggcatggacaaggtggcccacgagatcaaccacggcatcggccaggccggcaaggaggccgagaagctgggccatggagtgaacaatgctgctggccaggtgggcaaggaggccgacaagctgatccaccacggcgtgcaccacggggccaaccaggccggcagcgaggccggcaagtttggccagggcgtggacaatgctgctggccaggccggaaatgaagctggccgcttcggccagggcgtgcaccacgccgccggccaggccggaaatgaagctggccgcttcggccagggcgtgcaccacgccgccggccaggccggaaatgaagctggccgcttcggccagggcgcccaccacggcctgtctgagggctggaaggagacagagaagtttggccagggcatccaccacgccgccggccaggtgggcaaggaggccgagaagtttggccagggcgcccaccacgccgccggccaggccggaaatgaagctggccgcttcggccagggcgtgcaccacggcctgtctgagggctggaaggagacagagaagtttggccagggcgtgcaccacacagctggccaggtgggcaaggaggccgagaagtttggccagggcgcccaccacgccgccggccaggccggaaatgaagctggccgcttcggccagggcgcccaccacgccgccggccaggccggaaatgaagctggccgcttcggccagggcgtgcaccacggcctgtctgagggctggaaggagacagagaagtttggccagggcgtgcaccacgccgccagccagtttgggaaggagacagagaagctgggccacggcgtgcaccacggcgtgaatgaggcctggaaggaggccgagaagtttggccagggcgtgcaccacgccgccagccaggtgggcaaggaggaggacagagtggtgcagggcctgcaccacggcgtgtcccaggccggccgggaggccggccagtttggacatgacatccaccacacagctggccaggccggcaaggagggggacattgctgtgcacggcgtgcagcccggggtgcatgaagctgggaaggaggccggccagtttggccagggcgtgcaccacaccctggagcaggccggcaaggaggccgacaaggctgtgcagggcttccacactggagtgcaccaggccggcaaggaggccgagaagctgggccagggcgtgaaccacgccgctgaccaggccggcaaggaggtggagaagctgggccagggcgcccaccacgccgccggccaggccggcaaggagctgcagaatgcccacaacggggtgaaccaggccagcaaggaggccaaccagctgctgaatggaaaccaccagagcggcagcagcagccaccagggcggggccaccaccacccccctggccagcggggcctctgtgaacacccccttcatcaacctgcctgccctgtggaggtctgtggccaacatcatgccctag

SEQ ID NO: 64181 - DNA, 1773 bp, Artificial Sequence
  derived and/or modified sequence
atgcacctggcccggctggtgggcagctgcagcctgctgctgctgctgggtgccctgtccggttgggctgccagtgacgaccccatcgaaaaagtgattgaaggcatcaaccggggcctctccaatgcagaaagggaagtgggcaaagctctggacggcataaacagcggtattacgcacgctgggcgagaggtggaaaaggtctttaacggattgagcaatatgggctctcacaccggaaaggagctcgacaagggcgtccaggggctgaatcatggcatggacaaggtggcacacgaaataaaccatggcataggacaggcagggaaagaagccgagaagctgggacatggtgtgaataacgccgcgggccaggttgggaaggaggcagataagctaattcatcacggggtgcatcacggcgccaaccaggctggatctgaggccggtaagtttggacaaggagtggacaacgctgctggacaggctggaaatgaagctggccgttttggtcagggagtccatcatgccgccgggcaggccggaaacgaggctgggaggttcggacagggagttcatcacgcagctggacaggccgggaacgaagctggacggtttgggcaaggggcacaccatggcctatctgaggggtggaaagagactgaaaagttcggccagggcattcatcacgccgccggtcaggttgggaaggaagccgagaagttcgggcagggcgcccaccacgcggcgggacaggcaggcaacgaagccggtcgttttgggcagggcgtccaccacggcttaagtgaaggctggaaggagactgagaagtttgggcagggtgtccatcacaccgcgggccaggtcggcaaggaagccgaaaaatttgggcagggcgctcatcatgcagctgggcaagctggaaacgaggccggaagattcggacagggggcccatcatgccgctgggcaggcaggaaatgaggccgggcggttcggacagggtgtacaccacggactgagtgaaggatggaaggagaccgaaaaatttgggcagggagtgcatcacgccgcttcacagttcggaaaggaaactgaaaaattgggtcatggggtgcatcatggagtgaacgaagcttggaaggaagctgagaagttcggacagggggtccatcacgccgccagtcaggtgggaaaggaagaggatagagtggtgcaggggctacaccacggagtgagtcaggctgggcgtgaagcaggccagtttgggcacgacattcaccacaccgcaggacaagccggtaaggagggcgatatcgctgttcacggagtccaaccaggtgttcacgaggccggcaaagaggccggccagttcggccagggggtgcaccacacgttagagcaggccggcaaagaggcagataaggccgtccagggcttccacactggcgtccaccaggctggaaaagaggcggaaaaactgggccaaggagtaaatcacgccgctgaccaagcagggaaggaagtcgagaaactgggacagggagctcatcacgccgctgggcaagccggtaaagagcttcaaaacgcccacaacggtgtgaatcaagcgtccaaggaagccaatcaactcctgaatggcaaccatcagtctggctcgagctcccatcagggcggcgccaccaccacccccctggcctccggggcaagcgtgaacactcctttcattaacctcccagctctgtggaggagcgtcgctaacattatgccttag

SEQ ID NO: 64182 - DNA, 1773 bp, Artificial Sequence
  derived and/or modified sequence
atgcacctggctcggcttgtgggtagttgctctcttctactgctgctcggggcactctccggatgggccgcatcagacgacccaattgagaaagttattgagggtataaaccggggattatctaacgccgaacgcgaggtcggtaaagcccttgatgggatcaattcaggcatcacccacgcgggtcgggaagtggaaaaggtattcaatggcctgtccaatatgggtagccatacgggaaaagagcttgacaagggcgtgcagggtctgaatcatggcatggacaaggtggcacatgagattaaccacggaatcggtcaggccggtaaggaagccgagaagctggggcatggagtgaacaatgccgctgggcaggttggaaaggaggctgacaagttaatccaccacggagtccaccatggagccaaccaggctggttccgaagcgggtaaattcggacaaggcgtagataatgctgcaggccaggccggtaacgaggctggtcgcttcggccaaggtgtccatcacgccgcaggtcaggcgggaaacgaggccggtcgatttggtcagggcgttcatcacgctgccggacaggccggaaacgaagctggaaggttcggtcagggcgctcaccacggcttgtcagaaggctggaaagaaaccgagaagttcgggcaggggatccatcatgccgcaggtcaggtcgggaaggaagcagaaaagttcgggcaaggagcccatcacgctgctggtcaagcagggaatgaggcaggccgatttggccagggggtccatcacggcctcagcgagggttggaaggagactgaaaagtttggacagggcgttcatcataccgctggccaagtagggaaggaggctgagaaatttggccaaggagcacaccacgccgctggtcaggccggaaatgaggcaggaagattcggtcagggggcacaccacgccgctggtcaggcagggaatgaggctgggaggtttgggcagggagtgcatcacggactaagcgaggggtggaaggaaacagaaaaatttggccagggcgtgcaccacgccgctagccagtttggtaaggagacagagaaactgggacatggcgtgcaccacggcgtcaacgaggcctggaaagaagcagaaaagttcggccaaggcgtccaccacgccgctagccaggtcggcaaagaagaggacagggtcgtgcagggtctccatcatggagtctcccaggccggaagggaggccggacagttcggacatgacattcaccacacagccggacaggctgggaaagaaggggatatcgcggtccacggggtacagcctggtgtgcatgaggctgggaaagaagctggccagttcggtcaaggagtacatcacaccctcgaacaagcaggaaaggaggcagataaggcagttcaagggttccataccggtgtacaccaagccggtaaagaagccgaaaaactaggccagggagtcaaccacgccgctgatcaggctggcaaagaagttgaaaagctcggacagggcgcacaccacgccgctggccaggccggaaaggaattgcagaacgctcacaatggcgttaaccaggcctcaaaagaagctaatcaactgctgaacggtaatcaccagtccggctcctctagtcaccagggcggtgcaacaacaacaccgcttgcctccggtgcaagcgtgaacacacctttcattaacttaccggcactgtggcggagcgtcgcaaacattatgccctag

SEQ ID NO: 64183 - DNA, 1945 bp, Artificial Sequence
  derived and/or modified sequence
tctgcatccttcccgaccttcccagcaatatgcatcttgcacgtctggtcggctcctgctccctccttctgctactgggggccctgtctggatgggcggccagcgatgaccccattgagaaggtcattgaagggatcaaccgagggctgagcaatgcagagagagaggtgggcaaggccctggatggcatcaacagtggaatcacgcatgccggaagggaagtggagaaggttttcaacggacttagcaacatggggagccacaccggcaaggagttggacaaaggcgtccaggggctcaaccacggcatggacaaggttgcccatgagatcaaccatggtattggacaagcaggaaaggaagcagagaagcttggccatggggtcaacaacgctgctggacaggttgggaaggaggcagacaaactgatccatcatggggtccatcacggggccaaccaggcgggaagtgaggcagggaagtttggccagggagtcgacaatgctgcagggcaggctggaaatgaggctgggaggtttggccagggagtccaccatgctgcagggcaggccggaaatgaggctgggaggtttggccagggagtccaccatgctgcagggcaggccggaaatgaggctgggagatttggccagggggcccaccatggtctcagtgagggctggaaggagacagagaagtttggccaggggatccaccatgctgccggtcaggttgggaaggaggcagagaagtttggccagggggcccaccatgctgcggggcaggccggaaatgaggcagggagatttggccagggggtccaccatggtctcagtgagggctggaaggagacagagaagtttggccagggggtccaccatactgctggtcaggttgggaaggaggcagagaagtttggccagggggcccaccatgctgcggggcaggccggaaatgaggcagggagatttggccagggggcccaccatgctgcggggcaggccggaaatgaggctgggaggtttggccagggggtccaccatggtctcagtgagggctggaaggagacagagaagtttggccagggggtccaccatgctgccagtcagtttgggaaggaaacagagaagctcggccatggggtccaccatggggttaatgaggcctggaaggaagcagagaagtttggccagggtgtccaccatgctgcctcgcaggtggggaaggaggaagacagagtggtccaaggcctccatcatggcgttagtcaggctggaagggaggcggggcagtttggccacgacattcaccacacagcagggcaggctgggaaagagggagacatagcagttcatggtgtccaacctggggtccacgaggccgggaaggaggcagggcagtttggccagggagttcaccatacccttgaacaggccgggaaggaagcagacaaagcggtccaagggttccacactggggtccaccaggctgggaaggaagcagagaaacttggccaaggggtcaaccatgctgctgaccaggctggaaaggaagtggagaagcttggccaaggtgcccaccatgctgctggccaggccgggaaggagctgcagaatgctcataatggggtcaaccaagccagcaaggaggccaaccagctgctgaatggcaaccatcaaagcggatcttccagccatcaaggaggggccacaaccacgccgttagcctctggggcctcggtcaacacgcctttcatcaaccttcccgccctgtggaggagcgtcgccaacatcatgccctaaactggcatccggccttgctgggagaataatgtcgccgttgtcacatcagctgacatgacctggaggggttgggggtgggggacaggtttctgaaatccctgaagggggttgtactgggatttgtgaataaacttgatacacta

SEQ ID NO: 64184 - protein, 95 aa, Artificial Sequence
  derived and/or modified sequence
MGSHTGKELDKGVQGLNHGMDKVAHEINHGIGQAGKEAEKLGHGVNNAAGQGNHQSGSSSHQGGATTTPLASGASVNTPFINLPALWRSVANIMP

SEQ ID NO: 64185 - DNA, 288 bp, Artificial Sequence
  derived and/or modified sequence
atgggcagccacaccggcaaggagctggacaagggcgtgcagggcctgaaccacggcatggacaaggtggcccacgagatcaaccacggcatcggccaggccggcaaggaggccgagaagctgggccacggcgtgaacaacgccgccggccagggcaaccaccagagcggcagcagcagccaccagggcggcgccaccaccacccccctggccagcggcgccagcgtgaacacccccttcatcaacctgcccgccctgtggagaagcgtggccaacatcatgccctag

SEQ ID NO: 64186 - DNA, 288 bp, Artificial Sequence
  derived and/or modified sequence
atgggctcccacaccgggaaggagctcgacaaaggggtccagggactgaaccacggcatggataaggtcgcgcacgaaataaatcatggcattgggcaggctggtaaagaagccgaaaagttgggccatggagtgaataacgccgccggacagggcaatcaccagagtggctccagttcacaccagggtggcgcgaccaccactcccctggctagcggcgcctccgtgaacacacctttcatcaacttacctgccttatggcggagcgttgctaacatcatgccttag

SEQ ID NO: 64187 - DNA, 288 bp, Artificial Sequence
  derived and/or modified sequence
atgggcagccacacaggcaaggagctggacaagggcgtgcagggcctgaaccacggcatggacaaggtggcccacgagatcaaccacggcatcggccaggccggcaaggaggccgagaagctgggccatggagtgaacaatgctgctggccagggcaaccaccagagcggcagcagcagccaccagggcggggccaccaccacccccctggccagcggggcctctgtgaacacccccttcatcaacctgcctgccctgtggaggtctgtggccaacatcatgccctag

SEQ ID NO: 64188 - DNA, 288 bp, Artificial Sequence
  derived and/or modified sequence
atgggcagccacaccggcaaggagctggacaagggcgtgcagggccttaatcacggtatggataaggtcgcccatgaaatcaaccacggaatcggccaggccgggaaagaagccgaaaaactgggtcacggcgtaaataatgccgcgggacagggtaaccatcagtcagggtctagtagccaccagggcggagctactacgacaccgttggcttccggagctagcgtgaacacgccttttatcaacttaccagcgttatggaggagcgtcgctaatatcatgccatag

SEQ ID NO: 64189 - DNA, 288 bp, Artificial Sequence
  derived and/or modified sequence
atgggatcacatacaggaaaggagctcgacaaaggagtgcagggactgaaccatggcatggataaggtcgcgcacgagataaatcacggtattgggcaggctgggaaagaggccgagaaactcggacacggagtcaataatgcagccggtcaggggaaccaccagtctgggagcagcagccatcagggcggagccaccaccacaccactggcctccggcgcttctgtgaatacccccttcatcaatctgccagccctgtggagaagcgttgctaatattatgccctag

SEQ ID NO: 64190 - DNA, 593 bp, Artificial Sequence
  derived and/or modified sequence
ggatgggcggccagcgatgaccccattgagaaggtcattgaagggatcaaccgagggctgagcaatgcagagagagaggtgggcaaggccctggatggcatcaacagtggaatcacgcatgccggaagggaagtggagaaggttttcaacggacttagcaacatggggagccacaccggcaaggagttggacaaaggcgtccaggggctcaaccacggcatggacaaggttgcccatgagatcaaccatggtattggacaagcaggaaaggaagcagagaagcttggccatggggtcaacaacgctgctggacagggcaaccatcaaagcggatcttccagccatcaaggaggggccacaaccacgccgttagcctctggggcctcggtcaacacgcctttcatcaaccttcccgccctgtggaggagcgtcgccaacatcatgccctaaactggcatccggccttgctgggagaataatgtcgccgttgtcacatcagctgacatgacctggaggggttgggggtgggggacaggtttctgaaatccctgaagggggttgtactgggatttgtgaataaacttgatacacta

SEQ ID NO: 64191 - protein, 273 aa, Artificial Sequence
  derived and/or modified sequence
MDPGKDKEGVPQPSGPPARKKFVIPLDEDEVPPGVAKPLFRSTQSLPTVDTSAQAAPQTYAEYAISQPLEGAGATCPTGSEPLAGETPNQALKPGAKSNSIIVSPRQRGNPVLKFVRNVPWEFGDVIPDYVLGQSTCALFLSLRYHNLHPDYIHGRLQSLGKNFALRVLLVQVDVKDPQQALKELAKMCILADCTLILAWSPEEAGRYLETYKAYEQKPADLLMEKLEQDFVSRSLEQLIAASREDLALCPGLGPQKARRLFDVLHEPFLKVP

SEQ ID NO: 64192 - DNA, 822 bp, Artificial Sequence
  derived and/or modified sequence
atggaccccggcaaggacaaggagggcgtgccccagcccagcggcccccccgccagaaagaagttcgtgatccccctggacgaggacgaggtgccccccggcgtggccaagcccctgttcagaagcacccagagcctgcccaccgtggacaccagcgcccaggccgccccccagacctacgccgagtacgccatcagccagcccctggagggcgccggcgccacctgccccaccggcagcgagcccctggccggcgagacccccaaccaggccctgaagcccggcgccaagagcaacagcatcatcgtgagccccagacagagaggcaaccccgtgctgaagttcgtgagaaacgtgccctgggagttcggcgacgtgatccccgactacgtgctgggccagagcacctgcgccctgttcctgagcctgagataccacaacctgcaccccgactacatccacggcagactgcagagcctgggcaagaacttcgccctgagagtgctgctggtgcaggtggacgtgaaggacccccagcaggccctgaaggagctggccaagatgtgcatcctggccgactgcaccctgatcctggcctggagccccgaggaggccggcagatacctggagacctacaaggcctacgagcagaagcccgccgacctgctgatggagaagctggagcaggacttcgtgagcagaagcctggagcagctgatcgccgccagcagagaggacctggccctgtgccccggcctgggcccccagaaggccagaagactgttcgacgtgctgcacgagcccttcctgaaggtgccctag

SEQ ID NO: 64193 - DNA, 120 bp, Artificial Sequence
  derived and/or modified sequence
atggaccccggcaaggacaaggagggcgtgccccagcccagcggcccccccgccagaaagaagttcgtgatccccctggacgaggacgaggtgccccccggcgtgagcaagcccctgtag

SEQ ID NO: 64194 - DNA, 822 bp, Artificial Sequence
  derived and/or modified sequence
atggacccaggcaaggacaaagaaggagtcccacagcccagcggaccaccagcgaggaagaagtttgtgataccactggatgaagacgaggtcccccctggggttgccaaacccctttttaggagtactcagagtctgccgacggtggatacttccgcccaagcggcccctcagacttatgctgagtatgcaatcagccagcctctggagggcgccggggccacgtgtccgacaggatctgagccattggccggggaaacaccaaaccaagccttgaagccgggcgctaagagcaactcaattatcgtgtcgccaagacagcgaggcaatcctgtcttaaaattcgtgaggaacgtcccctgggagtttggagatgtgatccctgattacgtgcttgggcagagtacttgcgccctatttttgagtcttcgttatcacaacctacaccccgactatatccatggccggctgcagtctctcgggaagaactttgcactgagagtgctgttagtccaggtggacgtgaaggatccacagcaggcattgaaggagctcgccaagatgtgcattctggccgactgtacactgattctggcctggtcccctgaagaggcaggacggtacctcgagacctataaggcgtacgaacaaaagcccgctgacttactaatggaaaagttggagcaggacttcgtttcacgctcactggaacagctgattgcagcttcacgtgaggacctagcgctgtgccccggcttagggccacagaaagctagacgcctgtttgatgttttacatgaacccttcctgaaggtcccgtag

SEQ ID NO: 64195 - DNA, 120 bp, Artificial Sequence
  derived and/or modified sequence
atggatccagggaaggacaaggaaggtgtcccacagccttccggaccgcccgctaggaagaagttcgttattcccctggatgaagacgaagttcctcctggtgtctccaaacccttgtag

SEQ ID NO: 64196 - DNA, 259 bp, Artificial Sequence
  derived and/or modified sequence
aagtgctgcgagccctgggccacgctggccgtgctggcagtgggccgcctcgatccctctgcagtctttcccttgaggctccaagaccagcaggtgaggcctcgcggcgctgaaaccgtgaggcccggaccacaggctccagatggaccctgggaaggacaaagagggggtgccccagccctcagggccgccagcaaggaagaaatttgtgatacccctcgacgaggatgaggtccctcctggagtgagcaaaccactg

SEQ ID NO: 64197 - DNA, 822 bp, Artificial Sequence
  derived and/or modified sequence
atggaccccgggaaggacaaggagggcgtgccccagcccagcggccccccagccaggaagaagtttgtgatccccctggatgaagatgaggtgcccccaggagtggccaagcccctcttccgcagcacccagagcctgcccaccgtggacaccagcgcccaggccgccccccagacctatgcagaatatgccatcagccagcccctggagggcgctggggccacctgccccaccggcagcgagcccctggccggggagacccccaaccaggccctgaagccaggggccaagagcaacagcatcatcgtgagcccccggcagaggggcaaccctgtgctgaagtttgtgagaaatgtgccctgggagtttggagatgtgatcccagactatgtgctgggccagagcacctgtgccctcttcctgagcctgcgctaccacaacctgcacccagactacatccacggccgcctgcagagcctgggcaagaactttgccctgcgggtgctgctggtgcaggtggatgtgaaggacccccagcaggccctgaaggagctggccaagatgtgcatcctggccgactgcaccctcatcctggcctggagccctgaggaggccggccgctacctggagacctacaaggcctatgagcagaagccagctgacctgctgatggagaagctggagcaggactttgtgagccgcagcctggagcagctgattgctgccagccgggaggacctggccctgtgccccggcctgggcccccagaaggcccggcggctgtttgatgtgctgcacgagcccttcctgaaggtgccctag

SEQ ID NO: 64198 - DNA, 120 bp, Artificial Sequence
  derived and/or modified sequence
atggaccccgggaaggacaaggagggcgtgccccagcccagcggccccccagccaggaagaagtttgtgatccccctggatgaagatgaggtgcccccaggagtgtccaagcccctgtag

SEQ ID NO: 64199 - DNA, 822 bp, Artificial Sequence
  derived and/or modified sequence
atggaccccggcaaggacaaggagggcgtgccccagcccagcggccccccggctagaaagaaatttgtcattccactggacgaagacgaagttccacccggtgtggcaaagccgctgttccggagtacgcagtccctccccaccgtcgacacctctgctcaggccgctcctcagacatatgcggagtatgccatcagccagcccttggagggggcaggcgcgacctgccccacaggctccgagcctctggccggagagaccccaaatcaagccctgaaacccggcgcaaagagtaattccatcatcgtgagcccccgtcagaggggaaacccagttttgaaatttgtgaggaacgtgccgtgggagttcggcgatgtaattcccgactatgtgttgggccagagtacctgtgccctttttctcagtctaagataccataacttgcacccggattacattcatgggaggttgcagtcactaggcaaaaactttgcactgcgcgttctactcgttcaggttgacgtcaaagatcctcagcaggctctgaaggaattggcaaagatgtgcatattggctgactgtacattgattttggcgtggtcccctgaggaggcagggcggtacttggaaacttataaagcgtacgaacagaaaccggcagacctcctgatggagaagctggagcaggatttcgtatctaggtcactggagcaacttatcgccgcctccagggaggatctagccttatgcccaggcttggggccccaaaaagctcgcagactgttcgatgtcctccatgaacctttccttaaggtaccatag

SEQ ID NO: 64200 - DNA, 120 bp, Artificial Sequence
  derived and/or modified sequence
atggaccccggcaaggacaaggagggcgtgccccagcccagcggccctcccgcaaggaagaaattcgttatccctctggatgaggacgaggtgcctccgggggttagcaagcctctgtag

SEQ ID NO: 64201 - DNA, 822 bp, Artificial Sequence
  derived and/or modified sequence
atggaccctggaaaagataaagagggagtccctcagccatctggtccgcctgcgagaaagaagttcgtgattccactagacgaggacgaggtgccaccgggtgtggctaagcccctttttcgaagcacacaatcactgccaacagtggacaccagcgctcaggctgccccacaaacatatgcagaatacgcgataagccagcccctggaaggcgcaggagcaacttgccccacaggatcagagcccctggcaggcgagactcccaatcaggcactgaagccaggagctaaatccaacagtattatcgtaagtcctagacagcggggtaacccggtactcaaatttgtgaggaacgttccgtgggagtttggcgatgtgatacccgactacgtccttggccaatcaacgtgcgcactctttttatccttgagataccataacctccaccccgactatatccacggtagactgcagtccctaggtaaaaatttcgcgctgagagtactcctggtgcaggtggacgtgaaagatccccagcaagccttgaaagaactcgcgaaaatgtgcattctcgctgactgtactctgatcttagcgtggtcacccgaggaggccggacgatatctggaaacttataaagcgtatgaacaaaaacctgctgatcttttgatggagaaactagaacaggattttgtgtcccgcagtctcgagcagttaatcgcagcctcacgcgaggatcttgccctttgcccaggtttaggaccacagaaggccaggcgactatttgacgtcctgcatgagccgttcttgaaagtgccctag

SEQ ID NO: 64202 - DNA, 120 bp, Artificial Sequence
  derived and/or modified sequence
atggatccagggaaagacaaagagggagtgccccagccttccgggcctcccgcacggaaaaaatttgtcataccgctggacgaagacgaggttccccctggtgtgagcaagcccctctag

SEQ ID NO: 64203 - protein, 758 aa, Artificial Sequence
  derived and/or modified sequence
MSEVLPADSGVDTLAVFMASSGTTDVTNRNSPATPPNTLNLRSSHNELLNAEIKHTETKNSTPPKCRKKYALTNIQAAMGLSDPAAQPLLGNGSANIKLVKNGENQLRKAAEQGQQDPNKNLSPTAVINITSEKLEGKEPHPQDSSSCEILPSQPRRTKSFLNYYADLETSARELEQNRGNHHGTAEEKSQPVQGQASTIIGNGDLLLQKPNRPQSSPEDGQVATVSSSPETKKDHPKTGAKTDCALHRIQNLAPSDEESSWTTLSQDSASPSSPDETDIWSDHSFQTDPDLPPGWKRVSDIAGTYYWHIPTGTTQWERPVSIPADLQGSRKGSLSSVTPSPTPENEKQPWSDFAVLNGGKINSDIWKDLHAATVNPDPSLKEFEGATLRYASLKLRNAPHPDDDDSCSINSDPEAKCFAVRSLGWVEMAEEDLAPGKSSVAVNNCIRQLSYCKNDIRDTVGIWGEGKDMYLILENDMLSLVDPMDRSVLHSQPIVSIRVWGVGRDNGRDFAYVARDKDTRILKCHVFRCDTPAKAIATSLHEICSKIMAERKNAKALACSSLQERANVNLDVPLQVDFPTPKTELVQKFHVQYLGMLPVDKPVGMDILNSAIENLMTSSNKEDWLSVNMNVADATVTVISEKNEEEVLVECRVRFLSFMGVGKDVHTFAFIMDTGNQRFECHVFWCEPNAGNVSEAVQAACMLRYQKCLVARPPSQKVRPPPPPADSVTRRVTTNVKRGVLSLIDTLKQKRPVTEMP

SEQ ID NO: 64204 - protein, 757 aa, Artificial Sequence
  derived and/or modified sequence
SHCIPADSGVDTLAVFMASSGTTDVTNRNSPATPPNTLNLRSSHNELLNAEIKHTETKNSTPPKCRKKYALTNIQAAMGLSDPAAQPLLGNGSANIKLVKNGENQLRKAAEQGQQDPNKNLSPTAVINITSEKLEGKEPHPQDSSSCEILPSQPRRTKSFLNYYADLETSARELEQNRGNHHGTAEEKSQPVQGQASTIIGNGDLLLQKPNRPQSSPEDGQVATVSSSPETKKDHPKTGAKTDCALHRIQNLAPSDEESSWTTLSQDSASPSSPDETDIWSDHSFQTDPDLPPGWKRVSDIAGTYYWHIPTGTTQWERPVSIPADLQGSRKGSLSSVTPSPTPENEKQPWSDFAVLNGGKINSDIWKDLHAATVNPDPSLKEFEGATLRYASLKLRNAPHPDDDDSCSINSDPEAKCFAVRSLGWVEMAEEDLAPGKSSVAVNNCIRQLSYCKNDIRDTVGIWGEGKDMYLILENDMLSLVDPMDRSVLHSQPIVSIRVWGVGRDNGRDFAYVARDKDTRILKCHVFRCDTPAKAIATSLHEICSKIMAERKNAKALACSSLQERANVNLDVPLQVDFPTPKTELVQKFHVQYLGMLPVDKPVGMDILNSAIENLMTSSNKEDWLSVNMNVADATVTVISEKNEEEVLVECRVRFLSFMGVGKDVHTFAFIMDTGNQRFECHVFWCEPNAGNVSEAVQAACMLRYQKCLVARPPSQKVRPPPPPADSVTRRVTTNVKRGVLSLIDTLKQKRPVTEMP

SEQ ID NO: 64205 - DNA, 2277 bp, Artificial Sequence
  derived and/or modified sequence
atgtccgaggtattacctgccgactcgggcgtggataccctggccgtgtttatggcaagctcaggcaccaccgacgtgacaaacagaaactcgccagcgacacctccgaatacgctcaatctccggagtagtcataacgagctcctcaacgcagagataaagcacactgagacaaaaaatagcactcctcctaagtgccggaaaaagtatgctttgactaatattcaggccgctatggggttgagcgaccccgcagcccagccactgcttggcaatggttctgctaacattaaattagtgaagaatggtgagaaccagctgagaaaggccgccgagcagggccagcaagacccgaacaaaaacctctctccgactgctgtcattaacatcacctccgagaagttggagggcaaagaaccccacccacaggatagcagctcctgtgaaatcctcccttcccagcccagacggactaagtcttttttgaattattatgcggacttggagacttccgcccgggagttagagcaaaaccggggaaatcatcacgggaccgccgaagagaaaagccagccagtgcagggacaggcaagcacaatcatcggcaacggtgacttgctgctacagaagcccaataggccgcaaagcagtcctgaagacggccaggtggctacagttagcagtagtcctgagaccaagaaagatcatccgaagacaggcgccaaaaccgattgcgcacttcatcggatccagaacctcgctcccagtgacgaggagagtagctggactaccttgtcccaggacagcgctagcccctcatcccccgatgaaacagatatctggtcagaccactctttccaaactgacccggatctcccccctggctggaagcgggtatctgatattgccggaacatactactggcacatcccgaccggaactactcagtgggaaaggcccgtgtctatcccggcagatctgcaggggagccggaaagggtctttatcatccgtgacaccgtcccccacaccagagaatgagaagcagccttggagcgatttcgcagtactcaacggcggaaaaataaatagcgacatttggaaggacttgcacgcagccaccgtcaaccctgatccatccctgaaagaattcgagggcgccaccttgagatatgcatccttaaagctgcgaaatgcaccccatcccgatgatgacgactcatgttcaattaactccgatcccgaggcaaagtgtttcgctgtgaggtcactcggatgggtggagatggcagaggaggatcttgctccaggcaagtcctcagtcgccgtcaataactgcattcgccaactgtcctactgcaaaaacgacatccgagacacagtcggcatttggggcgagggcaaagacatgtatctgatccttgagaacgatatgttgtcattagttgatcctatggaccgttctgtcctgcattcccagccgattgttagcatccgggtctggggcgtggggcgcgataatggccgcgactttgcttacgtggctcgagacaaggacactaggatcctgaagtgtcatgtcttcagatgtgacacacctgccaaggccatcgctacatctcttcatgagatctgctcaaaaatcatggcggaaaggaaaaacgctaaagcactcgcctgctcctccctgcaagaaagggctaacgtgaacctcgacgtcccactacaggtagacttccctactccaaagaccgaactagtgcagaaatttcacgtgcaataccttggaatgctgcccgttgataagccagtagggatggatatcctaaattccgccattgagaacttaatgacttctagcaacaaggaggactggctatctgtgaacatgaatgttgcagacgctacagtgacagtcatctcagagaagaacgaggaagaggtgctggtagagtgtagagtacgcttcctcagcttcatgggggttggcaaggacgtgcacacatttgcttttatcatggacaccggaaaccagagatttgagtgccacgttttctggtgtgagcctaatgctggcaatgtgagtgaggcagtccaggccgcctgcatgcttaggtaccaaaagtgcttggtggccaggcccccctcccaaaaagtcaggccccctccaccacccgcagattcggttacccgaagggtcaccacaaatgttaaaaggggtgttctttctctgatagatacacttaaacagaagaggcccgttaccgagatgccttag

SEQ ID NO: 64206 - DNA, 2274 bp, Artificial Sequence
  derived and/or modified sequence
tcccattgtatacccgcagattccggggtagataccttggccgtttttatggcctcaagcggtacaaccgacgtgaccaatcggaattcacccgccacccccccgaatacgctgaacctccgctcctcccataatgagctcttaaatgcagagattaaacacaccgagactaaaaatagtacacctccaaaatgccgaaaaaagtatgccctaaccaacatccaggcagccatgggtctttccgatccagcagctcagcctctgttgggcaatgggtcggctaatatcaaacttgtaaaaaacggcgagaaccagctgcgcaaggccgccgagcaggggcaacaggatcccaacaagaatctgtcccctaccgcagtgattaacattacatccgagaaactggaaggcaaggaaccgcatccccaggactcatctagctgtgagatattacctagtcagcctcggagaactaaatctttcctcaactattatgccgacctggaaacctcagccagagagctggagcagaacagaggaaaccaccacggaacagccgaggaaaagagtcagccagtgcagggccaagcaagtaccatcatcgggaatggcgacctcctcctgcagaagcctaacaggccccaaagctctccggaagacggccaggtggccactgtgagttccagccccgagaccaaaaaagaccaccccaagacaggggctaaaacagactgcgcgctccaccgcattcagaatctggccccttccgatgaagaatcatcatggaccaccctcagccaggacagcgcctccccctcgtccccggacgagacagacatttggtctgatcactcattccagaccgacccagacttgcctccaggatggaagagagtgtctgatatagccggcacatattactggcacatcccgacaggcactacccagtgggaacggcctgtaagcatcccagcggatctgcagggtagccggaaggggagcctctccagtgtcaccccaagtcccactcctgagaacgaaaaacagccctggtctgatttcgccgtgctgaatggtgggaagataaactctgacatatggaaagacctccatgccgcaacagtcaatcccgatccatcacttaaggagttcgagggggccactctccggtacgcctcacttaaactgcggaatgcccctcatcctgatgacgatgactcctgctctataaattctgatccagaggccaagtgctttgcagtgagatccctgggttgggtcgaaatggctgaggaggatctcgctccgggaaaatccagcgtggcagtcaacaattgcattaggcagctaagctactgcaagaacgacatcagggatactgtcggtatatggggcgagggcaaagacatgtatcttatactggaaaatgacatgctgtctctggtggaccctatggacaggagtgtgctccactcccagccaattgtatctatccgcgtgtggggcgtgggtcgcgacaatgggcgcgacttcgcctacgtggcaagagacaaggacacgcggatccttaagtgtcacgtgttccgatgtgatacaccggctaaagctattgccacctccctgcacgagatctgtagcaaaataatggcagaacgaaagaatgccaaagcactggcctgcagctctctgcaagagcgcgctaatgtcaacctggatgtaccccttcaggtggatttcccaaccccaaagacggagcttgtacaaaaatttcatgttcagtaccttggaatgctccccgtcgacaagcctgtgggtatggacattctgaacagcgcaatagagaacttgatgacgtccagcaacaaggaagactggttgtctgtgaatatgaacgtggccgacgctactgtcaccgtcatcagcgaaaaaaatgaggaagaagtgctggttgagtgtcgggtgagatttcttagcttcatgggagtggggaaggatgtacataccttcgcttttattatggatactggcaatcaacggtttgagtgtcatgttttctggtgcgagcccaatgcaggcaatgtcagtgaagccgttcaggctgcatgtatgctgagataccagaaatgcctcgttgctcgacctccaagccagaaggtccggccacctccgcctcctgctgattccgtcacccgcagagtgaccacaaacgtgaaacgcggggtattgtctttaatagatacactcaaacaaaaacgcccagtgacagagatgccctag

SEQ ID NO: 64207 - DNA, 2277 bp, Artificial Sequence
  derived and/or modified sequence
atgtctgaggtgctgcctgctgacagcggcgtggacaccctggccgtgttcatggccagcagcggcaccacagatgtgaccaacagaaacagccctgccaccccacccaacaccctgaacctgcggagcagccacaatgagctgctgaatgctgagatcaagcacacagagaccaagaacagcaccccacccaagtgcaggaagaagtatgccctgaccaacatccaggccgccatgggcctgagtgaccctgctgcccagcccctgctgggcaatggcagcgccaacatcaagctggtgaagaatggagagaaccagctgaggaaggctgctgagcagggccagcaggaccccaacaagaacctgagccccacagctgtgatcaacatcaccagcgagaagctggagggcaaggagccccacccccaggacagcagcagctgtgagatcctgcccagccagcccaggaggaccaagagcttcctgaactactatgctgacctggagaccagcgcccgggagctggagcagaacagaggcaaccaccacggcacagctgaggagaagagccagcctgtgcagggccaggccagcaccatcattggaaatggagacctgctgctgcagaagcccaaccggccccagagcagcccagaagatggccaggtggccaccgtgagcagcagccctgagaccaagaaggaccaccccaagacaggagccaagacagactgtgccctgcaccgcatccagaacctggcccccagtgatgaggagagctcctggaccaccctgagccaggacagcgccagccccagcagcccagatgaaacagacatctggagcgaccacagcttccagacagatcctgacctgcccccaggctggaagagggtgtctgacattgctggcacctactactggcacatccccaccggcaccacccagtgggagaggcctgtgtccatcccagctgacctgcagggcagcaggaagggcagcctgagctctgtgacccccagccccaccccagaaaatgagaagcagccctggagcgactttgctgtgctgaatggaggcaagatcaacagcgacatctggaaggacctgcacgccgccaccgtgaacccagaccccagcctgaaggagtttgagggcgccaccctgcgctatgccagcctgaagctgagaaatgccccccacccagatgatgatgacagctgcagcatcaacagcgaccctgaggccaagtgctttgctgtgcgcagcctgggctgggtggagatggccgaggaggacctggcccctgggaagagctctgtggccgtgaacaactgcatccggcagctgagctactgcaagaatgacatccgggacacagtgggcatctggggcgagggcaaggacatgtacctgatcctggagaatgacatgctgagcctggtggaccccatggacagatctgtgctgcacagccagcccatcgtgtccatccgggtgtggggcgtgggccgggacaatggccgggactttgcctacgtggcccgggacaaggacacccgcatcctgaagtgccacgtgttccgctgtgacaccccagccaaggccatcgccaccagcctgcacgagatctgcagcaagatcatggccgagaggaagaatgccaaggccctggcctgcagcagcctgcaggagcgggccaacgtgaacctggatgtgcccctgcaggtggacttccccacccccaagacagagctggtgcagaagttccacgtgcagtacctgggcatgctgcctgtggacaagcctgtgggcatggacatcctgaacagcgccatcgagaacctgatgaccagcagcaacaaggaggactggctgtctgtgaacatgaatgtggctgatgccaccgtgaccgtcatcagcgagaagaatgaggaggaggtgctggtggagtgccgggtgcgcttcctgtccttcatgggcgtgggcaaggatgtgcacacctttgccttcatcatggacaccggcaaccagagatttgaatgtcatgtgttctggtgtgagcccaatgctggaaatgtgtctgaggccgtgcaggccgcctgcatgctgcgctaccagaagtgcctggtggcccggccccccagccagaaggtgcggcccccacctcctcctgctgacagcgtgaccaggagagtgaccaccaacgtgaagaggggcgtgctgagcctgattgacaccctgaagcagaagaggcctgtgacagagatgccctag

SEQ ID NO: 64208 - DNA, 2274 bp, Artificial Sequence
  derived and/or modified sequence
agccactgcatcccagctgacagcggcgtggacaccctggccgtgttcatggccagcagcggcaccacagatgtgaccaacagaaacagccctgccaccccacccaacaccctgaacctgcggagcagccacaatgagctgctgaatgctgagatcaagcacacagagaccaagaacagcaccccacccaagtgcaggaagaagtatgccctgaccaacatccaggccgccatgggcctgagtgaccctgctgcccagcccctgctgggcaatggaagtgccaacatcaagctggtgaagaatggagagaaccagctgaggaaggctgctgagcagggccagcaggaccccaacaagaacctgagccccacagctgtgatcaacatcaccagcgagaagctggagggcaaggagccccacccccaggacagcagcagctgtgagatcctgcccagccagcccaggaggaccaagagcttcctgaactactatgctgacctggagaccagcgcccgggagctggagcagaacagaggcaaccaccacggcacagctgaggagaagagccagcctgtgcagggccaggccagcaccatcattggaaatggagacctgctgctgcagaagcccaaccggccccagagcagcccagaagatggccaggtggccaccgtgagcagcagccctgagaccaagaaggaccaccccaagacaggagccaagacagactgtgccctgcaccgcatccagaacctggcccccagtgatgaggagagctcctggaccaccctgagccaggacagcgccagccccagcagcccagatgaaacagacatctggagcgaccacagcttccagacagatcctgacctgcccccaggctggaagagggtgtctgacattgctggcacctactactggcacatccccaccggcaccacccagtgggagaggcctgtgtccatcccagctgacctgcagggcagcaggaagggcagcctgagctctgtgacccccagccccaccccagaaaatgagaagcagccctggagcgactttgctgtgctgaatggaggcaagatcaacagcgacatctggaaggacctgcatgctgccaccgtgaacccagaccccagcctgaaggagtttgaaggagccaccctgcgctatgccagcctgaagctgagaaatgccccccacccagatgatgatgacagctgcagcatcaacagcgaccctgaggccaagtgctttgctgtgcgcagcctgggctgggtggagatggccgaggaggacctggcccctgggaagagctctgtggccgtgaacaactgcatccggcagctgagctactgcaagaatgacatccgggacacagtgggcatctggggcgagggcaaggacatgtacctgatcctggagaatgacatgctgagcctggtggaccccatggacagatctgtgctgcacagccagcccatcgtgtccatccgggtgtggggcgtgggccgggacaatggccgggactttgcctacgtggcccgggacaaggacacccgcatcctgaagtgccacgtgttccgctgtgacaccccagccaaggccatcgccaccagcctgcacgagatctgcagcaagatcatggccgagaggaagaatgccaaggccctggcctgcagcagcctgcaggagcgggccaacgtgaacctggatgtgcccctgcaggtggacttccccacccccaagacagagctggtgcagaagttccacgtgcagtacctgggcatgctgcctgtggacaagcctgtgggcatggacatcctgaacagcgccatcgagaacctgatgaccagcagcaacaaggaggactggctgtctgtgaacatgaatgtggctgatgccaccgtgaccgtcatcagcgagaagaatgaggaggaggtgctggtggagtgccgggtgcgcttcctgtccttcatgggcgtgggcaaggatgtgcacacctttgccttcatcatggacaccggcaaccagagatttgagtgccacgtgttctggtgtgagcccaatgctggaaatgtgtctgaggccgtgcaggccgcctgcatgctgcgctaccagaagtgcctggtggcccggccccccagccagaaggtgcggcccccacctcctcctgctgacagcgtgacccggcgggtgaccaccaacgtgaagaggggcgtgctgagcctgattgacaccctgaagcagaagaggcctgtgacagagatgccctag

SEQ ID NO: 64209 - DNA, 2277 bp, Artificial Sequence
  derived and/or modified sequence
atgagcgaggtgctgcccgccgacagcggcgtggacaccctggccgtgttcatggccagcagcgggactacagatgtgaccaacaggaactcccccgccactcccccaaataccctgaacctccgcagcagccataacgagctgctaaacgccgagatcaagcacacggaaacaaagaactcaactccccctaagtgccgtaagaaatatgcattaaccaatattcaggctgctatgggactgtctgatccagcagctcagcccctgcttgggaatgggtccgccaatatcaagctggtgaaaaacggagaaaaccagcttcggaaggctgcagagcagggccagcaagacccaaataagaaccttagtccaactgccgttatcaatattacttcggagaaactggaaggcaaggaaccgcatccacaagactcttccagttgcgagatacttcccagccaaccccggcggacgaagtcctttttgaattattacgccgatctggagacttctgcccgcgagctggagcagaatcgcggtaaccaccatgggacagctgaagaaaaaagtcaaccagttcaaggtcaagccagcaccattatcggaaacggagacctgctgcttcagaagccgaataggccccagtcatcacccgaagatggacaggtcgcgacagtatcaagtagcccagagacaaagaaagaccacccaaaaaccggagcaaaaacagactgtgcactgcacagaatccagaacttagcaccttctgatgaagagtcttcttggaccacacttagccaggacagcgcatctccttctagcccggacgaaacagacatctggagtgaccactctttccagaccgatcctgaccttccccccggttggaaaagagtttcagatatcgctggcacatactattggcacatccccaccggtaccactcagtgggagcgacctgtcagtattcccgctgacttacaggggtcccgaaagggctccctgagctctgtaacacctagtcccacccccgaaaatgaaaagcagccctggtctgacttcgccgtcctgaacggtggcaaaatcaattccgatatttggaaggacctccatgccgccacagtcaacccggacccatctctgaaggagtttgaaggcgcaaccttacgctacgcaagcctgaagctccgcaacgccccccaccccgacgacgacgattcatgttctatcaacagtgaccccgaagcgaagtgtttcgccgtacggagtctcgggtgggtggaaatggctgaagaagatttggctcccggaaagtccagtgtggccgtcaacaactgtatcagacagttgagctactgtaagaatgacattagggacacagtcggtatctggggcgaaggaaaggatatgtatcttatcctggaaaacgacatgctgtctcttgttgaccctatggaccggtcagtcctgcacagtcagcccatcgttagtatacgcgtctggggggtgggccgcgataatggacgtgatttcgcttatgtggcacgggacaaagatactaggattctgaagtgtcatgtctttcggtgtgacacgcctgccaaagccattgcaacctcattacatgagatttgttctaagattatggctgaacgcaaaaacgccaaggccttagcgtgttcgtcactgcaagagcgcgccaacgtgaatctagacgtcccactacaggtggatttcccgacaccaaaaacagagttagttcagaaatttcacgtgcagtatctgggaatgctgccagtagacaaaccagtggggatggatattcttaactcggctatcgagaaccttatgacgtctagcaacaaagaggattggcttagtgtgaacatgaacgttgctgacgctacagtaactgtcatctcagaaaagaatgaagaggaggtgctggtcgagtgtcgtgtgaggttccttagttttatgggggttggtaaagatgttcacaccttcgcctttattatggacacaggaaatcagagattcgagtgccatgtgttttggtgtgaacctaacgccgggaacgtctccgaagccgtgcaggctgcctgtatgctgcggtatcagaagtgtctggtggctagacccccaagccagaaagtgcgccccccacctccccccgcggactctgtgactcgcagggtgaccactaacgttaaacgcggtgtcttgagcctgatcgatacactgaaacagaaacggcctgtcacagagatgccgtag

SEQ ID NO: 64210 - DNA, 2274 bp, Artificial Sequence
  derived and/or modified sequence
agccactgcatccccgccgacagcggcgtggacaccctggccgtgtttatggcttcatccggaaccacagacgtcactaaccggaacagccccgcgactcctccaaatacactgaatctccgctcgtcccataacgaactgcttaatgctgagattaagcacaccgagaccaaaaattctacacctcccaagtgccgcaaaaagtatgcgcttacaaatatccaagcggccatgggcttatccgatcctgccgcccagcctcttctgggcaacggaagcgctaacataaaactggtaaaaaacggagagaatcaactgcggaaggcagccgaacagggccagcaagacccaaataagaatctcagtccgaccgctgtaattaatattaccagcgaaaaactggaaggcaaggagcctcaccctcaagatagctccagttgcgaaatactccccagccagccccggcgtacgaaaagctttcttaactattatgccgatttggaaaccagtgcccgagaactggaacagaaccggggtaatcaccacggcacagcagaagagaagagccagccagttcagggccaggccagcactattattggtaatggtgatttgctgttgcaaaagccaaatcgaccacagtcgagtccggaagatgggcaagtggcaaccgtcagttcctcacccgagaccaagaaagaccacccgaagacaggggccaaaacggattgcgctctgcatcggattcagaatcttgccccgtccgatgaggaatctagctggactactttgtcacaggattccgcgagcccctcttcaccggacgaaaccgatatttggagcgatcactctttccaaacggatccagacctcccacccggctggaaacgggtgtccgatatcgctggtacatattattggcacatcccaacaggcaccacacagtgggagcgcccagtttccatccctgcggacctacagggatccagaaagggtagtctatctagcgttacacctagcccaacccctgagaatgaaaagcagccatggagtgactttgcagtactcaatggcgggaaaatcaactccgatatctggaaggacctccacgcagcaaccgtgaatcccgacccttcactgaaggagttcgagggcgccacattgcgttatgcctcacttaagctccggaacgccccccaccccgacgacgatgattcttgttcaattaattctgaccctgaagctaagtgtttcgccgtgagatctctggggtgggtcgaaatggccgaggaggacctggcccccgggaagtcttccgtcgccgttaacaactgcataaggcagttgagttattgcaagaatgatatccgggatactgttggaatctggggagaaggtaaggacatgtatctcattctcgaaaatgacatgctgagtctggttgacccaatggaccggagtgtcttacatagccaaccaatcgtctcaatcagggtgtggggtgtggggagagataacggtcgggattttgcctatgtggcccgggataaagacacacgcatactgaagtgtcacgtgtttcgctgtgatactcctgcaaaagcgatcgccacgtccctacacgaaatttgcagtaaaataatggccgagcggaaaaatgccaaggctctggcctgttctagcctccaggaacgtgcaaacgtgaatctcgatgtgccactccaagtcgatttccccacccccaagactgagctggttcaaaagttccatgtgcagtacctgggcatgctccctgtggacaagcctgttggcatggacatcctcaacagcgcaatcgaaaacctgatgaccagcagcaataaagaggactggctcagcgttaacatgaacgtagccgatgcaactgtgacggtgatttctgaaaagaatgaggaagaggtcctcgtggagtgtagagtacgattcctgtccttcatgggcgtgggtaaagacgtccacacttttgcctttattatggacaccggcaatcagcgcttcgaatgccatgtcttttggtgtgagcctaatgcaggcaatgtgagtgaagctgtgcaagctgcctgcatgttgaggtatcagaagtgtctggtagcccgacctccctcacagaaggtgcgccctccccctccacctgctgatagtgtgacccgtcgtgtcaccactaacgtgaagcgcggtgtcctctctctcattgataccctaaaacagaagaggccagttactgagatgccctag

SEQ ID NO: 64211 - DNA, 8972 bp, Artificial Sequence
  derived and/or modified sequence
gccaaagcctggagaagtggaatctcgtcagcgccgctccctgcgcgggactcgcggaacggcactgagcatgctcagttgccggagcccgttctggtctcaagtaggaagctagtgcgctgtaaccgcatctgatctgggcgctccgggaagggcgagactggagcagagccgctgggcgccggagccgaggcgagcgccgcgcgcaccactggttggagttgctgtgggtgagctgctgtggtctgtagccaagcatgctgtggtcggatctgcccagccgtggaacagaaacatttgctggatggaaaatccataaaagaaagctcctgtgaaaagctgaggctgacaataatttaagcaaaatcagatcgatctctttgggctgcctgacctccttgggtgcttgctattaattaacagactttgtggggaaaaaaaggagcttgccttctgagctttgtaccaaagacctgggaaaactaaccatctcagtctttcctgaggacttgggaactgccgaggcctctgccaatgtgttgactgtcgctatgggctcactgttgtccaggcagctcatatttcaaattataacctatttcctgcaccattgctgacgcctggtgatccatgtcagaagtacttccagctgactcaggtgttgacaccttggcagtgtttatggccagcagcggaactacagacgtcacaaatcggaacagcccagccacaccaccaaacacccttaacctccgatcctcccacaatgaactgttgaacgctgaaataaaacacacagaaaccaagaacagcacacctcccaaatgcaggaaaaaatatgcactaactaacatccaggcggccatgggcctctcggatccagctgcacagcccctgctgggaaatggctctgccaacatcaagctggtgaaaaatggggagaaccagctccgtaaggctgcagagcaagggcagcaggaccccaacaaaaacctgagccccactgcagtcatcaacataacttctgagaagttagagggtaaagagccccacccacaggattcctcgagctgtgagattttaccctcccagcccaggagaactaagagcttcctaaattactatgcagatctggaaacctcagccagagaactagagcagaaccgaggcaatcaccatgggactgcggaagagaaatcccagccagtccagggccaggcctccaccatcattgggaatggcgatttgctgctgcagaaaccaaacagaccccagtccagccctgaagacggccaagtagccacagtgtcatccagcccagaaaccaagaaggatcatccgaaaacaggggccaaaaccgactgtgcactgcaccggatccagaacctggcaccgagcgatgaggagtccagctggacaacgttgtcccaagacagtgcctcacccagctccccggatgaaacagatatatggagtgatcactcatttcagactgatccagatttgccgcctggctggaaaagagtcagtgacattgccgggacctattattggcacatcccaacaggaacgactcagtgggaacggcccgtctccatcccagcagatctccagggttctaggaaagggtcacttagttctgtaacgccatctcccaccccagagaacgagaaacagccatggagtgattttgctgttctgaatgggggaaagattaatagtgacatttggaaggatttgcatgcagccactgttaacccggaccccagtttaaaagagtttgaaggagcaaccctacgctatgcatctttgaaactcagaaatgccccacaccctgatgatgatgattcttgtagtatcaacagtgacccagaagccaagtgttttgctgtgcgttctctgggatgggtagagatggcagaagaggacctcgcccccggtaaaagtagtgttgcggtcaacaactgcatcaggcaactttcctactgcaaaaatgacatccgagacacagtcgggatttggggagaggggaaagacatgtacctgatcctggagaatgacatgctcagcctggtggaccccatggaccgcagcgtgctgcactcgcagcccatcgtcagcatccgcgtgtggggcgtgggccgcgacaatggccgggattttgcttatgtagcaagagataaagatacaagaattttgaaatgtcatgtatttcgatgtgacacaccagcaaaagccattgccacaagtctccacgagatctgctccaagattatggctgaacggaagaatgccaaagcgctggcctgcagctccttacaggaaagggccaatgtgaacctcgatgtccctttgcaagtagattttccaacaccaaagactgagctggtccagaagttccacgtgcagtacttgggcatgttacctgtagacaaaccagtcggaatggatattttgaacagtgccatagaaaatcttatgacctcatccaacaaggaggactggctgtcagtgaacatgaacgtggctgatgccactgtgactgtcatcagtgaaaagaatgaagaggaagtcttagtggaatgtcgtgtgcgattcctgtccttcatgggtgttgggaaggacgtccacacatttgccttcatcatggacacggggaaccagcgctttgagtgccacgttttctggtgcgagcctaatgctggtaacgtgtctgaggcggtgcaggccgcctgcatgttacgatatcagaagtgcttggtagccaggccgccttctcagaaagttcgaccacctccaccgccagcagattcagtaaccagaagagtcacaaccaatgtaaaacgaggggtcttatccctcattgacactttgaaacagaaacgccctgtcaccgaaatgccatagctgcacatgcaaaaggactcggctatttacctgaagattgactagctacactaaagaaaatgaactccgccatccgaccttccatccagttgctgatgctttgtcttcagagaatttacccttaaccaagcagtgttagacaagcatgttctctcgtcttgccaccatcatgtgatatgaaaagaagcatgaataattttttttgctgtaagttacatcatgcgcagtggaaggtctttttcttattgtaaatattgtgaacattacttaacttcacacacacacagagaagagtgtggccccacccctcctagtgaactaacgctgcgtccttggaatgaatgatgcgtgagttagtttcactgtcttcttggctggacctgtcacaagcaacctttaagtcctacagcactttgccctgttttcaacattggagtaggcactgcatagcagataccattgaattgctgtaaaaataggatggcgagtttgtgttttaatttttcataaaattgaacctgttggttgacaaaattggctgttggcatcagtatagaaaccaactggcagctttccctgacaagctctttgacacatggacaccatttcatgtctacagctgtttgtgggatgttggaaaaaaatgaaacttcaaaattgatgaaaaactaaattcgaggaattaaaatcgaacaaaacatagcctttcttttccgatggttttcaaactgattatttttaaaagagattaataaaatcataatgcattttgggtgggacatatttcaaacttctgccttatattgtacggtgcagctagagaattatagttcactatggccattctctacataaacattaagatgaaatactcctcatcagcctttcatccttagtttgagaattagctgatatgcaatttgaagttgaggaaatatcattgatatttctatcatgcacgattattttagatttctaccaccgtgtgatttttgctagtccatgtgctagaggtaaacgttctgctggaattctgcatccagctctatccccctctgatgctttttgcccagaaagctgtctgtccatcatgtattgtccatggcaacaaattacattaggttgaacctttccttgattttatgtatttaatattagaatttgttggactcaactagatatattttttaatttatattttttccattttactttgaagatttgaaatgttcatacctgagcaaagtctacacaggagtaatggactgtttaacaagtttcccaaaacagcattttcctgctccttcgtatgtaggtgagaaacttagctggaaagacatacaaatttagactctcgttgacattgtcgttttaaaaggaagttgctaaggcgatcaatctcaatattagtcttgtttacttcttcttaatgtcaaaattaacatttacaacatccaattataaaagtaatgctttatgtttatacactgctatgtacttgtcaaaatggtttccacattcttatcacatctgagccttaccaggtagagaaggtactaaatacactttagaagtaaaaatatgaagtaccgagaggctaaacccactggcctaagatctcaccaaagttcatgaaaaccaggactaggacccacggctcccaaagcccgttcttgctgtgttgtgctgcctccatatccgtcaggaagagcctttccagaatgattctgggcatatactaagaagagcaggtatggaaagatctattgtcagggaatcttagaattccctacacgagtgggagaaagatgtccaaattccttacgcagtggtattcatgatggtgccctatctaagtccaggactgttttcctacagcgtgcctcaaaagtgttgtagagggcaggattctacattcacagcctgttccatctacgagattttccagatgctacttgtggtagacattcctaactcatggtacttagccaccagagatcatgatggaatgagtgggtggcttttctacctgccattccctcagaattcatgaggggtgggggacagggggaccggaattgtcttagcaccccaatgttatgacaaaactatgctactttagaaacgcagtctgtttttcaccaattgacatactactgatctgaagtaaccagtgccatcataagaaattactgcattaagaaaatccttgctgtgccctttgaaaagctgttcagaaatcatttacagtgatctttcatctcggtcgctgtagtgaaacattttagtgtgataaatttcaaaattctaaacaaattacccacttttatattggaaatctctaccagaactccctcttcattttttaaggcatacatttgcttgttttcaagatcaagaattctgagctagctttaagtagcaaactgatttatatgtgcaattataggatgcattaagatgaatgatagcctttacatattgaaaactttgcagacgttttgttttgaaaatggcattgtatagtaaatgcaaattaattttgtaaaattatgttaaagagtatgttcagacactttctgccatggccaaaaagtatgtatgaaagtatgtgtgtatttgtttgtaaaaggatgccaatgttttacctgatatcttagtgacacttcagttatctatgcattctttagatctgtgattcggtaaacaggcagccatgttcacgatgccttctatgtcttaccatatttttaattaacctgttaaatacagcttaaaatatttttattttatttattctatttttactgaaatatactgcattattgtgttaatgtattatctttcctggatattatctcccagtgtatccagatctaagtaatctcagtgaactatacattgcctaaaaagtggttttgtaatgatttgtagtcacatttctattgggatatgtagaagaaaaggcaaaatgcttaaagttccttttattttttaaaagcagctagatagacacagacttgccacctcatacatctgctccttggcaacatcaaggggaacgactagccaacatgcctatggctaaaaactttcctttgcagactaaagcactgcttggtgcttcgtttttctacccttcacaacatgtgtgatttcatctaagagatatatacatgtacacatgccctttgtttccacctggatacaagatcactcatagctaattaggaccattgttttttgttcatctgtcttgttgcatgaagggacattagacccatttccattaaaataagttcttggtgataaactgtggcactgctacttctttttaaatccactttatgatttcaagatggacacttgtaagatgactcgacacaaggccattgcctggaagccccagagctttcctctgtttgtatggcccgttcatgtcccaggcattgcaacacaaactcctcaagatttcaccacaacatgacaagcattttcctaactgatattagcacaatttaactaataagccccttcgctctctagttggccaggcttaacctaatacacatctaacgtgtgtgccacacggccagtagaaagtttaacttcagcttcagggcaaagatacccactcacaccgtgtcaacgcaagcagtagttcctggcctccagagcagcttacttcccctgaaagaacgctttgttttcctttatgcccttttcctgttgaccacttttacacatttaaatgtaatttgttgtgagaataaatttagctgcataaaacgttcggctcatttatctgacatcttagtcacatatacaaggaatagaaatagaaactcggtgtctctagttatttttaaattattcttacctcagacttcttagaaatcactttagtaatggagcattttgctttgattagttactacatatttctgcctggtaagaactaggaagtaacttcaaattttgagtaatcaccctgtacttatttggtgatcaggaaggccagctggccttccggacatagaagcctatttagtcaccaactcgagtcttttgtaagcggtcttgctaggattgtgatattttagcacgaagaagtttatcacttcctttaagaacctgacatcaaagaataaagaatagaggtgtacacacactaaatccaaaatgaaaggtaactagagaaatcagttgaatctggtttagcttaactgttaggcgcaggaaggcagataaacagaatttaaagtatgtccccgctttttgttcatcttgcacttccacagtggtttctctctagtcagtaacaaaatttcattatggtttcaggcattatatggtggtaaataatttcagattaaaaatgtgtttgctattggagtatctgaatactagtaatttcattatttagaattttgcagcacttttatctcaagaagaagtccaagaatgtaaaatgccaaatgaaacatgtcagtggaatcaatattctccttcattagaattccctcatattgctttttttttttttcttcagacagaggagtcttactctggagtgcagtggtgtaatttcagctcaccacaacctccacctcccaagttcaagcaattctcgcctcagcctcctgagtagctgggattacaggcatgcaccgccacgcctggccaatttgtatatttttagtagagacagggtttcgccacgttggccaggctggtctcgaactcctgacctcaggtgatccgcccgccccaacctcccaaagtatgtgagccaccacgtccggcctcatattgcttttatccaaaattcttttcccttttcactctaccaaagtatttaaataatcctgtccttcatagaagattctcaaagaagaaaactgcagtgtaattaatgaatggtttaattcagaatcttcatatacttctaaagagaaaaataatttagtgccaaatgcatgttaggagataatcaatgtaagtggcaacaaattgtgacttcacatgctactgtagagatcagaaaattatcctaaactattccataacaatgagacaacatcacagaaaatacacttgaaaataaaaatctcaagaccagctacttctggacaatggaatacttttcagtctggtatggtggagggcccgaaaaggataagggattcttatgatacacaatgggattctttactgaacaatatgttaaattaagctgcaccgccttccttgaggcatggactaccctaaccaaccagatagaaatctgggtgggataagaggatgagccacacgctataattttagggcaaggagatagtgtttgattttcaaaatcagcaaaataagctgagcactttatatctttctgtacaagagtgataacatgaagaattcttcttcagggatttaaaatacaataagcctggttcaactataaaaagtcttgtttcctttcttcattgacacttttttttttttttttttttttttgaggcaaggtctcactctgcttcccaggctggagtgcagtggggcaatattggctcactgcaacctgcacctcctggactcaagagatcctcgtacctcagcctcctaagtagctgggactacaggcgtgtcccaccacacccagctaatttttgtattttttgtagagatggggttttggggtttcgccatgttgtccaggctcgtctggaactccggtgctcaagtggcgtgcccacctcagcctcccaaactgctgagattacagatgtgagccactgcacccagcccactgacacgttttactgataaatgtaaatctaagctaaaataaaaataatgtattaccgctataatacaattcaccattctcttttctcacttcaagtaagaaagtaaaaatagaatatcagagctgaagtagacctaagtattcatcttgaagaagataatattctaaaaatcatgccacctgaattgagcatttaggaatttatgtaacatttctatacaactgaattgcaaaaataaaactttaaattcaaacttta

SEQ ID NO: 64212 - DNA, 8338 bp, Artificial Sequence
  derived and/or modified sequence
tcacactgtataccagctgactcaggtgttgacaccttggcagtgtttatggccagcagcggaactacagacgtcacaaatcggaacagcccagccacaccaccaaacacccttaacctccgatcctcccacaatgaactgttgaacgctgaaataaaacacacagaaaccaagaacagcacacctcccaaatgcaggaaaaaatatgcactaactaacatccaggcggccatgggcctctcggatccagctgcacagcccctgctgggaaatggctctgccaacatcaagctggtgaaaaatggggagaaccagctccgtaaggctgcagagcaagggcagcaggaccccaacaaaaacctgagccccactgcagtcatcaacataacttctgagaagttagagggtaaagagccccacccacaggattcctcgagctgtgagattttaccctcccagcccaggagaactaagagcttcctaaattactatgcagatctggaaacctcagccagagaactagagcagaaccgaggcaatcaccatgggactgcggaagagaaatcccagccagtccagggccaggcctccaccatcattgggaatggcgatttgctgctgcagaaaccaaacagaccccagtccagccctgaagacggccaagtagccacagtgtcatccagcccagaaaccaagaaggatcatccgaaaacaggggccaaaaccgactgtgcactgcaccggatccagaacctggcaccgagcgatgaggagtccagctggacaacgttgtcccaagacagtgcctcacccagctccccggatgaaacagatatatggagtgatcactcatttcagactgatccagatttgccgcctggctggaaaagagtcagtgacattgccgggacctattattggcacatcccaacaggaacgactcagtgggaacggcccgtctccatcccagcagatctccagggttctaggaaagggtcacttagttctgtaacgccatctcccaccccagagaacgagaaacagccatggagtgattttgctgttctgaatgggggaaagattaatagtgacatttggaaggatttgcatgcagccactgttaacccggaccccagtttaaaagagtttgaaggagcaaccctacgctatgcatctttgaaactcagaaatgccccacaccctgatgatgatgattcttgtagtatcaacagtgacccagaagccaagtgttttgctgtgcgttctctgggatgggtagagatggcagaagaggacctcgcccccggtaaaagtagtgttgcggtcaacaactgcatcaggcaactttcctactgcaaaaatgacatccgagacacagtcgggatttggggagaggggaaagacatgtacctgatcctggagaatgacatgctcagcctggtggaccccatggaccgcagcgtgctgcactcgcagcccatcgtcagcatccgcgtgtggggcgtgggccgcgacaatggccgggattttgcttatgtagcaagagataaagatacaagaattttgaaatgtcatgtatttcgatgtgacacaccagcaaaagccattgccacaagtctccacgagatctgctccaagattatggctgaacggaagaatgccaaagcgctggcctgcagctccttacaggaaagggccaatgtgaacctcgatgtccctttgcaagtagattttccaacaccaaagactgagctggtccagaagttccacgtgcagtacttgggcatgttacctgtagacaaaccagtcggaatggatattttgaacagtgccatagaaaatcttatgacctcatccaacaaggaggactggctgtcagtgaacatgaacgtggctgatgccactgtgactgtcatcagtgaaaagaatgaagaggaagtcttagtggaatgtcgtgtgcgattcctgtccttcatgggtgttgggaaggacgtccacacatttgccttcatcatggacacggggaaccagcgctttgagtgccacgttttctggtgcgagcctaatgctggtaacgtgtctgaggcggtgcaggccgcctgcatgttacgatatcagaagtgcttggtagccaggccgccttctcagaaagttcgaccacctccaccgccagcagattcagtaaccagaagagtcacaaccaatgtaaaacgaggggtcttatccctcattgacactttgaaacagaaacgccctgtcaccgaaatgccatagctgcacatgcaaaaggactcggctatttacctgaagattgactagctacactaaagaaaatgaactccgccatccgaccttccatccagttgctgatgctttgtcttcagagaatttacccttaaccaagcagtgttagacaagcatgttctctcgtcttgccaccatcatgtgatatgaaaagaagcatgaataattttttttgctgtaagttacatcatgcgcagtggaaggtctttttcttattgtaaatattgtgaacattacttaacttcacacacacacagagaagagtgtggccccacccctcctagtgaactaacgctgcgtccttggaatgaatgatgcgtgagttagtttcactgtcttcttggctggacctgtcacaagcaacctttaagtcctacagcactttgccctgttttcaacattggagtaggcactgcatagcagataccattgaattgctgtaaaaataggatggcgagtttgtgttttaatttttcataaaattgaacctgttggttgacaaaattggctgttggcatcagtatagaaaccaactggcagctttccctgacaagctctttgacacatggacaccatttcatgtctacagctgtttgtgggatgttggaaaaaaatgaaacttcaaaattgatgaaaaactaaattcgaggaattaaaatcgaacaaaacatagcctttcttttccgatggttttcaaactgattatttttaaaagagattaataaaatcataatgcattttgggtgggacatatttcaaacttctgccttatattgtacggtgcagctagagaattatagttcactatggccattctctacataaacattaagatgaaatactcctcatcagcctttcatccttagtttgagaattagctgatatgcaatttgaagttgaggaaatatcattgatatttctatcatgcacgattattttagatttctaccaccgtgtgatttttgctagtccatgtgctagaggtaaacgttctgctggaattctgcatccagctctatccccctctgatgctttttgcccagaaagctgtctgtccatcatgtattgtccatggcaacaaattacattaggttgaacctttccttgattttatgtatttaatattagaatttgttggactcaactagatatattttttaatttatattttttccattttactttgaagatttgaaatgttcatacctgagcaaagtctacacaggagtaatggactgtttaacaagtttcccaaaacagcattttcctgctccttcgtatgtaggtgagaaacttagctggaaagacatacaaatttagactctcgttgacattgtcgttttaaaaggaagttgctaaggcgatcaatctcaatattagtcttgtttacttcttcttaatgtcaaaattaacatttacaacatccaattataaaagtaatgctttatgtttatacactgctatgtacttgtcaaaatggtttccacattcttatcacatctgagccttaccaggtagagaaggtactaaatacactttagaagtaaaaatatgaagtaccgagaggctaaacccactggcctaagatctcaccaaagttcatgaaaaccaggactaggacccacggctcccaaagcccgttcttgctgtgttgtgctgcctccatatccgtcaggaagagcctttccagaatgattctgggcatatactaagaagagcaggtatggaaagatctattgtcagggaatcttagaattccctacacgagtgggagaaagatgtccaaattccttacgcagtggtattcatgatggtgccctatctaagtccaggactgttttcctacagcgtgcctcaaaagtgttgtagagggcaggattctacattcacagcctgttccatctacgagattttccagatgctacttgtggtagacattcctaactcatggtacttagccaccagagatcatgatggaatgagtgggtggcttttctacctgccattccctcagaattcatgaggggtgggggacagggggaccggaattgtcttagcaccccaatgttatgacaaaactatgctactttagaaacgcagtctgtttttcaccaattgacatactactgatctgaagtaaccagtgccatcataagaaattactgcattaagaaaatccttgctgtgccctttgaaaagctgttcagaaatcatttacagtgatctttcatctcggtcgctgtagtgaaacattttagtgtgataaatttcaaaattctaaacaaattacccacttttatattggaaatctctaccagaactccctcttcattttttaaggcatacatttgcttgttttcaagatcaagaattctgagctagctttaagtagcaaactgatttatatgtgcaattataggatgcattaagatgaatgatagcctttacatattgaaaactttgcagacgttttgttttgaaaatggcattgtatagtaaatgcaaattaattttgtaaaattatgttaaagagtatgttcagacactttctgccatggccaaaaagtatgtatgaaagtatgtgtgtatttgtttgtaaaaggatgccaatgttttacctgatatcttagtgacacttcagttatctatgcattctttagatctgtgattcggtaaacaggcagccatgttcacgatgccttctatgtcttaccatatttttaattaacctgttaaatacagcttaaaatatttttattttatttattctatttttactgaaatatactgcattattgtgttaatgtattatctttcctggatattatctcccagtgtatccagatctaagtaatctcagtgaactatacattgcctaaaaagtggttttgtaatgatttgtagtcacatttctattgggatatgtagaagaaaaggcaaaatgcttaaagttccttttattttttaaaagcagctagatagacacagacttgccacctcatacatctgctccttggcaacatcaaggggaacgactagccaacatgcctatggctaaaaactttcctttgcagactaaagcactgcttggtgcttcgtttttctacccttcacaacatgtgtgatttcatctaagagatatatacatgtacacatgccctttgtttccacctggatacaagatcactcatagctaattaggaccattgttttttgttcatctgtcttgttgcatgaagggacattagacccatttccattaaaataagttcttggtgataaactgtggcactgctacttctttttaaatccactttatgatttcaagatggacacttgtaagatgactcgacacaaggccattgcctggaagccccagagctttcctctgtttgtatggcccgttcatgtcccaggcattgcaacacaaactcctcaagatttcaccacaacatgacaagcattttcctaactgatattagcacaatttaactaataagccccttcgctctctagttggccaggcttaacctaatacacatctaacgtgtgtgccacacggccagtagaaagtttaacttcagcttcagggcaaagatacccactcacaccgtgtcaacgcaagcagtagttcctggcctccagagcagcttacttcccctgaaagaacgctttgttttcctttatgcccttttcctgttgaccacttttacacatttaaatgtaatttgttgtgagaataaatttagctgcataaaacgttcggctcatttatctgacatcttagtcacatatacaaggaatagaaatagaaactcggtgtctctagttatttttaaattattcttacctcagacttcttagaaatcactttagtaatggagcattttgctttgattagttactacatatttctgcctggtaagaactaggaagtaacttcaaattttgagtaatcaccctgtacttatttggtgatcaggaaggccagctggccttccggacatagaagcctatttagtcaccaactcgagtcttttgtaagcggtcttgctaggattgtgatattttagcacgaagaagtttatcacttcctttaagaacctgacatcaaagaataaagaatagaggtgtacacacactaaatccaaaatgaaaggtaactagagaaatcagttgaatctggtttagcttaactgttaggcgcaggaaggcagataaacagaatttaaagtatgtccccgctttttgttcatcttgcacttccacagtggtttctctctagtcagtaacaaaatttcattatggtttcaggcattatatggtggtaaataatttcagattaaaaatgtgtttgctattggagtatctgaatactagtaatttcattatttagaattttgcagcacttttatctcaagaagaagtccaagaatgtaaaatgccaaatgaaacatgtcagtggaatcaatattctccttcattagaattccctcatattgctttttttttttttcttcagacagaggagtcttactctggagtgcagtggtgtaatttcagctcaccacaacctccacctcccaagttcaagcaattctcgcctcagcctcctgagtagctgggattacaggcatgcaccgccacgcctggccaatttgtatatttttagtagagacagggtttcgccacgttggccaggctggtctcgaactcctgacctcaggtgatccgcccgccccaacctcccaaagtatgtgagccaccacgtccggcctcatattgcttttatccaaaattcttttcccttttcactctaccaaagtatttaaataatcctgtccttcatagaagattctcaaagaagaaaactgcagtgtaattaatgaatggtttaattcagaatcttcatatacttctaaagagaaaaataatttagtgccaaatgcatgttaggagataatcaatgtaagtggcaacaaattgtgacttcacatgctactgtagagatcagaaaattatcctaaactattccataacaatgagacaacatcacagaaaatacacttgaaaataaaaatctcaagaccagctacttctggacaatggaatacttttcagtctggtatggtggagggcccgaaaaggataagggattcttatgatacacaatgggattctttactgaacaatatgttaaattaagctgcaccgccttccttgaggcatggactaccctaaccaaccagatagaaatctgggtgggataagaggatgagccacacgctataattttagggcaaggagatagtgtttgattttcaaaatcagcaaaataagctgagcactttatatctttctgtacaagagtgataacatgaagaattcttcttcagggatttaaaatacaataagcctggttcaactataaaaagtcttgtttcctttcttcattgacacttttttttttttttttttttttttgaggcaaggtctcactctgcttcccaggctggagtgcagtggggcaatattggctcactgcaacctgcacctcctggactcaagagatcctcgtacctcagcctcctaagtagctgggactacaggcgtgtcccaccacacccagctaatttttgtattttttgtagagatggggttttggggtttcgccatgttgtccaggctcgtctggaactccggtgctcaagtggcgtgcccacctcagcctcccaaactgctgagattacagatgtgagccactgcacccagcccactgacacgttttactgataaatgtaaatctaagctaaaataaaaataatgtattaccgctataatacaattcaccattctcttttctcacttcaagtaagaaagtaaaaatagaatatcagagctgaagtagacctaagtattcatcttgaagaagataatattctaaaaatcatgccacctgaattgagcatttaggaatttatgtaacatttctatacaactgaattgcaaaaataaaactttaaattcaaacttt

SEQ ID NO: 64213 - DNA, 2277 bp, Artificial Sequence
  derived and/or modified sequence
atgagcgaggtgcttcccgcagactctggtgtggatactctggctgtatttatggccagttcgggaactactgacgttacgaatcggaactcacccgcaaccccccctaacactcttaaccttcgctcaagtcataacgaattgctgaatgccgagatcaagcacaccgaaaccaagaactctactcctcctaaatgccgtaagaagtatgcgctcaccaatatccaggctgcgatgggccttagtgaccctgccgctcagcctctgttgggaaatggcagtgccaacatcaagctggttaaaaacggagagaaccagttgaggaaagctgccgaacagggccaacaggacccaaacaaaaatcttagccctaccgccgttatcaacattacctctgagaaattggagggaaaggaacctcaccctcaggatagctcctcctgcgagatcctgcctagccagccccgtagaacgaagagcttccttaattattacgctgacctggagacttccgccagagagctggagcaaaaccgagggaaccaccacggtaccgctgaggaaaaatcacaacccgtacagggccaggcgtctaccatcataggtaatggcgacttgctgctgcagaagcccaaccgtccgcagtcttctcccgaggacggacaggtggccacagtcagtagctctccggaaacgaaaaaggaccaccctaagacaggggcaaagactgactgcgctctgcaccgcatacagaacttggccccaagtgatgaggagagctcctggaccacattatcacaggattccgccagcccatcttccccggatgagacggacatttggtctgatcactcctttcaaaccgaccccgaccttccacctggttggaagagggtctccgatatcgccggtacctattactggcacattcctaccggaactacacaatgggaacgccctgtaagcattccagcggacctccagggctcccggaagggctctcttagctccgttacccccagcccaactcctgagaacgagaagcagccgtggtccgattttgccgttctaaatggcggaaaaataaacagcgatatctggaaagatctgcacgccgctaccgtcaacccagacccaagtctgaaggagtttgagggcgcaaccctgcggtatgcatccctcaagctgagaaacgctccccaccctgacgacgacgactcctgcagcataaactccgaccccgaagccaaatgctttgcagtgaggtcactgggatgggttgagatggcagaagaggaccttgcgccagggaagtcatctgtggctgtgaataactgcatccgtcagctctcatactgcaagaacgacattagagacaccgtcgggatctggggcgagggtaaggatatgtatctgatcctggaaaacgacatgctgtcactagtggatccaatggatagatcagtcttacactcccagcctatcgttagcattcgagtctggggagtgggtagggacaatggcagagatttcgcttatgttgccagggacaaagacacaagaatcctaaaatgccatgttttccgctgtgacacgcccgctaaggccatcgctactagcctccacgagatctgttcaaagattatggccgagcgcaaaaatgcgaaagccctggcctgttctagcctccaagagcgggctaacgtgaatctggacgtgccactgcaggtcgactttccgacccccaagactgaattggttcagaaatttcatgtccagtatttaggaatgttgcccgtggacaaacccgttggaatggacattcttaacagcgcgattgaaaatttgatgaccagttcgaataaggaggactggctgtccgtgaatatgaatgtggcggacgcaaccgtcacagtgatctcagagaaaaacgaagaggaggtgctggtggagtgtcgcgttagattcttgagcttcatgggtgtggggaaggatgtgcacacttttgccttcatcatggatactggaaaccagagatttgagtgtcacgtgttctggtgtgaacccaatgcgggtaacgtgagtgaggccgtgcaagcggcatgtatgctcagataccagaaatgccttgtcgcaaggcctccatcccagaaagtgcggccaccaccacccccagcggactccgttacacgcagagtgacaactaatgtgaagagaggcgtgctctcacttattgacactctgaagcaaaagcgacccgtgaccgagatgccgtag

SEQ ID NO: 64214 - DNA, 2274 bp, Artificial Sequence
  derived and/or modified sequence
tcgcattgtataccagccgacagtggtgtcgacactcttgccgtctttatggcctcctctggaacaactgatgtgaccaacaggaatagtcctgctacacctccaaatacactaaacctgcgctcatctcataacgagctgctgaatgcggaaatcaagcatactgaaaccaaaaactctacccctccgaaatgtcggaagaagtatgccctgactaatatacaggctgctatgggcctgagcgatccagctgctcaaccgcttttggggaacggaagcgccaatattaagctcgtgaagaacggcgagaaccaactacggaaggccgctgagcagggtcagcaggaccctaacaagaacttaagccctaccgccgtgatcaatatcactagtgaaaagctggagggtaaagagccccatccacaggactcttcttcatgcgaaattctgccaagccagccacgcagaacaaagagctttctgaactactacgcagatttagaaacttcagcgcgagagctcgagcagaacagaggaaaccatcacgggaccgcagaagaaaagagccagccggtccagggacaagcttctaccatcattgggaatggggatttgctgctccagaagcccaaccgtcctcagtcatcccccgaggatggtcaagttgcaactgtgtctagcagtcctgagacaaaaaaggaccatccgaaaacgggggcaaaaacggattgtgccctgcaccgcatccagaacctcgctccatcagacgaggaatcctcctggacaaccctgagccaggatagcgctagcccgtcatcacccgacgagacggacatttggtccgaccattcatttcaaacggatcccgaccttccccctggatggaagagggtatccgatatcgcgggtacttactactggcatatcccgaccgggacaacacaatgggagcgcccagtctcaattccggcagatttgcagggttccaggaagggatcgttgtcgtcagtcacaccaagccccacccccgaaaatgaaaaacaaccttggtccgatttcgcggtactgaacggcggaaaaataaattccgacatctggaaggacctgcatgctgcgactgtaaaccctgaccctagcctgaaagaattcgaaggcgcaacccttcgctacgccagccttaaactgcggaacgcccctcatcccgatgacgatgattcatgctccatcaattcagatcctgaagcaaaatgcttcgcagtgcgtagcctcgggtgggtggagatggccgaagaggacttagcacctgggaaaagctcggtcgccgtgaataactgtattcgacaactctcgtattgtaagaacgatatccgtgacacggttggtatctggggggagggcaaggacatgtacctgatcctggagaatgatatgctttcgctggttgatcccatggaccgatccgtgctgcacagccagcccattgtgtctatccgggtttggggggtggggagggataatggtcgtgactttgcttatgtcgccagagataaggatactcggattcttaaatgccatgtcttccggtgtgacactcccgctaaagcgatcgccacatctctacacgagatttgctctaagatcatggccgagagaaagaacgccaaggccctcgcctgctcatcactgcaggaacgagcaaacgttaatctcgatgtccccctccaggtggacttcccgacgcctaagacggaactagtccagaagttccacgtacagtatctcggcatgctcccagtggataagcctgtcggcatggacatcctaaactcagctatcgagaatcttatgacgagctcgaataaggaggattggctgtcagtgaatatgaacgtggccgatgctacagtcacagtgatttcagaaaaaaacgaggaggaggtgttagtggagtgccgggtgcgtttcctgtcgttcatgggcgtgggcaaagacgtacatactttcgctttcatcatggatacgggcaaccagcgattcgaatgccacgtgttttggtgtgagccaaacgccggaaatgtctcagaagcagtgcaggccgcttgtatgttgagatatcagaagtgccttgtggctagacccccatctcaaaaggtgagaccacctccacctccagcagactccgtgacccggagagtcacgaccaacgtgaagcgcggtgtgttaagcctgattgataccttaaagcagaaaaggccagtgaccgagatgccctag

SEQ ID NO: 64215 - DNA, 2277 bp, Artificial Sequence
  derived and/or modified sequence
atgagcgaggtgctgcccgccgacagcggcgtggacaccctggccgtgttcatggccagcagcggcaccaccgacgtgaccaacagaaacagccccgccaccccccccaacaccctgaacctgagaagcagccacaacgagctgctgaacgccgagatcaagcacaccgagaccaagaacagcaccccccccaagtgcagaaagaagtacgccctgaccaacatccaggccgccatgggcctgagcgaccccgccgcccagcccctgctgggcaacggcagcgccaacatcaagctggtgaagaacggcgagaaccagctgagaaaggccgccgagcagggccagcaggaccccaacaagaacctgagccccaccgccgtgatcaacatcaccagcgagaagctggagggcaaggagccccacccccaggacagcagcagctgcgagatcctgcccagccagcccagaagaaccaagagcttcctgaactactacgccgacctggagaccagcgccagagagctggagcagaacagaggcaaccaccacggcaccgccgaggagaagagccagcccgtgcagggccaggccagcaccatcatcggcaacggcgacctgctgctgcagaagcccaacagaccccagagcagccccgaggacggccaggtggccaccgtgagcagcagccccgagaccaagaaggaccaccccaagaccggcgccaagaccgactgcgccctgcacagaatccagaacctggcccccagcgacgaggagagcagctggaccaccctgagccaggacagcgccagccccagcagccccgacgagaccgacatctggagcgaccacagcttccagaccgaccccgacctgccccccggctggaagagagtgagcgacatcgccggcacctactactggcacatccccaccggcaccacccagtgggagagacccgtgagcatccccgccgacctgcagggcagcagaaagggcagcctgagcagcgtgacccccagccccacccccgagaacgagaagcagccctggagcgacttcgccgtgctgaacggcggcaagatcaacagcgacatctggaaggacctgcacgccgccaccgtgaaccccgaccccagcctgaaggagttcgagggcgccaccctgagatacgccagcctgaagctgagaaacgccccccaccccgacgacgacgacagctgcagcatcaacagcgaccccgaggccaagtgcttcgccgtgagaagcctgggctgggtggagatggccgaggaggacctggcccccggcaagagcagcgtggccgtgaacaactgcatcagacagctgagctactgcaagaacgacatcagagacaccgtgggcatctggggcgagggcaaggacatgtacctgatcctggagaacgacatgctgagcctggtggaccccatggacagaagcgtgctgcacagccagcccatcgtgagcatcagagtgtggggcgtgggcagagacaacggcagagacttcgcctacgtggccagagacaaggacaccagaatcctgaagtgccacgtgttcagatgcgacacccccgccaaggccatcgccaccagcctgcacgagatctgcagcaagatcatggccgagagaaagaacgccaaggccctggcctgcagcagcctgcaggagagagccaacgtgaacctggacgtgcccctgcaggtggacttccccacccccaagaccgagctggtgcagaagttccacgtgcagtacctgggcatgctgcccgtggacaagcccgtgggcatggacatcctgaacagcgccatcgagaacctgatgaccagcagcaacaaggaggactggctgagcgtgaacatgaacgtggccgacgccaccgtgaccgtgatcagcgagaagaacgaggaggaggtgctggtggagtgcagagtgagattcctgagcttcatgggcgtgggcaaggacgtgcacaccttcgccttcatcatggacaccggcaaccagagattcgagtgccacgtgttctggtgcgagcccaacgccggcaacgtgagcgaggccgtgcaggccgcctgcatgctgagataccagaagtgcctggtggccagaccccccagccagaaggtgagacccccccccccccccgccgacagcgtgaccagaagagtgaccaccaacgtgaagagaggcgtgctgagcctgatcgacaccctgaagcagaagagacccgtgaccgagatgccctag

SEQ ID NO: 64216 - DNA, 2274 bp, Artificial Sequence
  derived and/or modified sequence
agccactgcatccccgccgacagcggcgtggacaccctggccgtgttcatggccagcagcggcaccaccgacgtgaccaacagaaacagccccgccaccccccccaacaccctgaacctgagaagcagccacaacgagctgctgaacgccgagatcaagcacaccgagaccaagaacagcaccccccccaagtgcagaaagaagtacgccctgaccaacatccaggccgccatgggcctgagcgaccccgccgcccagcccctgctgggcaacggcagcgccaacatcaagctggtgaagaacggcgagaaccagctgagaaaggccgccgagcagggccagcaggaccccaacaagaacctgagccccaccgccgtgatcaacatcaccagcgagaagctggagggcaaggagccccacccccaggacagcagcagctgcgagatcctgcccagccagcccagaagaaccaagagcttcctgaactactacgccgacctggagaccagcgccagagagctggagcagaacagaggcaaccaccacggcaccgccgaggagaagagccagcccgtgcagggccaggccagcaccatcatcggcaacggcgacctgctgctgcagaagcccaacagaccccagagcagccccgaggacggccaggtggccaccgtgagcagcagccccgagaccaagaaggaccaccccaagaccggcgccaagaccgactgcgccctgcacagaatccagaacctggcccccagcgacgaggagagcagctggaccaccctgagccaggacagcgccagccccagcagccccgacgagaccgacatctggagcgaccacagcttccagaccgaccccgacctgccccccggctggaagagagtgagcgacatcgccggcacctactactggcacatccccaccggcaccacccagtgggagagacccgtgagcatccccgccgacctgcagggcagcagaaagggcagcctgagcagcgtgacccccagccccacccccgagaacgagaagcagccctggagcgacttcgccgtgctgaacggcggcaagatcaacagcgacatctggaaggacctgcacgccgccaccgtgaaccccgaccccagcctgaaggagttcgagggcgccaccctgagatacgccagcctgaagctgagaaacgccccccaccccgacgacgacgacagctgcagcatcaacagcgaccccgaggccaagtgcttcgccgtgagaagcctgggctgggtggagatggccgaggaggacctggcccccggcaagagcagcgtggccgtgaacaactgcatcagacagctgagctactgcaagaacgacatcagagacaccgtgggcatctggggcgagggcaaggacatgtacctgatcctggagaacgacatgctgagcctggtggaccccatggacagaagcgtgctgcacagccagcccatcgtgagcatcagagtgtggggcgtgggcagagacaacggcagagacttcgcctacgtggccagagacaaggacaccagaatcctgaagtgccacgtgttcagatgcgacacccccgccaaggccatcgccaccagcctgcacgagatctgcagcaagatcatggccgagagaaagaacgccaaggccctggcctgcagcagcctgcaggagagagccaacgtgaacctggacgtgcccctgcaggtggacttccccacccccaagaccgagctggtgcagaagttccacgtgcagtacctgggcatgctgcccgtggacaagcccgtgggcatggacatcctgaacagcgccatcgagaacctgatgaccagcagcaacaaggaggactggctgagcgtgaacatgaacgtggccgacgccaccgtgaccgtgatcagcgagaagaacgaggaggaggtgctggtggagtgcagagtgagattcctgagcttcatgggcgtgggcaaggacgtgcacaccttcgccttcatcatggacaccggcaaccagagattcgagtgccacgtgttctggtgcgagcccaacgccggcaacgtgagcgaggccgtgcaggccgcctgcatgctgagataccagaagtgcctggtggccagaccccccagccagaaggtgagacccccccccccccccgccgacagcgtgaccagaagagtgaccaccaacgtgaagagaggcgtgctgagcctgatcgacaccctgaagcagaagagacccgtgaccgagatgccctag

SEQ ID NO: 64217 - DNA, 633 bp, Artificial Sequence
  derived and/or modified sequence
atggccgagcgcaagaacgccaaagctctcgcttgttccagtctgcaggaacgggcaaacgtgaatctggacgtacccctgcaggtggacttcccaacgccaaaaacggaactcgtccagaaatttcatgtgcaatacctgggtatgctgcctgtcgataagcctgtgggtatggacatcctgaattcagccattgaaaacctcatgacatcttcaaataaagaggactggctcagcgtgaacatgaacgttgctgacgccacagtcactgtaatatctgagaagaacgaggaggaggtgttagtagagtgtcgagtgcggtttttgtcttttatgggtgtaggcaaggatgtgcacacattcgccttcatcatggatactggcaaccagcggtttgagtgtcacgtgttctggtgcgagcctaacgccggaaatgtttcggaggcggtacaggcagcttgcatgctgcgataccagaagtgtcttgtcgcacgcccacccagccagaaggttagacctccccctccgccagccgattccgtcacccgccgtgtgactaccaatgttaagagaggcgtgttaagcctgatcgacacgcttaaacagaagcgacccgtaacagagatgccttag

SEQ ID NO: 64218 - DNA, 633 bp, Artificial Sequence
  derived and/or modified sequence
atggcagagcgcaagaatgccaaggccttggcctgcagttccctccaggaacgcgctaacgtgaatttggatgtgccactgcaggtcgatttcccaacccctaaaactgaactcgtccaaaaatttcacgtgcagtatttaggcatgctgcctgtggacaaacctgtgggcatggatattctcaatagcgccatcgaaaatctgatgacgtctagcaataaggaagattggctttccgtgaacatgaacgtcgcggatgcaaccgttacagtgatcagcgagaaaaacgaggaagaagtgctggttgaatgtagagttcgctttctgtccttcatgggtgttggaaaagatgtccacacattcgcattcatcatggacacagggaatcaaagatttgaatgccacgtgttctggtgtgaaccaaatgctgggaacgtttccgaggcagtccaggctgcctgcatgttacgctaccaaaaatgcctcgtcgccaggccaccttcacaaaaggtgcggcccccccctccccctgcagacagtgtcactaggcgcgttactacaaacgttaagcgcggcgtgctgtccctgattgacactctgaagcagaaaagacccgtaacagagatgccctag

SEQ ID NO: 64219 - DNA, 633 bp, Artificial Sequence
  derived and/or modified sequence
atggccgagcgtaaaaacgcgaaagctcttgcttgcagctcactgcaagaaagagctaatgtgaacctggacgtgcccttgcaggtggatttccctacgcccaagactgaactggtgcagaaattccatgtacagtacctcggcatgctgccagtggataagccagtgggcatggatatccttaattccgccatagaaaatctgatgaccagctcgaacaaagaagactggttatctgtaaatatgaatgtggccgacgctacagtaaccgtaataagtgagaaaaacgaggaagaagtgctggtcgaatgcagagtgagattcctgagctttatgggcgtcggtaaagatgtgcacaccttcgcatttatcatggacaccggtaaccagcggtttgagtgtcatgtgttctggtgcgagccaaacgctggcaatgtgagcgaggccgtgcaggcagcatgcatgctgagataccagaaatgtctagttgcaagacctccctcccagaaagtaagaccgccaccaccacccgcagacagcgtgacgcgcagggtcacaacaaatgtcaagaggggagtgctgtccctgatcgacactctgaagcagaagagaccggtaacagaaatgccttag

SEQ ID NO: 64220 - DNA, 633 bp, Artificial Sequence
  derived and/or modified sequence
atggccgagaggaagaatgccaaggccctggcctgcagcagcctgcaggagcgggccaacgtgaacctggatgtgcccctgcaggtggacttccccacccccaagacagagctggtgcagaagttccacgtgcagtacctgggcatgctgcctgtggacaagcctgtgggcatggacatcctgaacagcgccatcgagaacctgatgaccagcagcaacaaggaggactggctgtctgtgaacatgaatgtggctgatgccaccgtgaccgtcatcagcgagaagaatgaggaggaggtgctggtggagtgccgggtgcgcttcctgtccttcatgggcgtgggcaaggatgtgcacacctttgccttcatcatggacaccggcaaccagagatttgaatgtcatgtgttctggtgtgagcccaatgctggaaatgtgtctgaggccgtgcaggccgcctgcatgctgcgctaccagaagtgcctggtggcccggccccccagccagaaggtgcggcccccacctcctcctgctgacagcgtgaccaggagagtgaccaccaacgtgaagaggggcgtgctgagcctgattgacaccctgaagcagaagaggcctgtgacagagatgccctag

SEQ ID NO: 64221 - DNA, 633 bp, Artificial Sequence
  derived and/or modified sequence
atggccgagcggaagaacgccaaggccctggcctgcagcagcctgcaggagcgcgcaaacgtgaacctcgatgtgcccctccaggtggacttcccgacgccaaaaacggagctcgttcagaagttccacgtgcagtatctcggcatgctcccggttgataagcctgtgggaatggacattctaaacagtgccatagagaacctgatgactagcagcaacaaggaagactggctctccgttaacatgaacgtggctgatgcaacagtaaccgtgattagcgagaagaatgaggaagaggtgctggtggaatgtcgggtgcgtttcttatcctttatgggagtcggaaaggatgttcataccttcgctttcatcatggatacagggaaccaacggttcgaatgccacgtgttctggtgcgaaccaaacgctggtaacgttagcgaggccgttcaagcagcttgcatgctgaggtaccagaaatgcttggtggcccggcccccgtcacagaaggtgcggcctcctcccccgccagcagacagtgtgacccggagggtcactaccaacgttaagcggggtgttctcagtctgatcgacacccttaagcagaagcggcccgtcacagagatgccatag

SEQ ID NO: 64222 - DNA, 633 bp, Artificial Sequence
  derived and/or modified sequence
atggccgagcggaagaacgccaaggccctggcctgcagcagcctgcaggaacgcgcaaatgttaatttagacgtgcccttgcaggtggacttccccacaccgaaaactgaattggtgcagaagttccacgttcagtacctgggaatgcttccagtagacaagcccgtcgggatggacatcctgaattctgccatcgaaaatttaatgacatcttcaaataaggaagactggcttagcgtgaatatgaacgtagcagatgctactgtgaccgtaatttcggaaaagaacgaggaggaagtgctggtggagtgccgggtccgttttctgtccttcatgggagtgggcaaagacgtgcatacatttgcgtttattatggatactggcaaccagcgcttcgagtgccacgtcttctggtgtgaacccaacgctggaaacgtctcagaggcagtgcaagcggcttgtatgctgagataccagaaatgtctcgttgcacgccctccctcccagaaggtcagaccaccaccgccacccgcagactcggttacccgtagagtgactacaaacgtcaaaagaggggttctctctctgatagacactcttaagcaaaagagacccgtgactgaaatgccctag

SEQ ID NO: 64223 - DNA, 633 bp, Artificial Sequence
  derived and/or modified sequence
atggccgagcggaagaacgccaaggccctggcctgcagcagcctgcaggaacgggcgaatgtcaacttggacgtcccgctccaggtggattttcccacaccaaaaacggaactcgtgcagaagttccacgtgcaatatttgggcatgctgccggttgacaagcccgttggcatggacatcctgaacagcgctattgaaaacttgatgacgagctctaacaaggaagactggttgtcagttaacatgaatgtagcagatgcaactgtcactgtgatcagcgaaaaaaatgaagaagaagttctagtggaatgcagggtcaggttcctctcgttcatgggagtgggtaaagacgtgcatacttttgcattcatcatggacacaggtaatcagcgcttcgaatgccacgtgttttggtgcgagcctaacgccggtaatgtttcagaggcagtccaggcggcctgtatgctccgctatcagaagtgtctcgtcgcccgcccaccgtcgcagaaggtgaggcctccccccccaccggcagattctgttacccgtagggtgactactaatgtcaaaagaggggtgcttagcttgatcgacactctaaagcagaaacgccctgtgactgagatgccctag

SEQ ID NO: 64224 - DNA, 633 bp, Artificial Sequence
  derived and/or modified sequence
atggcagaaagaaaaaatgcaaaagctctcgcgtgttcctcactgcaggagcgcgctaatgtcaacttggacgtgcctctgcaggtagactttccaactcctaagaccgagctagttcagaagttccacgtacagtatctgggcatgctccctgtggacaagccagtggggatggatattcttaactctgcaatcgaaaacttgatgacttccagtaataaagaggactggctctccgttaacatgaatgtggccgatgcaaccgtgaccgttatcagcgagaaaaacgaggaagaggtgcttgtagagtgtagagtacgctttttatctttcatgggcgtgggtaaagacgtgcatactttcgcatttatcatggacacgggcaatcagagattcgagtgccacgtgttctggtgcgaacctaatgcgggaaatgtcagcgaagccgtgcaggccgcttgtatgctcaggtaccagaagtgcttagtcgcacgaccaccaagccagaaggttcggccacctccaccaccagccgattcagtgacccgtcgggtgacaaccaacgtcaagagaggagtgctatccctgattgataccctcaagcaaaagagacctgtgaccgagatgccatag

SEQ ID NO: 64225 - DNA, 633 bp, Artificial Sequence
  derived and/or modified sequence
atggcagagagaaagaatgccaaggcattagcatgttcttccctccaggagcgggcaaacgtgaacttggacgtgccgcttcaggtggattttccaaccccaaagaccgagctcgtgcagaaattccatgtgcagtatctggggatgctgccggttgataaacctgtgggtatggatattctcaattcggccatcgagaatcttatgacgtccagcaataaggaggactggctgagtgtgaacatgaatgtagccgatgccaccgttactgtgatcagcgaaaagaatgaagaggaagttctggttgagtgcagggtgcgttttctgtcattcatgggagtggggaaggatgtgcacacctttgcttttataatggataccggaaaccagcgctttgaatgtcatgttttttggtgtgagccgaatgcaggaaacgtatccgaggccgtacaggccgcatgcatgttgcgttatcagaagtgtctggtggctagacctccctcacagaaagttcggccaccaccccctcctgcagactccgtaactcgtcgagtgactacaaacgtcaaacgtggcgtgctttcactgattgacacactgaaacagaagcggccagtcactgagatgccctag

SEQ ID NO: 64226 - DNA, 633 bp, Artificial Sequence
  derived and/or modified sequence
atggcagaacggaaaaacgccaaggctctggcctgcagctctctgcaggagcgggcaaatgtgaatcttgacgtgccactccaagtcgacttcccaacaccaaaaaccgagctggttcagaagtttcacgtgcagtacctcggcatgctgcctgtagataagcccgtagggatggatattctcaacagtgcaatagaaaatctgatgacgtcctcaaacaaggaagattggctcagtgttaacatgaacgtggccgatgccacagtgaccgttatctcagaaaaaaatgaggaggaggtgctcgtggagtgccgcgtcaggtttttgtcattcatgggagtcggcaaggatgtgcacacctttgcttttattatggacaccggcaaccagcggttcgaatgccatgtgttctggtgtgagcccaacgctggtaacgtgtcagaggctgtgcaagcagcctgcatgctgaggtatcagaagtgtctggtagccaggccaccatcgcaaaaggtgagaccacctcctcctccagcggacagtgtaactaggcgagtcactaccaatgtcaagcgaggtgtactgtcacttatagatacactgaagcagaagcggcctgtcacggagatgccctag

SEQ ID NO: 64227 - DNA, 633 bp, Artificial Sequence
  derived and/or modified sequence
atggccgagagaaagaacgccaaggccctggcctgcagcagcctgcaggagagagccaacgtgaacctggacgtgcccctgcaggtggacttccccacccccaagaccgagctggtgcagaagttccacgtgcagtacctgggcatgctgcccgtggacaagcccgtgggcatggacatcctgaacagcgccatcgagaacctgatgaccagcagcaacaaggaggactggctgagcgtgaacatgaacgtggccgacgccaccgtgaccgtgatcagcgagaagaacgaggaggaggtgctggtggagtgcagagtgagattcctgagcttcatgggcgtgggcaaggacgtgcacaccttcgccttcatcatggacaccggcaaccagagattcgagtgccacgtgttctggtgcgagcccaacgccggcaacgtgagcgaggccgtgcaggccgcctgcatgctgagataccagaagtgcctggtggccagaccccccagccagaaggtgagacccccccccccccccgccgacagcgtgaccagaagagtgaccaccaacgtgaagagaggcgtgctgagcctgatcgacaccctgaagcagaagagacccgtgaccgagatgccctag

SEQ ID NO: 64228 - protein, 318 aa, Artificial Sequence
  derived and/or modified sequence
METLCLRASFWLALVGCVISDNPERYSTNLSNHVDDFTTFRGTELSFLVTTHQPTNLVLPSNGSMHNYCPQQTKITSAFKYINTVISCTIFIVGMVGNATLLRIIYQNKCMRNGPNALIASLALGDLIYVVIDLPINVFKFYQDVKDWWLFGFYFCMPLVCTAIFYTLMTCEMLNRRNGSLRIALSEHLKQRREVAKTVFCLVVIFALCWFPLHLSRILKKTVYNEMDKNRCELLSFLLLMDYIGINLATMNSCINPIALYFVSKKFKNCFQSCLCCCCYQSKSLMTSVPMNGTSIQWKNHDQNNHNTDRSSHKDSMN

SEQ ID NO: 64229 - DNA, 486 bp, Artificial Sequence
  derived and/or modified sequence
atggaaacactatgtctacgagcatctttttggttggccctcgtaggctgcgtgatctcagataaccccgaacgctactcaacaaacctatcaaaccacgtcgacgacttcacaacctttagaggaaccgagctcagcttcctggttactacccaccagcccacgaatctcgtgctaccttccaacggcagtatgcataattattgtccccaacagaccaagatcacttctgcgtttaaatatatcaacaccgtgatttcctgcacaatcttcattgtgggtatggtggggaacgctaccctcctccggatcatctaccagaataagtgtatgcggaatgggcccaatgccctgattgcatctctggctctaggtgacctcatatatgtagtcatagatctgcccataaatgtgtttaaagtgcagtcaagttgtcttctggagtcgtgctcaggcaactgggactctttcggaaactgtcattag

SEQ ID NO: 64230 - DNA, 957 bp, Artificial Sequence
  derived and/or modified sequence
atggagacactgtgcctgagggccagcttctggctcgccctggtgggttgcgtgatttccgacaatcctgagagatatagcacaaacctctccaatcatgtggatgattttactaccttcagaggaactgagctgagctttctagtgactacgcatcagcctaccaaccttgtcttgccgtctaatgggtctatgcacaactactgcccacagcaaacaaagattacgtctgcattcaaatatatcaataccgttatttcatgcaccatatttatcgtaggtatggtgggcaatgccactttactccgtattatctaccagaacaagtgtatgaggaacgggcccaacgccctgatagcttccctcgccctgggtgatttaatctacgtggtgatagatctgcccatcaacgtatttaagttctatcaggatgtgaaggattggtggctgtttggcttttatttctgtatgcccttggtgtgtactgctatattctataccctgatgacgtgcgaaatgttgaacaggagaaatggatcccttaggattgccttatccgaacatctgaagcagaggcgagaggttgccaagacagtgttttgcctggtggtcatctttgcactctgctggttcccgctgcatttgtccagaatcctgaaaaagactgtttataatgagatggacaagaatcggtgcgaactgttatcattcctgttgctgatggattatataggaattaacttagctacaatgaactcttgcattaacccaatcgcgctctattttgtcagcaagaaattcaagaattgtttccagtcctgtctctgctgctgctgctaccagtcaaaaagcctcatgacaagcgttccgatgaatggaacttcaatccagtggaaaaatcacgatcaaaacaaccacaataccgataggtcgtctcacaaggatagcatgaactag

SEQ ID NO: 64231 - DNA, 957 bp, Artificial Sequence
  derived and/or modified sequence
atggaaacgctgtgtctgcgcgcgagcttctggctggccctcgttggttgcgtcatttcagacaacccagagagatactctactaatttgagcaaccacgtggacgactttaccacttttcgcggaactgagctgtcctttctggtcacgacacaccagccaactaacctggtgctaccttcaaatgggagtatgcacaattactgtccccagcagactaagatcacctccgcattcaaatatataaacaccgtaatcagctgtactatcttcattgtggggatggttggaaacgccaccctgctaagaattatctatcagaacaaatgtatgcggaacgggccaaatgctctgattgcttctctcgctctcggagatcttatatatgttgttatagacctcccgatcaatgtttttaagttttaccaggacgtcaaggactggtggcttttcggattttacttttgcatgccattagtttgtactgctattttctacaccctgatgacctgcgaaatgctgaatagaagaaacggtagcctccggattgccctctcggagcacttgaagcagcgccgggaagtcgcaaaaacagtcttttgtttggttgtcattttcgccctatgttggttcccactgcacctgagccgcatcttgaagaagaccgtgtacaacgagatggacaagaaccgatgcgaactcctgtcattcctgctcctcatggattacatcgggataaacctggcgacgatgaacagctgcatcaatcctattgccctctacttcgtctccaagaagttcaagaattgctttcagagctgtttgtgctgctgttgttatcagtctaaaagtctcatgacatcagtgccgatgaatgggacatctatccagtggaagaaccacgaccaaaataaccataataccgacaggtccagccataaagacagtatgaattag

SEQ ID NO: 64232 - DNA, 486 bp, Artificial Sequence
  derived and/or modified sequence
atggagaccctgtgcctgcgggccagcttctggctggccctggtgggctgtgtgatcagtgacaaccctgagcgctacagcaccaacctgagcaaccacgtggatgacttcaccaccttccggggcacagagctgtccttcctggtgaccacccaccagcccaccaacctggtgctgcccagcaatggctccatgcacaactactgcccccagcagaccaagatcaccagcgccttcaagtacatcaacacagtcatcagctgcaccatcttcatcgtgggcatggtgggcaatgccaccctgctgcgcatcatctaccagaacaagtgcatgagaaatggccccaatgccctgattgccagcctggccctgggggacctgatctacgtggtgattgacctgcccatcaacgtgttcaaggtgcagagcagctgcctgctggagagctgcagcggcaactgggacagctttggaaactgccactag

SEQ ID NO: 64233 - DNA, 957 bp, Artificial Sequence
  derived and/or modified sequence
atggagaccctgtgcctgcgggccagcttctggctggccctggtgggctgtgtgatcagtgacaaccctgagcgctacagcaccaacctgagcaaccacgtggatgacttcaccaccttccggggcacagagctgtccttcctggtgaccacccaccagcccaccaacctggtgctgcccagcaatggctccatgcacaactactgcccccagcagaccaagatcaccagcgccttcaagtacatcaacacagtcatcagctgcaccatcttcatcgtgggcatggtgggcaatgccaccctgctgcgcatcatctaccagaacaagtgcatgagaaatggccccaatgccctgattgccagcctggccctgggggacctgatctacgtggtgattgacctgcccatcaacgtgttcaagttctaccaggatgtgaaggactggtggctgtttggcttctacttctgcatgcccctggtgtgcacagccatcttctacaccctgatgacctgtgagatgctgaacagaagaaatggcagcctgagaattgccctgtctgagcacctgaagcagaggcgggaggtggccaagacagtgttctgcctggtggtgatctttgccctgtgctggttccccctgcacctgagccgcatcctgaagaagacagtgtacaatgagatggacaagaacagatgtgagctgctgtccttcctgctgctgatggactacatcggcatcaacctggccaccatgaacagctgcatcaaccccatcgccctgtactttgtgtccaagaagttcaagaactgcttccagagctgcctgtgctgctgctgctaccagagcaagagcctgatgacctctgtgcccatgaatggcaccagcatccagtggaagaaccacgaccagaacaaccacaacacagacaggagcagccacaaggacagcatgaactag

SEQ ID NO: 64234 - DNA, 486 bp, Artificial Sequence
  derived and/or modified sequence
atggagaccctgtgcctgcgggccagcttctggctggccctggtgggatgcgtgatttctgacaacccagagaggtatagcactaatctgtctaatcacgtggatgattttactacctttcgggggacagagctcagttttctggtgaccacacaccagccaacaaatctggtactgcccagcaatgggtcaatgcacaattattgcccccaacagacaaagatcacatccgcattcaagtatattaacaccgtgattagttgtacgatattcatagtgggtatggtgggaaatgctaccctgttgagaattatctaccaaaataagtgtatgaggaatggacctaatgccctcatcgctagcctcgcgctgggagacctgatatatgtggtgattgatttgcccatcaatgtgtttaaggtgcagtctagctgtctattagagagttgttccggcaactgggacagcttcggcaattgtcattag

SEQ ID NO: 64235 - DNA, 957 bp, Artificial Sequence
  derived and/or modified sequence
atggagaccctgtgcctgcgggccagcttctggctggccctggtggggtgtgtcataagcgataaccctgaacgctattccactaatttatcaaaccatgtggatgacttcaccacgttccgaggcaccgaactgagctttttggtgactacgcatcagcccacaaacctggtgctacctagcaacggatcgatgcacaattactgcccccagcaaacaaagataactagcgcctttaaatatatcaacacagtcatttcctgcaccatctttattgtgggcatggtggggaatgctacactgctgaggataatttaccaaaataagtgtatgagaaatggccctaatgccctcattgcgtctctcgcactcggcgatttaatttatgtggtgattgaccttccaatcaacgtctttaagttttatcaggacgtgaaggattggtggttgtttgggttttacttctgtatgccactggtctgcaccgcaatcttttatactctaatgacctgtgagatgctgaatcgacgcaatggatccctgaggatcgcactaagcgagcatcttaagcagcgaagggaagtcgctaaaaccgtgttttgtctcgtggttatttttgcattgtgttggtttcctcttcatctgagtcgaatcctgaagaagacagtgtacaacgagatggataagaatcgctgtgaactgctctctttcctgctgctgatggactatattggtattaatctggctacaatgaatagttgtattaaccccatcgccctgtactttgtatccaaaaagttcaaaaactgttttcagagttgtttgtgctgctgctgttaccaatctaagtctctgatgacaagcgtgccgatgaatggaacgtctatccagtggaaaaaccatgaccagaacaatcacaatacggatagatccagccacaaagactccatgaattag

SEQ ID NO: 64236 - DNA, 957 bp, Artificial Sequence
  derived and/or modified sequence
atggagaccctgtgcctgcgggccagcttctggctggccctggtgggttgtgttatatcagataacccagaacggtacagcacaaacttgagcaatcacgtagatgacttcacgacatttcgtggcacagaactgtcctttttagttactactcaccagcccacaaacctggtattaccttccaacggcagtatgcacaattattgccctcagcaaaccaaaattacctctgcattcaagtacatcaacacagtgatatcatgcaccatcttcattgtgggaatggtcggaaatgcaaccctgctgcggataatttaccagaacaagtgcatgcgcaatggacccaacgctttgatcgctagcctcgcacttggagatttgatatatgtagtgattgaccttccaattaacgtatttaaattctatcaggatgttaaggattggtggttatttggcttctacttttgtatgccactcgtgtgcaccgctatcttttacacgctgatgacctgtgagatgctgaatcgcagaaacggtagcctgcgtatagccttgagtgaacacctgaaacaacgaagagaagttgccaagacagtcttctgtcttgtcgtgatcttcgcattgtgttggttccccctccatctcagcagaattctgaagaagactgtctataacgaaatggataagaatcgctgcgaactactctcctttctgctgctgatggactacatcggcatcaatttggcgactatgaattcttgcatcaatcccatcgccctttacttcgtgagtaaaaaatttaagaattgttttcagtcctgcttgtgctgttgttgttaccagtctaagagcctgatgaccagtgtgcccatgaacggcacaagtatccagtggaagaatcatgatcagaacaaccataataccgatcgcagttcccataaggattccatgaattag

SEQ ID NO: 64237 - DNA, 486 bp, Artificial Sequence
  derived and/or modified sequence
atggagactttgtgtttgagagccagtttttggctcgcactcgtcggctgtgtcatctccgacaatccagaacgatattccactaatctgtccaaccacgtcgacgactttacaacctttcgtggcactgaactgtcattccttgtaactacgcatcagccgacaaacttagtgttacccagcaatgggtctatgcacaattattgtccacagcaaacaaaaattacgagcgctttcaagtatatcaataccgtcatcagctgtacaatcttcatcgtcggcatggttgggaatgcgaccctgctgaggatcatctaccagaataagtgtatgcgcaatgggcctaatgccctgattgcatctttggctttaggtgatctcatctatgtagtgattgacctgcctatcaatgtcttcaaagtccagtcaagttgtctgttggaatcatgcagtggcaactgggactccttcggcaactgtcactag

SEQ ID NO: 64238 - DNA, 957 bp, Artificial Sequence
  derived and/or modified sequence
atggagactctatgcctcagagcgagtttttggctcgccctggtgggatgcgtaataagcgacaacccagagcggtactctactaacctttctaatcatgtagacgacttcactacttttcgcggaacagaactctctttcctggtgacgactcatcaacctacgaatcttgtgctgcctagtaatgggagtatgcacaattactgcccgcaacaaaccaagattacttcagcatttaaatacatcaacacggtgatctcatgcaccatcttcatcgtcgggatggtggggaacgccactctccttcgcataatttaccagaacaagtgcatgcggaatgggcctaacgcccttattgccagccttgctcttggagacctcatctacgttgtgatcgatttgcccattaatgtcttcaaattttaccaagacgttaaggactggtggctgttcggcttttacttctgcatgccattagtgtgcactgcaattttttatacactaatgacgtgcgaaatgcttaatcgtcgcaacgggagtctgagaattgccctcagtgagcaccttaaacagaggcgtgaagtggccaaaactgtgttttgcttggtggtgatttttgcactgtgctggttccccctgcatctgtcccgcatcctgaaaaaaaccgtgtataacgagatggataagaatagatgcgaactactgtcattcctgcttctgatggactacattggcatcaatctggccaccatgaactcttgcatcaaccccattgctttatactttgtttccaagaaattcaagaattgcttccagagctgtctctgttgttgctgctaccagagtaaaagcctgatgacatctgtacctatgaatggcacctctatccagtggaaaaaccacgatcagaacaatcataatactgaccgctcttctcacaaggactccatgaactag

SEQ ID NO: 64239 - DNA, 957 bp, Artificial Sequence
  derived and/or modified sequence
atggagaccctgtgcctgcgggcatctttctggctggccctggtaggctgcgttattagcgataatcctgaacgctatagtactaacctttcaaatcacgtggatgattttaccacctttcgcggaaccgagctcagcttccttgtcactacccaccaacctactaacctagtcttgccgagtaatggctctatgcataattactgcccccagcagacaaaaataaccagtgcttttaaatacatcaacactgtgattagctgtaccatttttatagtgggaatggtgggaaatgctaccctgctgaggataatctatcaaaataagtgcatgcgcaacgggccaaacgcactcatcgcatctctcgccctcggcgacctgatttatgtggtcatcgatctccctattaacgtgttcaagttctatcaggatgtcaaggactggtggctgttcggcttttatttttgcatgcctttggtgtgcactgctattttttacacacttatgacttgcgagatgctgaacagaagaaatggcagccttcggatcgcactctcagagcatttaaagcagcgtcgcgaggtcgcaaaaaccgttttctgtctggtggtcatctttgctctttgctggttccctctgcacctgagccgcatcctgaaaaaaacagtttataacgagatggacaagaatagatgcgagcttctctcgtttctgctcttgatggactacatcggcatcaatctagcgaccatgaacagttgcatcaacccgatagccctgtatttcgtctctaaaaagtttaaaaactgcttccagagctgtctgtgttgttgttgttatcagtctaagagccttatgacgtcagtccccatgaacgggaccagcattcagtggaaaaatcacgatcagaataaccataataccgaccgtagttcacacaaagatagtatgaattag

SEQ ID NO: 64240 - DNA, 486 bp, Artificial Sequence
  derived and/or modified sequence
atggagaccctgtgcctgagagccagcttctggctggccctggtgggctgcgtgatcagcgacaaccccgagagatacagcaccaacctgagcaaccacgtggacgacttcaccaccttcagaggcaccgagctgagcttcctggtgaccacccaccagcccaccaacctggtgctgcccagcaacggcagcatgcacaactactgcccccagcagaccaagatcaccagcgccttcaagtacatcaacaccgtgatcagctgcaccatcttcatcgtgggcatggtgggcaacgccaccctgctgagaatcatctaccagaacaagtgcatgagaaacggccccaacgccctgatcgccagcctggccctgggcgacctgatctacgtggtgatcgacctgcccatcaacgtgttcaaggtgcagagcagctgcctgctggagagctgcagcggcaactgggacagcttcggcaactgccactag

SEQ ID NO: 64241 - DNA, 957 bp, Artificial Sequence
  derived and/or modified sequence
atggagaccctgtgcctgagagccagcttctggctggccctggtgggctgcgtgatcagcgacaaccccgagagatacagcaccaacctgagcaaccacgtggacgacttcaccaccttcagaggcaccgagctgagcttcctggtgaccacccaccagcccaccaacctggtgctgcccagcaacggcagcatgcacaactactgcccccagcagaccaagatcaccagcgccttcaagtacatcaacaccgtgatcagctgcaccatcttcatcgtgggcatggtgggcaacgccaccctgctgagaatcatctaccagaacaagtgcatgagaaacggccccaacgccctgatcgccagcctggccctgggcgacctgatctacgtggtgatcgacctgcccatcaacgtgttcaagttctaccaggacgtgaaggactggtggctgttcggcttctacttctgcatgcccctggtgtgcaccgccatcttctacaccctgatgacctgcgagatgctgaacagaagaaacggcagcctgagaatcgccctgagcgagcacctgaagcagagaagagaggtggccaagaccgtgttctgcctggtggtgatcttcgccctgtgctggttccccctgcacctgagcagaatcctgaagaagaccgtgtacaacgagatggacaagaacagatgcgagctgctgagcttcctgctgctgatggactacatcggcatcaacctggccaccatgaacagctgcatcaaccccatcgccctgtacttcgtgagcaagaagttcaagaactgcttccagagctgcctgtgctgctgctgctaccagagcaagagcctgatgaccagcgtgcccatgaacggcaccagcatccagtggaagaaccacgaccagaacaaccacaacaccgacagaagcagccacaaggacagcatgaactag

SEQ ID NO: 64242 - DNA, 3823 bp, Artificial Sequence
  derived and/or modified sequence
gggggcggcagctttgtgctttttagtggccgcgtcccaggatagctggaaggttaggacgctcttgcggtcccagagtggagtggaaggtctggagctttgggaggagacggggaggacagactggaggcgtgttcctccggagttttctttttcgtgcgagccctcgcgcgcgcgtacagtcatcccgctggtctgacgattgtggagaggcggtggagaggcttcatccatcccacccggtcgtcgccggggattggggtcccagcgagacctccccgggagaagcagtgcccaggaggttttctgaagccggggaagctgtgcagccgaagccgccgccgcgccggagcccgggacaccggccaccctccgcgccacccaccctcgccggctccggcttcctctggcccaggcgccgcgcggacccggcagctgtctgcgcacgccgagctccacggtgaaaaaaaagtgaaggtgtaaaagcagcacaagtgcaataagagatatttcctcaaatttgcctcaagatggaaaccctttgcctcagggcatccttttggctggcactggttggatgtgtaatcagtgataatcctgagagatacagcacaaatctaagcaatcatgtggatgatttcaccacttttcgtggcacagagctcagcttcctggttaccactcatcaacccactaatttggtcctacccagcaatggctcaatgcacaactattgcccacagcagactaaaattacttcagctttcaaatacattaacactgtgatatcttgtactattttcatcgtgggaatggtggggaatgcaactctgctcaggatcatttaccagaacaaatgtatgaggaatggccccaacgcgctgatagccagtcttgcccttggagaccttatctatgtggtcattgatctccctatcaatgtatttaagttctaccaagatgtaaaggactggtggctcttcgggttctatttctgtatgcccttggtgtgcactgcgatcttctacaccctcatgacttgtgagatgttgaacagaaggaatggcagcttgagaattgccctcagtgaacatcttaagcagcgtcgagaagtggcaaaaacagttttctgcttggttgtaatttttgctctttgctggttccctcttcatttaagccgtatattgaagaaaactgtgtataacgagatggacaagaaccgatgtgaattacttagtttcttactgctcatggattacatcggtattaacttggcaaccatgaattcatgtataaaccccatagctctgtattttgtgagcaagaaatttaaaaattgtttccagtcatgcctctgctgctgctgttaccagtccaaaagtctgatgacctcggtccccatgaacggaacaagcatccagtggaagaaccacgatcaaaacaaccacaacacagaccggagcagccataaggacagcatgaactgaccacccttagaagcactcctcggtactcccataatcctctcggagaaaaaaatcacaaggcaactgtgagtccgggaatctcttctctgatccttcttccttaattcactcccacacccaagaagaaatgctttccaaaaccgcaagggtagactggtttatccacccacaacatctacgaatcgtacttctttaattgatctaatttacatattctgcgtgttgtattcagcactaaaaaatggtgggagctgggggagaatgaagactgttaaatgaaaccagaaggatatttactacttttgcatgaaaatagagctttcaagtacatggctagcttttatggcagttctggtgaatgttcaatgggaactggtcaccatgaaactttagagattaacgacaagattttctactttttttaagtgatttttttgtccttcagccaaacacaatatgggctcaagtcacttttatttgaaatgtcatttggtgccagtattttttaactgcataatagcctaacatgattatttgaacttatttacacatagtttgaaaaaaaaaagacaaaaatagtattcaggtgagcaattagattagtattttccacgtcactgtttatttttttaaaacacaaattctaaagctacaacaaatactacaggcccttaaagcacagtctgatgacacatttggcagtttaatagatgttactcaaagaattttttaagaactgtattttattttttaaatggtgttttattacaagggaccttgaacatgttttgtatgttaaattcaaaagtaatgcttcaatcagatagttctttttcacaagttcaatctgtttttcatgtaaattttgtatgaaaaatcaatgtcaagtaccaaaatgttaatgtatgtgtcatttaactctgcctgagactttcagtgcactgtatatagaagtctaaaacacacctaagagaaaaagatcgaatttttcagatgattcagaaattttcattcaggtatttgtaatagtgacatatatatgtatatacatatcacctcctattctcttaatttttcttaaaatgttaactggcagtaagtcttttttgatcattcccttttccatataggaaacataattttgaagtggccagatgagtttatcatgtcagtgaaaaataattacccacaaatgccaccagaacttacgattcttcacttcttggggttttcagtatgaacctaactccccaccccaacatctccctcccacattgtcaccatttcaaagggcccacagtgacttttgctgggcattttcccagatgtttacagactgtgagtacagcagaaaatcttttactagtgtgtgtgtgtatatatataaacaattgtaaatttcttttagcccatttttctagactgtctctgtggaatatatttgtgtgtgtgatatatgcatgtgtgtgatggtatgtatggatttaatctaatctaataattgtgccccgcagttgtgccaaagtgcatagtctgagtaaaatctaggtgattgttcatcatgacaacctgcctcagtccattttaacctgtagcaaccttctgcattcataaatcttgtaatcatgttaccattacaaatgggatataagaggcagcgtgaaagcagatgagctgtggactagcaatatagggttttgtttggttggttggtttgataaagcagtatttggggtcatattgtttcctgtgctggagcaaaagtcattacactttgaagtattatattgttcttatcctcaattcaatgtggtgatgaaattgccaggttgtctgatatttctttcagacttcgccagacagattgctgataataaattaggtaagataatttgttgggccatattttaggacaggtaaaataacatcaggttccagttgcttgaattgcaaggctaagaagtactgcccttttgtgtgttagcagtcaaatctattattccactggcgcatcatatgcagtgatatatgcctataatataagccataggttcacaccattttgtttagacaattgtctttttttcaagatgctttgtttctttcatatgaaaaaaatgcattttataaattcagaaagtcatagatttctgaaggcgtcaacgtgcattttatttatggactggtaagtaactgtggtttactagcaggaatatttccaatttctacctttactacatcttttcaacaagtaactttgtagaaatgagccagaagccaaggccctgagttggcagtggcccataagtgtaaaataaaagtttacagaaaccttg

SEQ ID NO: 64243 - DNA, 1032 bp, Artificial Sequence
  derived and/or modified sequence
atggaaaccctttgcctcagggcatccttttggctggcactggttggatgtgtaatcagtgataatcctgagagatacagcacaaatctaagcaatcatgtggatgatttcaccacttttcgtggcacagagctcagcttcctggttaccactcatcaacccactaatttggtcctacccagcaatggctcaatgcacaactattgcccacagcagactaaaattacttcagctttcaaatacattaacactgtgatatcttgtactattttcatcgtgggaatggtggggaatgcaactctgctcaggatcatttaccagaacaaatgtatgaggaatggccccaacgcgctgatagccagtcttgcccttggagaccttatctatgtggtcattgatctccctatcaatgtatttaagttctaccaagatgtaaaggactggtggctcttcgggttctatttctgtatgcccttggtgtgcactgcgatcttctacaccctcatgacttgtgagatgttgaacagaaggaatggcagcttgagaattgccctcagtgaacatcttaagcagcgtcgagaagtggcaaaaacagttttctgcttggttgtaatttttgctctttgctggttccctcttcatttaagccgtatattgaagaaaactgtgtataacgagatggacaagaaccgatgtgaattacttagtttcttactgctcatggattacatcggtattaacttggcaaccatgaattcatgtataaaccccatagctctgtattttgtgagcaagaaatttaaaaattgtttccagtcatgcctctgctgctgctgttaccagtccaaaagtctgatgacctcggtccccatgaacggaacaagcatccagtggaagaaccacgatcaaaacaaccacaacacagaccggagcagccataaggacagcatgaactgaccacccttagaagcactcctcggtactcccataatcctctcggagaaaaaaatcacaaggcaactgtgagtccgg

SEQ ID NO: 64244 - protein, 452 aa, Artificial Sequence
  derived and/or modified sequence
MAAATGPSFWLGNETLKVPLALFALNRQRLCERLRKNPAVQAGSIVVLQGGEETQRYCTDTGVLFRQESFFHWAFGVTEPGCYGVIDVDTGKSTLFVPRLPASHATWMGKIHSKEHFKEKYAVDDVQYVDEIASVLTSQKPSVLLTLRGVNTDSGSVCREASFDGISKFEVNNTILHPEIVECLFEHYCYSRGGMRHSSYTCICGSGENSAVLHYGHAGAPNDRTIQNGDMCLFDMGGEYYCFASDITCSFPANGKFTADQKAVYEAVLRSSRAVMGAMKPGVWWPDMHRLADRIHLEELAHMGILSGSVDAMVQAHLGAVFMPHGLGHFLGIDVHDVGGYPEGVERIDEPGLRSLRTARHLQPGMVLTVEPGIYFIDHLLDEALADPARASFLNREVLQRFRGFGGVRIEEDVVVTDSGIELLTCVPRTVEEIEACMAGCDKAFTPFSGPK

SEQ ID NO: 64245 - DNA, 1359 bp, Artificial Sequence
  derived and/or modified sequence
atggcagccgcaacaggtccttccttctggctgggcaacgaaaccttgaaagtgccactcgccctcttcgctctaaatagacagagactgtgcgaaaggcttcggaagaacccagctgtccaggcaggttccatcgtggtgctgcagggcggcgaggaaactcagcgctactgcacagatactggcgtactatttcgacaggagagcttcttccattgggcgttcggagtgacagaacccgggtgctacggcgtgatcgacgtagacacaggaaaatccacactcttcgtgccaagattgccagcttcacacgctacatggatgggaaagatccactcgaaggagcactttaaggagaaatacgccgtggacgacgtgcagtatgtagatgagattgcatctgtccttacctcccagaagccatccgtacttcttactctccggggtgtaaacacagactctggatcagtatgtagagaagcaagtttcgacggtattagcaaattcgaggtgaataacacaatactccaccccgagattgtggagtgcctcttcgaacactattgctattctagaggcgggatgaggcactcatcctacacttgtatctgcggctcgggagaaaacagcgcagtgctccattacgggcacgccggagccccgaatgaccgtaccatccagaacggcgacatgtgcctatttgatatgggcggagagtattattgtttcgctagtgacatcacctgtagcttccctgctaacggcaagttcacagccgaccagaaggctgtctacgaggctgtgctgagaagctctagagctgtgatgggtgctatgaagcctggcgtttggtggccagacatgcacaggctagccgacaggattcacctggaagaacttgctcacatgggaattctctctggatctgtcgatgccatggtccaggctcatttgggcgcagtatttatgcctcatggtctggggcatttcctggggatcgacgtgcacgatgtgggcggctatccagagggggtggagcgcattgacgaacccgggctgcgaagcctgagaacggccagacatctgcaaccagggatggtacttactgtggagccgggcatttattttatcgaccatctgttggacgaggcgctcgccgatccagccagagccagctttcttaatcgggaggtgctccaaaggtttcggggatttggaggagttcgcattgaggaagacgtagtcgtcacagacagcggcattgaactgctgacttgcgttccgagaactgtggaggaaatcgaggcatgcatggcaggatgcgataaagcatttacacctttttcaggacccaagtag

SEQ ID NO: 64246 - DNA, 1359 bp, Artificial Sequence
  derived and/or modified sequence
atggctgctgccaccggccccagcttctggctgggcaatgagaccctgaaggtgcccctggccctgtttgccctgaaccggcagaggctgtgtgagcggctgaggaagaacccagctgtgcaggccggcagcatcgtggtgctgcagggcggggaggagacccagcgctactgcacagacacaggagtgctcttccggcaggagagcttcttccactgggcctttggagtgacagagcccggctgctatggagtgattgatgtggacaccgggaagagcaccctgtttgtgccccggctgcctgccagccacgccacctggatgggcaagatccacagcaaggagcacttcaaggagaagtatgctgtggatgatgtgcagtatgtggatgagatcgcctctgtgctgaccagccagaagcccagcgtgctgctgaccctgcggggcgtgaacacagacagcggctctgtgtgccgggaggccagctttgatggcatcagcaagtttgaggtgaacaacaccatcctgcaccctgagatcgtggagtgcctgtttgagcactactgctacagcagaggaggcatgaggcacagcagctacacctgcatctgtggcagcggggagaacagcgctgtgctgcactacggccacgccggggccccaaatgacaggaccatccagaatggagacatgtgcctgtttgacatgggcggggagtactactgctttgccagtgacatcacctgcagcttccctgccaacgggaagttcaccgctgaccagaaggctgtgtatgaagctgtgctgcggagcagcagagctgtgatgggcgccatgaagccaggagtgtggtggccagacatgcaccggctggccgaccgcatccacctggaggagctggcccacatgggcatcctgagcggctctgtggatgccatggtgcaggcccacctgggcgctgtgttcatgcctcatggcctgggccacttcctgggcattgatgtgcatgatgtgggcggctacccagagggcgtggagagaattgatgagcccggcctgcggagcctgaggacagcccggcacctgcagcccggcatggtgctgactgtggagcccggcatctacttcatcgaccacctgctggatgaggccctggccgaccctgcccgggccagcttcctgaaccgggaggtgctgcagcgcttccggggctttggaggagtgcgcatcgaggaggatgtggtggtgacagattctggaattgagctgctgacctgtgtgcccaggacagtggaggagattgaggcctgcatggccggctgtgacaaggccttcacccccttcagcggccccaagtag

SEQ ID NO: 64247 - DNA, 1359 bp, Artificial Sequence
  derived and/or modified sequence
atggccgccgccaccggccccagcttctggctgggcaacgagaccctgaaggtacctctggccctgtttgccctgaacagacaacggttgtgcgaaaggttgcgaaaaaaccccgcagtgcaggcaggcagcatcgtcgttcttcagggcggtgaggagacccagagatattgtactgacaccggggttctgttcaggcaggaaagcttcttccactgggcctttggggtgacagaacccgggtgttacggcgtcattgacgtggacaccgggaagagcaccctgtttgtgcctaggcttccagcttcgcacgccacctggatggggaaaatccacagtaaagagcattttaaggagaagtacgcggtagatgatgttcagtacgtagacgagattgcctctgtcctcaccagccaaaaacccagtgtacttctgaccctgcgcggggttaataccgactcaggatcagtgtgcagagaagcttcttttgatggaattagtaaattcgaggtcaataacaccattctgcacccagaaatcgtggaatgcctgtttgaacactattgctatagcagaggcgggatgcgccatagcagttacacctgtatctgtggctctggggagaattcggccgtcttacactatggccacgctggtgcacccaatgaccgcacgatccagaacggagacatgtgcctctttgatatgggaggcgaatattattgcttcgcaagcgatataacctgtagttttcccgccaatggaaaattcaccgcggatcagaaggctgtgtacgaggcagttcttcggtcgtccagggccgtgatgggggccatgaaacctggagtgtggtggccagacatgcatcgattggctgatcgaatccacctggaggagcttgcgcatatgggcatcttaagcggatctgtggacgccatggtgcaggcgcatttaggcgccgtctttatgccgcatgggctgggccattttctggggattgacgtgcacgatgtaggcgggtacccagaaggagttgagcgtattgacgagccagggctgaggtccctgcgaactgctaggcacctgcaacccggcatggttctgactgtagaacctggtatctatttcatcgaccaccttctggacgaggcactggctgatcccgcccgggcttcttttctgaaccgagaggttctccagagattcagaggattcggaggggtgagaatcgaggaagacgtagtggtcactgacagtgggatagagctgctcacatgcgttcctagaacagtcgaggagattgaagcttgcatggccggatgcgacaaggctttcacaccattttccggccccaagtag

SEQ ID NO: 64248 - DNA, 1887 bp, Artificial Sequence
  derived and/or modified sequence
atttggctctggaggaggtgggtcaaggactccatgccccgccccctgccccgcccttaccccgccccatgcattggcacccggaggggctcagctgacgccgcacttcacgtgacgccggtgccgggcgaacatggcggcggccaccggaccctcgttttggctggggaatgaaaccctgaaggtgccgctggcgctctttgccttgaaccggcagcgcctgtgtgagcggctgcggaagaaccctgctgtgcaggccggctccatcgtggtcctgcagggcggggaggagactcagcgctactgcaccgacaccggggtcctcttccgccaggagtccttctttcactgggcgttcggtgtcactgagccaggctgctatggtgtcatcgatgttgacactgggaagtcgaccctgtttgtgcccaggcttcctgccagccatgccacctggatgggaaagatccattccaaggagcacttcaaggagaagtatgccgtggacgacgtccagtacgtagatgagattgccagcgtcctgacgtcacagaagccctctgtcctcctcactttgcgtggcgtcaacacggacagcggcagtgtctgcagggaggcctcctttgacggcatcagcaagttcgaagtcaacaataccattcttcacccagagatcgttgagtgcctcttcgagcactactgctactcccggggcggcatgcgccacagctcctacacctgcatctgcggcagtggtgagaactcagccgtgctacactacggacacgccggagctcccaacgaccgaacgatccagaatggggatatgtgcctgttcgacatgggcggtgagtattactgcttcgcttccgacatcacctgctcctttcccgccaacggcaagttcactgcagaccagaaggccgtctatgaggcagtgctgcggagctcccgtgccgtcatgggtgccatgaagccaggtgtctggtggcctgacatgcaccgcctggctgaccgcatccacctggaggagctggcccacatgggcatcctgagcggcagcgtggacgccatggtccaggctcacctgggggccgtgtttatgcctcacgggcttggccacttcctgggcattgacgtgcacgacgtgggaggctacccagagggcgtggagcgcatcgacgagcccggcctgcggagcctgcgcactgcacggcacctgcagccaggcatggtgctcaccgtggagccgggcatctacttcatcgaccacctcctggatgaggccctggcggacccggcccgcgcctccttccttaaccgcgaggtcctgcagcgctttcgcggttttggcggggtccgcatcgaggaggacgtcgtggtgactgacagcggcatagagctgctgacctgcgtgccccgcactgtggaagagattgaagcatgcatggcaggctgtgacaaggcctttacccccttctctggccccaagtagagccagccagaaatcccagcgcacctgggggcctggccttgcaacctcttttcgtgatgggcagcctgctggtcagcactccagtagcgagagacggcacccagaatcagatcccagcttcggcatttgatcagaccaaacagtgctgtttcccggggaggaaacacttttttaattacccttttgcaggctcccacctttaatctgttttataccttgcttattaaatgagcgacttaaaatgattgaaaataatgctgttctttagtagcaactaaaatgtgtcttgctgtcatttatattccttttcccaggaaagaagcatttctgatactttctgtcaaaaatcaatatgcagaatggcatttgcaataaaaggtttcctaaaatggtcc

SEQ ID NO: 64249 - DNA, 1359 bp, Artificial Sequence
  derived and/or modified sequence
atggcagctgctacaggaccaagtttttggctcgggaatgaaactcttaaggttcccttggccctgttcgccctgaatcgccagagactgtgcgaacggctccgcaagaaccccgctgttcaggcagggtcaattgttgtgcttcagggtggggaagaaactcagcgctactgcacagatacaggagtcctctttcgtcaagagtccttttttcactgggcctttggcgtcacagaacctggatgctacggagtgattgacgtagatacgggcaagagtactcttttcgtccccagacttcccgcttctcatgccacctggatgggaaagattcactcaaaagagcactttaaggagaagtatgctgtcgatgatgtacagtacgtggacgagattgccagtgtgctcacgagccagaaaccctctgtcctgttgactttgcgaggtgtgaacacagattctggatccgtgtgccgagaagcttccttcgacgggatcagcaagttcgaagtgaacaacactatcctgcacccggagattgtggaatgcttgtttgaacattactgttactcaagaggtggaatgcgtcactcctcatacacctgcatctgcgggagcggcgaaaattcagcggtactgcactacggacacgcaggggctccaaatgatcgcactattcagaatggggacatgtgtctgtttgatatgggcggagagtattactgtttcgccagtgatatcacgtgcagttttcccgctaatggaaaattcacagccgatcagaaagctgtgtacgaagccgtcttgcgcagctcgcgcgcagtcatgggagctatgaagccaggggtctggtggcctgacatgcacagacttgccgatagaatacacctggaggagctggcacatatgggcatcttaagcggatctgtggatgccatggtgcaggcacacttaggtgccgtatttatgccccatggtctaggccacttcctggggatagacgttcacgatgtgggaggctacccagaaggcgtagaaagaatcgacgaacccggactgaggtctcttcgcacagccagacacctacagcctgggatggttctgaccgtagaaccaggaatatactttatagaccacctgctggatgaagccctcgctgatcccgctcgggcttcgttcctgaatagagaagtgttacaacggttccggggattcggaggggtacgaatcgaggaagacgtggtagtcacggattccggaatcgaattgctgacctgcgtgccacggactgttgaagaaattgaggcctgtatggctggctgcgacaaggcattcacccccttttccggacccaagtag

SEQ ID NO: 64250 - DNA, 1359 bp, Artificial Sequence
  derived and/or modified sequence
atggccgccgccaccggccccagcttctggctgggcaacgagaccctgaaggtgcccctggccctgttcgccctgaacagacagagactgtgcgagagactgagaaagaaccccgccgtgcaggccggcagcatcgtggtgctgcagggcggcgaggagacccagagatactgcaccgacaccggcgtgctgttcagacaggagagcttcttccactgggccttcggcgtgaccgagcccggctgctacggcgtgatcgacgtggacaccggcaagagcaccctgttcgtgcccagactgcccgccagccacgccacctggatgggcaagatccacagcaaggagcacttcaaggagaagtacgccgtggacgacgtgcagtacgtggacgagatcgccagcgtgctgaccagccagaagcccagcgtgctgctgaccctgagaggcgtgaacaccgacagcggcagcgtgtgcagagaggccagcttcgacggcatcagcaagttcgaggtgaacaacaccatcctgcaccccgagatcgtggagtgcctgttcgagcactactgctacagcagaggcggcatgagacacagcagctacacctgcatctgcggcagcggcgagaacagcgccgtgctgcactacggccacgccggcgcccccaacgacagaaccatccagaacggcgacatgtgcctgttcgacatgggcggcgagtactactgcttcgccagcgacatcacctgcagcttccccgccaacggcaagttcaccgccgaccagaaggccgtgtacgaggccgtgctgagaagcagcagagccgtgatgggcgccatgaagcccggcgtgtggtggcccgacatgcacagactggccgacagaatccacctggaggagctggcccacatgggcatcctgagcggcagcgtggacgccatggtgcaggcccacctgggcgccgtgttcatgccccacggcctgggccacttcctgggcatcgacgtgcacgacgtgggcggctaccccgagggcgtggagagaatcgacgagcccggcctgagaagcctgagaaccgccagacacctgcagcccggcatggtgctgaccgtggagcccggcatctacttcatcgaccacctgctggacgaggccctggccgaccccgccagagccagcttcctgaacagagaggtgctgcagagattcagaggcttcggcggcgtgagaatcgaggaggacgtggtggtgaccgacagcggcatcgagctgctgacctgcgtgcccagaaccgtggaggagatcgaggcctgcatggccggctgcgacaaggccttcacccccttcagcggccccaagtag

SEQ ID NO: 64251 - protein, 429 aa, Artificial Sequence
  derived and/or modified sequence
MAAATGPSFWLGNETLKVPLALFALNRQRLCERLRKNPAVQAGSIVVLQGGEETQRYCTDTGVLFRQIASVLTSQKPSVLLTLRGVNTDSGSVCREASFDGISKFEVNNTILHPEIVECRVFKTDMELEVLRYTNKISSEAHREVMKAVKVGMKEYELESLFEHYCYSRGGMRHSSYTCICGSGENSAVLHYGHAGAPNDRTIQNGDMCLFDMGGEYYCFASDITCSFPANGKFTADQKAVYEAVLRSSRAVMGAMKPGVWWPDMHRLADRIHLEELAHMGILSGSVDAMVQAHLGAVFMPHGLGHFLGIDVHDVGGYPEGVERIDEPGLRSLRTARHLQPGMVLTVEPGIYFIDHLLDEALADPARASFLNREVLQRFRGFGGVRIEEDVVVTDSGIELLTCVPRTVEEIEACMAGCDKAFTPFSGPK

SEQ ID NO: 64252 - DNA, 1290 bp, Artificial Sequence
  derived and/or modified sequence
atggcagccgccaccgggccatccttttggctcggcaatgagactttgaaggtcccactggcattgtttgccctcaacagacaacgcctatgtgagcggctgagaaagaatccagcggtgcaggcagggtccattgtcgttttgcagggcggtgaagagacgcaaaggtactgcaccgacacaggagtcttgtttcgccagattgctagcgtgctgacatctcagaagccatctgtcctcctgacactgcgaggggtgaacactgactctgggtccgtttgccgtgaagcctctttcgacggaatcagtaagtttgaagtaaacaataccattttgcacccggaaatcgtagaatgccgggtatttaaaactgatatggagcttgaggtactgcggtatactaacaaaattagctccgaagcacacagagaagtgatgaaggccgtgaaagtgggcatgaaggagtacgagctagaaagcctgtttgagcactattgctattctcgcggcggtatgagacactcgagctacacctgcatttgtggttccggggagaactctgccgtcctacattatggccatgctggagcccctaatgacaggaccattcagaatggggatatgtgtttgttcgacatggggggagaatattattgttttgcaagcgacattacgtgttccttccctgccaatggaaaatttaccgccgatcagaaggccgtttacgaggcggttctgcgctcctcgagagcggtcatgggcgccatgaaacctggggtgtggtggcccgacatgcatcgcttggccgatcgaattcacctcgaagagctggcacatatgggcatcctgtctggcagcgtcgatgcgatggtccaggctcatttgggggcagtctttatgccacatggtctgggtcattttctcggtattgacgtccatgacgtgggaggctaccctgagggcgtggaaagaatcgacgagccaggcctccgatctctgagaacagcgcgccacctacagccaggtatggtgctgactgtggagcctggcatctatttcatagaccatctgctggacgaagccctcgctgaccccgcacgagctagttttctcaaccgggaagtgctgcaaagattccgaggatttggtggcgtaaggattgaggaagacgtcgtggtgacagatagtggaattgagctgcttacctgcgtaccccgcacggtcgaggaaattgaggcttgcatggcaggatgtgataaggcttttacgcccttcagcgggcctaagtag

SEQ ID NO: 64253 - DNA, 1290 bp, Artificial Sequence
  derived and/or modified sequence
atggctgctgccaccggccccagcttctggctgggcaatgagaccctgaaggtgcccctggccctgtttgccctgaaccggcagaggctgtgtgagcggctgaggaagaacccagctgtgcaggccggcagcatcgtggtgctgcagggcggggaggagacccagcgctactgcacagacacaggagtgctcttccggcagatcgcctctgtgctgaccagccagaagcccagcgtgctgctgaccctgcggggcgtgaacacagacagcggctctgtgtgccgggaggccagctttgatggcatcagcaagtttgaggtgaacaacaccatcctgcaccctgagatcgtggagtgcagggtcttcaagacagacatggagctggaggtgctgcgctacaccaacaagatcagcagcgaggcccaccgggaggtgatgaaggctgtgaaggtgggcatgaaggagtatgagctggagagcctgtttgagcactactgctacagccggggcggcatgaggcacagcagctacacctgcatctgtggcagcggagaaaattctgctgtgctgcactacggccatgctggggccccaaatgacaggaccatccagaatggagacatgtgcctgtttgacatgggcggggagtactactgctttgccagtgacatcacctgcagcttccctgccaacgggaagttcaccgctgaccagaaggctgtgtatgaggccgtgctgcggagcagcagagctgtgatgggcgccatgaagccaggagtgtggtggccagacatgcaccggctggccgaccgcatccacctggaggagctggcccacatgggcatcctgagcggctctgtggatgccatggtgcaggcccacctgggcgctgtgttcatgccccacggcctgggccacttcctgggcattgatgtgcatgatgtgggcggctacccagagggcgtggagagaattgatgagcccggcctgcggagcctgaggacagcccggcacctgcagcccggcatggtgctgactgtggagcccggcatctacttcatcgaccacctgctggatgaggccctggccgaccctgcccgggccagcttcctgaaccgggaggtgctgcagcgcttccggggctttggaggagtgagaattgaagaagatgtggtggtgacagacagcggcatcgagctgctgacctgtgtgcccaggacagtggaggagattgaggcctgcatggccggctgtgacaaggccttcacccccttcagcggccccaagtag

SEQ ID NO: 64254 - DNA, 1290 bp, Artificial Sequence
  derived and/or modified sequence
atggccgccgccaccggccccagcttctggctgggcaacgagaccttgaaggtgcctcttgcgctgttcgcgttaaatcgccagcggctctgcgagagactgcggaagaaccctgccgtccaggccggcagtattgtggtcctgcaagggggcgaagagacgcagaggtactgtacagacactggtgtgctgttccgtcagattgcttcagttttgacctcacagaagccatcagtgctgctcacactgaggggtgtcaacaccgatagtggttccgtttgtcgcgaagcctcctttgacggcataagcaagttcgaagtaaacaacaccatcctccaccccgaaattgtggagtgtcgggttttcaaaactgatatggaactggaggtgctgcgctacactaacaagattagcagcgaagcacaccgcgaagtgatgaaagccgttaaggtcggtatgaaggagtacgagttggaatccctctttgagcactattgttactctcggggcggaatgaggcatagcagctatacgtgcatctgcggctcaggagagaattctgctgttctgcactacggtcatgccggcgcgcctaatgatcgtactatccagaacggcgatatgtgtctcttcgatatgggcggagaatactattgcttcgcttctgatattacctgttctttcccagcaaacggaaaatttacagctgaccagaaagctgtgtatgaagccgtgttgaggtccagtagagcagtgatgggggctatgaagccaggcgtttggtggcccgacatgcatcgcctggctgatagaattcacctggaggagctagcccacatggggatcctaagcggcagcgtggatgcaatggtgcaggctcaccttggcgcagtctttatgccccacggccttggacacttcctaggcatcgacgtccatgacgtggggggttaccccgaaggtgtggagcgaattgatgagccaggcttgcggtcattgcgcacagccaggcacctacagcccgggatggtgctgactgtggagccggggatttatttcatagatcatctactcgatgaagcccttgctgatccagcacgcgcgagctttctcaatcgtgaggtcctgcaacggtttagagggtttgggggtgtacgcattgaggaagacgtcgtcgtgaccgactcaggcattgaactgctgacatgtgtgccgcggacggtggaggagatcgaagcttgtatggcgggttgtgacaaggcgtttacccctttctccgggccaaagtag

SEQ ID NO: 64255 - DNA, 1818 bp, Artificial Sequence
  derived and/or modified sequence
atttggctctggaggaggtgggtcaaggactccatgccccgccccctgccccgcccttaccccgccccatgcattggcacccggaggggctcagctgacgccgcacttcacgtgacgccggtgccgggcgaacatggcggcggccaccggaccctcgttttggctggggaatgaaaccctgaaggtgccgctggcgctctttgccttgaaccggcagcgcctgtgtgagcggctgcggaagaaccctgctgtgcaggccggctccatcgtggtcctgcagggcggggaggagactcagcgctactgcaccgacaccggggtcctcttccgccagattgccagcgtcctgacgtcacagaagccctctgtcctcctcactttgcgtggcgtcaacacggacagcggcagtgtctgcagggaggcctcctttgacggcatcagcaagttcgaagtcaacaataccattcttcacccagagatcgttgagtgccgagtgtttaagacggatatggagctggaggttctgcgctataccaataaaatctccagcgaggcccaccgtgaggtaatgaaggctgtaaaagtgggaatgaaagaatatgagttggaaagcctcttcgagcactactgctactcccggggcggcatgcgccacagctcctacacctgcatctgcggcagtggtgagaactcagccgtgctacactacggacacgccggagctcccaacgaccgaacgatccagaatggggatatgtgcctgttcgacatgggcggtgagtattactgcttcgcttccgacatcacctgctcctttcccgccaacggcaagttcactgcagaccagaaggccgtctatgaggcagtgctgcggagctcccgtgccgtcatgggtgccatgaagccaggtgtctggtggcctgacatgcaccgcctggctgaccgcatccacctggaggagctggcccacatgggcatcctgagcggcagcgtggacgccatggtccaggctcacctgggggccgtgtttatgcctcacgggcttggccacttcctgggcattgacgtgcacgacgtgggaggctacccagagggcgtggagcgcatcgacgagcccggcctgcggagcctgcgcactgcacggcacctgcagccaggcatggtgctcaccgtggagccgggcatctacttcatcgaccacctcctggatgaggccctggcggacccggcccgcgcctccttccttaaccgcgaggtcctgcagcgctttcgcggttttggcggggtccgcatcgaggaggacgtcgtggtgactgacagcggcatagagctgctgacctgcgtgccccgcactgtggaagagattgaagcatgcatggcaggctgtgacaaggcctttacccccttctctggccccaagtagagccagccagaaatcccagcgcacctgggggcctggccttgcaacctcttttcgtgatgggcagcctgctggtcagcactccagtagcgagagacggcacccagaatcagatcccagcttcggcatttgatcagaccaaacagtgctgtttcccggggaggaaacacttttttaattacccttttgcaggctcccacctttaatctgttttataccttgcttattaaatgagcgacttaaaatgattgaaaataatgctgttctttagtagcaactaaaatgtgtcttgctgtcatttatattccttttcccaggaaagaagcatttctgatactttctgtcaaaaatcaatatgcagaatggcatttgcaataaaaggtttcctaaaatggtcc

SEQ ID NO: 64256 - DNA, 1290 bp, Artificial Sequence
  derived and/or modified sequence
atggccgctgcgacaggtccttcgttttggttgggcaatgaaaccctgaaagtccccttagcactcttcgccttgaaccgccagcgactgtgcgagagacttagaaaaaatcctgcggtgcaggcagggtccatagtggtccttcaaggaggagaggagacgcagaggtactgtactgataccggcgtgttgttccgccagatagcttcagttctcacttctcagaagcctagtgtcctgttgactctgcggggtgttaatacagattcgggatccgtgtgtcgtgaagcctcctttgacggcatcagcaagttcgaggtcaacaacacaattctccaccctgaaatcgttgaatgccgagtgtttaaaacggatatggagctcgaggtcttaagatacactaataagattagctccgaggcacaccgagaagtcatgaaggccgttaaagtggggatgaaggagtatgagctggaatcactgttcgaacattactgctactcacggggaggaatgcgacatagctcatacacgtgtatttgtggcagcggagagaattcggcggtgctgcactatggccatgctggcgcaccaaatgacagaacaatacagaatggggatatgtgcttgttcgacatgggcggagagtactactgttttgccagcgatatcacttgttcattccctgcgaacgggaagtttactgccgatcaaaaagctgtgtacgaagccgtcctgcggtctagcagggccgttatgggcgcaatgaagcctggcgtctggtggcctgacatgcataggctggccgacaggattcatctcgaggagttagctcacatgggtattttatctggctccgtagacgccatggtccaagctcacctcggggcagtgttcatgccacatggtttagggcactttctggggattgatgtgcacgatgtcgggggttacccagagggagtcgagcgtattgatgaacctgggctcaggtcgttgcgcacagcacgacacctgcagcctggaatggtgctgaccgttgagcctggtatatacttcattgaccatctgttagacgaggcgttggccgatccagccagagcttccttccttaacagagaagttctgcagcgattcagaggcttcgggggtgttagaatcgaggaagatgtggtggtgacagattctgggatagagctgcttacctgcgtgcctagaaccgttgaggagatcgaggcatgcatggcgggttgcgataaggcttttactccgttcagcgggccaaaatag

SEQ ID NO: 64257 - DNA, 1290 bp, Artificial Sequence
  derived and/or modified sequence
atggccgccgccaccggccccagcttctggctgggcaacgagaccctgaaggtgcccctggccctgttcgccctgaacagacagagactgtgcgagagactgagaaagaaccccgccgtgcaggccggcagcatcgtggtgctgcagggcggcgaggagacccagagatactgcaccgacaccggcgtgctgttcagacagatcgccagcgtgctgaccagccagaagcccagcgtgctgctgaccctgagaggcgtgaacaccgacagcggcagcgtgtgcagagaggccagcttcgacggcatcagcaagttcgaggtgaacaacaccatcctgcaccccgagatcgtggagtgcagagtgttcaagaccgacatggagctggaggtgctgagatacaccaacaagatcagcagcgaggcccacagagaggtgatgaaggccgtgaaggtgggcatgaaggagtacgagctggagagcctgttcgagcactactgctacagcagaggcggcatgagacacagcagctacacctgcatctgcggcagcggcgagaacagcgccgtgctgcactacggccacgccggcgcccccaacgacagaaccatccagaacggcgacatgtgcctgttcgacatgggcggcgagtactactgcttcgccagcgacatcacctgcagcttccccgccaacggcaagttcaccgccgaccagaaggccgtgtacgaggccgtgctgagaagcagcagagccgtgatgggcgccatgaagcccggcgtgtggtggcccgacatgcacagactggccgacagaatccacctggaggagctggcccacatgggcatcctgagcggcagcgtggacgccatggtgcaggcccacctgggcgccgtgttcatgccccacggcctgggccacttcctgggcatcgacgtgcacgacgtgggcggctaccccgagggcgtggagagaatcgacgagcccggcctgagaagcctgagaaccgccagacacctgcagcccggcatggtgctgaccgtggagcccggcatctacttcatcgaccacctgctggacgaggccctggccgaccccgccagagccagcttcctgaacagagaggtgctgcagagattcagaggcttcggcggcgtgagaatcgaggaggacgtggtggtgaccgacagcggcatcgagctgctgacctgcgtgcccagaaccgtggaggagatcgaggcctgcatggccggctgcgacaaggccttcacccccttcagcggccccaagtag

SEQ ID NO: 64258 - protein, 730 aa, Artificial Sequence
  derived and/or modified sequence
MIVFLVFKHLFSLRLITMFFLLHFIVLINVKDFALTQGSMITPSCQKGYFPCGNLTKCLPRAFHCDGKDDCGNGADEENCGDTSGWATIFGTVHGNANSVALTQECFLKQYPQCCDCKETELECVNGDLKSVPMISNNVTLLSLKKNKIHSLPDKVFIKYTKLKKIFLQHNCIRHISRKAFFGLCNLQILYLNHNCITTLRPGIFKDLHQLTWLILDDNPITRISQRLFTGLNSLFFLSMVNNYLEALPKQMCAQMPQLNWVDLEGNRIKYLTNSTFLSCDSLTVLDLSSNTITELSPHLFKDLKLLQKLNLSSNPLMYLHKNQFESLKQLQSLDLERIEIPNINTRMFQPMKNLSHIYFKNFRYCSYAPHVRICMPLTDGISSFEDLLANNILRIFVWVIAFITCFGNLFVIGMRSFIKAENTTHAMSIKILCCADCLMGVYLFFVGIFDIKYRGQYQKYALLWMESVQCRLMGFLAMLSTEVSVLLLTYLTLEKFLVIVFPFSNIRPGKRQTSVILICIWMAGFLIAVIPFWNKDYFGNFYGKNGVCFPLYYDQTEDIGSKGYSLGIFLGVNLLAFLIIVFSYITMFCSIQKTALQTTEVRNCFGREVAVANRFFFIVFSDAICWIPVFVVKILSLFRVEIPDTMTSWIVIFFLPVNSALNPILYTLTTNFFKDKLKQLLHKHQRKSIFKIKKKSLSTSIVWIEDSSSLKLGVLNKITLGDSIMKPVS

SEQ ID NO: 64259 - DNA, 2193 bp, Artificial Sequence
  derived and/or modified sequence
atgatcgtgttcctggtgttcaagcacctgttcagcctgagactgatcaccatgttcttcctgctgcacttcatcgtgctgatcaacgtgaaggacttcgccctgacccagggcagcatgatcacccccagctgccagaagggctacttcccctgcggcaacctgaccaagtgcctgcccagagccttccactgcgacggcaaggacgactgcggcaacggcgccgacgaggagaactgcggcgacaccagcggctgggccaccatcttcggcaccgtgcacggcaacgccaacagcgtggccctgacccaggagtgcttcctgaagcagtacccccagtgctgcgactgcaaggagaccgagctggagtgcgtgaacggcgacctgaagagcgtgcccatgatcagcaacaacgtgaccctgctgagcctgaagaagaacaagatccacagcctgcccgacaaggtgttcatcaagtacaccaagctgaagaagatcttcctgcagcacaactgcatcagacacatcagcagaaaggccttcttcggcctgtgcaacctgcagatcctgtacctgaaccacaactgcatcaccaccctgagacccggcatcttcaaggacctgcaccagctgacctggctgatcctggacgacaaccccatcaccagaatcagccagagactgttcaccggcctgaacagcctgttcttcctgagcatggtgaacaactacctggaggccctgcccaagcagatgtgcgcccagatgccccagctgaactgggtggacctggagggcaacagaatcaagtacctgaccaacagcaccttcctgagctgcgacagcctgaccgtgctggacctgagcagcaacaccatcaccgagctgagcccccacctgttcaaggacctgaagctgctgcagaagctgaacctgagcagcaaccccctgatgtacctgcacaagaaccagttcgagagcctgaagcagctgcagagcctggacctggagagaatcgagatccccaacatcaacaccagaatgttccagcccatgaagaacctgagccacatctacttcaagaacttcagatactgcagctacgccccccacgtgagaatctgcatgcccctgaccgacggcatcagcagcttcgaggacctgctggccaacaacatcctgagaatcttcgtgtgggtgatcgccttcatcacctgcttcggcaacctgttcgtgatcggcatgagaagcttcatcaaggccgagaacaccacccacgccatgagcatcaagatcctgtgctgcgccgactgcctgatgggcgtgtacctgttcttcgtgggcatcttcgacatcaagtacagaggccagtaccagaagtacgccctgctgtggatggagagcgtgcagtgcagactgatgggcttcctggccatgctgagcaccgaggtgagcgtgctgctgctgacctacctgaccctggagaagttcctggtgatcgtgttccccttcagcaacatcagacccggcaagagacagaccagcgtgatcctgatctgcatctggatggccggcttcctgatcgccgtgatccccttctggaacaaggactacttcggcaacttctacggcaagaacggcgtgtgcttccccctgtactacgaccagaccgaggacatcggcagcaagggctacagcctgggcatcttcctgggcgtgaacctgctggccttcctgatcatcgtgttcagctacatcaccatgttctgcagcatccagaagaccgccctgcagaccaccgaggtgagaaactgcttcggcagagaggtggccgtggccaacagattcttcttcatcgtgttcagcgacgccatctgctggatccccgtgttcgtggtgaagatcctgagcctgttcagagtggagatccccgacaccatgaccagctggatcgtgatcttcttcctgcccgtgaacagcgccctgaaccccatcctgtacaccctgaccaccaacttcttcaaggacaagctgaagcagctgctgcacaagcaccagagaaagagcatcttcaagatcaagaagaagagcctgagcaccagcatcgtgtggatcgaggacagcagcagcctgaagctgggcgtgctgaacaagatcaccctgggcgacagcatcatgaagcccgtgagctag

SEQ ID NO: 64260 - DNA, 2193 bp, Artificial Sequence
  derived and/or modified sequence
atgatagttttcctcgtcttcaagcacctattctctcttcgcttgatcacgatgtttttccttttgcactttatcgtactcataaatgtcaaagactttgctctgacccagggctccatgatcacgccgagctgccaaaaaggctacttcccctgcggcaatctcactaagtgcctgcccagggcatttcactgcgacggaaaggacgattgcggcaacggtgctgacgaagagaactgcggagatacttccggctgggcaacaatatttgggactgtccacggtaacgcaaactctgtggcccttacccaggagtgctttctaaaacaatacccacagtgttgcgattgtaaagaaaccgagctggagtgcgttaatggcgatctcaagagcgtgccgatgattagcaataacgttacccttcttagcctcaagaagaataaaatccatagtctgccagacaaggtattcataaaatatactaaactgaaaaagatttttcttcaacacaactgcattaggcacatctcacgaaaggctttctttggcctatgtaacctgcagatcctttatctcaatcacaactgcatcactacgctgaggccgggtatcttcaaggatctccaccagctgacctggttgattctggatgacaaccctataacgagaatctctcagaggctgtttacaggactcaattccctgttctttctgtccatggttaataactacctcgaggccctgccaaaacagatgtgtgcccagatgccccagctgaattgggtagatctcgaggggaatcggatcaagtatctgacaaattccaccttcctgtcatgtgattcattgaccgtgctagacttgtcatccaacacaatcaccgaattgtccccccacctttttaaagatctgaagctattgcagaagctaaatctgtcctctaatcccttgatgtatcttcataagaaccagttcgagagcctgaaacagctccagagcctggatttagagaggatcgagatccccaacatcaacacccgcatgtttcagcccatgaaaaatctgtcccacatatactttaaaaattttcgttactgctcctatgccccacacgtgagaatctgtatgccactcacagacggtatcagctccttcgaggacctgctcgccaataatattctgcggattttcgtgtgggtaatagcatttatcacatgctttggaaacctcttcgtcatagggatgagatcatttataaaggccgaaaatacaacacatgcaatgtctattaagatcctatgctgtgcagattgcctgatgggcgtttacctcttctttgtcgggattttcgacatcaagtaccgcggtcagtatcagaagtatgccttgctctggatggagtcggttcaatgtaggctcatgggctttctggcgatgctgagtaccgaggtttcagtgttgctgctgacctacttgacactagaaaagttcctggttattgtgtttcctttctctaacataaggccaggtaagcgccagacctctgtcatactgatatgcatctggatggcgggtttcctgatcgctgtgattcccttttggaataaagattatttcgggaatttctacggcaagaacggcgtgtgtttccccctctattatgatcagactgaggatatcggatctaagggatactccctgggtatatttctgggagtcaatttgctcgcgttcctaataatcgttttcagctacatcactatgttctgctctatccagaaaacagcgctccagacaactgaagttaggaattgctttggacgggaagtggcagtcgccaatagatttttttttattgtgttttccgatgctatctgctggattccagtattcgtagtgaaaatcctttccctgtttcgagtcgagatccctgacaccatgactagctggatcgtgatcttcttcttacccgtgaacagcgctctgaaccctatcttgtatacactcactacaaacttcttcaaagacaagttgaaacagctcttgcacaagcatcagcgtaaaagcatcttcaagattaaaaagaagagtcttagtacctctattgtgtggattgaagattctagctccctgaagttaggcgtgctgaacaagatcactctcggtgacagcatcatgaagccagtctcctag

SEQ ID NO: 64261 - DNA, 2193 bp, Artificial Sequence
  derived and/or modified sequence
atgattgtgttcctggtgttcaagcacctgttcagcctgcggctcatcaccatgttcttcctgctgcacttcatcgtgctgatcaacgtgaaggactttgccctgacccagggctccatgatcacccccagctgccagaagggctacttcccctgtggcaacctgaccaagtgcctgccccgggccttccactgtgatggcaaggatgactgtggaaatggagcagatgaggagaactgtggggacaccagcggctgggccaccatcttcggcaccgtgcacggcaatgccaacagcgtggccctgacccaggagtgcttcctgaagcagtacccccagtgctgtgactgcaaggagacagagctggagtgtgtgaatggagacctgaagtctgtgcccatgatcagcaacaacgtgaccctgctgagcctgaagaagaacaagatccacagcctgcctgacaaggtgttcatcaagtacaccaagctgaagaagatcttcctgcagcacaactgcatccgccacatcagcaggaaggccttcttcggcctgtgcaacctgcagatcctgtacctgaaccacaactgcatcaccaccctgcggcccggcatcttcaaggacctgcaccagctgacctggctgatcctggatgacaaccccatcacccgcatcagccagaggctcttcaccggcctgaacagcctcttcttcctgtccatggtgaacaactacctggaggccctgcccaagcagatgtgtgcccagatgccccagctgaactgggtggacctggagggcaaccgcatcaagtacctgaccaacagcaccttcctgagctgtgacagcctgactgtgctggacctgagcagcaacaccatcacagagctgagcccccacctgttcaaggacctgaagctgctgcagaagctgaacctgagcagcaaccccctgatgtacctgcacaagaaccagtttgagagcctgaagcagctgcagagcctggacctggagagaattgagatccccaacatcaacaccaggatgttccagcccatgaagaacctgagccacatctacttcaagaacttccgctactgcagctatgcccctcatgtgcgcatctgcatgcccctgacagatggcatcagcagctttgaggacctgctggccaacaacatcctgcgcatctttgtgtgggtgattgccttcatcacctgctttggaaacctgtttgtgattggcatgaggagcttcatcaaggccgagaacaccacccacgccatgagcatcaagatcctgtgctgtgccgactgcctgatgggcgtgtacctgttctttgtgggcatctttgacatcaagtaccggggccagtaccagaagtatgccctgctgtggatggagagcgtgcagtgccgcctgatgggcttcctggccatgctgagcacagaggtgtctgtgctgctgctgacctacctgaccctggagaagttcctggtgattgtgttccccttcagcaacatccggcctgggaagaggcagaccagcgtcatcctgatctgcatctggatggccggcttcctgattgctgtgatccccttctggaacaaggactactttggaaacttctacggcaagaatggagtgtgcttccccctgtactatgaccagacagaggacatcggcagcaagggctacagcctgggcatcttcctgggcgtgaacctgctggccttcctgatcatcgtgttctcctacatcaccatgttctgcagcatccagaagacagccctgcagaccacagaggtgaggaactgcttcggccgggaggtggccgtggccaaccgcttcttcttcatcgtgttcagtgatgccatctgctggatccctgtgtttgtggtgaagatcctgagcctcttccgggtggagatcccagacaccatgacctcctggatcgtcatcttcttcctgcctgtgaacagcgccctgaaccccatcctgtacaccctgaccaccaacttcttcaaggacaagctgaagcagctgctgcacaagcaccagaggaagagcatcttcaagatcaagaagaagagcctgagcaccagcatcgtgtggattgaggacagcagcagcctgaagctgggcgtgctgaacaagatcaccctgggggacagcatcatgaagcctgtgtcctag

SEQ ID NO: 64262 - DNA, 2193 bp, Artificial Sequence
  derived and/or modified sequence
atgatcgtgttcctggtgttcaagcacctgttcagcctgcggctgatcaccatgttttttctcttacacttcattgttctcataaacgtgaaagactttgctcttacccagggatccatgatcactcctagttgccaaaaggggtacttcccgtgcggtaatctgactaagtgtctgccaagggcatttcactgtgatggcaaagacgactgtggaaacggtgctgatgaggagaattgcggcgacactagtggttgggcgacgatttttgggactgtgcacggcaatgccaattcagtagccctcacccaggaatgtttcctcaagcaatacccccaatgctgcgactgtaaagagactgaattggagtgcgtcaatggagatcttaagtccgttccaatgatttccaacaacgtgaccttgctcagcctcaagaaaaataaaattcactctcttccagacaaggtatttataaagtatacaaaactgaaaaaaatctttctccaacataactgtattcgccacatatcacggaaagccttttttggcttatgcaatctccagatactctacctgaaccacaactgcataactactctgcgacccggaatttttaaggatctgcaccagctcacctggctgatacttgacgataatcccattacacgcatttcccaacggctttttaccggtcttaacagcctgttttttctgtctatggtgaataactacctcgaggcattgccgaagcagatgtgtgcccaaatgccacagctcaactgggtggatcttgaaggcaaccgaattaagtatctcacgaattcaacttttttatcttgcgactctcttacggtgctcgatctgtcatcaaacaccatcaccgagctttcgccgcacctgtttaaggacttgaagctgttacagaagctcaacctctcaagtaaccccctgatgtacttgcacaagaaccaattcgaatcacttaagcagctgcagagcctggacctggagcgaattgaaataccaaatatcaacacacggatgttccagccaatgaagaaccttagccacatttactttaaaaattttcggtattgcagttatgccccccatgtgcgcatttgcatgcctttaactgatggtatttcaagcttcgaagacctactggcaaacaatatacttaggattttcgtgtgggtgatagctttcattacttgctttggtaatctgtttgtgattggcatgcgatccttcatcaaggcagagaacacaacacacgctatgtctattaaaatcctctgttgtgccgattgcctgatgggagtttaccttttctttgtgggaatatttgatatcaaataccggggacagtaccagaagtatgcactgttgtggatggagtcggttcaatgccgactcatgggctttctcgctatgctttcaacggaagtgtccgtcctgctgttgacctacctgaccttggagaaattcttagtcattgtgttccctttctccaatattaggccggggaagaggcagacctctgttatcctgatctgtatatggatggccggatttctaattgctgttattcctttctggaacaaggactacttcgggaacttctacggtaagaatggcgtctgctttcctctctactatgatcagactgaagatatcggctccaaaggatacagcctgggcattttcctgggggtcaaccttctggcttttctcatcatagtgttctcatacataaccatgttctgttctatccaaaagaccgccctgcagaccaccgaggtgcgtaactgttttgggagagaagtcgccgtggccaacaggttcttctttattgtgttttctgacgcaatctgctggattcctgtgtttgtcgtgaaaatactgtccctatttagggtggaaattcctgataccatgacctcctggattgtgatttttttcttacctgtcaactccgcactcaacccaattctgtatacactgacaacaaatttttttaaagataagcttaagcagctccttcacaaacatcaaaggaagtccatttttaaaatcaagaaaaaatcattgtccaccagtatcgtatggatagaggactcgagtagcctcaaactgggcgtcctaaacaagataactctgggggattcgatcatgaagcccgtgtcttag

SEQ ID NO: 64263 - DNA, 2193 bp, Artificial Sequence
  derived and/or modified sequence
atgattgtattcttagtgttcaagcatctgttttcactgaggttgattacgatgttcttcctacttcactttattgtcctaatcaacgtcaaagatttcgccctgacgcagggatctatgattaccccttcgtgccagaaaggttattttccttgcggtaatcttaccaagtgcctacctcgggctttccattgtgatgggaaggatgactgtgggaacggcgctgacgaggaaaactgcggagacacaagcgggtgggccacaatctttgggactgtccacggcaacgctaactcagtggcactcactcaggaatgttttctgaagcagtatcctcagtgctgcgattgtaaggaaactgaattagagtgcgtgaacggtgatctgaaatcagtccccatgatcagcaacaacgtaacactgctaagtctcaagaaaaataaaatccactctctgcccgataaggtgttcattaaatataccaagcttaaaaaaatttttctccaacataattgcatcagacatattagtaggaaggccttttttggactgtgcaatctccaaattctctatctgaaccataattgtattacaacactacggccaggtattttcaaagacttgcatcagttaacctggctcattctggatgacaatcctattactaggatatctcaaagattgtttactgggcttaactccctcttttttctgtcgatggtgaataactacctggaggccctgcccaagcagatgtgcgcccagatgccacagttaaattgggtcgacctcgagggcaacagaattaagtacttgactaactctaccttcctgagctgtgattccctaaccgtgctggacctctcaagcaataccataaccgagctctcccctcaccttttcaaagatctgaagctcctgcagaaacttaatttatctagcaacccactgatgtacctacacaaaaaccagtttgagtctttgaaacaactgcagagcctggacctggagagaatcgagatacccaacatcaacactcgcatgttccaacccatgaagaacctttctcacatctatttcaagaattttagatattgttcatacgccccacacgtgaggatctgcatgccactcacagatggcatttcttctttcgaggacctattagcaaacaacattctgaggatttttgtgtgggtgatcgccttcattacctgttttggcaatctgtttgttataggcatgagaagttttattaaggcagagaacacaacgcacgcaatgagcataaaaatcctctgttgtgccgactgcctcatgggggtttatttgttcttcgtcggcatctttgacattaagtaccgaggtcagtaccagaagtatgctttactttggatggaatccgtgcagtgccgcctgatgggattcttagccatgctgtcaacagaggtcagtgtactgctcttgacttatctgaccttagaaaaatttttggtaatagtgtttccctttagtaatatcagaccgggaaagaggcagacatctgtcatactaatctgcatttggatggcgggattccttatcgccgtgattcccttctggaacaaggactactttggtaatttctacggaaagaacggcgtgtgctttcctctgtattatgatcaaacggaagacatcggctccaaaggatatagcctgggaatctttctgggtgtgaacctactggccttcctcattatcgtcttttcctatatcacaatgttttgctctattcagaagacggctctgcagacaacagaagtgcggaactgcttcggtcgcgaagtagctgtcgccaaccggttttttttcattgtcttctctgacgccatctgctggatccccgtctttgtcgtcaaaatcctctcacttttcagggtggagatccccgacactatgactagctggatcgtcatcttcttcttgcctgttaactcggccctgaatccaattctgtacactctgactaccaatttcttcaaagataaactgaagcagttacttcataagcatcagaggaagagtatctttaaaattaagaagaagagcctcagtacctctattgtctggatcgaagattccagcagtctaaaattgggcgttctcaataaaatcactttaggcgacagcatcatgaagcctgtttcatag

SEQ ID NO: 64264 - DNA, 2736 bp, Artificial Sequence
  derived and/or modified sequence
ggcactgaacttactacatcagaactcctgctgaggtataagaggatacgtctaataactcaattgctgtaaacctatgattgtttttctggtttttaaacatctcttcagcctcagattgattacaatgttctttctacttcatttcatcgttctgatcaatgtcaaagattttgcactgactcaaggtagcatgatcactccttcatgccaaaaaggatattttccctgtgggaatcttaccaagtgcttaccccgagcttttcactgtgatggcaaggatgactgtgggaacggggcggacgaagagaactgtggtgacactagtggatgggcgaccatatttggcacagtgcatggaaatgctaacagcgtggccttaacacaggagtgctttctaaaacagtatccacaatgctgtgactgcaaagaaactgaattggaatgtgtaaatggtgacttaaagtctgtgccgatgatttctaacaatgtgacattactgtctcttaagaaaaacaaaatccacagtcttccagataaagttttcatcaaatacacaaaacttaaaaagatatttcttcagcataattgcattagacacatatccaggaaagcattttttggattatgtaatctgcaaatattatatctcaaccacaactgcatcacaaccctcagacctggaatattcaaagacttacatcagctaacttggctaattctagatgacaatccaataaccagaatttcacagcgcttgtttacgggattaaattccttgtttttcctgtctatggttaataactacttagaagctcttcccaagcagatgtgtgcccaaatgcctcaactcaactgggtggatttggaaggcaatagaataaagtatctcacaaattctacgtttctgtcgtgcgattcgctcacagtgctggatctgtctagcaatacgataacggaactatcacctcacctttttaaagacttgaagcttctacaaaagctgaacctgtcatccaatcctcttatgtatcttcacaagaaccagtttgaaagtcttaaacaacttcagtctctagacctggaaaggatagagattccaaatataaacacacgaatgtttcaacccatgaagaatctttctcacatttatttcaaaaactttcgatactgctcctatgctccccatgtccgaatatgtatgcccttgacggacggcatttcttcatttgaggacctcttggctaacaatatcctcagaatatttgtctgggttatagctttcattacctgctttggaaatctttttgtcattggcatgagatctttcattaaagctgaaaatacaactcacgctatgtccatcaaaatcctttgttgtgctgattgcctgatgggtgtttacttgttctttgttggcattttcgatataaaataccgagggcagtatcagaagtatgccttgctgtggatggagagcgtgcagtgccgcctcatggggttcctggccatgctgtccaccgaagtctctgttctgctactgacctacttgactttggagaagttcctggtcattgtcttccccttcagtaacattcgacctggaaaacggcagacctcagtcatcctcatttgcatctggatggcgggatttttaatagctgtaattccattttggaataaggattattttggaaacttttatgggaaaaatggagtatgtttcccactttattatgaccaaacagaagatattggaagcaaagggtattctcttggaattttcctaggtgtgaacttgctggcttttctcatcattgtgttttcctatattactatgttctgttccattcaaaaaaccgccttgcagaccacagaagtaaggaattgttttggaagagaggtggctgttgcaaatcgtttcttttttatagtgttctctgatgccatctgctggattcctgtatttgtagttaaaatcctttccctcttccgggtggaaataccagacacaatgacttcctggatagtgatttttttccttccagttaacagtgctttgaatccaatcctctatactctcacaaccaacttttttaaggacaagttgaaacagctgctgcacaaacatcagaggaaatcaattttcaaaattaaaaaaaaaagtttatctacatccattgtgtggatagaggactcctcttccctgaaacttggggttttgaacaaaataacacttggagacagtataatgaaaccagtttcctagcaatcattttggatcactggactttcagtggactacctaaaacaggggacagcttttggaagatgacatctgcaatgcttttcatctttaccaacggcaagcctttctgcacagagagcacagcagaatggctcctgtcactgcattccaatggcagctgtactatctaccaaccatgctgaggacagcaccaaaggttcctctcctcaccccacatgcctgaaaagcacatgtgaattcgtgtatagtgggctgaggtgcagctgatctctagctaatcaacacaacccaccaacaaatgaccacaggttggcactgtgtggtctttcacatcgggttgcactgtccatgaaatagaaacactcacaacatctgattccagtgtggccataataacagaaatctaacaactctttccttgccttttcaatatcaaataaaaccatcagcatcctgctggattgata

SEQ ID NO: 64265 - protein, 497 aa, Artificial Sequence
  derived and/or modified sequence
MKFLLTTAFLILISLWVEEAYSKEKSSKKGKGKKKQYLCPSQQSAEDLARVPANSTSNILNRLLVSYDPRIRPNFKGIPVDVVVNIFINSFGSIQETTMDYRVNIFLRQKWNDPRLKLPSDFRGSDALTVDPTMYKCLWKPDLFFANEKSANFHDVTQENILLFIFRDGDVLVSMRLSITLSCPLDLTLFPMDTQRCKMQLESFGYTTDDLRFIWQSGDPVQLEKIALPQFDIKKEDIEYGNCTKYYKGTGYYTCVEVIFTLRRQVGFYMMGVYAPTLLIVVLSWLSFWINPDASAARVPLGIFSVLSLASECTTLAAELPKVSYVKALDVWLIACLLFGFASLVEYAVVQVMLNNPKRVEAEKARIAKAEQADGKGGNVAKKNTVNGTGTPVHISTLQVGETRCKKVCTSKSDLRSNDFSIVGSLPRDFELSNYDCYGKPIEVNNGLGKSQAKNNKKPPPAKPVIPTAAKRIDLYARALFPFCFLFFNVIYWSIYL

SEQ ID NO: 64266 - protein, 303 aa, Artificial Sequence
  derived and/or modified sequence
MKFLLTTAFLILISLWVEEAYSKEKSSKKGKGKKKQYLCPSQQSAEDLARVPANSTSNILNRLLVSYDPRIRPNFKGIPVDVVVNIFINSFGSIQETTMDYRVNIFLRQKWNDPRLKLPSDFRGSDALTVDPTMYKCLWKPDLFFANEKSANFHDVTQENILLFIFRDGDVLVSMRLSITLSCPLDLTLFPMDTQRCKMQLESFGYTTDDLRFIWQSGDPVQLEKIALPQFDIKKEDIEYGNCTKYYKGTGYYTCVEVIFTLRRQVGFYMMGVYAPTLLIVVLSWLSFWINPDASAARVPLGW

SEQ ID NO: 64267 - DNA, 1494 bp, Artificial Sequence
  derived and/or modified sequence
atgaagtttctgctcaccaccgccttcttgatcctgatatctttgtgggtggaggaggcttacagtaaggagaagtcatcaaagaagggtaaaggaaagaagaagcaatatctgtgccccagccagcagtcagccgaggaccttgcccgcgtccctgcgaattcgacaagtaatatcttaaatagactgttggtgtcttatgacccgcgcattcggccaaatttcaagggcattcctgtagacgtggttgtcaatatctttattaattctttcggaagcattcaggaaactacgatggactatcgggtgaacatattccttaggcaaaagtggaatgatccacgcttgaaattacccagcgacttccggggcagtgacgcccttacggtggacccaaccatgtacaagtgcctatggaaaccagatttattctttgccaacgagaagtcggctaacttccatgacgtcacccaagagaacatactgttattcatttttagggacggcgatgtgctcgtctctatgcggcttagcataacgctgagttgcccactggatctgactttatttccaatggatacacagagatgcaagatgcagctggagtcttttgggtatactaccgacgatctgcgttttatctggcaaagcggagacccagttcagctggagaagattgccctccctcaattcgatatcaaaaaggaagacatcgagtatggcaactgtaccaagtactacaaggggacaggatattatacctgcgtggaggtcatcttcaccctccgacgccaagtgggattttatatgatgggggtctacgccccaacattactaattgtagttctgagctggctgtcgttttggattaacccagacgccagtgcagccagagtcccgctgggcattttctccgtcctctctctggcctccgagtgtaccacacttgccgctgagcttcctaaggtgagctacgtcaaggccctggacgtgtggctcattgcatgtctactcttcggcttcgcctccttggtcgagtacgccgtggtgcaggttatgctgaacaaccccaaacgcgtagaggctgaaaaagcaagaatcgctaaagccgagcaggctgatgggaagggcggcaacgtggctaaaaagaacaccgtaaatggaacgggtaccccagtgcacatatccacactgcaggtgggggaaacacggtgtaagaaagtttgcaccagcaagagcgatctccgatcgaacgacttcagcatagtgggctcactcccccgggatttcgaactaagcaactatgattgttacgggaaacctattgaggtgaataacggactcggaaaatctcaagctaaaaacaacaagaagccccccccagcaaagcccgtgatcccgaccgccgcaaagcggattgacttgtacgctagggccctcttccccttttgtttcctgttctttaacgtgatctattggtcaatctatctctag

SEQ ID NO: 64268 - DNA, 1494 bp, Artificial Sequence
  derived and/or modified sequence
atgaagtttctgctgaccacagcctttttaatccttatctcactatgggtggaagaagcatacagcaaagaaaagtcgtcaaaaaaaggaaaaggtaagaagaagcagtatttgtgcccatcccagcaatctgcagaggatttggctcgcgtccccgccaattcaaccagcaacatccttaacaggctgctggtgtcatacgatcctcggatacgtcctaatttcaagggcattcctgtagatgtggttgttaacattttcattaatagcttcggctccatccaggagaccacgatggattaccgggtgaacatcttcctgcgacagaaatggaatgacccccgcctgaaactccctagcgatttccgtggctcggacgcactgaccgtggacccgactatgtataaatgtctgtggaagccagatttgttttttgcaaatgagaaatcggccaactttcacgacgttacccaagagaatatactgctgtttattttccgtgacggggacgtgctcgtctctatgcggttgagcatcacactctcatgccccctggatctcaccctctttcccatggatacacagaggtgtaaaatgcaactcgagtcctttggatatactacagacgatctgaggtttatatggcagagtggggatcctgttcagctggagaaaatcgctttgccccaattcgacattaagaaggaggacatcgagtacgggaactgcacgaagtattataaaggaaccggttactatacctgcgtggaagtgatctttacccttaggaggcaggttgggttttatatgatgggagtgtatgccccaacattgctgatagtagttctgtcatggttgagtttttggatcaacccagacgcgagcgccgcaagagtacctctcgggatcttcagcgtgctaagtctggctagtgaatgcactacactcgccgctgaacttcctaaagtgtcctacgttaaagctctggatgtgtggctcattgcctgtctgctcttcggattcgccagcctggtggaatacgcggtcgtgcaggttatgctgaataaccctaaacgtgtcgaggcggagaaggcccgcatcgccaaggcagaacaggctgacggcaaaggggggaacgtcgccaagaaaaacacagtgaacggtacaggaactcctgtgcatatctctaccctgcaagtgggcgagaccagatgcaaaaaagtgtgcacctctaaaagcgatcttcgaagcaacgactttagcatcgtgggatccctgccacgggatttcgagcttagcaactatgattgctatggtaagcctattgaagtcaataacggcctcgggaagagtcaagccaagaataataagaagccgcccccagctaaaccagtaatcccaaccgcagccaagaggattgatctgtacgctagggctctgttccctttctgcttcctcttttttaatgtgatttactggagtatctacctgtag

SEQ ID NO: 64269 - DNA, 3126 bp, Artificial Sequence
  derived and/or modified sequence
ccgcccgcggtcgccaggttcccccgcggcccgcgctgtccccgctgcggccccgaccgcggcgcgccacggcgcaggctccgcggcccgagcaggcgcgtcagccgagctcggcggtggcgcgggcggctgggacgcagctgcccccgctcggcgcccgctgcacccttagcagccactgccacctgggcccggagcctccacgatctcgcccggcgattgtgggcaggggcgcctccggatcgatcttctgaaattcaagttttcaagatgaagtttttattgacaactgcctttttaattttaatttccttgtgggtggaagaagcctattctaaggaaaagtcttcaaagaaagggaaggggaaaaagaagcagtatctatgcccatctcagcagtcagcagaggaccttgcccgagtacctgccaactccactagcaatatcttgaacaggttattggtcagttatgatcccaggataagaccaaacttcaaaggcattcctgttgatgtagtagtcaacatttttattaacagttttggatccattcaagaaacaacaatggactatagagttaacatcttcctgagacaaaaatggaatgaccccaggctgaagctccccagtgattttaggggttcagatgcactgacagtggatccaacaatgtacaagtgtttatggaaacctgatttattttttgcaaatgaaaaaagtgccaattttcatgatgtgacccaggaaaacatcctcctctttatttttcgtgatggagatgtccttgtcagcatgaggttatctattactctttcatgccctttggacttgacattgtttcccatggatacacaacgttgcaagatgcaactggagagctttggttacacaactgatgatttacgatttatctggcagtcaggagatcctgtgcaattagaaaaaattgccttgcctcaatttgatatcaaaaaggaagatattgaatatggtaactgtacaaaatactataaaggcacgggctactacacatgcgtggaagtcatcttcaccctgaggaggcaggtcggcttttacatgatgggggtctacgccccaactctgctcattgttgttctctcctggctttccttctggatcaacccggacgcgagtgctgccagagtgcccctgggtatcttctcagtcctcagcttggcctctgagtgcacaacccttgccgctgagcttcccaaagtttcctatgtgaaggctcttgatgtttggcttattgcttgccttctctttgggtttgcttccctggtggagtatgcagttgtccaggtgatgctgaacaaccccaaaagggttgaagctgaaaaagccagaattgctaaggctgagcaagcagatggaaaaggtggaaatgtggctaaaaagaatactgtgaatggaacagggactcctgttcatattagcactttgcaggttggtgagaccagatgcaaaaaagtttgtacttctaagtctgatctgagatctaatgacttcagcattgttggaagcttaccaagagattttgaactatccaattatgactgctatggaaaacccattgaagttaacaacggacttgggaaatctcaggctaagaacaacaagaagcctccccctgcgaaacctgttattccaacagcagcaaagcgaattgatctttatgcaagagcattgtttcctttctgcttcttgttcttcaatgttatatattggtctatatatttatgataaatcttttccatttgtacaaaataaaattccatttcattgtgacctactcctttcataaatgccaatctgtgagaacttttgaattttcatagcaacattgcattttggatgccatttgattgtaataaaactgtggcaccttaattttgaatggcagcatgatcatgtaatatctgtgctctaataacgatgtatatatgtatagtgaacatattgcttagtaacaaatgaaggacaagcatactacataatataatccatacaattctcttcagttagtgtaaactgcaaatactacagataattctgataataaaatgatatgcacgctgaatcctgctatggtcaccattctaatgtatgtagtatttcaaatttccttccttgtaactttcaaagaaagccatcttattcttgtaaaattttagatggtattatcacagatttaaaaaggttgtattacatattgtttaaactttgtaagtagaaatatatctgttataattatacaggctctgtggagaaataaagttcaaaatatattaatttgtaaaatcagctcgttttaaagtgtgcttgtgttgtcaaaaatatcagatagtaatacacagtgagcatttttaaacaaagggaaacctatatttatgtaactgtatactgaattctgacaaaataaaaaaagataccttattgacgaaatatttaggataaacaaaattctatttaatccaccttaaaacctaaatgtattttcatggatttcatttgttggtacatattacacaaaacattgtgccttaaaatgagtcatacatcttttaaattggaatgcagtaatagatatgtgattttacatcatttttaagaaaccaaggggaagtaataagttgaaaaagaaatccataactattaaaagattttaacttttttattttattaaaatgcttgcatattttaagtaaaattaaaaatgtttactgaatttatttttttatttgaatattttgggattagttacaaaatatttagagattaaataaataatagctttgtttgtgttagacttcacttctacttgtattttctttcttgttaaaagtctagacaactgagatttacttactttgaacttgttccaatccaaaagtaagcactaagtctcattttatgagaccaccatttcttaatatcacatccagtgcacctttgtctttctgccatatctgaaataaaactatcagtaattcacatagataaacataagactaaagaagtatatttacattatctggagagttttgttgcagctacgagtttgtatggcaaattcaataataaagtattgtttatgcaaattgc

SEQ ID NO: 64270 - DNA, 1757 bp, Artificial Sequence
  derived and/or modified sequence
ggggcggcggagcgcgaggagcactgcggcgtgcccgggaggacgcgcgctgccctgcgcgggagaggggcgcggggcgcctggcagcggcagccgggtccccgctgcggtggcgcccgcggagacgctccgggtggagagatgcagagggccgggatcgatcttctgaaattcaagttttcaagatgaagtttttattgacaactgcctttttaattttaatttccttgtgggtggaagaagcctattctaaggaaaagtcttcaaagaaagggaaggggaaaaagaagcagtatctatgcccatctcagcagtcagcagaggaccttgcccgagtacctgccaactccactagcaatatcttgaacaggttattggtcagttatgatcccaggataagaccaaacttcaaaggcattcctgttgatgtagtagtcaacatttttattaacagttttggatccattcaagaaacaacaatggactatagagttaacatcttcctgagacaaaaatggaatgaccccaggctgaagctccccagtgattttaggggttcagatgcactgacagtggatccaacaatgtacaagtgtttatggaaacctgatttattttttgcaaatgaaaaaagtgccaattttcatgatgtgacccaggaaaacatcctcctctttatttttcgtgatggagatgtccttgtcagcatgaggttatctattactctttcatgccctttggacttgacattgtttcccatggatacacaacgttgcaagatgcaactggagagctttggttacacaactgatgatttacgatttatctggcagtcaggagatcctgtgcaattagaaaaaattgccttgcctcaatttgatatcaaaaaggaagatattgaatatggtaactgtacaaaatactataaaggcacgggctactacacatgcgtggaagtcatcttcaccctgaggaggcaggtcggcttttacatgatgggggtctacgccccaactctgctcattgttgttctctcctggctttccttctggatcaacccggacgcgagtgctgccagagtgcccctgggtatcttctcagtcctcagcttggcctctgagtgcacaacccttgccgctgagcttcccaaagtttcctatgtgaaggctcttgatgtttggcttattgcttgccttctctttgggtttgcttccctggtggagtatgcagttgtccaggtgatgctgaacaaccccaaaagggttgaagctgaaaaagccagaattgctaaggctgagcaagcagatggaaaaggtggaaatgtggctaaaaagaatactgtgaatggaacagggactcctgttcatattagcactttgcaggttggtgagaccagatgcaaaaaagtttgtacttctaagtctgatctgagatctaatgacttcagcattgttggaagcttaccaagagattttgaactatccaattatgactgctatggaaaacccattgaagttaacaacggacttgggaaatctcaggctaagaacaacaagaagcctccccctgcgaaacctgttattccaacagcagcaaagcgaattgatctttatgcaagagcattgtttcctttctgcttcttgttcttcaatgttatatattggtctatatatttatgataaatcttttccatttgtacaaaataaaattccatttcattgtgacctactcctttcataaatgccaatctgtgagaa

SEQ ID NO: 64271 - DNA, 1494 bp, Artificial Sequence
  derived and/or modified sequence
atgaagttcctgctgaccacagccttcctgatcctgatcagcctgtgggtggaggaggcctacagcaaggagaagagcagcaagaagggcaagggcaagaagaagcagtacctgtgccccagccagcagagcgctgaggacctggcccgggtgcctgccaacagcaccagcaacatcctgaaccggctgctggtgtcctatgacccccgcatccggcccaacttcaagggcatccctgtggatgtggtggtgaacatcttcatcaacagctttggcagcatccaggagaccaccatggactacagagtgaacatcttcctgcggcagaagtggaatgacccccggctgaagctgcccagcgacttccggggcagtgatgccctgactgtggaccccaccatgtacaagtgcctgtggaagccagacctcttctttgccaatgagaagagcgccaacttccatgatgtgacccaggagaacatcctgctcttcatcttcagagatggagatgtgctggtgtccatgaggctgagcatcaccctgagctgccccctggacctgaccctcttccccatggacacccagcgctgcaagatgcagctggagagctttggctacaccacagatgacctgcgcttcatctggcagagcggggaccctgtgcagctggagaagatcgccctgccccagtttgacatcaagaaggaggacatcgagtatggcaactgcaccaagtactacaagggcaccggctactacacctgtgtggaggtgatcttcaccctgcggcggcaggtgggcttctacatgatgggcgtgtatgcccccaccctgctgattgtggtgctgtcctggctgtccttctggatcaacccagatgccagcgctgcccgggtgcccctgggcatcttctctgtgctgagcctggccagcgagtgcaccaccctggccgctgagctgcccaaggtgtcctatgtgaaggccctggatgtgtggctgattgcctgcctgctgtttggatttgccagcctggtggagtatgctgtggtgcaggtgatgctgaacaaccccaagagggtggaggccgagaaggccagaattgccaaggccgagcaggctgatggcaagggcggcaatgtggccaagaagaacacagtgaatggaacaggcacccctgtgcacatcagcaccctgcaggtgggggagacccgctgcaagaaggtgtgcaccagcaagagtgacctgcggagcaatgacttcagcatcgtgggcagcctgccccgggactttgagctgagcaactatgactgctacggcaagcccatcgaggtgaacaacggcctgggcaagagccaggccaagaacaacaagaagcccccaccagccaagcctgtgatccccacagctgccaagagaattgacctgtatgcccgggccctcttccccttctgcttcctgttcttcaacgtcatctactggagcatctacctgtag

SEQ ID NO: 64272 - DNA, 1494 bp, Artificial Sequence
  derived and/or modified sequence
atgaagttcctgctgaccaccgccttcctgatcctgatcagcctgtgggtggaggaagcatactcaaaagaaaaatctagtaagaaaggcaaggggaagaaaaaacaatatctttgtccctcccagcagtccgctgaggatctagcccgtgtgccggcaaactccacctctaatatattgaaccgcctgcttgtgagctatgaccccagaataagacccaacttcaaaggcattcctgtagatgtcgttgttaatatcttcataaattcatttggaagcatacaggaaaccacaatggactatagggtcaatatttttttgcgtcagaagtggaatgaccctcggctgaaattgccatcagacttccggggtagcgatgcccttacagtggaccccaccatgtacaaatgtctgtggaaacctgacctgtttttcgccaatgagaaaagtgctaacttccatgacgtgacacaagagaacatactcctgtttatatttagggacggggacgtgcttgtttctatgcggctcagcataaccctgtcctgtcccttagatcttaccctgtttccaatggatacccagagatgcaagatgcagctggagtcttttggatatacgactgacgatctccgttttatttggcagtccggagaccctgtgcaactcgaaaagatcgctttgcctcagttcgatatcaaaaaggaagacatcgagtatggaaactgtactaagtactataagggaacagggtactacacatgcgtggaagttatcttcaccctccgccgacaggtcgggttctatatgatgggcgtttatgccccaactctgctgatagtggtcctgtcctggctgtctttctggatcaatcctgatgccagcgccgcaagagttcccctcggcatcttctccgtgctatctctggcgtcagaatgtacaaccttggctgctgagttgcctaaagtctcctatgtgaaggcgcttgatgtatggctcattgcgtgtcttctgtttggatttgccagtttggtagagtatgccgtcgttcaggtgatgttgaataatcccaagagagtcgaggccgagaaagccaggatcgctaaggcagagcaagcggatgggaaggggggcaacgttgcgaagaagaacaccgtgaacgggactggtacccccgttcacatttccactttacaagtaggcgaaactcgttgcaagaaggtatgtactagtaagtcagatttaaggtctaacgatttttccatcgtgggttcactccccagagactttgaattgtcaaattatgactgctacggcaagcctatcgaggtgaataatgggctgggcaagtcccaggcaaagaataataaaaagccacctcccgcgaaacctgttatcccgacagccgcaaagcgtatagacctgtatgcacgggcattatttcctttttgctttttgtttttcaacgtaatttattggtctatctacctgtag

SEQ ID NO: 64273 - DNA, 1494 bp, Artificial Sequence
  derived and/or modified sequence
atgaagttcctgctgaccaccgccttcctgatcctgatcagcctgtgggtggaagaggcttattctaaagagaaatcgagtaagaaggggaaaggcaagaaaaagcaatatctgtgtccctcacagcaatccgctgaagacctagctcgcgttccggccaattccacatctaatatcctgaacaggctgctcgtctcttatgacccgagaataagacccaattttaaagggattcccgtcgacgttgtagtgaacatctttatcaatagcttcggctctatccaggagaccacaatggactatagggtaaatatattcctgagacagaagtggaacgatccacgcctcaaactgccttctgattttcgcggcagtgacgcactcactgtggacccaaccatgtacaagtgcctatggaagcccgacctgttctttgctaatgagaaatctgccaatttccacgatgtgacccaggagaacatactgttgttcattttccgagatggtgatgtacttgtctcaatgcgcctttcaatcaccctttcctgccctctggaccttacactattcccaatggacactcagcgctgcaagatgcagcttgagagtttcggatacactaccgacgaccttaggttcatatggcaaagcggggatcctgtgcagctcgagaagatcgccctcccgcagttcgacataaaaaaggaggatatcgagtatggcaactgcacaaagtactacaaggggactggctattacacgtgtgtagaggtgattttcacacttagacgccaggtgggcttctatatgatgggtgtgtatgctccgaccctgcttatcgtggtgttgagttggctgagtttttggatcaacccggatgctagtgcggcacgagttccactggggatcttctcggttctgtctttggcaagtgaatgcactaccctcgcggctgaacttccaaaggtgtcatacgtgaaggccctcgacgtgtggctaatcgcgtgcctactttttggattcgcatccctggtggaatatgctgttgttcaggtgatgctgaacaatccaaagagggtcgaggccgagaaggctcggatagctaaggctgagcaagcggatggtaagggaggcaacgtggctaaaaagaataccgtgaacggcacgggaactccggtccacatttccactctgcaggtaggcgaaacacggtgtaaaaaggtgtgcacctcaaagagcgacctgagatcgaatgacttttccatcgtgggttctctaccacgcgattttgaactatcaaattacgattgttatggcaaacccatagaagtcaacaacggcctgggaaaatcacaggctaagaataataagaagccgcctcctgcaaagcccgtcattcccacagcagcgaagcgcatagacctgtacgcaagggcattgttcccattctgctttttgttctttaatgtgatctattggtcaatttatctatag

SEQ ID NO: 64274 - DNA, 1494 bp, Artificial Sequence
  derived and/or modified sequence
atgaagttccttctgactaccgcctttctgatccttatctcactctgggtcgaagaggcttacagtaaagaaaaaagcagcaagaaggggaagggaaaaaagaaacagtatctgtgcccttcacagcagtccgccgaagatttagccagagtgccagccaacagcacgtctaacatcctgaaccgtttgttagtcagctacgatcctagaattagaccgaattttaaaggcattcctgtcgacgtggttgtcaatatattcataaactcctttggctcaattcaagagactacaatggattatcgggtgaacatcttcttgcgacagaagtggaacgacccacggctgaaactgcccagcgatttccggggatcggacgccttgacagtcgatcctaccatgtataaatgcttgtggaaaccggatttattttttgctaatgagaagtctgcaaatttccacgacgttacccaggagaatattcttctctttatctttcgggacggcgatgttttggtaagtatgcggctctccatcactctgagctgtcctctcgacctgacgctctttcctatggatacccagcgctgtaagatgcagttagaatcattcggatatacaacagacgatctgaggtttatctggcaaagcggggatccagtccaattggaaaaaatcgcattgccccaattcgacattaagaaagaagacattgaatatggcaactgcacgaagtactacaagggcaccgggtattacacttgcgtggaagtgatctttactctgagaagacaagtaggattttatatgatgggcgtttatgcacccactttattgattgtagttctgtcctggctgtccttctggatcaacccagacgcctccgcggctcgggtgcctctgggaatctttagtgtattgtcactggcttcagagtgcacaactttagccgctgagttacccaaagtgtcctatgtgaaggccctcgacgtctggctaatcgcttgccttttgtttgggttcgcgagcctggtcgagtacgcagtcgtacaggttatgttgaacaaccccaaaagagtagaggctgaaaaagctaggatcgcaaaggcggagcaggcagacggcaaaggcggaaacgtggctaaaaaaaatacagtgaacggcacgggcacaccagtccacatttcgacacttcaagttggggaaactcgttgcaaaaaggtgtgcactagtaaatccgacctcagatccaacgacttcagtattgtgggctctcttcctagggactttgaactgagtaattacgactgctatgggaagcctatcgaggtaaacaatgggctggggaaaagccaggccaagaataacaagaagccccctccagcaaagccagtaatccccaccgctgcgaagcggatcgacctgtacgcaagggcccttttcccattctgcttcctcttctttaacgtaatttactggtccatctatctttag

SEQ ID NO: 64275 - DNA, 1494 bp, Artificial Sequence
  derived and/or modified sequence
atgaaatttctgctcactactgctttcttgatcctgatctctctctgggtcgaggaagcctattctaaagaaaagagttctaaaaaagggaaaggaaagaagaaacagtatctgtgcccgtcgcagcagagcgctgaggatctagcgcgagtgccagccaattcaacgagcaacatcttaaaccggctgcttgtctcctacgaccctagaatcagaccgaatttcaagggcataccagtagatgtggttgtcaatatatttattaattcgttcgggtctatacaagagactacaatggattaccgcgtcaacatttttctgcgccagaaatggaatgacccacgattaaagctgccatccgatttcaggggatctgacgcactcaccgtggaccccaccatgtacaaatgcttgtggaagcctgacctgttttttgcaaacgagaaatcggctaactttcacgatgtgactcaagaaaatattctcctattcatcttccgcgacggcgacgttctagtatccatgcgcctgagcattactctttcctgtcccctggacctgacgctcttcccgatggacacccagagatgcaaaatgcagctggaaagtttcggctatactacagatgacctacggttcatctggcagtccggcgacccagtgcagctggagaaaatcgctctcccacaattcgatattaagaaggaagacattgaatatggaaactgtactaagtattacaagggaacgggatattacacttgtgtggaggtgatctttaccctgcgaagacaagttggcttttacatgatgggggtctacgcacccacgctgttgattgtggttctgagctggctgagcttctggatcaaccccgacgcatccgcggcacgcgtgcctctgggtatcttctctgtgctctccctggcaagcgagtgcacaactttggcggctgaactacctaaagtgagttacgttaaagcacttgatgtgtggctgatagcttgcttgctatttggattcgcttccctagttgagtacgctgtcgtgcaggtcatgttgaataatcccaagcgtgttgaggcagaaaaggcccgtattgccaaggccgagcaagctgatgggaaaggaggtaatgtcgccaagaagaataccgtcaacggcacggggacaccggtccacataagtaccctgcaggtaggtgagactcggtgtaagaaggtgtgtacttctaaatctgacctacggagtaatgacttcagtatcgtgggtagcttgcctagagatttcgagttgtccaattacgactgctacggaaaacctatcgaagtgaacaatgggttgggaaaatcccaggctaagaacaacaagaagcctccgccagccaagcctgtcatcccaacagccgctaaacgcatcgatctctatgcgagagctctctttcccttttgtttcctgtttttcaacgtcatctactggagtatttacctctag

SEQ ID NO: 64276 - DNA, 1494 bp, Artificial Sequence
  derived and/or modified sequence
atgaagttcctgctgaccaccgccttcctgatcctgatcagcctgtgggtggaggaggcctacagcaaggagaagagcagcaagaagggcaagggcaagaagaagcagtacctgtgccccagccagcagagcgccgaggacctggccagagtgcccgccaacagcaccagcaacatcctgaacagactgctggtgagctacgaccccagaatcagacccaacttcaagggcatccccgtggacgtggtggtgaacatcttcatcaacagcttcggcagcatccaggagaccaccatggactacagagtgaacatcttcctgagacagaagtggaacgaccccagactgaagctgcccagcgacttcagaggcagcgacgccctgaccgtggaccccaccatgtacaagtgcctgtggaagcccgacctgttcttcgccaacgagaagagcgccaacttccacgacgtgacccaggagaacatcctgctgttcatcttcagagacggcgacgtgctggtgagcatgagactgagcatcaccctgagctgccccctggacctgaccctgttccccatggacacccagagatgcaagatgcagctggagagcttcggctacaccaccgacgacctgagattcatctggcagagcggcgaccccgtgcagctggagaagatcgccctgccccagttcgacatcaagaaggaggacatcgagtacggcaactgcaccaagtactacaagggcaccggctactacacctgcgtggaggtgatcttcaccctgagaagacaggtgggcttctacatgatgggcgtgtacgcccccaccctgctgatcgtggtgctgagctggctgagcttctggatcaaccccgacgccagcgccgccagagtgcccctgggcatcttcagcgtgctgagcctggccagcgagtgcaccaccctggccgccgagctgcccaaggtgagctacgtgaaggccctggacgtgtggctgatcgcctgcctgctgttcggcttcgccagcctggtggagtacgccgtggtgcaggtgatgctgaacaaccccaagagagtggaggccgagaaggccagaatcgccaaggccgagcaggccgacggcaagggcggcaacgtggccaagaagaacaccgtgaacggcaccggcacccccgtgcacatcagcaccctgcaggtgggcgagaccagatgcaagaaggtgtgcaccagcaagagcgacctgagaagcaacgacttcagcatcgtgggcagcctgcccagagacttcgagctgagcaactacgactgctacggcaagcccatcgaggtgaacaacggcctgggcaagagccaggccaagaacaacaagaagcccccccccgccaagcccgtgatccccaccgccgccaagagaatcgacctgtacgccagagccctgttccccttctgcttcctgttcttcaacgtgatctactggagcatctacctgtag

SEQ ID NO: 64277 - DNA, 912 bp, Artificial Sequence
  derived and/or modified sequence
atgaaattcctcttgacaaccgctttcctgattttaatctccctgtgggtggaggaagcctactctaaagaaaaatccagtaagaagggtaaggggaagaaaaagcagtacctgtgtccttctcagcagagtgctgaagatcttgcgcgggtaccagcaaactctacctccaacattcttaatcggctacttgtctcgtacgatccccgaatccgacccaattttaagggcatccctgtcgatgtcgtagtgaatatcttcattaactcattcggctctatccaggagactactatggattaccgagttaacattttcctacgacagaaatggaatgatccgagacttaaactgcctagtgactttcgtggttcagatgccctgaccgtggaccccaccatgtacaaatgcctctggaagcccgacctgttcttcgctaatgagaaatcagcgaatttccacgatgtcacccaagagaatatactcctttttatattccgggacggcgacgtgttggtgtctatgcggctctccattactctcagttgtcctctcgatctcacattgtttccaatggacacacaacggtgcaagatgcagctcgaatcttttggctacaccaccgacgatctgcgattcatctggcagtctggggaccctgtgcagctggaaaagattgcgcttcctcagtttgacataaagaaagaagatatcgagtatggaaattgcacgaagtactataagggcaccgggtactatacatgcgtggaggtgatcttcacacttcgccggcaggtcggcttttatatgatgggtgtgtatgcacccaccctgctgatagtggtgctgtcctggttgtccttctggattaatccagatgcctccgctgcgcgtgtgcctctgggctggtag

SEQ ID NO: 64278 - DNA, 2765 bp, Artificial Sequence
  derived and/or modified sequence
acggcgcaggctccgcggcccgagcaggcgcgtcagccgagctcggcggtggcgcgggcggctgggacgcagctgcccccgctcggcgcccgctgcacccttagcagccactgccacctgggcccggagcctccacgatctcgcccggcgattgtgggcaggggcgcctccggatcgatcttctgaaattcaagttttcaagatgaagtttttattgacaactgcctttttaattttaatttccttgtgggtggaagaagcctattctaaggaaaagtcttcaaagaaagggaaggggaaaaagaagcagtatctatgcccatctcagcagtcagcagaggaccttgcccgagtacctgccaactccactagcaatatcttgaacaggttattggtcagttatgatcccaggataagaccaaacttcaaaggcattcctgttgatgtagtagtcaacatttttattaacagttttggatccattcaagaaacaacaatggactatagagttaacatcttcctgagacaaaaatggaatgaccccaggctgaagctccccagtgattttaggggttcagatgcactgacagtggatccaacaatgtacaagtgtttatggaaacctgatttattttttgcaaatgaaaaaagtgccaattttcatgatgtgacccaggaaaacatcctcctctttatttttcgtgatggagatgtccttgtcagcatgaggttatctattactctttcatgccctttggacttgacattgtttcccatggatacacaacgttgcaagatgcaactggagagctttggttacacaactgatgatttacgatttatctggcagtcaggagatcctgtgcaattagaaaaaattgccttgcctcaatttgatatcaaaaaggaagatattgaatatggtaactgtacaaaatactataaaggcacgggctactacacatgcgtggaagtcatcttcaccctgaggaggcaggtcggcttttacatgatgggggtctacgccccaactctgctcattgttgttctctcctggctttccttctggatcaacccggacgcgagtgctgccagagtgcccctgggttggtgagaccagatgcaaaaaagtttgtacttctaagtctgatctgagatctaatgacttcagcattgttggaagcttaccaagagattttgaactatccaattatgactgctatggaaaacccattgaagttaacaacggacttgggaaatctcaggctaagaacaacaagaagcctccccctgcgaaacctgttattccaacagcagcaaagcgaattgatctttatgcaagagcattgtttcctttctgcttcttgttcttcaatgttatatattggtctatatatttatgataaatcttttccatttgtacaaaataaaattccatttcattgtgacctactcctttcataaatgccaatctgtgagaacttttgaattttcatagcaacattgcattttggatgccatttgattgtaataaaactgtggcaccttaattttgaatggcagcatgatcatgtaatatctgtgctctaataacgatgtatatatgtatagtgaacatattgcttagtaacaaatgaaggacaagcatactacataatataatccatacaattctcttcagttagtgtaaactgcaaatactacagataattctgataataaaatgatatgcacgctgaatcctgctatggtcaccattctaatgtatgtagtatttcaaatttccttccttgtaactttcaaagaaagccatcttattcttgtaaaattttagatggtattatcacagatttaaaaaggttgtattacatattgtttaaactttgtaagtagaaatatatctgttataattatacaggctctgtggagaaataaagttcaaaatatattaatttgtaaaatcagctcgttttaaagtgtgcttgtgttgtcaaaaatatcagatagtaatacacagtgagcatttttaaacaaagggaaacctatatttatgtaactgtatactgaattctgacaaaataaaaaaagataccttattgacgaaatatttaggataaacaaaattctatttaatccaccttaaaacctaaatgtattttcatggatttcatttgttggtacatattacacaaaacattgtgccttaaaatgagtcatacatcttttaaattggaatgcagtaatagatatgtgattttacatcatttttaagaaaccaaggggaagtaataagttgaaaaagaaatccataactattaaaagattttaacttttttattttattaaaatgcttgcatattttaagtaaaattaaaaatgtttactgaatttatttttttatttgaatattttgggattagttacaaaatatttagagattaaataaataatagctttgtttgtgttagacttcacttctacttgtattttctttcttgttaaaagtctagacaactgagatttacttactttgaacttgttccaatccaaaagtaagcactaagtctcattttatgagaccaccatttcttaatatcacatccagtgcacctttgtctttctgccatatctgaaataaaactatcagtaattcacatagataaacataagactaaagaagtatatttacattatctggagagttttgttgcagctacgagtttgtatggcaaattcaataataaagtattgtttatgcaaattgc

SEQ ID NO: 64279 - DNA, 912 bp, Artificial Sequence
  derived and/or modified sequence
atgaagttcctgctgaccacagccttcctgatcctgatcagcctgtgggtggaggaggcctacagcaaggagaagagcagcaagaagggcaagggcaagaagaagcagtacctgtgccccagccagcagagcgctgaggacctggcccgggtgcctgccaacagcaccagcaacatcctgaaccggctgctggtgtcctatgacccccgcatccggcccaacttcaagggcatccctgtggatgtggtggtgaacatcttcatcaacagctttggcagcatccaggagaccaccatggactacagagtgaacatcttcctgcggcagaagtggaatgacccccggctgaagctgcccagcgacttccggggcagtgatgccctgactgtggaccccaccatgtacaagtgcctgtggaagccagacctcttctttgccaatgagaagagcgccaacttccatgatgtgacccaggagaacatcctgctcttcatcttcagagatggagatgtgctggtgtccatgaggctgagcatcaccctgagctgccccctggacctgaccctcttccccatggacacccagcgctgcaagatgcagctggagagctttggctacaccacagatgacctgcgcttcatctggcagagcggggaccctgtgcagctggagaagatcgccctgccccagtttgacatcaagaaggaggacatcgagtatggcaactgcaccaagtactacaagggcaccggctactacacctgtgtggaggtgatcttcaccctgcggcggcaggtgggcttctacatgatgggcgtgtatgcccccaccctgctgattgtggtgctgtcctggctgtccttctggatcaacccagatgccagcgctgcccgggtgcccctgggctggtag

SEQ ID NO: 64280 - DNA, 912 bp, Artificial Sequence
  derived and/or modified sequence
atgaagttcctgctgaccaccgccttcctgatcctgatcagcctgtgggtggaagaagcttattctaaggagaagtctagcaaaaaaggaaaggggaaaaaaaagcagtatctctgccctagccagcaatctgccgaagacctcgctagggttcctgctaatagcacctctaatatcctcaatagacttctagtgtcctacgaccctaggatcagacccaactttaagggcattccagttgacgtggtggtgaacatattcattaactctttcggatccattcaagaaacaaccatggactaccgggtgaacatctttctgcgccagaagtggaatgatcccaggcttaagctgccctctgacttccgcggcagcgatgcactgaccgtggacccaacgatgtacaaatgtctgtggaaacctgatctgtttttcgcaaatgaaaaaagtgctaacttccatgatgtcacccaggaaaacatcctgttgttcatttttcgcgatggcgacgtgctggtcagcatgcgactatctattaccctgagttgtccgctggacctcactctgtttccgatggatacccagaggtgtaaaatgcagttagaatccttcggttatactactgatgacctccgcttcatctggcaaagcggcgatcccgtgcagctggaaaaaatagccttgccacagttcgatatcaaaaaagaagacatcgaatacggcaactgtaccaagtattataaaggcactggctactatacatgtgtcgaagtgatcttcacgttgcggaggcaggtcgggttctatatgatgggagtctacgcaccaacactgctgattgttgtactcagctggctcagcttctggatcaatcccgacgcatccgccgcacgcgttcccctggggtggtag

SEQ ID NO: 64281 - DNA, 912 bp, Artificial Sequence
  derived and/or modified sequence
atgaagttcctgttaactaccgcttttcttattctgatatccctgtgggtggaggaggcctactctaaggagaaatcttctaaaaaagggaagggcaaaaagaagcaatatctgtgccccagtcagcagtccgctgaagacctcgcgagagttccggcaaattcaacctcaaacatcctcaacagacttctagtaagttacgaccctagaatccggcctaatttcaaaggcataccagtcgatgtggtggtaaatattttcatcaactcattcgggtcaatccaggaaaccacaatggattatagagttaatattttcctccgccagaagtggaacgatcctcgcctgaaacttccctctgatttcagaggctcggacgctctgaccgtcgaccctacaatgtacaaatgcctctggaaacccgacctgttctttgccaatgagaagtccgcaaatttccacgacgtaacacaagagaatatccttctcttcatcttccgtgatggggatgtccttgtcagcatgagactcagcattacactctcctgccccctcgacttgaccctgtttccaatggatactcagaggtgtaagatgcaactggagtcatttggctatacaacagacgacctgaggttcatctggcagagcggcgatccagtccaactggagaaaattgccttaccacaattcgacattaagaaggaggacatcgagtacgggaattgtaccaaatattacaagggcacgggatactacacgtgcgtcgaggtaatcttcacactgcgacggcaggtgggcttttatatgatgggcgtctacgcaccaacgcttctgatcgtcgtcctgtcctggttatctttctggatcaatcctgacgccagcgctgcgagggttcccctcggctggtag

SEQ ID NO: 64282 - DNA, 912 bp, Artificial Sequence
  derived and/or modified sequence
atgaagttcctgctgaccaccgccttcctgatcctgatcagcctgtgggtggaggaggcctacagcaaggagaagagcagcaagaagggcaagggcaagaagaagcagtacctgtgccccagccagcagagcgccgaggacctggccagagtgcccgccaacagcaccagcaacatcctgaacagactgctggtgagctacgaccccagaatcagacccaacttcaagggcatccccgtggacgtggtggtgaacatcttcatcaacagcttcggcagcatccaggagaccaccatggactacagagtgaacatcttcctgagacagaagtggaacgaccccagactgaagctgcccagcgacttcagaggcagcgacgccctgaccgtggaccccaccatgtacaagtgcctgtggaagcccgacctgttcttcgccaacgagaagagcgccaacttccacgacgtgacccaggagaacatcctgctgttcatcttcagagacggcgacgtgctggtgagcatgagactgagcatcaccctgagctgccccctggacctgaccctgttccccatggacacccagagatgcaagatgcagctggagagcttcggctacaccaccgacgacctgagattcatctggcagagcggcgaccccgtgcagctggagaagatcgccctgccccagttcgacatcaagaaggaggacatcgagtacggcaactgcaccaagtactacaagggcaccggctactacacctgcgtggaggtgatcttcaccctgagaagacaggtgggcttctacatgatgggcgtgtacgcccccaccctgctgatcgtggtgctgagctggctgagcttctggatcaaccccgacgccagcgccgccagagtgcccctgggctggtag

SEQ ID NO: 64283 - protein, 455 aa, Artificial Sequence
  derived and/or modified sequence
MLATRRLLGWSLPARTAPKKTSFGSLKDEDRIFTNLYGRHDWRLKGSLSRGDWYKTKEILLKGPDWILGEIKTSGLRGRGGAGFPTGLKWSFMNKPSDGRPKYLVVNADEGEPGTCKDREILRHDPHKLLEGCLVGGRAMGARAAYIYIRGEFYNEASNLQVAIREAYEAGLIGKNACGSGYDFDVFVVRGAGAYICGEETALIESIEGKQGKPRLKPPFPADVGVFGCPTTVANVETVAVSPTICRRGGTWFAGFGRERNSGTKLFNISGHVNHPCTVEEEMSVPLKELIEKHAGGVTGGWDNLLAVIPGGSSTPLIPKSVCETVLMDFDALVQAQTGLGTAAVIVMDRSTDIVKAIARLIEFYKHESCGQCTPCREGVDWMNKVMARFVRGDARPAEIDSLWEISKQIEGHTICALGDGAAWPVQGLIRHFRPELEERMQRFAQQHQARQAAS

SEQ ID NO: 64284 - DNA, 1008 bp, Artificial Sequence
  derived and/or modified sequence
atgctagccacaaggcgactcctcgggtggagcctacctgccagggtgtctgtgagattttcaggggacaccaccgcaccaaagaagacatcttttgggagcctgaaggatgaagaccggatctttacaaacctatatggcaggcatgactggcggctgaaagggagcctatcaagaggggactggtataagacaaaagaaatcttgctcaaggggccagactggattcttggagagatcaagaccagcggcctgcgcgggagaggaggagctgggttcccaaccgggctcaaatggagtttcatgaacaaacctagcgatgggtcaccaaccacggtggctaatgtggagacagtcgcggtttccccaacaatctgtaggagaggcgggacttggttcgcaggcttcgggagagagcgaaattcaggcaccaagctattcaatattagcggacacgtcaaccatccctgcaccgtagaagaagagatgagcgttcccttgaaggaactcatagagaaacacgcgggaggagtcacgggtgggtgggacaacctcctggctgttattccggggggcagctcaacaccgcttatccccaaaagcgtctgtgagactgtgctgatggatttcgatgccctggtgcaggcccagaccggcttaggcacagctgccgtgattgtgatggatcgctcaaccgacatcgtaaaagctattgcgcgactcatagagttttacaagcacgagtcatgcggacagtgcaccccttgtagagaaggggtcgattggatgaataaggtgatggctagattcgtgaggggtgacgcaagacccgcagaaatagactcattgtgggagatttcaaagcagatcgaagggcacacaatctgcgccctcggggacggggccgcctggccagtgcagggcctcatcagacactttaggcctgagttagaggagcgaatgcaaagatttgcgcaacaacaccaggctcgacaagcagcctcttag

SEQ ID NO: 64285 - DNA, 1368 bp, Artificial Sequence
  derived and/or modified sequence
atgctggccacacggcgattgcttgggtggtcactccctgcccggaccgcccctaagaaaaccagcttcggatccctgaaagacgaagatagaatctttacgaatctgtatgggaggcacgattggcgcctgaaggggtcgctgagtcgcggcgattggtataaaaccaaggagattctgctcaaaggaccggactggatactaggggagataaagacgtctggtttgcgggggaggggtggcgctggcttcccgaccgggctgaagtggtcatttatgaataagcccagtgatggtcgtcccaaatatttagtcgttaatgccgatgagggagagccagggacatgcaaagaccgcgagatcctgcggcacgacccacataaattgttggagggttgcctggtgggcggacgagctatgggggcccgggctgcctatatctacattaggggggaattctacaacgaggccagcaatttgcaggtggcgattcgggaggcctatgaggcagggctgattggaaagaacgcctgtggtagcgggtacgacttcgatgtctttgtggtgcggggggccggcgcctacatttgtggcgaggaaacagccctcattgaatccatcgaggggaagcagggtaagcccaggctcaaacctccttttccagccgatgtgggcgtgtttggttgccccacaaccgttgctaacgtcgaaactgtggcagtgtcccccacaatctgtaggcggggaggcacgtggtttgccggttttggaagggagcggaattccggtactaaactcttcaacatttctggacacgtgaaccacccgtgcaccgtcgaggaagaaatgtcagtgcccctgaaggaacttatcgagaagcacgctggaggcgtcactgggggttgggacaacctgctcgcagtgatccccggcggttccagtactcccctgattcctaagtccgtgtgtgaaactgtgctcatggactttgatgccctagtgcaggctcagaccgggcttggcaccgctgccgtcattgtcatggaccggtccacagacatcgtcaaagcaattgcgcggctcatcgaattctataaacacgagagctgcggtcagtgcacaccttgtcgcgagggtgtagattggatgaacaaagtgatggcccggttcgtcaggggagatgctcgacctgccgaaatcgattccctgtgggaaatctccaagcagattgaaggccataccatttgtgctctcggtgacggagccgcctggcccgtccagggcttgattcggcactttagacctgagctggaagagagaatgcaacgctttgcacagcagcatcaggctaggcaagccgccagttag

SEQ ID NO: 64286 - DNA, 1092 bp, Artificial Sequence
  derived and/or modified sequence
atgaacaagccaagcgacgggagacccaagtatttagtggtcaacgcagatgaaggggaacccgggacctgtaaggatcgggaaatactgaggcatgatcctcacaagctcctggagggttgcctggtcggggggagggcaatgggagccagagcagcttacatttacatccggggggagttttataacgaggccagtaatcttcaagttgctatacgcgaagcctatgaagcaggactcatcggtaaaaatgcttgtgggtccgggtacgattttgatgtgttcgtcgtgcggggagccggcgcttacatctgcggcgaggaaacagcccttatcgaaagtatcgagggcaagcagggcaaacctcgactgaaaccgccgttccctgccgatgtcggtgttttcggctgtccgacaactgttgccaatgtcgagactgtcgcagtctcacctaccatctgtaggagaggcggtacttggtttgcaggattcggccgggaaaggaatagcggtactaagctgtttaatattagcggtcacgtgaaccacccttgcacagttgaggaagagatgtctgtgcctctaaaagagctgatagaaaagcacgccggaggagtgactggcggttgggacaatctgctggccgttattccaggcggatcgagcacaccactaataccaaaatccgtctgtgaaactgtgctgatggactttgacgctttagtgcaggctcaaaccggcctcggcaccgctgctgttatcgtgatggatcgatccaccgatattgtaaaagcgattgcaaggttaattgaattttataagcatgaatcttgtggacagtgcacaccatgcagggagggagtggattggatgaacaaggtgatggctagatttgtgaggggggatgctaggccggccgagatcgactccttgtgggaaatctctaaacagatagaaggtcacactatatgtgcgttaggagacggggccgcatggcccgtgcagggtctgatcaggcattttcgaccagagctagaagaacggatgcaacggtttgcccagcaacaccaggcaaggcaggcagcgagctag

SEQ ID NO: 64287 - DNA, 1008 bp, Artificial Sequence
  derived and/or modified sequence
atgctggccacccggcggctgctgggctggagcctgcctgcccgggtgtctgtgcgcttcagcggggacaccacagcccccaagaagaccagctttggcagcctgaaggatgaggaccgcatcttcaccaacctgtatggaagacatgactggaggctgaagggcagcctgagcagaggagactggtacaagaccaaggagatcctgctgaagggccctgactggatcctgggggagatcaagaccagcggcctgcggggccggggcggggccggcttccccaccggcctgaagtggagcttcatgaacaagcccagtgatggcagccccaccaccgtggccaacgtggagaccgtggccgtgagccccaccatctgcagaagaggaggcacctggtttgctggcttcggccgggagaggaacagcggcaccaagctgttcaacatcagcggccacgtgaaccacccctgcaccgtggaggaggagatgtctgtgcccctgaaggagctgattgagaagcatgctggaggagtgactggaggctgggacaacctgctggccgtcatccctgggggcagcagcacccccctcatccccaagtctgtgtgtgaaacagtgctgatggactttgatgccctggtgcaggcccagacaggcctgggcacagctgctgtgattgtgatggacaggagcacagacatcgtgaaggccatcgcccggctcatcgagttctacaagcatgagagctgtggccagtgcaccccctgccgggagggcgtggactggatgaacaaggtgatggccaggtttgtgagaggagatgcccggcctgctgagattgacagcctgtgggagatcagcaagcagatcgagggccacaccatctgtgccctgggagatggagctgcctggcctgtgcagggcctcatccgccacttccggcctgagctggaggagaggatgcagagatttgcccagcagcaccaggcccggcaggccgccagctag

SEQ ID NO: 64288 - DNA, 1368 bp, Artificial Sequence
  derived and/or modified sequence
atgctggccacccggcggctgctgggctggagcctgcctgccaggacagcccccaagaagaccagctttggcagcctgaaggatgaagatcgcatcttcaccaacctgtatggaagacatgactggaggctgaagggcagcctgagcagaggagactggtacaagaccaaggagatcctgctgaagggccctgactggatcctgggggagatcaagaccagcggcctgcggggccggggcggggccggcttccccaccggcctgaagtggagcttcatgaacaagcccagtgatggccggcccaagtacctggtggtgaatgctgatgaaggagagcccggcacctgcaaggaccgggagatcctgcggcatgacccccacaagctgctggagggctgcctggtgggcggccgggccatgggcgcccgggccgcctacatctacatccggggggagttctacaatgaggccagcaacctgcaggtggccatccgggaggcctatgaggccggcctgattggcaagaatgcctgtggcagcggctatgactttgatgtgtttgtggtgcggggggccggggcctacatctgtggggaggagacagccctgattgagagcattgagggcaagcagggcaagccccggctgaagccacccttcccagcagatgtgggcgtgtttggctgccccaccaccgtggccaacgtggagaccgtggccgtgagccccaccatctgcagaagaggaggcacctggtttgctggcttcggccgggagaggaacagcggcaccaagctgttcaacatcagcggccacgtgaaccacccctgcaccgtggaggaggagatgtctgtgcccctgaaggagctgattgagaagcatgctggaggagtgactggaggctgggacaacctgctggccgtcatccctgggggcagcagcacccccctcatccccaagtctgtgtgtgaaacagtgctgatggactttgatgccctggtgcaggcccagacaggcctgggcacagctgctgtgattgtgatggacaggagcacagacatcgtgaaggccatcgcccggctcatcgagttctacaagcatgagagctgtggccagtgcaccccctgccgggagggcgtggactggatgaacaaggtgatggccaggtttgtgagaggagatgcccggcctgctgagattgacagcctgtgggagatcagcaagcagatcgagggccacaccatctgtgccctgggagatggagctgcctggcctgtgcagggcctcatccgccacttccggcctgagctggaggagaggatgcagagatttgcccagcagcaccaggcccggcaggccgccagctag

SEQ ID NO: 64289 - DNA, 1092 bp, Artificial Sequence
  derived and/or modified sequence
atgaacaagcccagtgatggccggcccaagtacctggtggtgaatgctgatgaaggagagcccggcacctgcaaggaccgggagatcctgcggcatgacccccacaagctgctggagggctgcctggtgggcggccgggccatgggcgcccgggccgcctacatctacatccggggggagttctacaatgaggccagcaacctgcaggtggccatccgggaggcctatgaggccggcctgattggcaagaatgcctgtggcagcggctatgactttgatgtgtttgtggtgcggggggccggggcctacatctgtggggaggagacagccctgattgagagcattgagggcaagcagggcaagccccggctgaagccacccttcccagcagatgtgggcgtgtttggctgccccaccaccgtggccaacgtggagaccgtggccgtgagccccaccatctgcagaagaggaggcacctggtttgctggcttcggccgggagaggaacagcggcaccaagctgttcaacatcagcggccacgtgaaccacccctgcaccgtggaggaggagatgtctgtgcccctgaaggagctgattgagaagcatgctggaggagtgactggaggctgggacaacctgctggccgtcatccctgggggcagcagcacccccctcatccccaagtctgtgtgtgaaacagtgctgatggactttgatgccctggtgcaggcccagacaggcctgggcacagctgctgtgattgtgatggacaggagcacagacatcgtgaaggccatcgcccggctcatcgagttctacaagcatgagagctgtggccagtgcaccccctgccgggagggcgtggactggatgaacaaggtgatggccaggtttgtgagaggagatgcccggcctgctgagattgacagcctgtgggagatcagcaagcagatcgagggccacaccatctgtgccctgggagatggagctgcctggcctgtgcagggcctcatccgccacttccggcctgagctggaggagaggatgcagagatttgcccagcagcaccaggcccggcaggccgccagctag

SEQ ID NO: 64290 - DNA, 1131 bp, Artificial Sequence
  derived and/or modified sequence
agtgctatgaaggtgacagcgtgaggtgacccatctggcccgccgcgatgctggcaacacggcggctgctcggctggtcgcttcccgcgcgggtatctgtgcgtttcagcggcgacacgacagcacccaagaaaacctcatttggctcgctgaaggatgaagaccggattttcaccaacctgtacggccgccatgactggaggctgaaaggttccctgagtcgaggtgactggtacaagacaaaggagatcctgctgaaggggcccgactggatcctgggcgagatcaagacatcgggtttgaggggccgtggaggcgctggcttccccactggcctcaagtggagcttcatgaataagccctcagatggcagccccacaactgtggccaacgtggagacagtggcagtgtcccccacaatctgccgccgtggaggtacctggtttgctggctttggcagagaacgcaactcaggcaccaaactattcaacatctctggccatgtcaaccacccttgcactgtggaggaggagatgtctgtgcccttgaaagaactgattgagaagcatgctgggggtgtcacgggcggctgggacaacctccttgctgtgatccctggcggctcgtctaccccactgatccccaagtctgtgtgtgagacggtgctgatggacttcgatgcgctggtgcaggcacagacaggcctgggcacagctgcggtgatcgtcatggaccgctcgacggacatcgtgaaagccatcgcccgcctcattgagttctataagcacgagagctgtggccagtgtaccccatgccgtgagggtgtggactggatgaacaaggtgatggcacgtttcgtgaggggggatgcccggccggccgagatcgactccctgtgggagatcagcaagcagatagaaggccatacgatttgtgctctgggtgacggggccgcctggcctgtgcagggtctgatccgccactttcggccggagctcgaggagcggatgcagcggtttgcccagcagcatcaggcccggcaggctgcctcttagcccaccaccctggcctgctgtcctgcgtctatccatgtggaatgctggacaataaagcgagtgctgcccaccctcc

SEQ ID NO: 64291 - DNA, 1503 bp, Artificial Sequence
  derived and/or modified sequence
cgccagttcctcagcctcagtgctatgaaggtgacagcgtgaggtgacccatctggcccgccgcgatgctggcaacacggcggctgctcggctggtcgcttcccgcgcggacagcacccaagaaaacctcatttggctcgctgaaggatgaagaccggattttcaccaacctgtacggccgccatgactggaggctgaaaggttccctgagtcgaggtgactggtacaagacaaaggagatcctgctgaaggggcccgactggatcctgggcgagatcaagacatcgggtttgaggggccgtggaggcgctggcttccccactggcctcaagtggagcttcatgaataagccctcagatggcaggcccaagtatctggtggtgaacgcagacgagggggagccgggcacctgcaaggaccgggagatcttacgccatgatcctcacaagctgctggaaggctgcctggtggggggccgggccatgggcgcccgcgctgcctatatctacatccgaggggaattctacaatgaggcctccaatctgcaggtggccatccgagaggcctatgaggcaggtctgattggcaagaatgcttgtggctctggctatgattttgacgtgtttgtggtgcgcggggctggggcctacatctgtggagaggagacagcgctcatcgagtccattgagggcaagcagggcaagccccgcctgaagccccccttccccgcagacgtgggagtgtttggctgccccacaactgtggccaacgtggagacagtggcagtgtcccccacaatctgccgccgtggaggtacctggtttgctggctttggcagagaacgcaactcaggcaccaaactattcaacatctctggccatgtcaaccacccttgcactgtggaggaggagatgtctgtgcccttgaaagaactgattgagaagcatgctgggggtgtcacgggcggctgggacaacctccttgctgtgatccctggcggctcgtctaccccactgatccccaagtctgtgtgtgagacggtgctgatggacttcgatgcgctggtgcaggcacagacaggcctgggcacagctgcggtgatcgtcatggaccgctcgacggacatcgtgaaagccatcgcccgcctcattgagttctataagcacgagagctgtggccagtgtaccccatgccgtgagggtgtggactggatgaacaaggtgatggcacgtttcgtgaggggggatgcccggccggccgagatcgactccctgtgggagatcagcaagcagatagaaggccatacgatttgtgctctgggtgacggggccgcctggcctgtgcagggtctgatccgccactttcggccggagctcgaggagcggatgcagcggtttgcccagcagcatcaggcccggcaggctgcctcttagcccaccaccctggcctgctgtcctgcgtctatccatgtggaatgctggacaataaagcgagtgctgccca

SEQ ID NO: 64292 - DNA, 1493 bp, Artificial Sequence
  derived and/or modified sequence
gcgtgacgtctttcctgcgcgccacctagcgtctctatcgcgccagttcctcagcctcagtgctatgaaggtgacagcgtgaggtgacccatctggcccgccgcgatgctggcaacacggcggctgctcggctggtcgcttcccgcgcgggtatctgtgcgtttcagcggcgacacggctgaaaggttccctgagtcgaggtgactggtacaagacaaaggagatcctgctgaaggggcccgactggatcctgggcgagatcaagacatcgggtttgaggggccgtggaggcgctggcttccccactggcctcaagtggagcttcatgaataagccctcagatggcaggcccaagtatctggtggtgaacgcagacgagggggagccgggcacctgcaaggaccgggagatcttacgccatgatcctcacaagctgctggaaggctgcctggtggggggccgggccatgggcgcccgcgctgcctatatctacatccgaggggaattctacaatgaggcctccaatctgcaggtggccatccgagaggcctatgaggcaggtctgattggcaagaatgcttgtggctctggctatgattttgacgtgtttgtggtgcgcggggctggggcctacatctgtggagaggagacagcgctcatcgagtccattgagggcaagcagggcaagccccgcctgaagccccccttccccgcagacgtgggagtgtttggctgccccacaactgtggccaacgtggagacagtggcagtgtcccccacaatctgccgccgtggaggtacctggtttgctggctttggcagagaacgcaactcaggcaccaaactattcaacatctctggccatgtcaaccacccttgcactgtggaggaggagatgtctgtgcccttgaaagaactgattgagaagcatgctgggggtgtcacgggcggctgggacaacctccttgctgtgatccctggcggctcgtctaccccactgatccccaagtctgtgtgtgagacggtgctgatggacttcgatgcgctggtgcaggcacagacaggcctgggcacagctgcggtgatcgtcatggaccgctcgacggacatcgtgaaagccatcgcccgcctcattgagttctataagcacgagagctgtggccagtgtaccccatgccgtgagggtgtggactggatgaacaaggtgatggcacgtttcgtgaggggggatgcccggccggccgagatcgactccctgtgggagatcagcaagcagatagaaggccatacgatttgtgctctgggtgacggggccgcctggcctgtgcagggtctgatccgccactttcggccggagctcgaggagcggatgcagcggtttgcccagcagcatcaggcccggcaggctgcctcttagcccaccaccctggcctgctgtcctgcgtctatccatgtggaatgctggacaataaagcgagtgctgcccaccctcc

SEQ ID NO: 64293 - DNA, 1008 bp, Artificial Sequence
  derived and/or modified sequence
atgctggccacccggcggctgctgggctggagcctgcccgcccgggtgagcgtgaggttttccggggacaccacagcccctaagaaaacatcctttggttctctgaaagacgaggatcggatttttaccaacctgtacggacggcacgactggcgactcaaaggatcactaagtcgaggggattggtacaagacgaaggagattcttctaaagggtccggattggattctcggagaaatcaagacctccgggctacgaggtcgcggaggtgctgggtttcctaccggcctcaaatggagttttatgaataaaccctcggatggatctcctacaaccgttgctaatgtggagacggtcgctgtgtctcccaccatctgccggcgcggaggcacttggtttgcaggcttcggccgggaacggaattctggcaccaagcttttcaacatctccggccatgtgaaccacccttgcaccgttgaggaggaaatgagcgttcccctaaaggagctcattgagaagcacgctggtggagtcacgggtggttgggacaaccttcttgcagtaattcctgggggttcaagtacacctttaattccaaaaagtgtgtgtgagaccgtcctgatggacttcgacgccctggtccaagcacaaactgggcttggaacagcagccgtgatcgtgatggaccggtccactgatattgtgaaggcaatcgccaggttgattgagttctataagcatgagagctgtgggcagtgcaccccttgtcgcgaaggtgtagactggatgaacaaagtcatggcccgtttcgtgcgcggcgacgcccgaccagccgagatagattccctctgggaaattagtaagcagatagaggggcacaccatatgcgccctgggcgatggtgctgcctggccagtacagggtttaatacgtcatttccgtcccgagctggaagagagaatgcagaggttcgcccagcagcatcaggcaaggcaagccgcatcttag

SEQ ID NO: 64294 - DNA, 1368 bp, Artificial Sequence
  derived and/or modified sequence
atgctggccacccggcggctgctgggctggagcctgcccgcccggaccgcccctaaaaagacttcatttggctctctgaaggacgaagatcggatttttaccaacctttacgggcgccatgactggcgtttgaaagggtccctaagtagaggcgactggtacaaaacaaaagaaatcctattgaaagggccagactggatcctgggggagatcaaaacatccggacttcgggggcgtgggggtgcaggatttcctaccgggctcaagtggtctttcatgaataaaccgtctgacggaaggccaaagtatctcgtggtaaacgctgatgaaggcgagccagggacttgcaaggatagggagatccttaggcacgacccccataaactgctggaaggatgtctcgttggaggaagagcgatgggtgcacgagccgcttatatatatattagaggggagttttataatgaggctagtaacctgcaggtggccattagggaagcctatgaggccggtctcatcggtaagaatgcctgcggctctgggtatgacttcgacgtctttgtggtccggggcgcgggcgcctacatctgcggcgaagaaaccgctctgattgaaagtattgagggcaaacagggcaagccgaggcttaagcccccttttcctgcggacgtaggcgtgtttggatgcccgactaccgtggccaatgtcgagacagtggccgtaagtccaactatatgtaggagaggtgggacctggtttgctggctttggacgagaaaggaactccggcaccaagctcttcaatatctcaggccacgtgaatcacccatgtaccgtcgaggaagaaatgtccgtcccacttaaagagctgatcgagaagcacgccgggggggtcacaggcggttgggacaacttgctagcagtgattccaggaggctcttcaacccctctgatccccaaaagtgtgtgtgagacagtattgatggacttcgatgcactggtccaggcacaaacgggtctgggcactgcagccgtaattgttatggaccgctctacggacatcgtaaaggcgattgctaggttgattgaattttacaaacacgagtcatgcggtcaatgtactccatgtcgggagggcgtggactggatgaacaaggtcatggctagattcgtgcgcggagacgcaaggcctgccgagattgactcattatgggagatttctaagcaaatcgagggccataccatttgcgctctgggcgacggagctgcctggccagtgcagggccttatccgccattttcgccctgaactggaagagcggatgcagagatttgcccagcaacaccaggcacgtcaagccgcatcctag

SEQ ID NO: 64295 - DNA, 1092 bp, Artificial Sequence
  derived and/or modified sequence
atgaacaagcccagcgacggccggcccaagtacctggtggtgaacgccgacgaaggggaacccggcacatgtaaggatagggaaattttgcgacatgatccacataagttactggaagggtgtctggtgggcggtcgagccatgggagctcgtgcagcgtacatttatattcgcggagagttttataacgaagcaagcaacctgcaggttgcgatacgggaagcctatgaggcaggccttataggaaaaaacgcttgtggttcaggatacgatttcgatgtcttcgttgttcgaggcgcgggggcctatatatgtggtgaagaaacagcactgattgagtctatagaaggaaagcagggcaagccgcggcttaaaccccccttcccagctgacgtcggcgtctttggctgccctactactgtagccaacgtggagacagttgccgtgagcccgacaatttgtcgcagaggcggtacctggttcgctggtttcggtcgtgagaggaattctgggaccaaactatttaatatctctgggcatgttaaccatccatgtaccgtcgaagaggagatgtctgttccactcaaagagctcattgagaaacatgctgggggagtgacagggggctgggataatctcctggccgttatccctggaggtagtagtacacccctcattcccaagtcagtctgtgaaaccgtcctcatggatttcgatgctctcgtgcaggcacaaaccggcctcggaacagctgctgttattgtcatggatcgttcaacagacatagtcaaggcaatcgcgaggctcatcgaattctataagcatgagagctgtggccaatgtactccgtgtcgtgagggggtggattggatgaacaaggtaatggctaggttcgtgcgcggtgacgctagacccgcggaaatcgatagcctctgggaaatctcgaaacagatcgaaggtcatactatctgcgccctgggcgacggagccgcctggcccgtccaagggctaattcgtcacttcagacccgagctcgaagagaggatgcaaagatttgcacagcagcatcaagcacggcaggctgcaagttag

SEQ ID NO: 64296 - DNA, 1008 bp, Artificial Sequence
  derived and/or modified sequence
atgctggcaactcgaaggttgcttggctggtctctccccgctcgggtgtccgtgcggttttctggagatacaactgcaccaaagaagacttcttttggcagtcttaaggatgaagatagaattttcacaaatttgtacggcaggcatgattggaggctgaaagggagcctaagccggggagattggtacaaaactaaggagatactgctgaaaggccctgactggatcctgggggagatcaagaccagcgggctgaggggcaggggcggagcaggcttccctaccggattgaagtggagttttatgaataaaccttcggacggttcacctaccaccgtggctaatgtggagaccgtagccgtgagccccaccatctgtcgtagagggggaacctggttcgctggctttggccgtgagagaaacagcggaacgaaactgtttaatatctcaggtcacgtgaatcacccttgtacagtcgaagaggagatgagtgtgcctctcaaggagctgatcgagaagcacgccggtggtgtcaccggagggtgggacaaccttctcgcagtgattccgggaggtagcagtacaccactcattccgaagtcagtgtgcgagacagtgttaatggatttcgatgccttagtccaggctcagactggcctgggtaccgctgcagttattgttatggataggagtacagatatcgtgaaagccatcgcaagattgattgagttctataagcacgaatcttgcggacagtgcaccccatgtagagaaggcgtggactggatgaacaaggtcatggcccgattcgttaggggcgacgcccgacccgctgagatagactcattgtgggagatcagcaagcaaattgaaggtcacactatttgtgctctcggggatggagccgcatggccagtccagggattgattcgacattttcgccctgagctcgaggagaggatgcaaaggtttgcgcagcaacaccaggccaggcaggcggcttcttag

SEQ ID NO: 64297 - DNA, 1368 bp, Artificial Sequence
  derived and/or modified sequence
atgttggccacgcggcgtttgttggggtggagtttgcccgctagaacagcccctaaaaagacaagcttcggatctctgaaagacgaggacaggatcttcactaatctgtacgggagacatgactggagactcaagggatccctctccaggggtgactggtacaaaaccaaggagattctgctgaagggcccagactggatactcggggaaattaagacatctggccttcgcggtcgcggaggcgctgggttccccaccggactaaagtggagcttcatgaacaagcccagtgacggtcgacccaaatatctggtcgtaaatgcggacgagggcgaacctggcacatgcaaagatcgcgagattctgcggcacgacccacacaagttgctggaaggatgtctggtagggggtcgggctatgggtgccagggccgcatacatatatattagaggcgaattttataatgaggccagcaatctgcaagtcgctattagagaagcctacgaggcgggacttattggaaaaaacgcttgcggatctggttatgactttgacgtttttgtggtcagaggcgctggcgcttacatttgcggagaggagacagcactcattgaatctatcgagggaaaacagggaaagccacgattaaaacctcccttccccgctgacgttggtgtcttcggatgccctacaacggtcgcgaacgtcgagacagtggctgtctccccgacaatttgtcgcagaggcggaacctggtttgcaggctttggtcgggagcgaaacagcgggactaaactctttaatatctccggacacgtgaaccacccatgtaccgtagaagaagaaatgagtgtgcccctcaaggaactaattgagaagcatgcagggggagttacgggagggtgggataatctactagcggtaatccccggtggctctagcacgccactgattcccaaatcagtctgcgaaaccgttttgatggacttcgacgcactggtgcaggcccaaactggcctcggcaccgccgctgtcatcgttatggaccgtagtaccgatattgttaaggcaatcgcacgcctgatcgaattttataagcatgagagctgcggtcagtgcaccccttgccgtgaaggggtcgattggatgaataaagtcatggccagattcgtacgcggtgatgcccgacccgcagaaattgactccttgtgggagatcagcaaacagattgagggccacaccatttgcgctcttggggatggtgccgcatggcccgtccagggactgatccgtcacttcagaccggaactggaggaacggatgcagcggttcgcacagcagcatcaagcccgtcaggcggcatcctag

SEQ ID NO: 64298 - DNA, 1092 bp, Artificial Sequence
  derived and/or modified sequence
atgaataagccatccgacggcaggcctaagtacctggttgtgaatgccgacgaaggtgaaccgggaacatgtaaggatcgggaaatcctgcgccatgatccccataagcttctggaggggtgtttagtgggtggacgggctatgggtgcccgagcagcttacatttatattcgaggcgaattctataacgaagccagtaatctacaggtggcgatcagggaggcctatgaggccggtctgatcgggaagaacgcgtgtggttcaggctacgacttcgacgtgtttgtggtccggggagcaggagcttatatatgtggcgaagagacagctctgatagaatcgatagaggggaaacaaggcaagcccagactcaagccacctttccctgccgacgtcggcgtcttcggctgcccaaccactgtggctaacgtggagacagtggccgtcagccctacaatatgtaggagggggggaacctggttcgccggttttggacgagaacgcaattcggggactaagttattcaacatttccggccatgtcaatcacccctgcacagttgaagaagagatgagtgttcctttaaaggaactaatcgagaaacatgctgggggtgtcacaggaggatgggacaatctgctggccgtaatccctggaggaagctcaacccctctgattcccaaatcagtttgcgagaccgtgctaatggacttcgatgcccttgtgcaagcccaaactggcctgggcacagccgcagtgatagtcatggacaggtctaccgacatcgtcaaggccattgcccgtctgatagagttttataagcacgagtcctgtggccagtgtactccttgtagagagggggtggattggatgaataaagtgatggcccgtttcgtccgcggagacgctagacctgcggaaattgattccctttgggaaataagcaaacagatcgaggggcacaccatttgtgcactaggagacggcgcagcgtggccagtgcaaggactgatccggcatttcagacccgaattggaggagcgaatgcagaggttcgcccaacaacaccaagccaggcaggctgcaagttag

SEQ ID NO: 64299 - DNA, 1008 bp, Artificial Sequence
  derived and/or modified sequence
atgctggccaccagaagactgctgggctggagcctgcccgccagagtgagcgtgagattcagcggcgacaccaccgcccccaagaagaccagcttcggcagcctgaaggacgaggacagaatcttcaccaacctgtacggcagacacgactggagactgaagggcagcctgagcagaggcgactggtacaagaccaaggagatcctgctgaagggccccgactggatcctgggcgagatcaagaccagcggcctgagaggcagaggcggcgccggcttccccaccggcctgaagtggagcttcatgaacaagcccagcgacggcagccccaccaccgtggccaacgtggagaccgtggccgtgagccccaccatctgcagaagaggcggcacctggttcgccggcttcggcagagagagaaacagcggcaccaagctgttcaacatcagcggccacgtgaaccacccctgcaccgtggaggaggagatgagcgtgcccctgaaggagctgatcgagaagcacgccggcggcgtgaccggcggctgggacaacctgctggccgtgatccccggcggcagcagcacccccctgatccccaagagcgtgtgcgagaccgtgctgatggacttcgacgccctggtgcaggcccagaccggcctgggcaccgccgccgtgatcgtgatggacagaagcaccgacatcgtgaaggccatcgccagactgatcgagttctacaagcacgagagctgcggccagtgcaccccctgcagagagggcgtggactggatgaacaaggtgatggccagattcgtgagaggcgacgccagacccgccgagatcgacagcctgtgggagatcagcaagcagatcgagggccacaccatctgcgccctgggcgacggcgccgcctggcccgtgcagggcctgatcagacacttcagacccgagctggaggagagaatgcagagattcgcccagcagcaccaggccagacaggccgccagctag

SEQ ID NO: 64300 - DNA, 1368 bp, Artificial Sequence
  derived and/or modified sequence
atgctggccaccagaagactgctgggctggagcctgcccgccagaaccgcccccaagaagaccagcttcggcagcctgaaggacgaggacagaatcttcaccaacctgtacggcagacacgactggagactgaagggcagcctgagcagaggcgactggtacaagaccaaggagatcctgctgaagggccccgactggatcctgggcgagatcaagaccagcggcctgagaggcagaggcggcgccggcttccccaccggcctgaagtggagcttcatgaacaagcccagcgacggcagacccaagtacctggtggtgaacgccgacgagggcgagcccggcacctgcaaggacagagagatcctgagacacgacccccacaagctgctggagggctgcctggtgggcggcagagccatgggcgccagagccgcctacatctacatcagaggcgagttctacaacgaggccagcaacctgcaggtggccatcagagaggcctacgaggccggcctgatcggcaagaacgcctgcggcagcggctacgacttcgacgtgttcgtggtgagaggcgccggcgcctacatctgcggcgaggagaccgccctgatcgagagcatcgagggcaagcagggcaagcccagactgaagccccccttccccgccgacgtgggcgtgttcggctgccccaccaccgtggccaacgtggagaccgtggccgtgagccccaccatctgcagaagaggcggcacctggttcgccggcttcggcagagagagaaacagcggcaccaagctgttcaacatcagcggccacgtgaaccacccctgcaccgtggaggaggagatgagcgtgcccctgaaggagctgatcgagaagcacgccggcggcgtgaccggcggctgggacaacctgctggccgtgatccccggcggcagcagcacccccctgatccccaagagcgtgtgcgagaccgtgctgatggacttcgacgccctggtgcaggcccagaccggcctgggcaccgccgccgtgatcgtgatggacagaagcaccgacatcgtgaaggccatcgccagactgatcgagttctacaagcacgagagctgcggccagtgcaccccctgcagagagggcgtggactggatgaacaaggtgatggccagattcgtgagaggcgacgccagacccgccgagatcgacagcctgtgggagatcagcaagcagatcgagggccacaccatctgcgccctgggcgacggcgccgcctggcccgtgcagggcctgatcagacacttcagacccgagctggaggagagaatgcagagattcgcccagcagcaccaggccagacaggccgccagctag

SEQ ID NO: 64301 - DNA, 1092 bp, Artificial Sequence
  derived and/or modified sequence
atgaacaagcccagcgacggcagacccaagtacctggtggtgaacgccgacgagggcgagcccggcacctgcaaggacagagagatcctgagacacgacccccacaagctgctggagggctgcctggtgggcggcagagccatgggcgccagagccgcctacatctacatcagaggcgagttctacaacgaggccagcaacctgcaggtggccatcagagaggcctacgaggccggcctgatcggcaagaacgcctgcggcagcggctacgacttcgacgtgttcgtggtgagaggcgccggcgcctacatctgcggcgaggagaccgccctgatcgagagcatcgagggcaagcagggcaagcccagactgaagccccccttccccgccgacgtgggcgtgttcggctgccccaccaccgtggccaacgtggagaccgtggccgtgagccccaccatctgcagaagaggcggcacctggttcgccggcttcggcagagagagaaacagcggcaccaagctgttcaacatcagcggccacgtgaaccacccctgcaccgtggaggaggagatgagcgtgcccctgaaggagctgatcgagaagcacgccggcggcgtgaccggcggctgggacaacctgctggccgtgatccccggcggcagcagcacccccctgatccccaagagcgtgtgcgagaccgtgctgatggacttcgacgccctggtgcaggcccagaccggcctgggcaccgccgccgtgatcgtgatggacagaagcaccgacatcgtgaaggccatcgccagactgatcgagttctacaagcacgagagctgcggccagtgcaccccctgcagagagggcgtggactggatgaacaaggtgatggccagattcgtgagaggcgacgccagacccgccgagatcgacagcctgtgggagatcagcaagcagatcgagggccacaccatctgcgccctgggcgacggcgccgcctggcccgtgcagggcctgatcagacacttcagacccgagctggaggagagaatgcagagattcgcccagcagcaccaggccagacaggccgccagctag

SEQ ID NO: 64302 - protein, 195 aa, Artificial Sequence
  derived and/or modified sequence
MAQLCGLRRSRAFLALLGSLLLSGVLAADRERSIHENATGDLATSRNAADSSVPSAPRRQDSEDHSSDMFNYEEYCTANAVTGPCRASFPRWYFDVERNSCNNFIYGGCRGNKNSYRSEEACMLRCFRQQENPPLPLGSKVVVLAGLFVMVLILFLGASMVYLIRVARRNQERALRTVWSSGDDKEQLVKNTYVL

SEQ ID NO: 64303 - DNA, 588 bp, Artificial Sequence
  derived and/or modified sequence
atggctcaattgtgcggcctgaggaggtcaagggcgttcctggctctcttggggagtctgctgttatctggagtactggcagccgatagggagaggtccattcacgagaacgctacaggggacctggcaacctcacggaatgcagcagactccagcgtacccagcgcaccgcgccgacaagactccgaggatcactcgagcgacatgtttaattatgaggagtactgtaccgctaacgcagtcaccggcccatgtcgggcttcctttccacgttggtactttgacgtggaacgaaacagctgcaataatttcatctatggcggatgtcgggggaacaagaacagctaccggtcagaagaggcttgcatgctccgctgctttagacaacaggaaaatcctcctttgcctctagggagcaaagtagtagtgcttgccggattgttcgtgatggtccttatcctgttcttgggggcgtcaatggtttatcttataagggtcgctcgaaggaaccaggagagggcccttcggactgtttggtcttccggggatgataaggagcaattggtcaaaaatacctatgtattatag

SEQ ID NO: 64304 - DNA, 588 bp, Artificial Sequence
  derived and/or modified sequence
atggcccagctgtgtggcctgcggcgcagccgggccttcctggccctgctgggcagcctgctgctgtctggagtgctggccgctgaccgggagaggagcatccatgaaaatgccactggagacctggccaccagcagaaatgctgctgacagctctgtgcccagcgccccccggcggcaggacagcgaggaccacagcagtgacatgttcaactatgaggagtactgcacagccaatgctgtgacaggcccctgccgggccagcttcccccgctggtactttgatgtggagaggaacagctgcaacaacttcatctacggcggctgccggggcaacaagaacagctacagaagtgaggaggcctgcatgctgcgctgcttccggcagcaggagaacccccccctgcccctgggcagcaaggtggtggtgctggccggcctgtttgtgatggtgctgatcctcttcctgggcgcctccatggtgtacctgatccgggtggcccggaggaaccaggagcgggccctgaggacagtgtggagcagtggagatgacaaggagcagctggtgaagaacacctacgtgctgtag

SEQ ID NO: 64305 - DNA, 588 bp, Artificial Sequence
  derived and/or modified sequence
atggcccagctgtgcggcctgcggcggagccgggccttcctggccctcctcggcagtctgctcttgtccggggttcttgcagccgacagagaacgcagcatccatgaaaacgctacaggagatctggctacgagcagaaatgctgctgattcgtctgtgccatccgctccccggcgtcaggacagcgaggatcacagctccgatatgtttaattacgaggagtactgcactgctaatgcggtaaccggaccatgccgagcgagctttccaaggtggtatttcgacgtggaaaggaactcctgtaataacttcatttacggcggctgcagaggtaataaaaactcatacaggtccgaggaggcgtgtatgctgcgatgctttcgtcaacaggaaaatccacctctccccctcggcagtaaagtggtggtgctcgccggtttgtttgttatggttcttatcctctttctgggcgcctccatggtttatctcattcgcgtcgcgcggcgtaatcaggagcgggccctgcgcacagtgtggagttccggtgacgataaggagcagctggttaagaacacttacgtgctttag

SEQ ID NO: 64306 - DNA, 588 bp, Artificial Sequence
  derived and/or modified sequence
atggcccaactgtgcggccttaggcgcagtagagccttcttggcactcctagggtccttgctcttaagcggcgtactggccgcagaccgagagcgctcaattcacgagaacgcgactggtgacctggccacatcacgcaacgcagccgattcctccgtgccatcagcccctcggagacaggactccgaggatcatagctccgacatgttcaactacgaagaatattgcacagccaacgccgtaacgggcccttgtagggcctctttcccgcgatggtacttcgacgtggaaaggaattcgtgcaataacttcatctatgggggttgtaggggtaataagaattcttataggtcggaagaggcctgcatgctgcgctgttttaggcagcaagagaatccccctctgccactcgggtcgaaggtcgtggttttggccggactgtttgttatggtcctaatactcttcctgggagcatccatggtgtatctcatccgggtggccaggaggaaccaagagcgcgcattgaggacggtgtggagttcaggcgatgataaggaacagctcgtgaaaaacacctacgtgctctag

SEQ ID NO: 64307 - DNA, 1630 bp, Artificial Sequence
  derived and/or modified sequence
gcggccgcgcaggtgcctgccctttgcgcctgcgcccagctcgccctgcctagccaggtgcgccccgccccctgcctgcccggccaccttcgggagccgcttccaataggcgttcgccattggctctggcgacctccgcgcgttgggaggtgtagcgcggctctgaacgcgctgagggccgttgagtgtcgcaggcggcgagggcgcgagtgaggagcagacccaggcatcgcgcgccgagaaggccgggcgtccccacactgaaggtccggaaaggcgacttccgggggctttggcacctggcggaccctcccggagcgtcggcacctgaacgcgaggcgctccattgcgcgtgcgcgttgaggggcttcccgcacctgatcgcgagaccccaacggctggtggcgtcgcctgcgcgtctcggctgagctggccatggcgcagctgtgcgggctgaggcggagccgggcgtttctcgccctgctgggatcgctgctcctctctggggtcctggcggccgaccgagaacgcagcatccacgagaatgccacgggtgacctggccaccagcaggaatgcagcggattcctctgtcccaagtgctcccagaaggcaggattctgaagaccactccagcgatatgttcaactatgaagaatactgcaccgccaacgcagtcactgggccttgccgtgcatccttcccacgctggtactttgacgtggagaggaactcctgcaataacttcatctatggaggctgccggggcaataagaacagctaccgctctgaggaggcctgcatgctccgctgcttccgccagcaggagaatcctcccctgccccttggctcaaaggtggtggttctggcggggctgttcgtgatggtgttgatcctcttcctgggagcctccatggtctacctgatccgggtggcacggaggaaccaggagcgtgccctgcgcaccgtctggagctccggagatgacaaggagcagctggtgaagaacacatatgtcctgtgaccgccctgtcgccaagaggactggggaagggaggggagactatgtgtgagctttttttaaatagagggattgactcggatttgagtgatcattagggctgaggtctgtttctctgggaggtaggacggctgcttcctggtctggcagggatgggtttgctttggaaatcctctaggaggctcctcctcgcatggcctgcagtctggcagcagccccgagttgtttcctcgctgatcgatttctttcctccaggtagagttttctttgcttatgttgaattccattgcctcttttctcatcacagaagtgatgttggaatcgtttcttttgtttgtctgatttatggtttttttaagtataaacaaaagttttttattagcattctgaaagaaggaaagtaaaatgtacaagtttaataaaaaggggccttcccctttagaataaatttcagcatgtgctttctttatgggagtcctaatttcaaccctaccaaaatgatcacaagacactatctgaggtgtcccattctagaaatagacccctcaaaatagcgtctttcagatctttttgaatgaatccacaagatgaaataaatgtcctattactg

SEQ ID NO: 64308 - DNA, 588 bp, Artificial Sequence
  derived and/or modified sequence
atggcccagctgtgcggcctgagaagaagcagagccttcctggccctgctgggcagcctgctgctgagcggcgtgctggccgccgacagagagagaagcatccacgagaacgccaccggcgacctggccaccagcagaaacgccgccgacagcagcgtgcccagcgcccccagaagacaggacagcgaggaccacagcagcgacatgttcaactacgaggagtactgcaccgccaacgccgtgaccggcccctgcagagccagcttccccagatggtacttcgacgtggagagaaacagctgcaacaacttcatctacggcggctgcagaggcaacaagaacagctacagaagcgaggaggcctgcatgctgagatgcttcagacagcaggagaacccccccctgcccctgggcagcaaggtggtggtgctggccggcctgttcgtgatggtgctgatcctgttcctgggcgccagcatggtgtacctgatcagagtggccagaagaaaccaggagagagccctgagaaccgtgtggagcagcggcgacgacaaggagcagctggtgaagaacacctacgtgctgtag

SEQ ID NO: 64309 - protein, 867 aa, Artificial Sequence
  derived and/or modified sequence
METKGYHSLPEGLDMERRWGQVSQAVERSSLGPTERTDENNYMEIVNVSCVSGAIPNNSTQGSSKEKQELLPCLQQDNNRPGILTSDIKTELESKELSATVAESMGLYMDSVRDADYSYEQQNQQGSMSPAKIYQNVEQLVKFYKGNGHRPSTLSCVNTPLRSFMSDSGSSVNGGVMRAVVKSPIMCHEKSPSVCSPLNMTSSVCSPAGINSVSSTTASFGSFPVHSPITQGTPLTCSPNVENRGSRSHSPAHASNVGSPLSSPLSSMKSSISSPPSHCSVKSPVSSPNNVTLRSSVSSPANINNSRCSVSSPSNTNNRSTLSSPAASTVGSICSPVNNAFSYTASGTSAGSSTLRDVVPSPDTQEKGAQEVPFPKTEEVESAISNGVTGQLNIVQYIKPEPDGAFSSSCLGGNSKINSDSSFSVPIKQESTKHSCSGTSFKGNPTVNPFPFMDGSYFSFMDDKDYYSLSGILGPPVPGFDGNCEGSGFPVGIKQEPDDGSYYPEASIPSSAIVGVNSGGQSFHYRIGAQGTISLSRSARDQSFQHLSSFPPVNTLVESWKSHGDLSSRRSDGYPVLEYIPENVSSSTLRSVSTGSSRPSKICLVCGDEASGCHYGVVTCGSCKVFFKRAVEGQHNYLCAGRNDCIIDKIRRKNCPACRLQKCLQAGMNLGGFKNLPLEDQITLIQYSWMCLSSFALSWRSYKHTNSQFLYFAPDLVFNEEKMHQSAMYELCQGMHQISLQFVRLQLTFEEYTIMKVLLLLSTIPKDGLKSQAAFEEMRTNYIKELRKMVTKCPNNSGQSWQRFYQLTKLLDSMHDLVSDLLEFCFYTFRESHALKVEFPAMLVEIISDQLPKVESGNAKPLYFHRK

SEQ ID NO: 64310 - protein, 639 aa, Artificial Sequence
  derived and/or modified sequence
METKGYHSLPEGLDMERRWGQVSQAVERSSLGPTERTDENNYMEIVNVSCVSGAIPNNSTQGSSKEKQELLPCLQQDNNRPGILTSDIKTELESKELSATVAESMGLYMDSVRDADYSYEQQNQQGSMSPAKIYQNVEQLVKFYKGNGHRPSTLSCVNTPLRSFMSDSGSSVNGGVMRAVVKSPIMCHEKSPSVCSPLNMTSSVCSPAGINSVSSTTASFGSFPVHSPITQGTPLTCSPNVENRGSRSHSPAHASNVGSPLSSPLSSMKSSISSPPSHCSVKSPVSSPNNVTLRSSVSSPANINNSRCSVSSPSNTNNRSTLSSPAASTVGSICSPVNNAFSYTASGTSAGSSTLRDVVPSPDTQEKGAQEVPFPKTEEVESAISNGVTGQLNIVQYIKPEPDGAFSSSCLGGNSKINSDSSFSVPIKQESTKHSCSGTSFKGNPTVNPFPFMDGSYFSFMDDKDYYSLSGILGPPVPGFDGNCEGSGFPVGIKQEPDDGSYYPEASIPSSAIVGVNSGGQSFHYRIGAQGTISLSRSARDQSFQHLSSFPPVNTLVESWKSHGDLSSRRSDGYPVLEYIPENVSSSTLRSVSTGSSRPSKKNIYRFLLCNNRTRGVGQQLPLSPRSSTVFCITGIHTR

SEQ ID NO: 64311 - DNA, 2604 bp, Artificial Sequence
  derived and/or modified sequence
atggagaccaaggggtaccattccctgcccgaaggcttggacatggaacggcgatggggccaggtctcccaggcagtggagcgttcatccctcggccctacggaaagaacagatgagaataattatatggagatagtcaatgtctcttgcgtcagtggcgctattcctaataatagcactcagggatcgagcaaggagaagcaggaactgctaccctgtctgcagcaagacaataaccgaccaggaatcctcacaagtgatatcaagacagagctggaatctaaagagttgagcgcaacagtggctgagtctatggggctgtatatggattccgttagggacgcagattattcctacgagcagcagaaccaacaaggctctatgagccccgcaaagatctatcagaatgtggagcaactggtcaagttttataaaggtaatggtcatcgccccagtactttatcatgtgtgaatactcctctacgctcctttatgagcgacagcggatcgagcgtgaatggcggagtgatgcgtgctgtcgtgaagtcacccatcatgtgtcacgaaaagtctccctctgtgtgtagccctctgaacatgacctcgagtgtgtgctccccagcaggcatcaacagcgtgtctagcacaaccgcttccttcggctcgttccccgtacatagccccattacccaggggacccctctgacctgttcacctaatgtggaaaatcggggcagccggtcccacagtcccgcgcacgccagcaacgttgggagtccgctatcaagccctctgtcctcaatgaaatcatccatttcatcccccccctctcactgcagcgttaaatccccagtctcctcacctaataacgtgacgctgaggagtagcgtctcctccccagccaacattaacaatagtcggtgctcagtgtcctcaccaagcaatacaaataaccggtccacactatccagtccagctgcctcaactgtaggatccatttgttctccagttaacaatgctttcagctacacagcatctggcacatcggctgggagctccactttaagggatgtggtgcctagccccgacacacaagaaaaaggcgctcaggaggtgcccttccctaaaaccgaagaagtggagagtgcaatctccaacggtgtgactggccagctgaacattgtgcagtatatcaaacccgagccggatggggctttctcctcaagttgtctaggcggcaactccaagatcaattccgactcctctttttctgtgcctattaaacaggaaagtacgaaacactcatgctctgggacatcatttaaggggaaccctacagtcaacccattccccttcatggatggttcttatttctcttttatggacgataaggactattacagtctgtccgggatccttgggcctcctgtccctggtttcgacggaaattgcgaagggtcgggatttcccgtggggatcaagcaggaaccggatgacggtagctactaccctgaggcttccatccccagttcagccatagtgggcgtcaactccggcggacagtcttttcattatcggataggtgcccagggcacaatcagcctgagtcgtagtgcccgagaccagtcttttcagcacttaagttcttttccccccgttaacaccttggttgagtcctggaaaagtcacggggatctgagttctcggcgttctgatggctatcccgtgctggagtatatccccgagaacgtgagcagttctactctaagatcggttagtaccgggagtagtagacccagcaagatatgtctggtctgtggcgatgaagcttccggttgccactacggggtggttacctgtggttcttgtaaagtgttcttcaaaagagcagttgaaggccagcacaactatttatgtgctgggcggaacgattgtatcattgacaagattcggcgcaaaaattgtcctgcatgccggctgcaaaagtgcctccaggcaggaatgaatttaggcggattcaagaaccttccactcgaagatcaaattacattgattcaatactcgtggatgtgtttaagttctttcgccctctcctggcgcagctacaagcacacaaactctcaatttctgtactttgcccctgacctcgtgtttaacgaggagaaaatgcaccagtccgccatgtatgagctatgtcagggaatgcaccaaattagtctgcagtttgtgcggctgcagctcacattcgaagaatacaccataatgaaggttcttctgcttctctctaccatccccaaggatgggctgaaatcacaggccgcatttgaagagatgaggacaaattacatcaaagagcttagaaaaatggtcaccaagtgtccgaataatagtggccagagttggcagaggttctatcaactgaccaagctgttggactctatgcacgatctcgtgtcagatctactggaattctgtttttacacgtttagagagtcccacgccctcaaggtggaattcccggcgatgctggtggagatcatcagtgaccagctccccaaggttgagtccggcaatgcgaaaccgctctatttccaccgcaaatag

SEQ ID NO: 64312 - DNA, 1920 bp, Artificial Sequence
  derived and/or modified sequence
atggagaccaaggggtaccatagtctgcccgagggtctggacatggagagaagatgggggcaggtgagtcaggccgtggagcggagctcactggggcccaccgagcgaacagatgagaataactacatggaaattgtgaatgtgtcctgtgtgtcaggagccatccccaataacagtacacagggaagcagtaaggagaaacaggaactcttgccttgcctgcagcaggataataatcgccctggtattctcaccagcgatatcaaaaccgaacttgagtctaaagaacttagcgcaaccgtggccgagtctatgggcctctacatggatagtgtacgcgatgcagactacagctacgaacagcaaaatcagcagggatccatgtcgccggcgaagatttaccaaaacgtggaacagctcgtgaaattctacaaaggcaatggacaccggccctcaactctctcttgcgtgaatactcctctgagatccttcatgagtgattctggtagcagtgtcaatggaggagtcatgagggctgtggttaagagtcccatcatgtgccacgagaagtctccatcagtgtgttcgccactgaatatgacaagttcagtgtgctcgcctgcaggcatcaactccgtgagcagcaccactgcatccttcggtagttttcccgtgcactcacctatcacacagggaacaccactgacgtgtagccctaacgtggaaaatcgcggatcccgctcacatagtccagcccacgccagcaatgtggggagcccactttcaagtcccctctcgagtatgaaatccagcatttcctcccccccatctcattgttccgtgaagtcacccgtctcctcaccaaacaacgtgacactgcggagctcggtgtctagccctgcaaacatcaacaactcaagatgctcagtgtcttcgccctctaatacaaacaatcgaagtactctaagcagcccagccgctagcacagtggggtccatttgctcccctgtgaataatgcattctcatacaccgcctccggcacctccgcagggtccagtactcttagggacgtcgtgccatctccagatacgcaggagaagggggctcaggaggtgccttttccaaaaaccgaggaagtcgagtcagctattagtaacggtgtgacgggtcaattgaacatcgtgcagtatatcaaacccgagccggacggggcgttttccagttcgtgtctgggaggcaattctaaaataaactctgattcctcatttagcgtgccaatcaagcaggagtctaccaagcatagttgcagcggaacgtctttcaaggggaatccaacggtgaatcccttcccattcatggatgggtcttacttcagctttatggacgacaaggactattactcactcagtggaatcctcggacctcccgtgccggggtttgacggaaactgcgagggctctggatttcctgtgggcatcaaacaggagcccgatgacggtagctactatccggaggcctctatccctagcagtgccattgtgggcgttaatagcggggggcagtcatttcattacagaatcggggcccagggcacaatcagtctgtctcgctcagctcgggaccagtcttttcagcatctcagtagtttccctcctgtcaatactctggtggagagctggaagtcacacggcgacctgtcatcgcgacggtcagacggataccccgttttagagtatatccctgagaacgtgtcctcaagtactctcagaagcgttagcacagggagtagtaggccctcgaaaaagaacatttatagatttctgctgtgcaacaaccgaactcgtggagtaggacagcagctgcccctgagcccaagatctagtaccgtcttctgtataaccggaattcacacccgctag

SEQ ID NO: 64313 - DNA, 2604 bp, Artificial Sequence
  derived and/or modified sequence
atggagaccaagggctaccacagcctgcctgagggcctggacatggagcggcgctggggccaggtgtcccaggccgtggagaggagcagcctgggccccacagagaggacagatgagaacaactacatggagatcgtgaatgtgtcctgtgtgtctggggccatccccaacaacagcacccagggcagcagcaaggagaagcaggagctgctgccctgcctgcagcaggacaacaacagacctggcatcctgaccagtgacatcaagacagagctggagagcaaggagctgagcgccaccgtggccgagagcatgggcctgtacatggattctgtgagagatgctgactacagctatgagcagcagaaccagcagggctccatgagccctgccaagatctaccagaatgtggagcagctggtgaagttctacaagggaaatggccaccggcccagcaccctgagctgtgtgaacacccccctgcgctccttcatgtctgacagcggcagctctgtgaatggaggagtgatgagagctgtggtgaagagccccatcatgtgccacgagaagagccccagcgtgtgcagccccctgaacatgaccagctctgtgtgcagccctgctggcatcaacagcgtgagcagcaccacagccagctttggcagcttccctgtgcacagccccatcacccagggcacccccctgacctgcagccccaacgtggagaacagaggcagccgcagccacagccctgcccacgccagcaatgtgggcagccccctgagcagccccctgagctccatgaagagcagcatcagcagcccccccagccactgcagcgtgaagagccctgtgagcagccccaacaacgtgaccctgcggagctctgtgagcagccctgccaacatcaacaacagccgctgcagcgtgagcagccccagcaacaccaacaacagaagcaccctgagcagccctgctgccagcacagtgggcagcatctgcagccctgtgaacaatgccttctcctacacagccagcggcaccagcgctggcagcagcaccctgagagatgtggtgcccagcccagacacccaggagaagggggcccaggaggtgcccttccccaagacagaggaggtggagagcgccatcagcaatggagtgacaggccagctgaacatcgtgcagtacatcaagccagagccagatggagccttcagcagcagctgcctgggcggcaacagcaagatcaacagcgacagcagcttctctgtgcccatcaagcaggagagcaccaagcacagctgcagcggcaccagcttcaagggcaaccccaccgtgaaccccttccccttcatggatggcagctacttctccttcatggatgacaaggactactacagcctgagcggcatcctgggcccccctgtgcccggctttgatggcaactgtgagggcagcggcttccctgtgggcatcaagcaggagccagatgatggcagctactacccagaggccagcatccccagcagcgccatcgtgggcgtgaacagcggcggccagagcttccactacagaattggagcccagggcaccatcagcctgagccgcagcgcccgggaccagagcttccagcacctgagcagcttcccccctgtgaacaccctggtggagagctggaagagccatggagacctgagcagcagaagaagtgatggctaccctgtgctggagtacatcccagaaaatgtgagcagcagcaccctgcggtctgtgtccacaggcagcagccggcccagcaagatctgcctggtgtgtggagatgaggccagcggctgccactatggagtggtgacctgtggcagctgcaaggtgttcttcaagagagctgtggagggccagcacaactacctgtgtgccggcagaaatgactgcatcatcgacaagatccggaggaagaactgcccagcctgccgcctgcagaagtgcctgcaggccggcatgaacctgggcggcttcaagaacctgcccctggaggaccagatcaccctcatccagtacagctggatgtgcctgagcagctttgccctgtcctggaggagctacaagcacaccaacagccagttcctgtactttgccccagacctggtgttcaatgaggagaagatgcaccagagcgccatgtatgagctgtgccagggcatgcaccagatcagcctgcagtttgtgcggctgcagctgacctttgaggagtacaccatcatgaaggtgctgctgctgctgagcaccatccccaaggatggcctgaagagccaggccgcctttgaggagatgaggaccaactacatcaaggagctgaggaagatggtgaccaagtgccccaacaacagcggccagagctggcagcgcttctaccagctgaccaagctgctggacagcatgcatgacctggtgtctgacctgctggagttctgcttctacaccttccgggagagccacgccctgaaggtggagttccctgccatgctggtggagatcatcagtgaccagctgcccaaggtggagagcggaaatgccaagcccctgtacttccacaggaagtag

SEQ ID NO: 64314 - DNA, 1920 bp, Artificial Sequence
  derived and/or modified sequence
atggagaccaagggctaccacagcctgcctgagggcctggacatggagcggcgctggggccaggtgtcccaggccgtggagaggagcagcctgggccccacagagaggacagatgagaacaactacatggagatcgtgaatgtgtcctgtgtgtctggggccatccccaacaacagcacccagggcagcagcaaggagaagcaggagctgctgccctgcctgcagcaggacaacaacagacctggcatcctgaccagtgacatcaagacagagctggagagcaaggagctgagcgccaccgtggccgagagcatgggcctgtacatggattctgtgagagatgctgactacagctatgagcagcagaaccagcagggctccatgagccctgccaagatctaccagaatgtggagcagctggtgaagttctacaagggaaatggccaccggcccagcaccctgagctgtgtgaacacccccctgcgctccttcatgtctgacagcggcagctctgtgaatggaggagtgatgagagctgtggtgaagagccccatcatgtgccacgagaagagccccagcgtgtgcagccccctgaacatgaccagctctgtgtgcagccctgctggcatcaacagcgtgagcagcaccacagccagctttggcagcttccctgtgcacagccccatcacccagggcacccccctgacctgcagccccaacgtggagaacagaggcagccgcagccacagccctgcccacgccagcaatgtgggcagccccctgagcagccccctgagctccatgaagagcagcatcagcagcccccccagccactgcagcgtgaagagccctgtgagcagccccaacaacgtgaccctgcggagctctgtgagcagccctgccaacatcaacaacagccgctgcagcgtgagcagccccagcaacaccaacaacagaagcaccctgagcagccctgctgccagcacagtgggcagcatctgcagccctgtgaacaatgccttctcctacacagccagcggcaccagcgctggcagcagcaccctgagagatgtggtgcccagcccagacacccaggagaagggggcccaggaggtgcccttccccaagacagaggaggtggagagcgccatcagcaatggagtgacaggccagctgaacatcgtgcagtacatcaagccagagccagatggagccttcagcagcagctgcctgggcggcaacagcaagatcaacagcgacagcagcttctctgtgcccatcaagcaggagagcaccaagcacagctgcagcggcaccagcttcaagggcaaccccaccgtgaaccccttccccttcatggatggcagctacttctccttcatggatgacaaggactactacagcctgagcggcatcctgggcccccctgtgcccggctttgatggcaactgtgagggcagcggcttccctgtgggcatcaagcaggagccagatgatggcagctactacccagaggccagcatccccagcagcgccatcgtgggcgtgaacagcggcggccagagcttccactacagaattggagcccagggcaccatcagcctgagccgcagcgcccgggaccagagcttccagcacctgagcagcttcccccctgtgaacaccctggtggagagctggaagagccatggagacctgagcagcagaagaagtgatggctaccctgtgctggagtacatcccagaaaatgtgagcagcagcaccctgcggtctgtgtccacaggcagcagccggcccagcaagaagaacatctaccgcttcctgctgtgcaacaacagaacccggggcgtgggccagcagctgcccctgagccccaggagcagcacagtgttctgcatcaccggcatccacaccaggtag

SEQ ID NO: 64315 - DNA, 2604 bp, Artificial Sequence
  derived and/or modified sequence
atggagaccaagggctaccacagcctgcccgagggcctggacatggaacggcggtggggtcaggtgtcccaggcagtggaacggtctagcctcggccccacagaaagaactgacgagaacaactacatggagatcgttaacgtgtcttgcgtatctggggccatcccgaacaattccacacaggggtcatctaaggagaaacaagagctgctgccatgcctgcaacaggataacaaccgccccgggattcttaccagcgacattaaaacagagctggaatctaaggaactgtccgccaccgtggccgagtccatgggcctgtatatggattccgttcgagacgctgattactcctatgaacagcagaatcagcagggcagcatgtccccagccaaaatctaccaaaatgtagagcagctggtgaaattttataaaggtaatgggcatagaccctccacactgagctgcgtaaacacgcccctgcgatccttcatgagtgattccggttcttctgtgaacgggggggtgatgagggcggtggtcaagtcacccattatgtgtcatgagaagtccccctcagtgtgctcgccgctcaatatgacttccagtgtgtgttcaccagccggcataaattctgtttctagtacaacggcaagtttcggctcctttcccgtacattcaccaattacccagggcactccattgacgtgcagccctaacgtcgaaaatcgcggctctcgcagccatagccctgcccacgctagcaacgtggggtcaccactgtcctcacccttgtcttccatgaagtctagtatttccagcccccctagtcattgcagtgtgaagtctccagtcagcagtcctaacaacgtgactctgaggagcagcgtctcgagccctgcaaatatcaacaactctagatgctcggtatcaagtccttcaaacacaaataatcgctctacacttagtagcccagccgctagtaccgtggggagcatctgcagccctgtcaacaacgctttttcctataccgccagtggcacaagtgctggatcttctacgctacgagatgtcgtcccttcacctgacacccaggagaaaggtgcgcaagaggtcccctttcccaaaactgaagaggtggagtccgccatctctaacggtgtgacaggccagctgaacatcgtccaatatattaaacctgagccagacggggcatttagttcatcctgcttgggaggtaattccaaaattaactccgattcgagcttctcagtgccgatcaaacaggagtccacgaaacactcatgttctggaacctcatttaaaggcaatccaaccgtgaacccatttccattcatggacggctcatacttcagtttcatggacgataaagactattactccctgtctgggattctaggtcctcctgtcccagggttcgatggcaattgtgaaggatctgggttccccgtgggcatcaaacaggagcctgacgatggctcttactaccctgaagcgagcattcccagttcagcaattgtgggagtgaactctggcggccaatcctttcactaccgaatcggtgcacaggggaccatatcgctctcccgctccgcgagggatcaaagcttccagcacctctccagctttccacccgtgaataccctcgtcgaaagttggaagtcccacggagatttgtcctcccgccggtccgacggataccctgtgctagagtacattcccgaaaatgtgtcctctagcacactgagatccgtcagtacaggaagtagccgaccatccaaaatctgtctcgtgtgcggtgacgaggccagcggctgccactatggagtggtgacctgcggatcttgtaaggtattctttaaacgagccgttgagggacagcataactacctgtgcgcgggccggaacgattgcattatcgacaaaattcgtcgcaagaactgtccagcctgccggctccagaagtgtcttcaggctggtatgaacctcggcggttttaagaacctgccactggaggaccaaattacactgatccagtactcctggatgtgcttgagcagctttgcactgtcctggagaagctacaaacatacaaactcccaatttctgtactttgccccggacctggtgttcaacgaagaaaagatgcatcaaagcgctatgtatgaactgtgtcagggtatgcaccagatctcacttcaatttgtgcgactgcagttgacctttgaagagtataccattatgaaggtgctgctactgctgtccacaattcctaaggatggactgaagtcacaggcagcctttgaagaaatgaggacgaattatatcaaggaactacgcaaaatggttacaaaatgtcccaacaattctgggcagagctggcagaggttttaccagctaactaagctcctggacagcatgcatgatctcgtgtcggatctcctggagttctgtttctacacttttcgtgagagccatgcactgaaggtcgagttcccagctatgctggtcgagattattagcgaccagctcccaaaggtagaatcgggcaacgcaaagcccctctattttcatcggaaatag

SEQ ID NO: 64316 - DNA, 1920 bp, Artificial Sequence
  derived and/or modified sequence
atggagaccaagggctaccacagcctgcccgagggcctggacatggagcgtcgatggggacaggtgagccaggctgtggagagatccagtctggggcccactgaacgaacagatgaaaacaattatatggagatagttaatgtgtcttgcgtctctggagctattccaaacaacagtacccagggcagttccaaagagaaacaggagctcctcccgtgcctgcagcaggacaataaccgccccggtatcctgacctctgatatcaaaaccgagctggaaagcaaagaactgtctgccacagtcgctgagtctatggggctttacatggatagcgttcgggacgcggattacagctatgagcagcagaatcagcagggcagtatgtcgccagcaaagatataccaaaatgttgagcagcttgtgaagttttacaaaggcaatggccacaggccctcaaccctgtcttgcgtcaatacaccgctgcgttcgttcatgagcgactcaggtagttcagtgaatgggggagtgatgagggcggttgtgaagtcccccatcatgtgccatgaaaagagcccctctgtgtgttcccctctgaacatgacaagctccgtctgctctcccgctgggatcaattccgtgtcttctactaccgcttccttcggaagctttccagtgcactcaccaattacgcaagggactccgctgacctgttccccaaatgtggagaatagagggtcccgctcacattcacctgcccacgcctcaaatgtcggatctcctctgtcttcccctttgtctagtatgaagagttcaatttcaagcccaccaagccactgctctgttaaaagccctgttagcagccctaacaatgtgacgctcagaagttctgtgagtagccctgcaaacataaacaattctcgatgctcggtttcgagtccatcaaacaccaataatcgctccaccctgtcatctccagcggccagtacggtcggctctatctgtagtccagtgaacaatgcgttctcctataccgccagcggcacctccgctggttcctccactctcagggatgttgtgccctccccggatacgcaggagaagggcgctcaggaggtcccatttccgaagaccgaggaggtggaatccgccatctccaacggggtgacagggcagctgaatatcgttcagtatattaaaccagaacctgatggcgcgtttagctccagctgccttggaggaaattcgaaaatcaatagcgactctagcttctcagtgcccattaagcaagaatctacgaagcatagctgctccggaacgagcttcaaggggaaccccaccgtaaacccttttccttttatggacggatcttacttctccttcatggacgacaaggactattattccctcagcgggattctcggacccccggtgcctggatttgatgggaactgcgagggttccggctttcctgtgggcataaagcaagagccagatgacgggagctattaccccgaggcctccatcccctcatcagccattgtgggggtgaattctgggggccaatcctttcactacagaatcggcgcccagggtacaattagcctatcaagatcagcccgggaccagagcttccagcatctgagtagcttcccgcctgtgaataccttggtagagagctggaagtcccacggcgacctctcatcgcggcggagcgacggatacccagtcctggagtatattccagaaaatgtgagctcgagtactctgaggtcagtatctactgggtcctcccggcccagcaagaagaacatataccggtttctgctgtgtaacaaccgcaccagaggggttgggcagcagttgcccctcagcccgcgatcctcaaccgtcttctgcattaccggtattcatacgcgctag

SEQ ID NO: 64317 - DNA, 3822 bp, Artificial Sequence
  derived and/or modified sequence
ggtttcgtggcggtggcaagcgctgcaacaggtagacggcgagagacggaccccggccgaggcagcgatggagaccaaaggctaccacagtctccctgaaggtctagatatggaaagacggtggggtcaagtttctcaggctgtggagcgttcttccctgggacctacagagaggaccgatgagaataactacatggagattgtcaacgtaagctgtgtttccggtgctattccaaacaacagtactcaaggaagcagcaaagaaaaacaagaactactcccttgccttcagcaagacaataatcggcctgggattttaacatctgatattaaaactgagctggaatctaaggaactttcagcaactgtagctgagtccatgggtttatatatggattctgtaagagatgctgactattcctatgagcagcagaaccaacaaggaagcatgagtccagctaagatttatcagaatgttgaacagctggtgaaattttacaaaggaaatggccatcgtccttccactctaagttgtgtgaacacgcccttgagatcatttatgtctgactctgggagctccgtgaatggtggcgtcatgcgcgccgttgttaaaagccctatcatgtgtcatgagaaaagcccgtctgtttgcagccctctgaacatgacatcttcggtttgcagccctgctggaatcaactctgtgtcctccaccacagccagctttggcagttttccagtgcacagcccaatcacccagggaactcctctgacatgctcccctaatgttgaaaatcgaggctccaggtcgcacagccctgcacatgctagcaatgtgggctctcctctctcaagtccgttaagtagcatgaaatcctcaatttccagccctccaagtcactgcagtgtaaaatctccagtctccagtcccaataatgtcactctgagatcctctgtgtctagccctgcaaatattaacaactcaaggtgctctgtttccagcccttcgaacactaataacagatccacgctttccagtccggcagccagtactgtgggatctatctgtagccctgtaaacaatgccttcagctacactgcttctggcacctctgctggatccagtacattgcgggatgtggttcccagtccagacacgcaggagaaaggtgctcaagaggtcccttttcctaagactgaggaagtagagagtgccatctcaaatggtgtgactggccagcttaatattgtccagtacataaaaccagaaccagatggagcttttagcagctcatgtctaggaggaaatagcaaaataaattcggattcttcattctcagtaccaataaagcaagaatcaaccaagcattcatgttcaggcacctcttttaaagggaatccaacagtaaacccgtttccatttatggatggctcgtatttttcctttatggatgataaagactattattccctatcaggaattttaggaccacctgtgcccggctttgatggtaactgtgaaggcagcggattcccagtgggtattaaacaagaaccagatgatgggagctattacccagaggccagcatcccttcctctgctattgttggggtgaattcaggtggacagtccttccactacaggattggtgctcaaggtacaatatctttatcacgatcggctagagaccaatctttccaacacctgagttcctttcctcctgtcaatactttagtggagtcatggaaatcacacggcgacctgtcgtctagaagaagtgatgggtatccggtcttagaatacattccagaaaatgtatcaagctctactttacgaagtgtttctactggatcttcaagaccttcaaaaatatgtttggtgtgtggggatgaggcttcaggatgccattatggggtagtcacctgtggcagctgcaaagttttcttcaaaagagcagtggaagggcaacacaactatttatgtgctggaagaaatgattgcatcattgataagattcgacgaaagaattgtcctgcttgcagacttcagaaatgtcttcaagctggaatgaatttaggaggatttaaaaacttgcctcttgaggaccaaattaccctaatccagtattcttggatgtgtctatcatcatttgccttgagctggagatcgtacaaacatacgaacagccaatttctctattttgcaccagacctagtctttaatgaagagaagatgcatcagtctgccatgtatgaactatgccaggggatgcaccaaatcagccttcagttcgttcgactgcagctcacctttgaagaatacaccatcatgaaagttttgctgctactaagcacaattccaaaggatggcctcaaaagccaggctgcatttgaagaaatgaggacaaattacatcaaagaactgaggaagatggtaactaagtgtcccaacaattctgggcagagctggcagaggttctaccaactgaccaagctgctggactccatgcatgacctggtgagcgacctgctggaattctgcttctacaccttccgagagtcccatgcgctgaaggtagagttccccgcaatgctggtggagatcatcagcgaccagctgcccaaggtggagtcggggaacgccaagccgctctacttccaccggaagtgactgcccgctgcccagaagaactttgccttaagtttccctgtgttgttccacacccagaaggacccaagaaaacctgtttttaacatgtgatggttgattcacacttgttcaacagtttctcaagtttaaagtcatgtcagaggtttggagccgggaaagctgtttttccgtggatttggcgagaccagagcagtctgaaggattccccacctccaatcccccagcgcttagaaacatgttcctgttcctcgggatgaaaagccatatctagtcaataactctgattttgatattttcacagatggaagaagttttaactatgccgtgtagtttctggtatcgttcgcttgttttaaaagggttcaaggactaacgaacgttttaaagcttacccttggtttgcacataaaacgtatagtcaatatggggcattaatattcttttgttattaaaaaaacacaaaaaaataataaaaaaatatatacagattcctgttgtgtaataacagaactcgtggcgtggggcagcagctgcctctgagccctcgctcgtccacggtcttctgcatcactggtatacacactcgttagcgtccatttcttatttaattagaatggataagatgatgttaaatgccttggtttgatttctagtatctattgtgttggctttacaaataattttttgcagtcttttgctgtgctgtacattactgtatgtataaattatgaaggacctgaaataaggtataaggatcttttgtaaatgagacacatacaaaaaaaatctttaatggttaataggatgaatgggaaagtatttttgaaagaattctattttgctggagactatttaagtactatctttgtctaaacaaggtaatttttttttgtaaagtgcaatgtcctgcatgcataatgaaccgtttacagtgtatttaagaaagggaaagctgtgccttttttagcttcatatctaatttaccattattttacagtctctgttgtaaataaccacactgaaacctcttcggttgtcttgaaacctttctactttttctgtactttttgttttgttcttggtctcccgcttggggcatttgtgggactccagcacgttttctggcttctgcttcatcctgctccatcggg

SEQ ID NO: 64318 - DNA, 2283 bp, Artificial Sequence
  derived and/or modified sequence
aaaagggccagccctccagctggcccactccccctccgggctttcgcccgccctctctccctcccttttttgcccgccctggccctgcccctgcccctgccccctcctctcagcccctccgcgcccggggtgtcattgggcccgggagacgggagccaacttcaggctgctcagaggaagcccgtgcagtcagtcacctgggtgcaagagcgttgctgcctcgggctctcccgctgcagggagagcggcactcgctggcctggatgtggttggatttaggggggctccgcagcaggggtttcgtggcggtggcaagcgctgcaacaggtagacggcgagagacggaccccggccgaggcagcgatggagaccaaaggctaccacagtctccctgaaggtctagatatggaaagacggtggggtcaagtttctcaggctgtggagcgttcttccctgggacctacagagaggaccgatgagaataactacatggagattgtcaacgtaagctgtgtttccggtgctattccaaacaacagtactcaaggaagcagcaaagaaaaacaagaactactcccttgccttcagcaagacaataatcggcctgggattttaacatctgatattaaaactgagctggaatctaaggaactttcagcaactgtagctgagtccatgggtttatatatggattctgtaagagatgctgactattcctatgagcagcagaaccaacaaggaagcatgagtccagctaagatttatcagaatgttgaacagctggtgaaattttacaaaggaaatggccatcgtccttccactctaagttgtgtgaacacgcccttgagatcatttatgtctgactctgggagctccgtgaatggtggcgtcatgcgcgccgttgttaaaagccctatcatgtgtcatgagaaaagcccgtctgtttgcagccctctgaacatgacatcttcggtttgcagccctgctggaatcaactctgtgtcctccaccacagccagctttggcagttttccagtgcacagcccaatcacccagggaactcctctgacatgctcccctaatgttgaaaatcgaggctccaggtcgcacagccctgcacatgctagcaatgtgggctctcctctctcaagtccgttaagtagcatgaaatcctcaatttccagccctccaagtcactgcagtgtaaaatctccagtctccagtcccaataatgtcactctgagatcctctgtgtctagccctgcaaatattaacaactcaaggtgctctgtttccagcccttcgaacactaataacagatccacgctttccagtccggcagccagtactgtgggatctatctgtagccctgtaaacaatgccttcagctacactgcttctggcacctctgctggatccagtacattgcgggatgtggttcccagtccagacacgcaggagaaaggtgctcaagaggtcccttttcctaagactgaggaagtagagagtgccatctcaaatggtgtgactggccagcttaatattgtccagtacataaaaccagaaccagatggagcttttagcagctcatgtctaggaggaaatagcaaaataaattcggattcttcattctcagtaccaataaagcaagaatcaaccaagcattcatgttcaggcacctcttttaaagggaatccaacagtaaacccgtttccatttatggatggctcgtatttttcctttatggatgataaagactattattccctatcaggaattttaggaccacctgtgcccggctttgatggtaactgtgaaggcagcggattcccagtgggtattaaacaagaaccagatgatgggagctattacccagaggccagcatcccttcctctgctattgttggggtgaattcaggtggacagtccttccactacaggattggtgctcaaggtacaatatctttatcacgatcggctagagaccaatctttccaacacctgagttcctttcctcctgtcaatactttagtggagtcatggaaatcacacggcgacctgtcgtctagaagaagtgatgggtatccggtcttagaatacattccagaaaatgtatcaagctctactttacgaagtgtttctactggatcttcaagaccttcaaaaaaaaatatatacagattcctgttgtgtaataacagaactcgtggcgtggggcagcagctgcctctgagccctcgctcgtccacggtcttctgcatcactggtatacacactcgttag

SEQ ID NO: 64319 - DNA, 2604 bp, Artificial Sequence
  derived and/or modified sequence
atggagaccaaaggatatcattctttacccgaaggcctggacatggagcggcgatggggccaagttagccaggcggtggaaagaagcagcctgggacccactgagaggaccgatgaaaataactacatggaaattgtgaacgtttcctgcgtgagcggtgcaattcccaataattcgactcaggggagtagcaaagagaagcaggaacttttaccatgtctgcagcaggataataatcggccaggaatcctgacatccgacattaaaacggagctggagtctaaagagttatccgccaccgtcgccgagtctatgggcctgtacatggactcagtaagggatgccgattatagctacgaacagcaaaatcaacagggttccatgtcacctgccaagatttatcaaaatgtagaacagttagtcaaattctacaagggaaacggtcatagaccaagtaccttatcttgtgtcaacacaccactgcgatcttttatgagtgacagcggtagttcagtgaatggaggcgtgatgagagcagtggttaagtcgccaatcatgtgccatgagaaatcgccgtcggtctgttccccattgaatatgacttcctcagtgtgctctcctgccggaatcaactccgtgagttccaccaccgcgtccttcgggagctttcccgtgcacagtcccatcacccagggaactccgcttacttgttcccccaacgttgaaaaccgcggatctcggagtcacagccccgctcacgcttcaaacgtggggtcccccctttctagccccctgtccagtatgaagtcttccatttctagtcccccaagtcattgttcagttaaatcacccgttagttcacctaacaatgttaccctgagaagttcagtgtcgagtcctgcgaacataaataacagccgatgctctgtgtctagcccctccaacactaacaacagaagcaccctgtccagcccagccgcttcaacagtgggctcaatctgcagtcctgtcaataacgcttttagctatactgcatccgggaccagtgccggttcaagcaccttgagagacgtggttccatctcctgacacccaggaaaagggggcacaagaggtaccattccccaaaacagaggaagtggaatctgccatttctaatggcgttaccggccagttaaatattgtgcagtacatcaagcctgagccagatggcgcattcagttctagctgtcttggaggcaatagtaagatcaacagcgattcctcgttctccgttcctattaaacaggagtccactaaacacagctgcagcggcacatccttcaaggggaaccctaccgttaaccccttcccgtttatggacggaagttatttttcattcatggatgataaggattactactcactgagtggcatcctgggacctccggtgcctgggtttgatggcaactgcgagggaagcggcttcccggtgggaattaaacaggagcccgatgacggcagctactaccccgaggccagcattccttcatctgccatcgtgggagtgaacagtggcggacaatctttccactaccgcattggcgctcaggggaccatttccctgtctaggtccgctcgagaccagtcttttcagcacctttcgagtttcccgcctgtaaacaccctcgttgagtcttggaagtcccatggcgacctgtctagccgcaggagcgatggctatccggtgctggagtacatccccgaaaatgtatcttctagtacactacggtccgtgtctaccggttcctcaagaccaagcaagatttgcctagtgtgtggcgacgaagctagtgggtgccactatggtgtggtgacgtgtgggtcttgtaaggtttttttcaagcgcgcagtggaaggccagcacaattacttgtgcgcagggagaaacgattgtatcattgataaaatacgcaggaaaaactgtcctgcttgccggctccaaaaatgtttgcaagcgggaatgaatctgggcggattcaagaatctcccattggaggaccaaattacactgattcagtattcatggatgtgcctgtcaagctttgccctgtcttggcgaagttacaagcataccaattcacagtttctctatttcgcgcctgacctggttttcaatgaggagaagatgcatcaatccgctatgtacgaactttgccagggaatgcatcagattagtctccagtttgtccgtttgcagctcacattcgaggaatataccattatgaaggtcctgctgttactgagtacgatcccaaaggacgggcttaagagccaggctgcattcgaagagatgagaacaaattacatcaaggaactcaggaaaatggtaaccaaatgcccaaataactctggccagtcttggcaacggttttatcagctgaccaaactgctggactctatgcatgatctcgtgtccgacctcctcgagttttgcttttacaccttccgcgaaagccacgcattgaaggtggaattccctgccatgctcgtggagatcatcagcgatcagctcccaaaagtggagtcaggcaatgctaaacccctgtacttccacaggaagtag

SEQ ID NO: 64320 - DNA, 1920 bp, Artificial Sequence
  derived and/or modified sequence
atggaaacgaagggctatcacagtctgcctgaaggcctggacatggagcgcaggtggggacaagtatcccaggccgtcgagcgttcctctttaggcccaacagagcgtaccgatgaaaataactacatggagattgtaaacgtgagctgtgttagcggtgccataccgaataactctacacaaggatcctccaaggaaaagcaagagctgctgccttgcttacagcaagacaacaacagacccggtatactcacatcagacataaagacagagctcgagagtaaagagctgtctgcaacagtcgccgaaagtatgggcctttacatggattcggtgagggatgctgactactcctatgaacagcaaaatcaacaaggttccatgtccccggctaaaatttaccaaaatgtcgagcagcttgtcaaattctataagggcaatggacatcgtccctctactcttagctgcgttaatactccactgagatcctttatgagcgatagtgggtcatcagtcaatggcggtgtgatgcgggcagtcgtgaagtcaccaattatgtgtcacgaaaaatccccgagcgtgtgtagccccctgaatatgacctcatctgtgtgtagccctgccggaatcaattcagtgtccagtaccactgcgtctttcggcagttttccagttcacagcccgattacccagggcacgcctctgacctgctctcccaacgtggaaaataggggttctagatctcactcccccgctcatgcatccaacgtggggagccccctgagttcaccactctcatcaatgaagagctccataagcagcccaccttctcactgtagcgtcaaatcacctgtcagtagccccaacaacgtcactctgaggagctccgtctcgtctcccgcaaatatcaacaactcgcggtgctctgtgagctccccatccaatacaaataaccgcagtaccctctcatcaccggctgcatccaccgtgggttctatttgctcacccgttaataacgctttctcttacactgcttcagggacctccgcaggctcttccaccttaagagacgtcgtgccttctccggatacgcaagaaaagggcgctcaggaggtccctttcccaaagaccgaagaagttgagagtgcaattagtaatggtgtgacaggccaacttaatattgttcagtacatcaaacctgagccggacggtgctttcagtagctcatgccttgggggaaactcaaaaataaactccgactccagctttagcgtcccaattaaacaagagtctaccaagcacagttgtagcgggacctccttcaaggggaatcccacggtgaacccattccccttcatggacggctcctactttagctttatggatgataaggactactactctctctccggcatcctagggccaccggtcccgggtttcgacggcaattgtgaggggagtgggttccccgttggaatcaaacaggaaccagacgacggctcctattaccccgaagcgtccatcccttctagtgccattgtgggtgttaacagtggtggacaatcttttcactaccgtatcggcgcacagggcaccatcagtttgtcccggagcgccagggaccagtcatttcagcacctcagtagcttccccccagtcaacacactagtcgaaagctggaaatcccacggggatttgtcatctagaagatccgacgggtaccctgtactggagtatatccccgaaaacgtctcaagctccactctgaggtcggttagcactgggtcctcaagaccatccaaaaaaaacatctataggttcctgctgtgcaataaccgcacccgaggagtgggccagcagctgcctctgtctccccgatccagtaccgtgttctgtattactggaattcacactcgttag

SEQ ID NO: 64321 - DNA, 2604 bp, Artificial Sequence
  derived and/or modified sequence
atggagaccaagggctaccacagcctgcccgagggcctggacatggagagaagatggggccaggtgagccaggccgtggagagaagcagcctgggccccaccgagagaaccgacgagaacaactacatggagatcgtgaacgtgagctgcgtgagcggcgccatccccaacaacagcacccagggcagcagcaaggagaagcaggagctgctgccctgcctgcagcaggacaacaacagacccggcatcctgaccagcgacatcaagaccgagctggagagcaaggagctgagcgccaccgtggccgagagcatgggcctgtacatggacagcgtgagagacgccgactacagctacgagcagcagaaccagcagggcagcatgagccccgccaagatctaccagaacgtggagcagctggtgaagttctacaagggcaacggccacagacccagcaccctgagctgcgtgaacacccccctgagaagcttcatgagcgacagcggcagcagcgtgaacggcggcgtgatgagagccgtggtgaagagccccatcatgtgccacgagaagagccccagcgtgtgcagccccctgaacatgaccagcagcgtgtgcagccccgccggcatcaacagcgtgagcagcaccaccgccagcttcggcagcttccccgtgcacagccccatcacccagggcacccccctgacctgcagccccaacgtggagaacagaggcagcagaagccacagccccgcccacgccagcaacgtgggcagccccctgagcagccccctgagcagcatgaagagcagcatcagcagcccccccagccactgcagcgtgaagagccccgtgagcagccccaacaacgtgaccctgagaagcagcgtgagcagccccgccaacatcaacaacagcagatgcagcgtgagcagccccagcaacaccaacaacagaagcaccctgagcagccccgccgccagcaccgtgggcagcatctgcagccccgtgaacaacgccttcagctacaccgccagcggcaccagcgccggcagcagcaccctgagagacgtggtgcccagccccgacacccaggagaagggcgcccaggaggtgcccttccccaagaccgaggaggtggagagcgccatcagcaacggcgtgaccggccagctgaacatcgtgcagtacatcaagcccgagcccgacggcgccttcagcagcagctgcctgggcggcaacagcaagatcaacagcgacagcagcttcagcgtgcccatcaagcaggagagcaccaagcacagctgcagcggcaccagcttcaagggcaaccccaccgtgaaccccttccccttcatggacggcagctacttcagcttcatggacgacaaggactactacagcctgagcggcatcctgggcccccccgtgcccggcttcgacggcaactgcgagggcagcggcttccccgtgggcatcaagcaggagcccgacgacggcagctactaccccgaggccagcatccccagcagcgccatcgtgggcgtgaacagcggcggccagagcttccactacagaatcggcgcccagggcaccatcagcctgagcagaagcgccagagaccagagcttccagcacctgagcagcttcccccccgtgaacaccctggtggagagctggaagagccacggcgacctgagcagcagaagaagcgacggctaccccgtgctggagtacatccccgagaacgtgagcagcagcaccctgagaagcgtgagcaccggcagcagcagacccagcaagatctgcctggtgtgcggcgacgaggccagcggctgccactacggcgtggtgacctgcggcagctgcaaggtgttcttcaagagagccgtggagggccagcacaactacctgtgcgccggcagaaacgactgcatcatcgacaagatcagaagaaagaactgccccgcctgcagactgcagaagtgcctgcaggccggcatgaacctgggcggcttcaagaacctgcccctggaggaccagatcaccctgatccagtacagctggatgtgcctgagcagcttcgccctgagctggagaagctacaagcacaccaacagccagttcctgtacttcgcccccgacctggtgttcaacgaggagaagatgcaccagagcgccatgtacgagctgtgccagggcatgcaccagatcagcctgcagttcgtgagactgcagctgaccttcgaggagtacaccatcatgaaggtgctgctgctgctgagcaccatccccaaggacggcctgaagagccaggccgccttcgaggagatgagaaccaactacatcaaggagctgagaaagatggtgaccaagtgccccaacaacagcggccagagctggcagagattctaccagctgaccaagctgctggacagcatgcacgacctggtgagcgacctgctggagttctgcttctacaccttcagagagagccacgccctgaaggtggagttccccgccatgctggtggagatcatcagcgaccagctgcccaaggtggagagcggcaacgccaagcccctgtacttccacagaaagtag

SEQ ID NO: 64322 - DNA, 1920 bp, Artificial Sequence
  derived and/or modified sequence
atggagaccaagggctaccacagcctgcccgagggcctggacatggagagaagatggggccaggtgagccaggccgtggagagaagcagcctgggccccaccgagagaaccgacgagaacaactacatggagatcgtgaacgtgagctgcgtgagcggcgccatccccaacaacagcacccagggcagcagcaaggagaagcaggagctgctgccctgcctgcagcaggacaacaacagacccggcatcctgaccagcgacatcaagaccgagctggagagcaaggagctgagcgccaccgtggccgagagcatgggcctgtacatggacagcgtgagagacgccgactacagctacgagcagcagaaccagcagggcagcatgagccccgccaagatctaccagaacgtggagcagctggtgaagttctacaagggcaacggccacagacccagcaccctgagctgcgtgaacacccccctgagaagcttcatgagcgacagcggcagcagcgtgaacggcggcgtgatgagagccgtggtgaagagccccatcatgtgccacgagaagagccccagcgtgtgcagccccctgaacatgaccagcagcgtgtgcagccccgccggcatcaacagcgtgagcagcaccaccgccagcttcggcagcttccccgtgcacagccccatcacccagggcacccccctgacctgcagccccaacgtggagaacagaggcagcagaagccacagccccgcccacgccagcaacgtgggcagccccctgagcagccccctgagcagcatgaagagcagcatcagcagcccccccagccactgcagcgtgaagagccccgtgagcagccccaacaacgtgaccctgagaagcagcgtgagcagccccgccaacatcaacaacagcagatgcagcgtgagcagccccagcaacaccaacaacagaagcaccctgagcagccccgccgccagcaccgtgggcagcatctgcagccccgtgaacaacgccttcagctacaccgccagcggcaccagcgccggcagcagcaccctgagagacgtggtgcccagccccgacacccaggagaagggcgcccaggaggtgcccttccccaagaccgaggaggtggagagcgccatcagcaacggcgtgaccggccagctgaacatcgtgcagtacatcaagcccgagcccgacggcgccttcagcagcagctgcctgggcggcaacagcaagatcaacagcgacagcagcttcagcgtgcccatcaagcaggagagcaccaagcacagctgcagcggcaccagcttcaagggcaaccccaccgtgaaccccttccccttcatggacggcagctacttcagcttcatggacgacaaggactactacagcctgagcggcatcctgggcccccccgtgcccggcttcgacggcaactgcgagggcagcggcttccccgtgggcatcaagcaggagcccgacgacggcagctactaccccgaggccagcatccccagcagcgccatcgtgggcgtgaacagcggcggccagagcttccactacagaatcggcgcccagggcaccatcagcctgagcagaagcgccagagaccagagcttccagcacctgagcagcttcccccccgtgaacaccctggtggagagctggaagagccacggcgacctgagcagcagaagaagcgacggctaccccgtgctggagtacatccccgagaacgtgagcagcagcaccctgagaagcgtgagcaccggcagcagcagacccagcaagaagaacatctacagattcctgctgtgcaacaacagaaccagaggcgtgggccagcagctgcccctgagccccagaagcagcaccgtgttctgcatcaccggcatccacaccagatag

SEQ ID NO: 64323 - protein, 443 aa, Artificial Sequence
  derived and/or modified sequence
MDRLGPFSNDPSDKPPCRGCSSYLMEPYIKCAECGPPPFFLCLQCFTRGFEYKKHQSDHTYEIMTSDFPVLDPSWTAQEEMALLEAVMDCGFGNWQDVANQMCTKTKEECEKHYMKHFINNPLFASTLLNLKQAEEAKTADTAIPFHSTDDPPRPTFDSLLSRDMAGYMPARADFIEEFDNYAEWDLRDIDFVEDDSDILHALKMAVVDIYHSRLKERQRRKKIIRDHGLINLRKFQLMERRYPKEVQDLYETMRRFARIVGPVEHDKFIESHALEFELRREIKRLQEYRTAGITNFCSARTYDHLKKTREEERLKRTMLSEVLQYIQDSSACQQWLRRQADIDSGLSPSIPMASNSGRRSAPPLNLTGLPGTEKLNEKEKELCQMVRLVPGAYLEYKSALLNECNKQGGLRLAQARALIKIDVNKTRKIYDFLIREGYITKG

SEQ ID NO: 64324 - DNA, 1886 bp, Artificial Sequence
  derived and/or modified sequence
tttcccgctcagccctggagcgcgtagctctaccaagaatggccactgtgccagatgcccctgaccagcgttgcccatttgaatttcctagcaggccccccaaagtaggtatttcagtaccctgttagagctgaggcgcaggtaaaatgactggcccaggccggtcccaccccgtaaggatttgaacgttggctccacaactcgggagcctgcgcctttcctcctcccaacgtggactcctgcccggcgaagtgcctcacttccttctcccgggagtcatcaagctttggtgtatgtgttggccggttctgaagtcttgaagaagctctgctgaggaagaccaaagcagcactcgttgccaattagggaatggaccgtttgggtccctttagcaatgatccctctgataagccaccttgccgaggctgctcctcctacctcatggagccttatatcaagtgtgctgaatgtgggccacctccttttttcctctgcttgcagtgtttcactcgaggctttgagtacaagaaacatcaaagcgatcatacttatgaaataatgacttcagattttcctgtccttgatcccagctggactgctcaagaagaaatggcccttttagaagctgtgatggactgtggctttggaaattggcaggatgtagccaatcaaatgtgcaccaagaccaaggaggagtgtgagaagcactatatgaagcatttcatcaataaccctctgtttgcatctaccctgctgaacctgaaacaagcagaggaagcaaaaactgctgacacagccattccatttcactctacagatgaccctccccgacctacctttgactccttgctttctcgggacatggccgggtacatgccagctcgagcagatttcattgaggaatttgacaattatgcagaatgggacttgagagacattgattttgttgaagatgactcggacattttacatgctctgaagatggctgtggtagatatctatcattccaggttaaaggagagacaaagacgaaaaaaaattataagagaccatggattaatcaaccttagaaagtttcaattaatggaacggcggtatcccaaggaggtccaggacctgtatgaaacaatgaggcgatttgcaagaattgtggggccagtggaacatgacaaattcattgaaagccatgcattggaatttgaactccgaagggaaatcaagaggctccaagaatacaggacagcaggcattaccaatttttgtagtgccagaacctacgatcacctcaagaagacacgggaggaagagcgccttaaacgcactatgctctcagaagttctccagtatatccaggacagtagtgcttgccagcagtggctccgccggcaagctgacattgattccggcctgagtccttccattccaatggcttcgaattcaggtagacggagtgcaccacccttgaacctcactggcctccctggcacagagaagctgaatgaaaaagaaaaggagctctgtcagatggtgaggttggtccctggagcctatttagaatacaaatctgctctattgaacgaatgtaacaagcaaggaggcttaagactggcgcaggcaagagcactcatcaagatagatgtgaacaaaacccggaaaatctatgatttcctcatcagagaaggatacatcactaaaggctaaggctccaagagcttgggatcagaagtcagaagtttggaatgtggtgggtcaaaggacaatatgggtgggcattctggagagttgtttttcagctgaattctcatggtgaaaacaggggaaaggacaaaggaaaccttaaaaaaaaaaaaaaaaaaaaaaaaaaaaaaaaaaaaaaaaaaaaaaaa

SEQ ID NO: 64325 - DNA, 1332 bp, Artificial Sequence
  derived and/or modified sequence
atggaccggctgggtccatttagcaacgatccatccgacaagcctccatgtagagggtgctcatcttatttgatggagccatatataaaatgtgctgaatgcggtcccccaccgttcttcctttgcttgcagtgcttcactagaggattcgaatataaaaaacatcagagtgatcatacttacgagatcatgacaagcgacttcccggtgctagacccctcctggactgcacaggaggagatggctctactggaggccgttatggattgcgggttcggtaattggcaggatgtcgccaaccagatgtgcaccaagactaaggaggaatgcgagaagcattacatgaaacattttatcaataatccactttttgccagcacactgcttaatctcaaacaggctgaggaagccaagaccgctgatactgctatccctttccatagtacagacgaccccccacgcccaacattcgatagcctcttgagtagggacatggccggctacatgccagctcgtgccgatttcatcgaggaatttgacaactatgcagagtgggatctccgcgatatagacttcgtggaggacgattcagacattcttcatgccttgaaaatggccgtggtcgacatttatcactcgcggctcaaggagcgccaacgccggaaaaaaataattcgggatcacggccttatcaatttacgcaaatttcagctgatggagagacgctatcccaaggaggttcaagacctgtacgagacaatgcgccgatttgcacggattgtgggacctgtggagcatgataaattcatcgaatcgcatgccctggagtttgagctcaggcgcgagataaagcggctgcaggaataccgtaccgccggaatcaccaacttctgttccgcacgcacttatgaccatcttaagaaaacccgcgaggaggagaggctcaaacggacaatgctttcagaagtgctccagtatatacaagacagttccgcgtgccagcagtggctccgtagacaagccgacatcgattcaggactttccccgagcatacccatggcatcaaatagcgggagacgaagtgcaccccccttgaacttgacaggtctgcccgggacagagaaactgaacgagaaagaaaaggagttatgtcaaatggtgaggctggtgccaggtgcttatctggagtataaatccgcattgctgaatgagtgcaataagcagggcggtctccgactggctcaggcccgggcccttataaagatcgacgtcaacaagactcggaagatctatgacttccttattcgcgaagggtacattaccaagggatag

SEQ ID NO: 64326 - DNA, 1332 bp, Artificial Sequence
  derived and/or modified sequence
atggaccggctgggtcccttctccaacgatccctcggacaagcccccatgccgcggatgctcctcctatctgatggagccctatataaagtgcgcggagtgcggtcctccccccttctttctgtgtctccagtgcttcaccagggggttcgagtataaaaagcatcagagcgatcacacgtatgagataatgacttcggattttcctgtgctcgatccttcatggacggcacaggaggagatggccctgttagaggccgtaatggattgcgggttcgggaactggcaggacgtcgcgaatcagatgtgcaccaaaaccaaggaagagtgcgaaaaacactatatgaagcatttcatcaataatcctttattcgcttccacactgctcaatcttaaacaggccgaagaggcgaaaaccgccgacaccgcaatcccgttccattccactgatgaccctccccggcccacattcgactcactgctatcaagggatatggccggctacatgcccgcccgggcagactttattgaagaatttgacaactacgccgaatgggacctccgggacatagacttcgtcgaagacgattccgacatcctgcatgctcttaagatggctgtcgtcgatatataccacagccgcctgaaggagaggcaacggagaaagaagatcattagagatcatgggctcataaaccttcgaaaattccagctaatggagaggcgctaccctaaggaagtgcaggatttgtatgagactatgagacggttcgcacggatcgttggccctgtggagcatgataaatttatcgagagccacgctcttgagtttgagctgcgtcgcgaaatcaaacgcttgcaagagtataggaccgccggaataacaaatttttgttccgccaggacctatgaccacctcaaaaaaactagggaggaagaaaggctgaagcgcacgatgctcagcgaagtccttcagtatatccaagactcgagtgcttgccagcagtggctcaggcgccaggctgatatcgattcaggcctgtctccttcaatcccaatggcctccaatagtggccgtaggtctgcgccaccacttaacctgaccggtctgcccggaaccgagaaacttaatgaaaaggagaaagaactttgtcagatggtgagactagtgcccggcgcttacctcgagtataagagtgccctcctcaatgagtgtaacaaacagggaggactccgactggcccaggctcgggctcttataaaaattgatgtgaacaagacacggaagatctacgactttttgattcgcgaagggtacattacaaagggatag

SEQ ID NO: 64327 - DNA, 1332 bp, Artificial Sequence
  derived and/or modified sequence
atggaccggctgggccccttcagcaatgaccccagcgacaagccaccctgccggggctgcagcagctacctgatggagccctacatcaagtgtgctgaatgtggccccccacccttcttcctgtgcctgcagtgcttcacccggggctttgagtacaagaagcaccagagcgaccacacctatgagatcatgaccagtgacttccctgtgctggaccccagctggacagcccaggaggagatggccctgctggaggccgtgatggactgtggcttcggcaactggcaggatgtggccaaccagatgtgcaccaagaccaaggaggagtgtgagaagcactacatgaagcacttcatcaacaaccccctgtttgccagcaccctgctgaacctgaagcaggccgaggaggccaagacagctgacacagccatccccttccacagcacagatgaccccccccggcccacctttgacagcctgctgagccgggacatggccggctacatgcctgcccgggctgacttcatcgaggagtttgacaactatgcagagtgggacctgcgggacatcgactttgtggaggatgacagcgacatcctgcacgccctgaagatggctgtggtggacatctaccacagccggctgaaggagcggcagaggaggaagaagatcatccgggaccacggcctcatcaacctgaggaagttccagctgatggagcggcgctaccccaaggaggtgcaggacctgtatgagaccatgagaagatttgcccgcatcgtgggccctgtggagcatgacaagttcatcgagagccacgccctggagtttgagctgcggcgggagatcaagaggctgcaggagtacagaacagctggcatcaccaacttctgcagcgcccggacctatgaccacctgaagaagacccgggaggaggagcggctgaagaggaccatgctgtctgaggtgctgcagtacatccaggacagcagcgcctgccagcagtggctgcggcggcaggccgacattgattctggcctgagccccagcatccccatggccagcaacagcggcagaagaagtgccccacccctgaacctgaccggcctgcctggaacagagaagctgaatgagaaggagaaggagctgtgccagatggtgcggctggtgcctggggcctacctggagtacaagagcgccctgctgaatgaatgcaacaagcagggcggcctgcggctggcccaggcccgggccctgatcaagattgatgtgaacaagaccaggaagatctatgacttcctgatccgggagggctacatcaccaagggctag

SEQ ID NO: 64328 - DNA, 1332 bp, Artificial Sequence
  derived and/or modified sequence
atggaccggctgggccccttcagcaacgaccccagcgacaagcccccttgtagaggctgttcctcgtaccttatggagccttacataaaatgtgccgaatgcggcccaccacctttcttcctctgtctgcaatgttttaccaggggctttgaatataagaaacaccaatctgaccacacgtatgaaataatgacaagcgactttcccgtcctggatcccagctggacagcacaagaagagatggccttactggaggctgtgatggattgcgggttcggaaattggcaggacgttgcaaaccagatgtgcacaaaaactaaagaagaatgcgagaaacattatatgaaacacttcatcaacaatccccttttcgcgtccaccttgctgaatttaaaacaggctgaagaagccaagaccgcagacaccgccatcccgttccactctacagacgatcctccccgtcctaccttcgactctcttctaagccgcgacatggcaggttatatgccagctagagctgattttatcgaggagtttgataattacgctgagtgggacctccgcgacattgacttcgtggaagacgattccgacatcctgcatgctcttaagatggccgtagtggacatttaccattcgagactgaaagagaggcaaaggcgcaaaaagatcatcagggaccacggtctaatcaacctcaggaagttccagctgatggagcggcgatacccaaaagaggtccaggatttatacgaaacgatgcggaggttcgcgcgcattgttggccccgtagagcatgataaatttatcgaatctcacgccctcgagttcgaattacggagagaaataaaacgcctgcaggaatacaggactgcaggcatcaccaatttctgctctgccaggacatatgatcatctgaaaaaaacacgggaagaagaacggcttaaacggaccatgttgtctgaggtcttacagtatatccaggattcctctgcatgccagcaatggttgcgtcggcaagcagacattgactctggattgagcccttctatccccatggcgagcaattcgggccgtagaagtgcacctcctctgaacttgacggggctgcccggaactgagaagctcaacgagaaggaaaaggagctttgccagatggtccgcctcgtccccggcgcctatctcgaatacaagagtgctctcttaaatgagtgtaacaagcagggaggactgcggctcgcgcaagcacgtgctctgattaagatagatgtgaataaaaccaggaagatttacgactttttaatccgagaggggtacattactaagggctag

SEQ ID NO: 64329 - DNA, 1332 bp, Artificial Sequence
  derived and/or modified sequence
atggaccggctgggccccttcagcaacgaccccagcgacaagcccccttgcagaggttgcagctcatatctgatggaaccgtacataaagtgcgccgaatgtggcccacctcccttctttctgtgcctgcagtgttttacaagggggttcgaatataaaaagcaccagtcggaccacacctacgaaataatgaccagcgactttccagtattagatccctcatggaccgctcaagaggagatggcccttctggaggcagtgatggactgtgggtttggaaactggcaggacgtcgccaatcagatgtgcaccaagaccaaggaggagtgcgaaaagcactatatgaagcactttatcaataatcccctgttcgcgtctacactactcaatttgaagcaggccgaggaagcaaagaccgcagataccgctattcctttccacagcaccgacgatcctccacggccaacctttgatagcttgctaagtcgcgatatggccggctacatgcccgctagagctgatttcatagaagagtttgacaactatgcagagtgggatctgagggatattgactttgtagaagacgacagtgatatcttgcatgctctgaagatggccgttgtcgacatctatcatagtcgacttaaagaaaggcagaggcgaaaaaaaatcatccgggaccacggcctgatcaatctaaggaaatttcagctcatggaaaggaggtacccaaaagaagtccaggatctatacgaaactatgaggcgtttcgcccgtatcgtcggtcctgtggagcacgacaagttcatcgaaagccacgcattggagttcgagctccgaagagagattaagcggttacaggaataccgtacagctgggattacgaatttctgcagcgcgaggacttacgatcatttaaaaaagacacgcgaggaagagcggctgaagcgcaccatgctttctgaagtgctccaatacattcaggatagtagcgcttgccagcagtggctccgccggcaggccgatattgatagtggcctctcaccatcgatcccaatggcttccaacagtggcaggagatccgccccccccttgaacctgaccggactaccaggaacagagaagttaaacgagaaagagaaagagctctgccagatggtgcgattagtgcctggagcgtatctggagtataaaagcgcactgctcaatgagtgcaacaagcagggaggtcttaggctggctcaagcaagggctttgattaagatcgatgtgaacaaaacacgaaagatctacgacttcctcatcagagagggttacatcacgaaagggtag

SEQ ID NO: 64330 - DNA, 1332 bp, Artificial Sequence
  derived and/or modified sequence
atggatagactggggcctttttctaacgaccccagtgataaacccccttgcaggggatgcagtagctatttgatggaaccatacatcaaatgcgctgagtgtggcccaccgccatttttcctgtgcctgcaatgctttactagagggttcgagtacaaaaagcaccagtctgaccatacttacgagattatgacttctgactttccggtgctcgatccttcttggactgctcaggaggagatggccctcttggaagcagtgatggattgtggtttcggcaactggcaggacgtagctaaccaaatgtgtactaagacgaaggaagaatgcgaaaaacactacatgaagcacttcattaacaatcccctgttcgcctccactcttctgaatcttaagcaagccgaggaagctaaaactgccgatacggccatcccattccacagcactgatgatcctcccaggcccactttcgacagcctgctaagcagggatatggctggttatatgcctgccagagcggacttcatagaggaatttgataattacgccgagtgggatcttcgcgacatcgatttcgtggaggatgactcagatattctccacgcattaaagatggctgtagttgatatatatcactcaaggttgaaggaaagacaacggagaaagaagattattagggaccacggcttgattaatctgagaaagtttcagctgatggaacgacggtaccctaaggaggttcaagatctttacgaaacaatgcggaggtttgcacggattgtgggtcctgtcgaacacgataaattcatcgagtcgcacgccctcgagtttgagctgcggagggagatcaagagacttcaagagtatcgcaccgctggcatcaccaatttctgcagcgcacgtacatacgatcacctgaagaagacacgggaagaagaaagattgaagcgaactatgctcagtgaggtgctgcagtacatccaagactccagcgcttgtcaacaatggctgcgtcgccaagccgatatcgacagcgggctcagtccttcaattcccatggcctccaactctgggagacgctccgccccaccccttaacctcacgggactgcctggtaccgaaaagcttaatgaaaaggagaaggaactctgccagatggtgagattagtaccaggcgcataccttgagtacaaatctgccttactgaacgagtgcaacaagcaggggggactccgcctggcccaggccagggctctgatcaaaatcgatgtcaacaagacaagaaaaatctacgacttcttaataagggagggatacattacaaaaggatag

SEQ ID NO: 64331 - DNA, 1332 bp, Artificial Sequence
  derived and/or modified sequence
atggacaggctcggcccttttagcaacgatccgagcgacaagcctccatgcagaggctgcagttcttatcttatggagccctatatcaagtgcgccgagtgtggccctcctccttttttcctgtgcctgcagtgctttactcgcggatttgagtacaagaaacaccagtccgatcatacttacgagatcatgacatctgatttcccggtgctagacccatcctggaccgcacaagaagaaatggctctcctcgaggccgttatggactgcggcttcggaaattggcaggacgtggccaaccaaatgtgcacaaaaaccaaggaagagtgtgagaagcattacatgaagcattttatcaataatcctctcttcgcatctacccttttaaacttaaaacaagctgaagaagccaagactgcagataccgcaatcccctttcattccaccgacgacccaccccgacctaccttcgacagcctcttgagcagagatatggcaggctacatgcctgccagagccgattttatcgaggaattcgataattacgcagaatgggaccttcgggacatagattttgtggaagatgactccgatatcctccacgcactgaagatggccgtcgtggacatctaccactcacgtttgaaagaacggcagcgccgtaagaaaatcattagggatcacggattaatcaatttgcgtaagttccagttgatggagcgacgctaccccaaagaggttcaagatctatacgagacgatgcgtcgctttgcacggattgtgggcccagtggagcacgacaaatttatcgagtctcacgcacttgaattcgagctgcgaagggagattaaacgtctgcaagaatatcgaactgccggtattacaaacttttgcagcgctagaacttacgatcacctgaagaagacacgggaagaggagcggttgaaaaggaccatgctatccgaagtgctgcagtacatccaggattcttccgcttgccagcagtggcttagacgtcaggccgacattgatagtggccttagtccttccattcccatggcctctaacagcggcagacggtcagcaccccctttgaatctgaccggccttcccggtaccgaaaagcttaatgagaaggagaaggaactctgccagatggtgaggctggttccaggtgcctatctggaatataagtccgctcttttgaatgagtgtaacaagcaggggggtctaaggctggcacaagccagggccctgataaagatcgacgttaacaaaacccggaaaatttacgactttctgatcagggagggttatatcactaagggttag

SEQ ID NO: 64332 - DNA, 1838 bp, Artificial Sequence
  derived and/or modified sequence
tttcccgctcagccctggagcgcgtagctctaccaagaatggccactgtgccagatgcccctgaccagcgttgcccatttgaatttcctagcaggccccccaaagtaggtatttcagtaccctgttagagctgaggcgcaggtaaaatgactggcccaggccggtcccaccccgtaaggatttgaacgttggctccacaactcgggagcctgcgcctttcctcctcccaacgtggactcctgcccggcgaagtgcctcacttccttctcccgggagtcatcaagctttggtgtatgtgttggccggttctgaagtcttgaagaagctctgctgaggaagaccaaagcagcactcgttgccaattagggaatggaccgtttgggtccctttagcaatgatccctctgataagccaccttgccgaggctgctcctcctacctcatggagccttatatcaagtgtgctgaatgtgggccacctccttttttcctctgcttgcagtgtttcactcgaggctttgagtacaagaaacatcaaagcgatcatacttatgaaataatgacttcagattttcctgtccttgatcccagctggactgctcaagaagaaatggcccttttagaagctgtgatggactgtggctttggaaattggcaggatgtagccaatcaaatgtgcaccaagaccaaggaggagtgtgagaagcactatatgaagcatttcatcaataaccctctgtttgcatctaccctgctgaacctgaaacaagcagaggaagcaaaaactgctgacacagccattccatttcactctacagatgaccctccccgacctacctttgactccttgctttctcgggacatggccgggtacatgccagctcgagcagatttcattgaggaatttgacaattatgcagaatgggacttgagagacattgattttgttgaagatgactcggacattttacatgctctgaagatggctgtggtagatatctatcattccaggttaaaggagagacaaagacgaaaaaaaattataagagaccatggattaatcaaccttagaaagtttcaattaatggaacggcggtatcccaaggaggtccaggacctgtatgaaacaatgaggcgatttgcaagaattgtggggccagtggaacatgacaaattcattgaaagccatgcattggaatttgaactccgaagggaaatcaagaggctccaagaatacaggacagcaggcattaccaatttttgtagtgccagaacctacgatcacctcaagaagacacgggaggaagagcgccttaaacgcactatgctctcagaagttctccagtatatccaggacagtagtgcttgccagcagtggctccgccggcaagctgacattgattccggcctgagtccttccattccaatggcttcgaattcaggtagacggagtgcaccacccttgaacctcactggcctccctggcacagagaagctgaatgaaaaagaaaaggagctctgtcagatggtgaggttggtccctggagcctatttagaatacaaatctgctctattgaacgaatgtaacaagcaaggaggcttaagactggcgcaggcaagagcactcatcaagatagatgtgaacaaaacccggaaaatctatgatttcctcatcagagaaggatacatcactaaaggctaaggctccaagagcttgggatcagaagtcagaagtttggaatgtggtgggtcaaaggacaatatgggtgggcattctggagagttgtttttcagctgaattctcatggtgaaaacaggggaaaggacaaaggaaacctt

SEQ ID NO: 64333 - DNA, 1751 bp, Artificial Sequence
  derived and/or modified sequence
ccgggggcgcgcacgcaaagcccggaggcgcgcgcgaccggcggctctttggcgcggattagggggtctcggcgagggagtcatcaagctttggtgtatgtgttggccggttctgaagtcttgaagaagctctgctgaggaagaccaaagcagcactcgttgccaattagggaatggaccgtttgggtccctttagcaatgatccctctgataagccaccttgccgaggctgctcctcctacctcatggagccttatatcaagtgtgctgaatgtgggccacctccttttttcctctgcttgcagtgtttcactcgaggctttgagtacaagaaacatcaaagcgatcatacttatgaaataatgacttcagattttcctgtccttgatcccagctggactgctcaagaagaaatggcccttttagaagctgtgatggactgtggctttggaaattggcaggatgtagccaatcaaatgtgcaccaagaccaaggaggagtgtgagaagcactatatgaagcatttcatcaataaccctctgtttgcatctaccctgctgaacctgaaacaagcagaggaagcaaaaactgctgacacagccattccatttcactctacagatgaccctccccgacctacctttgactccttgctttctcgggacatggccgggtacatgccagctcgagcagatttcattgaggaatttgacaattatgcagaatgggacttgagagacattgattttgttgaagatgactcggacattttacatgctctgaagatggctgtggtagatatctatcattccaggttaaaggagagacaaagacgaaaaaaaattataagagaccatggattaatcaaccttagaaagtttcaattaatggaacggcggtatcccaaggaggtccaggacctgtatgaaacaatgaggcgatttgcaagaattgtggggccagtggaacatgacaaattcattgaaagccatgcattggaatttgaactccgaagggaaatcaagaggctccaagaatacaggacagcaggcattaccaatttttgtagtgccagaacctacgatcacctcaagaagacacgggaggaagagcgccttaaacgcactatgctctcagaagttctccagtatatccaggacagtagtgcttgccagcagtggctccgccggcaagctgacattgattccggcctgagtccttccattccaatggcttcgaattcaggtagacggagtgcaccacccttgaacctcactggcctccctggcacagagaagctgaatgaaaaagaaaaggagctctgtcagatggtgaggttggtccctggagcctatttagaatacaaatctgctctattgaacgaatgtaacaagcaaggaggcttaagactggcgcaggcaagagcactcatcaagatagatgtgaacaaaacccggaaaatctatgatttcctcatcagagaaggatacatcactaaaggctaaggctccaagagcttgggatcagaagtcagaagtttggaatgtggtgggtcaaaggacaatatgggtgggcattctggagagttgtttttcagctgaattctcatggtgaaaacaggggaaaggacaaaggaaaccttaagttgtattgtctactttcttctccatcctgctttaaaacactcctgttgttggtattatgctgcagagttgtgtgctacataagctattattaaatgtgagtgggca

SEQ ID NO: 64334 - DNA, 2200 bp, Artificial Sequence
  derived and/or modified sequence
caaagcccggaggcgcgcgcgaccggcggctctttggcgcggttctgaagtcttgaagaagccaccttgccgaggctgctcctcctacctcatggagccttatatcaagtgtgctgaatgtgggccacctccttttttcctctgcttgcagtgtttcactcgaggctttgagtacaagaaacatcaaagcgatcatacttatgaaataatgacttcagattttcctgtccttgatcccagctggactgctcaagaagaaatggcccttttagaagctgtgatggactgtggctttggaaattggtaagagcttggtgttaagagttgtcctgccctagtggactcagagaagaagctgttgttgaagagtaaaggaaggaacctcaggaagagaaagtatgtgttgctttcctatcaacccatgatttagaggcaggatgtagccaatcaaatgtgcaccaagaccaaggaggagtgtgagaagcactatatgaagcatttcatcaataaccctctgtttgcatctaccctgctgaacctgaaacaagcagaggaagcaaaaactgctgacacagccattccatttcactctacagatgaccctccccgacctacctttgactccttgctttctcgggacatggccgggtacatgccagctcgagcagatttcattgaggaatttgacaattatgcagaatgggacttgagagacattgattttgttgaagatgactcggacattttacatgctctgaagatggctgtggtagatatctatcattccaggttaaaggagagacaaagacgaaaaaaaattataagagaccatggattaatcaaccttagaaagtttcaattaatggaacggcggtatcccaaggaggtccaggacctgtatgaaacaatgaggcgatttgcaagaattgtggggccagtggaacatgacaaattcattgaaagccatgcattggaatttgaactccgaagggaaatcaagaggctccaagaatacaggacagcaggcattaccaatttttgtagtgccagaacctacgatcacctcaagaagacacgggaggaagagcgccttaaacgcactatgctctcagaagttctccagtatatccaggacagtagtgcttgccagcagtggctccgccggcaagctgacattgattccggcctgagtccttccattccaatggcttcgaattcaggtagacggagtgcaccacccttgaacctcactggcctccctggcacagagaagctgaatgaaaaagaaaaggagctctgtcagatggtgaggttggtccctggagcctatttagaatacaaatctgctctattgaacgaatgtaacaagcaaggaggcttaagactggcgcaggcaagagcactcatcaagatagatgtgaacaaaacccggaaaatctatgatttcctcatcagagaaggatacatcactaaaggctaaggctccaagagcttgggatcagaagtcagaagtttggaatgtggtgggtcaaaggacaatatgggtgggcattctggagagttgtttttcagctgaattctcatggtgaaaacaggggaaaggacaaaggaaaccttaagttgtattgtctactttcttctccatcctgctttaaaacactcctgttgttggtattatgctgcagagttgtgtgctacataagctattattaaatgtgagtgggcattcattcctaacacctcttgtaactaaaagaaccatagtacctcacatcacagtgctggtagaaatggaactaaaccacagtctgtaatcccaggagtccagctcagatccttatattgcgaggtaagtttgctgattatctgtcttgccttcaaacactgcagacagatttaaaataaagagaaaggttttagagcataagaaagctctcgttgaaggattttttaagctgacaacttttttttttttttttgaggcagaggttgcagcgagctgagatcacgccactgtgctccagcctgggcaacaaagtgagactctgtctcaaaaaaaaaaaaacaaaaaaaaacctttaatgtctggctttgtactttgcagtctgcctgtctaatctgcagtagtcttttgaggaggtggcaccggatataacatgtctctgttatttttagaattaattaaaatgttttgctattt

SEQ ID NO: 64335 - DNA, 2520 bp, Artificial Sequence
  derived and/or modified sequence
tttcccgctcagccctggagcgcgtagctctaccaagaatggccactgtgccagatgcccctgaccagcgttgcccatttgaatttcctagcaggccccccaaagtaggtatttcagtaccctgttagagctgaggcgcaggtaaaatgactggcccaggccggtcccaccccgtaaggatttgaacgttggctccacaactcgggagcctgcgcctttcctcctcccaacgtggactcctgcccggcgaagtgcctcacttccttctcccgggagtcatcaagctttggtgtatgtgttggccggttctgaagtcttgaagaagctctgctgaggaagaccaaagcagcactcgttgccaattagggaatggaccgtttgggtccctttagcaatgatccctctgataagccaccttgccgaggctgctcctcctacctcatggagccttatatcaagtgtgctgaatgtgggccacctccttttttcctctgcttgcagtgtttcactcgaggctttgagtacaagaaacatcaaagcgatcatacttatgaaataatgacttcagattttcctgtccttgatcccagctggactgctcaagaagaaatggcccttttagaagctgtgatggactgtggctttggaaattggcaggatgtagccaatcaaatgtgcaccaagaccaaggaggagtgtgagaagcactatatgaagcatttcatcaataaccctctgtttgcatctaccctgctgaacctgaaacaagcagaggaagcaaaaactgctgacacagccattccatttcactctacagatgaccctccccgacctacctttgactccttgctttctcgggacatggccgggtacatgccagctcgagcagatttcattgaggaatttgacaattatgcagaatgggacttgagagacattgattttgttgaagatgactcggacattttacatgctctgaagatggctgtggtagatatctatcattccaggttaaaggagagacaaagacgaaaaaaaattataagagaccatggattaatcaaccttagaaagtttcaattaatggaacggcggtatcccaaggaggtccaggacctgtatgaaacaatgaggcgatttgcaagaattgtggggccagtggaacatgacaaattcattgaaagccatgcattggaatttgaactccgaagggaaatcaagaggctccaagaatacaggacagcaggcattaccaatttttgtagtgccagaacctacgatcacctcaagaagacacgggaggaagagcgccttaaacgcactatgctctcagaagttctccagtatatccaggacagtagtgcttgccagcagtggctccgccggcaagctgacattgattccggcctgagtccttccattccaatggcttcgaattcaggtagacggagtgcaccacccttgaacctcactggcctccctggcacagagaagctgaatgaaaaagaaaaggagctctgtcagatggtgaggttggtccctggagcctatttagaatacaaatctgctctattgaacgaatgtaacaagcaaggaggcttaagactggcgcaggcaagagcactcatcaagatagatgtgaacaaaacccggaaaatctatgatttcctcatcagagaaggatacatcactaaaggctaaggctccaagagcttgggatcagaagtcagaagtttggaatgtggtgggtcaaaggacaatatgggtgggcattctggagagttgtttttcagctgaattctcatggtgaaaacaggggaaaggacaaaggaaaccttaagttgtattgtctactttcttctccatcctgctttaaaacactcctgttgttggtattatgctgcagagttgtgtgctacataagctattattaaatgtgagtgggcattcattcctaacacctcttgtaactaaaagaaccatagtacctcacatcacagtgctggtagaaatggaactaaaccacagtctgtaatcccaggagtccagctcagatccttatattgcgaggtaagtttgctgattatctgtcttgccttcaaacactgcagacagatttaaaataaagagaaaggttttagagcataagaaagctctcgttgaaggattttttaagctgacaactttttttttttttttttgagacagagtttgctcttgtcctccaggctggagtgtgatggcaagatctcagctcactacaacctctgcctcccaggagaattgcttgaacacaggaggcagaggttgcagcgagctgagatcacgccactgtgctccagcctgggcaacaaagtgagactctgtctcaaaaaaaaaaaaacaaaaaaaaacctttaatgtctggctttgtactttgcagtctgcctgtctaatctgcagtagtcttttgaggaggtggcaccggatataacatgtctctgttatttttagaattaattaaaatgttttgctatttaa

SEQ ID NO: 64336 - DNA, 1332 bp, Artificial Sequence
  derived and/or modified sequence
atggacagactgggccccttcagcaacgaccccagcgacaagcccccctgcagaggctgcagcagctacctgatggagccctacatcaagtgcgccgagtgcggccccccccccttcttcctgtgcctgcagtgcttcaccagaggcttcgagtacaagaagcaccagagcgaccacacctacgagatcatgaccagcgacttccccgtgctggaccccagctggaccgcccaggaggagatggccctgctggaggccgtgatggactgcggcttcggcaactggcaggacgtggccaaccagatgtgcaccaagaccaaggaggagtgcgagaagcactacatgaagcacttcatcaacaaccccctgttcgccagcaccctgctgaacctgaagcaggccgaggaggccaagaccgccgacaccgccatccccttccacagcaccgacgacccccccagacccaccttcgacagcctgctgagcagagacatggccggctacatgcccgccagagccgacttcatcgaggagttcgacaactacgccgagtgggacctgagagacatcgacttcgtggaggacgacagcgacatcctgcacgccctgaagatggccgtggtggacatctaccacagcagactgaaggagagacagagaagaaagaagatcatcagagaccacggcctgatcaacctgagaaagttccagctgatggagagaagataccccaaggaggtgcaggacctgtacgagaccatgagaagattcgccagaatcgtgggccccgtggagcacgacaagttcatcgagagccacgccctggagttcgagctgagaagagagatcaagagactgcaggagtacagaaccgccggcatcaccaacttctgcagcgccagaacctacgaccacctgaagaagaccagagaggaggagagactgaagagaaccatgctgagcgaggtgctgcagtacatccaggacagcagcgcctgccagcagtggctgagaagacaggccgacatcgacagcggcctgagccccagcatccccatggccagcaacagcggcagaagaagcgccccccccctgaacctgaccggcctgcccggcaccgagaagctgaacgagaaggagaaggagctgtgccagatggtgagactggtgcccggcgcctacctggagtacaagagcgccctgctgaacgagtgcaacaagcagggcggcctgagactggcccaggccagagccctgatcaagatcgacgtgaacaagaccagaaagatctacgacttcctgatcagagagggctacatcaccaagggctag

SEQ ID NO: 64337 - DNA, 1332 bp, Artificial Sequence
  derived and/or modified sequence
atggaccggctcggaccttttagcaatgacccttcggataaacctccttgccgaggctgctcctcctacctcatggaaccgtatatcaaatgcgccgaatgcggtcccccgccgttttttctgtgcctccagtgcttcaccagaggttttgaatataaaaaacatcaaagtgatcacacctacgaaattatgacctcggacttcccggtcctggaccccagttggacggctcaggaggagatggcgcttctggaggcagttatggattgcggattcgggaattggcaagacgtagccaaccagatgtgcactaaaacaaaagaagagtgcgagaaacattacatgaagcacttcatcaataatccactctttgcctcaacactgttgaacctgaagcaggcagaggaagcaaagactgctgacacagcgataccattccattctacggatgatcctccccgcccaacgtttgacagccttttgagccgggatatggccggttacatgcccgcccgtgccgatttcatagaggagtttgacaactatgctgagtgggacctgagggacattgatttcgtggaggatgactcggacatcctgcacgctctgaaaatggccgttgtggatatttatcactctagactcaaagaaaggcagaggcggaagaagatcattagggaccacgggctaattaaccttcggaagttccagctcatggaaaggagatatcctaaggaagtacaggatctttacgagactatgcgccgatttgctcggattgtcggacctgtggagcacgacaaattcatcgagtcacacgccctggagtttgagctgagaagggaaattaagagattgcaggagtatcgaacagccggcattaccaatttttgtagcgccaggacatatgatcacttgaagaaaacccgcgaagaggaaagactcaagcgcactatgctgagtgaggtcctccaatacatccaagactccagcgcatgtcagcaatggcttcggcggcaggcggatatcgactctggcctgagtccatcgattcctatggcctccaattctgggagaaggagcgcacctcctctcaatctgacaggattgcccggaaccgaaaagcttaatgaaaaggagaaggagctgtgtcagatggtgagattagttccaggcgcttatcttgaatataaatcagcgctccttaacgaatgtaataagcagggcggccttcgcctggctcaggctcgggcccttattaaaattgatgtgaacaaaacccgaaagatctacgacttcttgatccgggaaggttacatcaccaagggttag

SEQ ID NO: 64338 - DNA, 1332 bp, Artificial Sequence
  derived and/or modified sequence
atggaccggctgggccccttcagcaacgaccccagcgacaagcccccgtgcagaggctgctcgtcttacctcatggagccatacatcaagtgcgcagaatgtggtcctccccccttcttcctctgccttcagtgttttacacgggggtttgaatacaaaaagcaccagagcgatcacacctatgagattatgaccagtgacttccccgtactggatccctcttggaccgcccaggaggagatggctctgcttgaagccgtcatggactgcggcttcggcaattggcaggatgtggctaaccaaatgtgcaccaaaacaaaggaagagtgcgaaaagcactatatgaaacacttcattaataaccccttatttgccagcacgctgctcaatcttaagcaggcagaggaggctaaaacggctgacactgctatcccttttcacagtacagatgatccgccccgtcctacttttgacagcctcctgtctagagatatggccgggtacatgcctgcaagagcggatttcatcgaggaatttgataactatgccgagtgggacctgagggatattgactttgtagaggacgactccgacatcctgcacgctctgaagatggctgtggtcgacatttaccacagccggctcaaggagaggcagaggcggaaaaaaattattcgagaccatggattgatcaacctgcggaagttccagcttatggagcggaggtatcctaaagaagttcaggatctgtacgagaccatgagacggttcgcccggattgtgggtccagtggaacatgacaaatttatagaaagtcacgcactagaatttgaactgagaagagaaatcaagcgcctgcaagagtaccgcactgccggcatcacaaatttctgctcagcacgcacatatgaccacctgaaaaaaacgcgcgaggaggaaaggcttaaaaggacaatgctttctgaggtcttgcagtatattcaggactcttcagcatgccagcaatggctgcgacggcaggcggacatagactccgggttaagcccttccataccaatggcttccaacagtgggcggcgttccgccccacctctcaacctgactgggctcccaggtaccgaaaaactcaacgagaaagagaaggaactttgtcaaatggtgaggctcgtgcccggggcatacttagagtataaatcggctctactcaacgagtgcaacaaacaagggggtctcagactcgcccaggcaagggcattgattaaaatcgacgttaacaagacaaggaagatatatgattttctcatcagagagggctacattactaaaggatag

SEQ ID NO: 64339 - DNA, 1332 bp, Artificial Sequence
  derived and/or modified sequence
atggacaggctcggacccttctcaaatgatccaagcgataaacctccctgcagaggctgctctagctatttaatggagccctatataaagtgtgccgaatgcggccctccgccttttttcctgtgtctgcagtgcttcactagggggtttgagtacaagaaacaccagagcgatcacacctacgagattatgacgagtgatttccccgttctggacccatcatggaccgcccaggaggagatggccttgctggaggcagtaatggattgtgggttcggcaattggcaggatgttgcaaatcagatgtgcacaaagaccaaggaggagtgcgagaagcattatatgaagcacttcatcaacaatcccctattcgcttccaccctcttgaacctcaagcaagccgaggaagctaaaaccgctgacactgcaatcccttttcacagtacggatgatccacccagaccgacctttgactcattgctaagcagggacatggctgggtatatgccagctcgtgcggacttcattgaagaatttgataactatgcagaatgggatttgagagatattgacttcgtggaggacgatagcgacatactgcacgctcttaagatggccgtggtcgatatttatcatagtagactgaaagaacgacagagaagaaaaaaaattataagagatcatggactgattaacctgaggaaattccagctgatggagcgcagatatcctaaagaggttcaagatctatatgagaccatgagacgcttcgccagaattgtgggccctgtggagcatgataagttcattgagtctcacgcccttgagtttgaattacgtagagaaattaaaagactgcaggagtaccgcacggctgggattaccaacttctgtagcgccagaacctatgaccacctcaagaaaacccgtgaggaggagagactgaagcgcacaatgttatctgaggtcctccagtatatccaagacagtagtgcatgtcagcagtggctgaggagacaggctgacatagatagtggcctatctccctccatcccaatggcgtctaatagcggacgccgttcagctccccctctcaacttgacggggctgccgggtactgagaaactcaatgagaaagaaaaagaactgtgtcagatggtacgccttgtgccaggggcttatctggagtacaagtccgccctcttaaatgagtgtaataagcaggggggactccgcttggcgcaggccagagccctgattaaaattgacgtcaacaaaacaaggaaaatttacgacttcttgattagagagggttacatcaccaagggctag

SEQ ID NO: 64340 - protein, 1123 aa, Artificial Sequence
  derived and/or modified sequence
MSGTSSHESFYDSLSDMQEESKNTDFFPGLSAFLSQEEINKSLDLARRAIADSETEDFDSEKEISQIFSTSPASLCEHPSHKETKLGEHASRRPQDNRSTPVQPLAEKQTKSISSPVSKRKPAMSPLLTRPSYIRSLRKAEKRGAKTPSTNVKPKTPHQRKGGPQSQLCDKAANLIEELTSIFKAAKPRNRSPNGESSSPDSGYLSPKNQPSALLSASASQSPMEDQGEMEREVKSPGARHCYQDNQDLAVPHNRKSHPQPHSALHFPAAPRFIQKLRSQEVAEGSRVYLECRVTGNPTPRVRWFCEGKELHNTPDIQIHCEGGDLHTLIIAEAFEDDTGRYTCLATNPSGSDTTSAEVFIEGASSTDSDSESLAFKSRAGAMPQAQKKTTSVSLTIGSSSPKTGVTTAVIQPLSVPVQQVHSPTSYLCRPDGTTTAYFPPVFTKELQNTAVAEGQVVVLECRVRGAPPLQVQWFRQGSEIQDSPDFRILQKKPRSTAEPEEICTLVIAETFPEDAGIFTCSARNDYGSATSTAQLVVTSANTENCSYESMGESNNDHFQHFPPPPPILETSSLELASKKPSEIQQVNNPELGLSRAALQMQFNAAERETNGVHPSRGVNGLINGKANSNKSLPTPAVLLSPTKEPPPLLAKPKLGFPKKASRTARIASDEEIQGTKDAVIQDLERKLRFKEDLLNNGQPRLTYEERMARRLLGADSATVFNIQEPEEETANQDIGSPHASVGSPLDGQKEYKVSSCEQRLISEIEYRLERSPVDESGDEVQYGDVPVENGMAPFFEMKLKHYKIFEGMPVTFTCRVAGNPKPKIYWFKDGKQISPKSDHYTIQRDLDGTCSLHTTASTLDDDGNYTIMAANPQGRISCTGRLMVQAVNQRGRSPRSPSGHPHVRRPRSRSRDSGDENEPIQERFFRPHFLQAPGDLTVQEGKLCRMDCKVSGLPTPDLSWQLDGKPVRPDSAHKMLVRENGVHSLIIEPVTSRDAGIYTCIATNRAGQNSFSLELVVAAKEAHKPPVFIEKLQNTGVADGYPVRLECRVLGVPPPQIFWKKENESLTHSTDRVSMHQDNHGYICLLIQGATKEDAGWYTVSAKNEAGIVSCTARLDVYISRH

SEQ ID NO: 64341 - DNA, 3372 bp, Artificial Sequence
  derived and/or modified sequence
atgtcaggcacctcttcacacgagagcttctacgactctctatcggatatgcaagaggagagcaagaacaccgatttttttcctggcctgtcagcattcctgagccaagaagagattaataaaagtttggacttagcaagacgggccattgccgacagtgaaaccgaagatttcgatagcgaaaaagagatcagccagatattctccacttcccctgcttcgttgtgcgaacacccttcacacaaggagacaaaactgggtgaacacgccagtaggaggccacaagacaatcgatctactcctgtgcagcctttagccgaaaagcagacaaaatccatatcttctcccgtatctaagaggaaacctgctatgtctccattactcacaagaccatcttacattcgatctctgaggaaggccgagaagcggggggcaaaaacaccttcaactaatgttaagccaaaaacccctcatcagcgcaaaggaggccctcagagccagctctgtgacaaggctgcaaatttaatcgaggagctaactagcatctttaaggccgccaaacccagaaacagatcccctaatggggagtcatcgagcccagactccgggtacctctcccccaagaatcagccatccgccctcctgtctgcctcagctagccagagcccaatggaggaccagggcgaaatggagcgcgaagtgaaatcccccggcgccagacactgctatcaggacaatcaggacctggccgttccccacaacagaaagtcacatccacaacctcattccgcactccacttccccgcagccccgaggttcattcagaaacttcgatcacaagaagtggccgaaggctcccgggtatacctcgaatgtcgagtcaccggtaatcctacaccaagagtccggtggttctgcgagggaaaggaactccataatacgccagatattcagattcactgtgaagggggggacttgcataccctgatcattgccgaggcctttgaagacgatacgggcagatatacgtgtctggctacaaatccctcaggatccgacacaacatccgcagaagtgttcattgagggcgcatcctctactgactctgatagtgaatccctggcattcaaatctagagctggggcaatgccacaagcccagaaaaagactacctcagtttctctcacgatcggaagcagctccccaaagactggagtgaccaccgccgttatacagcccctgtctgttccagttcaacaggtgcatagcccgaccagctacctttgtcgtcctgatgggacgaccaccgcttactttcctcctgttttcacaaaggagcttcagaacactgcagtggcagaaggacaggttgtggtgctcgagtgccgagtcagaggtgcccctcctctccaggtgcagtggttcaggcaaggttcagagatccaggacagcccagacttcagaatcctccaaaagaagccaaggtcaactgccgagccggaggagatttgcacactcgtgatcgctgagaccttccccgaggacgccggaattttcacatgttccgcccgcaacgactatggttcggccacctctaccgcacaactggtagttacctctgctaatacagaaaactgtagctacgagtcaatgggggagagcaacaatgatcactttcagcattttccccccccgcctcctattctcgagacttcaagcctggagcttgcttcaaaaaagccaagcgagattcagcaggtaaacaacccagagctcggactgtccagggctgccctccagatgcagttcaacgctgctgaaagggagaccaatggagtccacccatctagaggggtaaacggactcatcaacgggaaggctaacagtaataaatctttacctacacctgctgtgttactttctcctacgaaagaacctccccctctcttagccaagcccaaactgggattccccaagaaggctagccgaaccgcgcgtatcgcgtcggatgaggagattcagggcacaaaagacgcagttatccaggatctggaacggaagctccgcttcaaggaggacctactaaataacggccagccaagactgacatacgaggagcgcatggcgaggagactgttgggtgctgattcggcaaccgtgttcaatatccaagaacctgaggaggaaactgcaaatcaggatattggatcacctcacgccagcgtggggagcccattagacggccagaaggaatacaaggttagctcatgtgaacagcgcctgatatccgagattgagtatcgcttagaacgttcacccgtggatgagtcaggcgacgaggtgcagtatggcgacgtcccggtcgagaatggaatggccccctttttcgaaatgaaacttaaacactataagatatttgaagggatgcccgtgacatttacctgcagagtggctgggaaccctaaacctaagatatactggtttaaggacggaaaacagatatccccaaaatccgaccactacacaatccaacgcgacctggacgggacctgtagcctgcatactaccgcgagcacactggatgatgatggcaattacacaatcatggcagccaaccctcagggcaggatttcctgcacagggcggctgatggttcaggccgtcaaccagagaggacgtagccctcgtagcccatctgggcatccccatgtgagaaggccaaggtctagatcacgggacagcggcgatgagaacgagcccatccaggagaggttcttccggccacatttcctccaagcacccggagatctgactgtgcaagaaggcaagctgtgccgtatggactgcaaagtatccggattgcctactcccgatctctcctggcaactggacggtaagccggttaggcctgactccgcacataaaatgctggtgcgcgaaaacggcgtccactcactaatcatcgagcctgtgaccagccgagatgcaggcatctatacctgcattgccacgaaccgggcggggcagaattcattctcgctggagttggtagtggctgccaaggaggctcataaaccaccagtctttatcgagaagctgcagaataccggcgtggcagacgggtatccagtgcgcttggagtgcagagttttgggggtgccacccccacagatattctggaagaaggagaacgagtcgctcacacacagcaccgaccgagtctctatgcaccaagacaaccacggatacatctgtctgctcatacaaggcgcaacgaaagaggacgccggatggtatacggtaagtgccaaaaatgaagctggaattgtgtcttgcacagctaggttggacgtgtacatctccaggcattag

SEQ ID NO: 64342 - DNA, 3372 bp, Artificial Sequence
  derived and/or modified sequence
atgagcggcaccagcagccatgagagcttctatgacagcctgagtgacatgcaggaggagagcaagaacacagacttcttccctggcctgagcgccttcctgagccaggaggagatcaacaagagcctggacctggcccggcgggccatcgctgacagcgagacagaggactttgacagcgagaaggagatcagccagatcttcagcaccagccctgccagcctgtgtgagcaccccagccacaaggagaccaagctgggggagcacgccagccggcggccccaggacaacagaagcacccctgtgcagcccctggccgagaagcagaccaagagcatcagcagccctgtgtccaagaggaagccagccatgagccccctgctgacccggcccagctacatccgcagcctgaggaaggccgagaagagaggagccaagacccccagcaccaacgtgaagcccaagaccccccaccagaggaaaggaggcccccagagccagctgtgtgacaaggccgccaacctgattgaggagctgaccagcatcttcaaggccgccaagcccaggaacagaagccccaacggggagagcagcagcccagacagcggctacctgagccccaagaaccagcccagcgccctgctgagcgccagcgccagccagagccccatggaggaccagggcgagatggagcgggaggtgaagagccctggggcccggcactgctaccaggacaaccaggacctggccgtgccccacaacaggaagagccacccccagccccacagcgccctgcacttccctgctgccccccgcttcatccagaagctgcggagccaggaggtggccgagggcagccgggtgtacctggagtgccgggtgactggaaaccccaccccccgggtgcgctggttctgtgagggcaaggagctgcacaacaccccagacatccagatccactgtgagggcggggacctgcacaccctcatcatcgccgaggcctttgaagatgacaccggccgctacacctgcctggccaccaaccccagcggcagtgacaccaccagcgctgaggtgttcattgaaggagccagcagcacagacagcgacagcgagagcctggccttcaagagccgggccggggccatgccccaggcccagaagaagaccacctctgtgtccctgaccatcggcagcagcagccccaagacaggagtgaccacagctgtgatccagcccctgtctgtgcctgtgcagcaggtgcacagccccaccagctacctgtgcaggccagatggcaccaccacagcctacttcccccctgtgttcaccaaggagctgcagaacacagctgtggccgagggccaggtggtggtgctggagtgccgggtgcggggggccccacccctgcaggtgcagtggttccggcagggcagcgagatccaggacagcccagacttccgcatcctgcagaagaagcccaggagcacagctgagcctgaggagatctgcaccctggtgattgctgagaccttcccagaagatgctggcatcttcacctgcagcgccagaaatgactatggcagcgccaccagcacagcccagctggtggtgaccagcgccaacacagagaactgcagctatgagagcatgggagagagcaacaatgaccacttccagcacttccccccacctccacccatcctggagaccagcagcctggagctggccagcaagaagcccagcgagatccagcaggtgaacaaccctgagctgggcctgagcagagctgccctgcagatgcagttcaatgctgctgagcgggagaccaatggagtgcaccccagccggggcgtgaatggcctcatcaacgggaaggccaacagcaacaagagcctgcccaccccagctgtgctgctgagccccaccaaggagcccccacccctgctggccaagcccaagctgggcttccccaagaaggccagcaggacagccagaattgccagtgatgaggagatccagggcaccaaggatgctgtgatccaggacctggagaggaagctgcgcttcaaggaggacctgctgaacaacggccagccccggctgacctatgaggagaggatggcccggcggctgctgggcgctgacagcgccaccgtcttcaacatccaggagcctgaggaggagacagccaaccaggacatcggcagcccccacgcctctgtgggcagccccctggatggccagaaggagtacaaggtgagcagctgtgagcagaggctcatcagcgagattgagtaccgcctggagaggagccctgtggatgaaagtggagatgaggtgcagtatggagatgtgcctgtggagaatggcatggcccccttctttgagatgaagctgaagcactacaagatctttgagggcatgcctgtgaccttcacctgccgggtggccggcaaccccaagcccaagatctactggttcaaggatggcaagcagatcagccccaagagtgaccactacaccatccagagggacctggatggcacctgcagcctgcacaccacagccagcaccctggatgatgatggcaactacaccatcatggccgccaacccccagggccgcatcagctgcaccggccgcctgatggtgcaggccgtgaaccagaggggccgcagccccaggagccccagcggccacccccacgtgagaagacccaggagccgcagccgggacagcggagatgaaaatgagcccatccaggagcgcttcttccggccccacttcctgcaggcccctggggacctgactgtgcaggagggcaagctgtgcaggatggactgcaaggtgtctggcctgcccaccccagacctgtcctggcagctggatggcaagcctgtgcggccagacagcgcccacaagatgctggtgcgggagaatggagtgcacagcctcatcatcgagcctgtgaccagcagagatgctggcatctacacctgcatcgccaccaacagagctggccagaacagcttcagcctggagctggtggtggccgccaaggaggcccacaagccccctgtgttcatcgagaagctgcagaacacaggagtggctgatggctaccctgtgcggctggagtgccgggtgctgggcgtgcccccaccccagatcttctggaagaaggaaaatgaaagcctgacccacagcacagacagagtgtccatgcaccaggacaaccacggctacatctgcctgctgatccagggcgccaccaaggaggatgctggctggtacacagtgtctgccaagaatgaagctggcatcgtgtcctgcacagcccggctggatgtgtacatcagccgccactag

SEQ ID NO: 64343 - DNA, 3372 bp, Artificial Sequence
  derived and/or modified sequence
atgagcggcaccagcagccacgagagcttctacgacagcctgagcgacatgcaggaagaatctaagaataccgacttttttccagggctgtctgccttcctaagccaggaggagatcaataagtctttggacctggcccgcagagcaatcgccgactcagaaacagaagatttcgattcagaaaaggaaatttcccagatattttcgacaagtcctgcctctctttgtgagcacccctcacataaggaaactaagctgggagaacatgccagcaggaggccacaggacaacaggtctacccccgtgcagccactggcagaaaaacagacaaaaagcatcagctctcctgtctctaagcgaaaaccagctatgagcccactgctcacaaggccttcgtacatcaggtctttacgaaaagccgaaaagcgcggagcaaagacaccttccaccaacgtgaagccaaaaaccccccaccagcgcaaaggaggacctcagtctcagctgtgtgacaaggccgcgaacctcatcgaggagctgacctcgatatttaaggccgccaaacccagaaacagaagtcccaacggtgagtcctcttcccctgattccggatatctgagtcctaaaaatcagccttccgctctgctgagcgcatctgcttcacagtcaccaatggaggaccagggcgagatggagagggaagtcaaatctccgggtgcacggcattgttatcaagacaaccaggatctggcagttcctcacaatcggaaaagccacccacagcctcatagcgcattgcactttcccgccgcccctcgctttatacaaaagttaagaagccaagaggtggctgaaggtagccgggtttatctagagtgtagggtgacaggcaatccaaccccgcgtgtgcgctggttttgcgaggggaaggaacttcacaacacacccgatattcagatccactgcgagggaggagatttgcacaccctcattatcgccgaggctttcgaagacgacacgggtaggtacacgtgtttggctaccaatcccagcgggtctgacaccacgtctgccgaagtatttatcgaaggagctagttctactgacagcgattccgaaagcctggccttcaaaagcagagccggagccatgccacaggctcagaaaaaaactaccagtgtgagtctcaccataggctcctcttctcccaagactggcgtgacaaccgccgtgatccagcctctgagcgttcccgttcagcaggttcactcacctacatcctatctgtgtcgaccagatggaactacaactgcatacttccctccagtgttcacaaaggagttacaaaacaccgccgttgcggagggccaagtggtggtgctagaatgccgggttagaggggccccgccgctccaagtgcagtggttcaggcagggttcagagatccaggatagccccgactttcgcattctacaaaagaagcctcgatccactgctgaacccgaagaaatctgcactctggtcattgcagagacttttccggaagacgccggcatctttacatgttctgccaggaacgactatggatctgccacaagcacagcacagttagtcgtcacctccgccaacactgaaaactgtagctacgagtcaatgggggagtctaacaatgaccacttccagcatttccccccaccccccccaatcctggagacttcatcactggagctggcctcgaagaagccgagtgagattcagcaggtcaataacccagagctcgggctctctagggctgctctgcagatgcagttcaatgcagccgagagagagactaatggggttcatccctccaggggcgtgaacggcctaattaacgggaaggctaactctaataagtccctgcctactcctgctgtgttactttcccccaccaaggagcctcctcctctgctcgctaaacctaagctgggcttccctaaaaaggctagccggaccgccagaatcgcttccgacgaggaaattcagggcactaaggatgctgtgatccaggacctcgaacgcaagcttaggtttaaagaggaccttctgaacaatgggcagcctcggctaacctacgaggaacgaatggcacgccggttactcggtgcagatagcgccactgtctttaacatccaagaacctgaggaggagacagccaaccaagatattgggtcaccccatgccagcgtgggcagccccctagatggacagaaggagtacaaagtctctagctgcgagcagaggctcatctctgagatcgaataccggttggagagatccccggtagatgagtcaggcgacgaggtgcagtatggagatgtccccgtcgagaacgggatggcgccgttctttgaaatgaagctcaaacactacaagatttttgaaggtatgccagtgacatttacatgtcgcgtggcagggaaccctaagcctaaaatctattggttcaaagatggcaagcagatttcaccaaaatccgaccactatacgattcagcgcgatctagacggcacttgcagcctacatacaaccgcgtccaccctggacgacgatggcaattacaccatcatggccgctaatccccagggaaggataagttgcacaggccgtctgatggtgcaggctgtgaaccaaaggggcaggagccccaggtcaccgagcgggcaccctcacgtgaggagaccaaggtcccgatcccgagactcgggcgacgaaaatgaacctatccaggaacgctttttcagaccgcacttcctccaggccccgggcgatctgactgttcaggagggaaagctgtgccgcatggactgtaaagttagcggcctacctactcctgatctctcgtggcagctggatggtaaacccgtgcgacctgattctgctcacaaaatgcttgtcagagaaaatggcgtccactccctcatcattgaacctgtgactagcagggacgctgggatatatacatgtattgctaccaaccgcgctggccaaaactccttttcgttggaacttgtagtggccgccaaggaggcccacaaaccacccgtcttcatagaaaagcttcagaataccggggtggccgatggatatccggtacgcttggaatgtagagtgctgggcgtgcctccccctcagattttctggaaaaaagaaaacgagtctttgacacacagtacagacagagtatctatgcaccaggacaaccatgggtacatttgcctgctaatccagggtgctaccaaagaagacgccggatggtatacggtttccgccaagaatgaagcaggcattgtgtcctgtaccgctagactggacgtctacattagccgacactag

SEQ ID NO: 64344 - DNA, 3372 bp, Artificial Sequence
  derived and/or modified sequence
atgtccggcaccagctcacacgagagtttttatgactccctgtcagacatgcaggaagagagtaagaatacagatttttttcctggactttccgcctttctctcacaggaggagatcaataagtcactggacctagctcggcgtgctattgcggactcagagacggaagactttgactcagagaaggaaatcagccagattttttcaacctcccccgcatcactctgtgagcatccctcacacaaggagactaagctgggcgagcatgccagtcgaaggcctcaagataatcgttccactccagttcagccacttgccgagaaacagactaagagcattagcagtccggtgagtaagaggaagcctgccatgagccccctgctcactaggccctcctacatacggagcctgcgcaaggccgagaaacgtggtgccaagacaccaagtaccaacgttaagccaaaaacccctcaccagcgcaaaggtggacctcagtctcagctatgtgacaaggccgctaacctgatcgaggagctcacatcaatatttaaggcagccaaacctagaaaccgctctccaaatggcgaaagctcatcaccagattctggctacctgagccccaagaatcagccaagcgctcttctctccgcctcagcatctcagtcgccaatggaagatcagggggaaatggagcgggaagtgaaatcccccggagcgaggcattgctaccaagataatcaggatttagccgtgccgcacaataggaagtcccatccacaaccgcacagtgcgttgcactttcccgcagccccacggttcatccagaagctcaggagccaggaggtcgccgaaggaagccgggtttacctagagtgtcgcgtcaccgggaatcccaccccgagagtaagatggttttgtgaaggcaaagagctccataacaccccagacatacagatccattgcgagggaggcgacctccatactctgataatcgcagaggccttcgaggacgataccgggaggtatacatgtttggctaccaaccctagcggatcggacaccactagcgccgaggtcttcatcgagggcgcttctagcactgatagcgattctgaatcccttgcatttaagtcccgggcaggcgcaatgccccaggcacaaaagaaaaccacctctgtcagtttgactataggaagcagcagtcccaagacaggcgtgaccacagcagtcatccagcctttgagtgtgcctgtgcaacaggtgcacagccccacatcatacctctgtcggcctgatggaaccacgaccgcttatttcccacccgtgtttacaaaagagctccaaaataccgccgttgcagaagggcaggtcgtagtgctcgaatgtagagttcgcggtgccccacctttgcaagtgcagtggtttcgccaaggttctgaaatacaagacagcccggatttccggattctgcaaaaaaagcccagatccaccgctgaaccagaggaaatttgtacactggtgatcgctgagaccttcccggaggacgccggaatatttacatgctccgccagaaatgactacggaagtgcaacatccacagcccaattagtggtgacctcggctaataccgagaactgctcctacgagagcatgggcgaaagcaacaacgaccactttcagcatttcccaccacctccaccaattctggaaactagctcactggaactggcctcaaaaaagccttccgagatccagcaggtgaacaaccctgagctgggtttgtcacgggctgccttacaaatgcagttcaatgcggctgaacgcgaaactaatggagtgcacccgagccggggtgtgaatggcttgataaacggcaaggccaattcgaataagagtctgccaacccccgcagtgctgctgagtcctacaaaagaacccccaccgttgcttgccaagcctaaattggggttccctaaaaaggcatctaggactgccaggatcgcaagcgacgaggagatccaggggactaaggacgccgtcatacaggaccttgaacgcaagcttcggtttaaggaagatcttctgaacaatggccagcctaggctaacttacgaggaaagaatggctaggcgtctgctgggtgcagattccgccactgtgttcaacatccaggagccggaggaggagactgcaaaccaagatatcggctctcctcacgccagtgtggggtcaccattggacggccagaaggaatacaaggtttcaagttgcgaacagaggctgatctccgaaattgagtacagactagagcggagcccagttgatgagagtggcgacgaggttcaatatggtgatgtgcctgtggagaacgggatggcacccttttttgaaatgaaactgaaacattacaaaatcttcgagggcatgccagttacatttacctgcagggtagctgggaacccgaagcccaagatttactggtttaaagatggtaaacaaatatcccctaaaagcgaccattatacgatccagcgagacctggacggaacatgctctctccacaccactgcctctactctcgatgacgacggaaattataccatcatggccgctaatcctcagggtaggatcagctgcactggacggctcatggtgcaggcggttaaccaaagaggcagatcacccaggagtccaagtggccacccacacgtccggagacccaggtccaggagcagagactccggagacgagaacgagcccatccaggagcgattctttcggccacatttccttcaggctcccggagaccttaccgtccaggagggcaaattgtgtcgtatggactgcaaggtttccggtctgccaacaccagatctttcatggcaactggacgggaaaccggttcgaccagacagcgcccacaagatgcttgtgagggaaaatggtgtgcattctttgatcatagagcccgtgacatcaagggacgccggaatatatacctgtattgccacgaatagggcaggacaaaatagtttttctctcgaactggtcgtggctgctaaggaagcccataaacctcccgtgttcatcgagaaactgcagaatacaggggtcgccgatgggtaccctgtcaggttggaatgtcgggttctcggagtccctccacctcaaatcttttggaagaaagaaaatgagagcttgacacacagtaccgacagggtctctatgcaccaagataatcacggctacatctgtttgctgatccaaggggctactaaagaagacgctggatggtataccgtgtccgccaagaatgaagcaggaattgtgtcttgcaccgcaaggctcgacgtttacatctcgcgccactag

SEQ ID NO: 64345 - DNA, 3372 bp, Artificial Sequence
  derived and/or modified sequence
atgagcggcaccagcagccacgagagcttctacgacagcctgagcgacatgcaggaggagagcaagaacaccgacttcttccccggcctgagcgccttcctgagccaggaggagatcaacaagagcctggacctggccagaagagccatcgccgacagcgagaccgaggacttcgacagcgagaaggagatcagccagatcttcagcaccagccccgccagcctgtgcgagcaccccagccacaaggagaccaagctgggcgagcacgccagcagaagaccccaggacaacagaagcacccccgtgcagcccctggccgagaagcagaccaagagcatcagcagccccgtgagcaagagaaagcccgccatgagccccctgctgaccagacccagctacatcagaagcctgagaaaggccgagaagagaggcgccaagacccccagcaccaacgtgaagcccaagaccccccaccagagaaagggcggcccccagagccagctgtgcgacaaggccgccaacctgatcgaggagctgaccagcatcttcaaggccgccaagcccagaaacagaagccccaacggcgagagcagcagccccgacagcggctacctgagccccaagaaccagcccagcgccctgctgagcgccagcgccagccagagccccatggaggaccagggcgagatggagagagaggtgaagagccccggcgccagacactgctaccaggacaaccaggacctggccgtgccccacaacagaaagagccacccccagccccacagcgccctgcacttccccgccgcccccagattcatccagaagctgagaagccaggaggtggccgagggcagcagagtgtacctggagtgcagagtgaccggcaaccccacccccagagtgagatggttctgcgagggcaaggagctgcacaacacccccgacatccagatccactgcgagggcggcgacctgcacaccctgatcatcgccgaggccttcgaggacgacaccggcagatacacctgcctggccaccaaccccagcggcagcgacaccaccagcgccgaggtgttcatcgagggcgccagcagcaccgacagcgacagcgagagcctggccttcaagagcagagccggcgccatgccccaggcccagaagaagaccaccagcgtgagcctgaccatcggcagcagcagccccaagaccggcgtgaccaccgccgtgatccagcccctgagcgtgcccgtgcagcaggtgcacagccccaccagctacctgtgcagacccgacggcaccaccaccgcctacttcccccccgtgttcaccaaggagctgcagaacaccgccgtggccgagggccaggtggtggtgctggagtgcagagtgagaggcgccccccccctgcaggtgcagtggttcagacagggcagcgagatccaggacagccccgacttcagaatcctgcagaagaagcccagaagcaccgccgagcccgaggagatctgcaccctggtgatcgccgagaccttccccgaggacgccggcatcttcacctgcagcgccagaaacgactacggcagcgccaccagcaccgcccagctggtggtgaccagcgccaacaccgagaactgcagctacgagagcatgggcgagagcaacaacgaccacttccagcacttccccccccccccccccatcctggagaccagcagcctggagctggccagcaagaagcccagcgagatccagcaggtgaacaaccccgagctgggcctgagcagagccgccctgcagatgcagttcaacgccgccgagagagagaccaacggcgtgcaccccagcagaggcgtgaacggcctgatcaacggcaaggccaacagcaacaagagcctgcccacccccgccgtgctgctgagccccaccaaggagcccccccccctgctggccaagcccaagctgggcttccccaagaaggccagcagaaccgccagaatcgccagcgacgaggagatccagggcaccaaggacgccgtgatccaggacctggagagaaagctgagattcaaggaggacctgctgaacaacggccagcccagactgacctacgaggagagaatggccagaagactgctgggcgccgacagcgccaccgtgttcaacatccaggagcccgaggaggagaccgccaaccaggacatcggcagcccccacgccagcgtgggcagccccctggacggccagaaggagtacaaggtgagcagctgcgagcagagactgatcagcgagatcgagtacagactggagagaagccccgtggacgagagcggcgacgaggtgcagtacggcgacgtgcccgtggagaacggcatggcccccttcttcgagatgaagctgaagcactacaagatcttcgagggcatgcccgtgaccttcacctgcagagtggccggcaaccccaagcccaagatctactggttcaaggacggcaagcagatcagccccaagagcgaccactacaccatccagagagacctggacggcacctgcagcctgcacaccaccgccagcaccctggacgacgacggcaactacaccatcatggccgccaacccccagggcagaatcagctgcaccggcagactgatggtgcaggccgtgaaccagagaggcagaagccccagaagccccagcggccacccccacgtgagaagacccagaagcagaagcagagacagcggcgacgagaacgagcccatccaggagagattcttcagaccccacttcctgcaggcccccggcgacctgaccgtgcaggagggcaagctgtgcagaatggactgcaaggtgagcggcctgcccacccccgacctgagctggcagctggacggcaagcccgtgagacccgacagcgcccacaagatgctggtgagagagaacggcgtgcacagcctgatcatcgagcccgtgaccagcagagacgccggcatctacacctgcatcgccaccaacagagccggccagaacagcttcagcctggagctggtggtggccgccaaggaggcccacaagccccccgtgttcatcgagaagctgcagaacaccggcgtggccgacggctaccccgtgagactggagtgcagagtgctgggcgtgccccccccccagatcttctggaagaaggagaacgagagcctgacccacagcaccgacagagtgagcatgcaccaggacaaccacggctacatctgcctgctgatccagggcgccaccaaggaggacgccggctggtacaccgtgagcgccaagaacgaggccggcatcgtgagctgcaccgccagactggacgtgtacatcagcagacactag

SEQ ID NO: 64346 - protein, 777 aa, Artificial Sequence
  derived and/or modified sequence
MPQAQKKTTSVSLTIGSSSPKTGVTTAVIQPLSVPVQQVHSPTSYLCRPDGTTTAYFPPVFTKELQNTAVAEGQVVVLECRVRGAPPLQVQWFRQGSEIQDSPDFRILQKKPRSTAEPEEICTLVIAETFPEDAGIFTCSARNDYGSATSTAQLVVTSANTENCSYESMGESNNDHFQHFPPPPPILETSSLELASKKPSEIQQVNNPELGLSRAALQMQFNAAERETNGVHPSRGVNGLINGKANSNKSLPTPAVLLSPTKEPPPLLAKPKLGFPKKASRTARIASDEEIQGTKDAVIQDLERKLRFKEDLLNNGQPRLTYEERMARRLLGADSATVFNIQEPEEETANQEYKVSSCEQRLISEIEYRLERSPVDESGDEVQYGDVPVENGMAPFFEMKLKHYKIFEGMPVTFTCRVAGNPKPKIYWFKDGKQISPKSDHYTIQRDLDGTCSLHTTASTLDDDGNYTIMAANPQGRISCTGRLMVQAVNQRGRSPRSPSGHPHVRRPRSRSRDSGDENEPIQERFFRPHFLQAPGDLTVQEGKLCRMDCKVSGLPTPDLSWQLDGKPVRPDSAHKMLVRENGVHSLIIEPVTSRDAGIYTCIATNRAGQNSFSLELVVAAKEAHKPPVFIEKLQNTGVADGYPVRLECRVLGVPPPQIFWKKENESLTHSTDRVSMHQDNHGYICLLIQGATKEDAGWYTVSAKNEAGIVSCTARLDVYTQWHQQSQSTKPKKVRPSASRYAALSDQGLDIKAAFQPEANPSHLTLNTALVESEDL

SEQ ID NO: 64347 - protein, 672 aa, Artificial Sequence
  derived and/or modified sequence
MSALASRSAPAMQSSGSFNYARPKQFIAAQNLGPASGHGTPASSPSSSSLPSPMSPTPRQFGRAPVPPFAQPFGAEPEAPWGSSSPSPPPPPPPVFSPTAAFPVPDVFPLPPPPPPLPSPGQASHCSSPATRFGHSQTPAAFLSALLPSQPPPAAVNALGLPKGVTPAGFPKKASRTARIASDEEIQGTKDAVIQDLERKLRFKEDLLNNGQPRLTYEERMARRLLGADSATVFNIQEPEEETANQEYKVSSCEQRLISEIEYRLERSPVDESGDEVQYGDVPVENGMAPFFEMKLKHYKIFEGMPVTFTCRVAGNPKPKIYWFKDGKQISPKSDHYTIQRDLDGTCSLHTTASTLDDDGNYTIMAANPQGRISCTGRLMVQAVNQRGRSPRSPSGHPHVRRPRSRSRDSGDENEPIQERFFRPHFLQAPGDLTVQEGKLCRMDCKVSGLPTPDLSWQLDGKPVRPDSAHKMLVRENGVHSLIIEPVTSRDAGIYTCIATNRAGQNSFSLELVVAAKEAHKPPVFIEKLQNTGVADGYPVRLECRVLGVPPPQIFWKKENESLTHSTDRVSMHQDNHGYICLLIQGATKEDAGWYTVSAKNEAGIVSCTARLDVYTQWHQQSQSTKPKKVRPSASRYAALSDQGLDIKAAFQPEANPSHLTLNTALVESEDL

SEQ ID NO: 64348 - DNA, 2019 bp, Artificial Sequence
  derived and/or modified sequence
atgtccgctctggcatcccgttctgcacctgccatgcaatcatccgggtcttttaactatgctaggcccaagcagttcatcgctgcgcagaatttaggccccgcctccggccacggtactccagcgtcctcaccctcatcttcctcacttccctcacctatgtctcctacccctcgccagtttggccgcgctcccgtgccacccttcgcgcagccgtttggcgcggagcctgaagctccttggggttccagctctccttccccgccgccgcccccgcccccagtgtttagtcccaccgcagcctttccagtccccgacgtgttccccctcccgccaccaccaccgcccctccccagcccagggcaggcgtctcactgctccagcccagcaacccgattcggacattcacagacacccgcagctttccttagcgccctgctccccagccagccgccacctgccgccgtcaatgctttaggactccccaagggcgtaacacccgcaggatttcctaaaaaggcgagcaggacagccagaattgcgagcgatgaggaaattcaggggaccaaagacgccgtaattcaggatctggagcgaaagctccgatttaaggaagaccttctgaacaacggacagcccaggctcacatacgaagaacgcatggcccggcgcctccttggcgctgactccgccacagtgttcaatatccaggagcctgaggaggagacagcaaatcaagaatataaagtcagcagttgcgaacaaagactgatctccgagattgaataccgcttggagcggagcccagtggatgagtctggcgatgaggtgcagtatggggacgtgccagtggagaacgggatggccccatttttcgagatgaagctgaaacactacaaaatttttgaaggcatgcctgtcacttttacctgtcgcgtcgctggcaatcccaagccaaagatctattggttcaaagacggcaaacaaatctctccaaagtcagaccactacactatccagcgtgacctcgacggcacgtgttccctgcacaccactgccagcacattagatgatgatggcaactacactattatggccgccaatccccagggacgcatttcctgcactggcaggttgatggtgcaggcagttaaccagaggggcaggtccccccggagcccctcaggccaccctcacgttaggcgccctcgatcccggtctcgtgattctggtgacgaaaatgaacctatccaggaacgcttctttcggccacacttcttgcaagcccccggcgatcttacagtccaggaaggcaagttgtgtcggatggattgtaaagtcagtggcctaccaacgcctgatctgagctggcaactggatgggaagccagtgaggcctgattctgctcataagatgctggtaagagagaacggcgtgcatagcctgatcatcgagcccgtcacgagtcgtgacgcgggaatctacacctgtattgccacaaatagggccggacaaaactccttctccctcgagctggtggtcgccgccaaagaggcacacaaaccacccgtgttcatagagaagctgcagaataccggcgtagcagacgggtatccagtgaggttagagtgtcgcgtgctaggcgtcccacctccgcaaatcttctggaagaaagaaaatgaaagcctgacccatagtacagaccgagtcagtatgcaccaggacaaccacggatacatttgcctgctcatacagggagccaccaaggaggacgctggatggtacacagtgagtgccaagaacgaagctgggatcgtatcgtgtactgctagattggacgtttatacccagtggcatcagcagtcacaaagcacaaagccaaagaaagtgcgccccagcgcctcccgctacgcagctcttagcgaccaaggtttagacatcaaagccgcgttccagcctgaagccaaccccagccaccttacgttaaatacagccttggtagaatcagaagacctttag

SEQ ID NO: 64349 - DNA, 483 bp, Artificial Sequence
  derived and/or modified sequence
taagggaaacctgtgcgccccgactcagcacataagatgcttgtccgcgagaatggcgtccacagtcttattattgagccagtgacctcccgggacgccgggatttacacttgtatcgccactaatcgcgccggccaaaattccttttccctggaactcgtcgtagccgcaaaagaggcccataaacctcctgtttttattgaaaagctacagaacacgggcgtggcagatggatacccagtgagattagaatgtagggttttaggtgtaccacccccgcagattttttggaagaaggaaaacgagtccctgacgcattcaacagaccgcgtctcgatgcatcaggataatcacggctatatttgtctccttattcagggagcgacaaaggaggatgctggttggtatacagtgtcggcgaaaaacgaggctgggatagtcagctgcacagctcgtctggacgtctacattagccgacattag

SEQ ID NO: 64350 - DNA, 2019 bp, Artificial Sequence
  derived and/or modified sequence
atgtctgccctggccagccgcagcgccccagccatgcagagcagcggcagcttcaactatgcccggcccaagcagttcatcgccgcccagaacctgggccctgccagcggccacggcaccccagccagcagccccagcagcagcagcctgcccagccccatgagccccaccccccggcagtttggccgggcccctgtgcccccatttgcccagccctttggagctgagcctgaggccccctggggcagcagcagccccagccccccacctcctcctcctcctgtgttcagccccacagctgccttccctgtgcctgatgtgttccccctgcccccacctcctccacccctgcccagccctggccaggccagccactgcagcagccctgccaccaggtttggccacagccagaccccagctgccttcctgagcgccctgctgcccagccagcccccacctgctgctgtgaatgccctgggcctgcccaagggcgtgaccccagctggcttccccaagaaggccagcaggacagcccgcatcgccagtgatgaggagatccagggcaccaaggatgctgtgatccaggacctggagaggaagctgcgcttcaaggaggacctgctgaacaacggccagccccggctgacctatgaggagaggatggcccggcggctgctgggcgctgacagcgccaccgtcttcaacatccaggagcctgaggaggagacagccaaccaggagtacaaggtgagcagctgtgagcagaggctcatcagcgagattgagtaccgcctggagaggagccctgtggatgaaagtggagatgaggtgcagtatggagatgtgcctgtggagaatggcatggcccccttctttgagatgaagctgaagcactacaagatctttgagggcatgcctgtgaccttcacctgccgggtggccggcaaccccaagcccaagatctactggttcaaggatggcaagcagatcagccccaagagtgaccactacaccatccagagggacctggatggcacctgcagcctgcacaccacagccagcaccctggatgatgatggcaactacaccatcatggccgccaacccccagggccgcatcagctgcaccggccgcctgatggtgcaggccgtgaaccagaggggccgcagccccaggagccccagcggccacccccacgtgagaagacccaggagccgcagccgggacagcggagatgaaaatgagcccatccaggagcgcttcttccggccccacttcctgcaggcccctggggacctgactgtgcaggagggcaagctgtgcaggatggactgcaaggtgtctggcctgcccaccccagacctgtcctggcagctggatggcaagcctgtgcggccagacagcgcccacaagatgctggtgcgggagaatggagtgcacagcctcatcatcgagcctgtgaccagcagagatgctggcatctacacctgcatcgccaccaacagagctggccagaacagcttcagcctggagctggtggtggccgccaaggaggcccacaagccccctgtgttcatcgagaagctgcagaacacaggagtggctgatggctaccctgtgcggctggagtgccgggtgctgggcgtgcccccaccccagatcttctggaagaaggaaaatgaaagcctgacccacagcacagacagagtgtccatgcaccaggacaaccacggctacatctgcctgctgatccagggcgccaccaaggaggatgctggctggtacacagtgtctgccaagaatgaagctggcatcgtgtcctgcacagcccggctggatgtgtacacccagtggcaccagcagagccagagcaccaagcccaagaaggtgcggcccagcgccagccgctatgctgccctgagtgaccagggcctggacatcaaggccgccttccagcctgaggccaaccccagccacctgaccctgaacacagccctggtggagagcgaggacctgtag

SEQ ID NO: 64351 - DNA, 483 bp, Artificial Sequence
  derived and/or modified sequence
tgaggaaaacctgtgcggccagattctgcccacaagatgctggtgagagaaaatggagtgcacagcctcatcatcgagcctgtgaccagcagagatgctggcatctacacctgcatcgccaccaacagagctggccagaacagcttcagcctggagctggtggtggccgccaaggaggcccacaagccccctgtgttcatcgagaagctgcagaacacaggagtggctgatggctaccctgtgcggctggagtgccgggtgctgggcgtgcccccaccccagatcttctggaagaaggaaaatgaaagcctgacccacagcacagacagagtgtccatgcaccaggacaaccacggctacatctgcctgctgatccagggcgccaccaaggaggatgctggctggtacacagtgtctgccaagaatgaggccggcatcgtgtcctgcacagcccggctggatgtgtacatcagccgccactag

SEQ ID NO: 64352 - DNA, 2019 bp, Artificial Sequence
  derived and/or modified sequence
atgagcgccctggccagccggagcgcccccgccatgcagagcagcgggagcttcaactacgcccggcccaaacagtttattgccgcacaaaacctaggacctgccagcggccatggcacccccgcttcctctccctctagcagtagcctgcccagtcccatgagcccaaccccacgccagttcggacgggcccccgtacccccttttgctcagcctttcggagctgagcctgaagcgccctggggaagcagttctccctccccaccgccgcccccgcctccagtcttttcgcctactgcagcgttccctgtgccagacgtgttccccctgcccccacctccacccccactccctagcccaggacaggcatcccactgtagttctccagctacccgttttggtcattctcagaccccagctgcattcctgagcgctctcctgccctcgcagccacctccagctgccgtgaatgcgctggggctcccgaaaggtgtgacaccggcagggttcccaaagaaagcaagccgcacggcccgcatcgcatctgatgaggagatccaaggcaccaaagatgctgtgattcaggatctggagcggaaactgcggtttaaggaagatctcctcaataatggacagccaaggttaacgtacgaagaaagaatggctcgtagactgctcggggctgacagtgcaacagtgtttaacattcaggaaccagaggaggagactgccaaccaggaatacaaagtttcttcctgtgagcagcgtcttattagcgagatcgagtatcgcttggagcgaagcccggtggacgaatcaggggacgaggtgcaatatggtgacgtgcctgtagaaaacggcatggccccctttttcgaaatgaaactcaaacattacaaaatcttcgaggggatgcccgtcaccttcacctgtagggtcgcgggtaatcccaaaccaaagatttactggttcaaggatggcaagcaaatttctcccaagagcgaccactacacaatacaaagagatctggatggcacctgttcactccacactaccgcctcaactcttgatgacgacggcaactacaccatcatggctgcgaacccacagggccggatttcatgtacaggcaggctcatggtgcaggccgtaaatcagcgtggccgctctcccaggagtccaagcgggcatccccacgtccgccggcccagatcccgctcaagggatagcggcgatgaaaatgaaccaatacaggaaagattcttccgacctcattttctccaggcccccggtgatcttacagtgcaagaggggaaactgtgcaggatggactgcaaagtttccggcttaccaacccctgatcttagttggcagctcgacggaaagccagtgagacctgattcagcccacaagatgctcgtccgcgaaaacggcgtccacagtctcataatcgaacctgttacttccagggacgctggcatttatacttgcattgcgaccaacagagcggggcagaacagtttctcactggagttagtcgtggcggcaaaagaagcacacaagcctcccgtgtttatcgaaaagctgcagaacacaggggtggctgatgggtatcctgtaaggcttgagtgccgagtgttgggggtgccccccccccagatcttttggaaaaaggagaatgagtctctcacacatagtaccgatcgggtttctatgcatcaggataaccacggatacatctgtctgctcattcagggcgcaactaaggaagacgctgggtggtacaccgtgtcagctaagaatgaggccggcatcgtcagctgcactgctaggcttgatgtatatacccaatggcatcaacagagccagagcacaaagccaaagaaagttcgcccaagtgcctctcggtacgccgccctcagtgatcaagggctggatattaaggccgccttccagcccgaggcgaatccctcgcaccttaccctgaacaccgccctcgtcgagtcagaagatttatag

SEQ ID NO: 64353 - DNA, 483 bp, Artificial Sequence
  derived and/or modified sequence
tgaggcaagcccgtgcggcccgacagcgcccacaagatgctggtgcgggaaaacggggtgcactcgctgatcattgaacccgtgacatcacgtgatgccggcatttatacttgtatcgccacgaatcgcgccggccaaaatagcttctccctggaactggtcgtcgcggcgaaggaggcacataagccacccgttttcatcgaaaagctgcagaacacaggagtggcggacgggtatcccgtacggcttgagtgccgggtactgggtgtgcccccaccccagatcttctggaagaaggaaaacgaatctctcactcacagcaccgatagagtgtcaatgcaccaggacaaccatggatatatctgtcttctgatccagggcgcaactaaggaggacgcaggatggtatacagtgtcagccaagaacgaggcgggaatagtgagctgcactgcacgtctggacgtgtacattagcaggcattag

SEQ ID NO: 64354 - DNA, 628 bp, Artificial Sequence
  derived and/or modified sequence
tggaaagcccgtacgccctgacagtgctcacaagatgctggtgcgtgagaacggggtgcactctctgatcatagagccagtcacgtcacgtgatgccggcatctacacatgtatagctaccaaccgagcaggacagaactcattcagcctggagcttgtggttgctgctaaagaagcacacaaaccccctgtgtttattgagaagctccaaaacacaggagttgctgatgggtacccagtgcggctggaatgtcgtgtattgggagtgccaccacctcagatattttggaagaaagaaaatgaatcactcactcacagcactgaccgagtgagcatgcaccaggacaaccacggctacatctgcctgctcattcagggagccacaaaagaagatgctgggtggtatactgtgtcagccaagaatgaagcagggattgtgtcctgtactgccaggctggacgtttacatttctcgacattaatagtgaaccacaccaggagaacaaatacccaagtatcattcaggaactttgaattattagcaaaatatgcatgttgatttctcttacattggctagttagttgtggcttccttactcaagcatccttaggagttaacagtaggcaaa

SEQ ID NO: 64355 - DNA, 2019 bp, Artificial Sequence
  derived and/or modified sequence
atgagcgccctcgctagtaggtccgctcctgctatgcaaagttcagggtcgttcaattatgccaggccaaagcagttcatcgctgcccagaatctgggacctgcctctggccacggcaccccagcatccagcccctctagctccagccttccttcccccatgtctcctacccctaggcagtttggcagagcccctgtgccaccatttgctcagccgtttggggctgagccggaggccccatggggaagctcaagccccagcccccctcctcctcctccgcctgttttttcacctacagcagcattcccggttcctgatgtttttccgctgccccctcctccacctcctcttccatcccccggacaggcctcacattgcagcagcccagcgacccggtttggccactcacagacccccgctgcgttcctgtcggcgctgctcccttcgcagcctcctcctgctgcagtcaatgccctggggttaccaaaaggggttacacctgcaggattcccgaaaaaggcctcccgcacggcgaggattgcctctgatgaagaaatccaggggacgaaagacgctgtcatccaggatttggaaaggaagctccggttcaaggaggatttactgaacaatggccaacccagattaacctacgaggaacggatggctcggagactgttgggagcagatagtgctactgtgtttaacatccaggagccagaagaagaaacagccaaccaggagtacaaggtctcttcgtgcgaacagcgcttgatcagtgagattgagtatcgcctagagcggagtcccgtcgatgaatcaggggacgaagtgcagtatggcgacgtacccgtcgaaaacggcatggccccattctttgaaatgaagttaaagcactataaaatttttgaaggcatgcccgtcacctttacgtgccgtgttgccggaaacccgaagcctaagatctactggtttaaggacggaaagcagatatctcccaaatccgatcactatacaatacagagggacctcgatggaacttgctccttgcatactaccgcttcgacactagatgacgacgggaactacaccatcatggccgcaaacccgcagggcagaatttcttgcaccggtcgccttatggtccaggccgtaaatcagaggggcagatctcccaggtctccctcaggacaccctcatgtgcggagaccacgatcacggagtagagacagcggtgacgagaacgaaccaatacaagagcgatttttccgtcctcattttttgcaggccccaggcgatctcactgtgcaggaaggtaaattatgtcggatggactgcaaggttagcggtctgcctacccctgacctcagctggcagctggacggaaagccagtgagacccgattctgcccataagatgttagtgcgcgaaaacggagtccatagcctgattattgaaccagtgaccagtcgtgatgctggaatatatacatgcatcgcgactaatcgtgctggccagaactccttctcattagagctagtggtggccgctaaggaggctcacaaaccacctgtgtttattgagaagctccaaaatacgggcgtggccgatgggtacccggtacggctagaatgcagggtccttggcgtccccccaccacagattttttggaagaaagagaacgagtctcttacccattcgacagacagagtctcaatgcatcaggataatcacggctacatctgcctgctcatccagggcgcaacaaaagaagatgccggatggtacacagtcagcgcaaaaaacgaggcagggatagtctcctgtacggcacggctcgacgtatatacccagtggcaccagcagtctcagtcgacgaaacctaagaaggtgagaccatccgcctcacgctacgctgcactgagcgaccaaggtctggatatcaaagccgcattccagccggaagcaaaccctagccacttgactctcaacactgccctcgtcgaatctgaggacctgtag

SEQ ID NO: 64356 - DNA, 483 bp, Artificial Sequence
  derived and/or modified sequence
taagggaaacccgtgcgacctgattccgctcacaagatgctggtgagagagaatggcgtccatagcctcatcatagagccggtgacatcacgcgatgcgggaatttacacctgtatagctactaatagggctggccaaaactctttcagtctggagctcgtcgtcgcagctaaagaggcccacaagcctccagtgtttattgaaaagctgcagaacactggcgtggctgatggctatcctgtccgccttgagtgcagagtgctgggcgttcccccaccacagattttctggaagaaagagaacgagagtctcacacactccacggaccgtgtgtccatgcatcaggacaaccacggttacatctgcctgctgatccagggcgcaacgaaagaagacgccggttggtacacagtatctgctaagaatgaggctggcatcgtatcttgcaccgcccgactcgacgtgtatatcagcaggcactag

SEQ ID NO: 64357 - DNA, 397 bp, Artificial Sequence
  derived and/or modified sequence
aggcttggcggtggcggcggcggcagcttcgcgccgaatccccggggagcggcggtggcggcgtcctggggccaggaggagcgaacacctgccgcggtcctcccgccggcgctgggtgagtgcaccgcccgccctatccgctgtgcctggctgcttgggcccccatccctgctgccggctgagccttccgcggaacacctgctgctgctcgctgttcggcccggggcggggacacggccgcggacgtccttgtgggctctgtgtgctccgggatggagcaggtgtgcagagggtgagaacccagctctgggaccaagtcacttgcttccttacttagcaagactatcgacttgagcaaacttggacctgggatgaggatgtctgtgggcctctcgct

SEQ ID NO: 64358 - DNA, 2019 bp, Artificial Sequence
  derived and/or modified sequence
atgagcgccctggccagcagaagcgcccccgccatgcagagcagcggcagcttcaactacgccagacccaagcagttcatcgccgcccagaacctgggccccgccagcggccacggcacccccgccagcagccccagcagcagcagcctgcccagccccatgagccccacccccagacagttcggcagagcccccgtgccccccttcgcccagcccttcggcgccgagcccgaggccccctggggcagcagcagccccagccccccccccccccccccccccgtgttcagccccaccgccgccttccccgtgcccgacgtgttccccctgccccccccccccccccccctgcccagccccggccaggccagccactgcagcagccccgccaccagattcggccacagccagacccccgccgccttcctgagcgccctgctgcccagccagcccccccccgccgccgtgaacgccctgggcctgcccaagggcgtgacccccgccggcttccccaagaaggccagcagaaccgccagaatcgccagcgacgaggagatccagggcaccaaggacgccgtgatccaggacctggagagaaagctgagattcaaggaggacctgctgaacaacggccagcccagactgacctacgaggagagaatggccagaagactgctgggcgccgacagcgccaccgtgttcaacatccaggagcccgaggaggagaccgccaaccaggagtacaaggtgagcagctgcgagcagagactgatcagcgagatcgagtacagactggagagaagccccgtggacgagagcggcgacgaggtgcagtacggcgacgtgcccgtggagaacggcatggcccccttcttcgagatgaagctgaagcactacaagatcttcgagggcatgcccgtgaccttcacctgcagagtggccggcaaccccaagcccaagatctactggttcaaggacggcaagcagatcagccccaagagcgaccactacaccatccagagagacctggacggcacctgcagcctgcacaccaccgccagcaccctggacgacgacggcaactacaccatcatggccgccaacccccagggcagaatcagctgcaccggcagactgatggtgcaggccgtgaaccagagaggcagaagccccagaagccccagcggccacccccacgtgagaagacccagaagcagaagcagagacagcggcgacgagaacgagcccatccaggagagattcttcagaccccacttcctgcaggcccccggcgacctgaccgtgcaggagggcaagctgtgcagaatggactgcaaggtgagcggcctgcccacccccgacctgagctggcagctggacggcaagcccgtgagacccgacagcgcccacaagatgctggtgagagagaacggcgtgcacagcctgatcatcgagcccgtgaccagcagagacgccggcatctacacctgcatcgccaccaacagagccggccagaacagcttcagcctggagctggtggtggccgccaaggaggcccacaagccccccgtgttcatcgagaagctgcagaacaccggcgtggccgacggctaccccgtgagactggagtgcagagtgctgggcgtgccccccccccagatcttctggaagaaggagaacgagagcctgacccacagcaccgacagagtgagcatgcaccaggacaaccacggctacatctgcctgctgatccagggcgccaccaaggaggacgccggctggtacaccgtgagcgccaagaacgaggccggcatcgtgagctgcaccgccagactggacgtgtacacccagtggcaccagcagagccagagcaccaagcccaagaaggtgagacccagcgccagcagatacgccgccctgagcgaccagggcctggacatcaaggccgccttccagcccgaggccaaccccagccacctgaccctgaacaccgccctggtggagagcgaggacctgtag

SEQ ID NO: 64359 - DNA, 483 bp, Artificial Sequence
  derived and/or modified sequence
tgaggcaagcccgtgagacccgacagcgcccacaagatgctggtgagagagaacggcgtgcacagcctgatcatcgagcccgtgaccagcagagacgccggcatctacacctgcatcgccaccaacagagccggccagaacagcttcagcctggagctggtggtggccgccaaggaggcccacaagccccccgtgttcatcgagaagctgcagaacaccggcgtggccgacggctaccccgtgagactggagtgcagagtgctgggcgtgccccccccccagatcttctggaagaaggagaacgagagcctgacccacagcaccgacagagtgagcatgcaccaggacaaccacggctacatctgcctgctgatccagggcgccaccaaggaggacgccggctggtacaccgtgagcgccaagaacgaggccggcatcgtgagctgcaccgccagactggacgtgtacatcagcagacactag

SEQ ID NO: 64360 - protein, 1375 aa, Artificial Sequence
  derived and/or modified sequence
MEAPLQTGMMGTSSHGLATNSSGAKVAERDGFQDVLAPGEGSAGRICGAQPVPFVPQVLGVMIGAGVAVVVTAVLILLVVRRLRVPKTPAPDGPRYRFRKRDKVLFYGRKIMRKVSQSTSSLVDTSVSATSRPRMRKKLKMLNIAKKILRIQKETPTLQRKEPPPAVLEADLTEGDLANSHLPSEVLYMLKNVRVLGHFEKPLFLELCRHMVFQRLGQGDYVFRPGQPDASIYVVQDGLLELCLPGPDGKECVVKEVVPGDSVNSLLSILDVITGHQHPQRTVSARAARDSTVLRLPVEAFSAVFTKYPESLVRVVQIIMVRLQRVTFLALHNYLGLTNELFSHEIQPLRLFPSPGLPTRTSPVRGSKRMVSTSATDEPRETPGRPPDPTGAPLPGPTGDPVKPTSLETPSAPLLSRCVSMPGDISGLQGGPRSDFDMAYERGRISVSLQEEASGGSLAAPARTPTQEPREQPAGACEYSYCEDESATGGCPFGPYQGRQTSSIFEAAKQELAKLMRIEDPSLLNSRVLLHHAKAGTIIARQGDQDVSLHFVLWGCLHVYQRMIDKAEDVCLFVAQPGELVGQLAVLTGEPLIFTLRAQRDCTFLRISKSDFYEIMRAQPSVVLSAAHTVAARMSPFVRQMDFAIDWTAVEAGRALYRQGDRSDCTYIVLNGRLRSVIQRGSGKKELVGEYGRGDLIGVVEALTRQPRATTVHAVRDTELAKLPEGTLGHIKRRYPQVVTRLIHLLSQKILGNLQQLQGPFPAGSGLGVPPHSELTNPASNLATVAILPVCAEVPMVAFTLELQHALQAIGPTLLLNSDIIRARLGASALDSIQEFRLSGWLAQQEDAHRIVLYQTDASLTPWTVRCLRQADCILIVGLGDQEPTLGQLEQMLENTAVRALKQLVLLHREEGAGPTRTVEWLNMRSWCSGHLHLRCPRRLFSRRSPAKLHELYEKVFSRRADRHSDFSRLARVLTGNTIALVLGGGGARGCSHIGVLKALEEAGVPVDLVGGTSIGSFIGALYAEERSASRTKQRAREWAKSMTSVLEPVLDLTYPVTSMFTGSAFNRSIHRVFQDKQIEDLWLPYFNVTTDITASAMRVHKDGSLWRYVRASMTLSGYLPPLCDPKDGHLLMDGGYINNLPADIARSMGAKTVIAIDVGSQDETDLSTYGDSLSGWWLLWKRLNPWADKVKVPDMAEIQSRLAYVSCVRQLEVVKSSSYCEYLRPPIDCFKTMDFGKFDQIYDVGYQYGKAVFGGWSRGNVIEKMLTDRRSTDLNESRRADVLAFPSSGFTDLAEIVSRIEPPTSYVSDGCADGEESDCLTEYEEDAGPDCSRDEGGSPEGASPSTASEMEEEKSILRQRRCLPQEPPGSATDA

SEQ ID NO: 64361 - DNA, 4128 bp, Artificial Sequence
  derived and/or modified sequence
atggaagcgcccctccagacgggcatgatgggcaccagctcacacggattggccacgaacagcagcggagccaaggtggccgaacgagacggcttccaagacgtcctcgcacccggagagggcagcgcaggccgtatatgcggagctcagccagtgccttttgtgccacaggtgttaggtgttatgataggcgccggcgtggctgtggtcgtcactgcagttctaattctgctggtggttcgccgccttcgcgttcccaagactccagcaccagacggtcctaggtatcggttccggaagagagacaaagtgcttttttatggaaggaagattatgcgaaaagtgtcgcaatccacctccagcctggtggacacaagtgtctccgcaacatcacgtccaagaatgcgtaaaaagttgaagatgttaaatatcgcgaagaagatactgcgcatacagaaggaaacacccaccttgcaaagaaaagagcccccacccgctgtgttagaggccgatcttaccgagggcgatctggccaactctcatctcccctctgaggtgctgtacatgctgaaaaacgttcgggtactcgggcatttcgagaagcctctgttcctagagctgtgccggcacatggttttccagcgcttgggccaaggcgattacgtctttagacctggtcagcccgacgcatccatttacgtggtgcaggacgggttactagaactgtgcctccctggccctgacgggaaagaatgtgttgtcaaggaggtagtgcctggggactcagttaactcgcttctttccatcctggatgtgattacaggacaccaacacccacagcgcactgttagcgctagggctgccagagatagtaccgtactgcggctgcccgtggaggcattcagcgccgtcttcaccaagtaccctgagtccttggtgcgggtcgtgcagattatcatggtgcgcctacagcgggtcacattcttggctctgcacaattatctaggactaactaacgaactgttttcacatgagatccagcccctgagactgtttccttcaccaggactgcccacccgcacatctcccgtgcgaggttcaaagcgcatggtcagcaccagcgcgacagatgaacccagagaaacccccggaagacctcccgatcctaccggcgcgcctcttccaggaccgaccggggatccagtcaaacccacttccctggaaaccccctccgcccctctgctatcaaggtgtgtcagcatgcctggcgacatttcagggctccagggtggcccccgctctgattttgatatggcctacgaacgggggcgaataagtgtctcgctacaagaggaggcgtcaggagggagcctggccgctccagccaggacgcccacccaagagccccgggagcagcccgccggcgcctgtgaatatagttattgtgaagatgagtctgcaacaggaggctgcccttttggtccttatcagggaagacagaccagctctattttcgaggctgctaaacaggaactcgccaaactgatgcgcatagaagacccttcgctccttaatagcagggtgcttctgcaccatgcaaaggccgggactatcatcgccaggcaaggtgatcaggatgtcagtttacacttcgtattgtggggatgtctgcacgtgtatcaacggatgattgataaagccgaggacgtgtgcctatttgttgctcaaccgggcgaacttgttggacaactcgctgtgcttaccggagagcctctaatattcaccctgagggcccagcgggattgtacttttctgagaattagtaaatccgacttctacgagatcatgagagcccaaccctctgtagtgctgagtgcagcccacactgtcgccgcgcgcatgtccccttttgtgcgccagatggattttgctatcgattggacagcagtggaagccggccgcgccttatacaggcaaggtgatagatccgattgtacatacattgtgctgaacgggcgtttgagatctgtgatccagcgtgggagcggtaagaaagaactggtcggcgaatatggaaggggcgatcttattggcgtagtcgaggccctgacccgccagcctagggctaccacggtgcacgcagtgagggacacggagctagccaagttgccagaaggaactttggggcatattaagcggcggtacccacaggtggtcacgagactgattcacctgttatcacaaaaaattctggggaatctacagcaactgcagggacctttccctgccggatcaggcctcggagtgccgccgcattctgagctgacaaaccctgcttcaaatctagccacagtcgccatattaccagtgtgtgccgaggtgcctatggtggctttcacactggagctgcagcatgccctgcaggccattggccctacgctgcttttaaactctgatattatccgcgcgcgcctgggagctagcgctctggattcaattcaggagtttaggttgtctggatggctcgcacagcaagaagatgcccaccgcattgtcctatatcaaaccgacgcttctttaaccccttggacagtgcgatgcctgcggcaggcagactgtatactaattgtgggtttaggagatcaggagcctactttggggcaactcgagcaaatgttggaaaataccgctgtcagggcattgaaacaactggtgctgctgcacagagaagagggcgctgggcccacccggacagtcgagtggctcaacatgcgtagttggtgctctggacatctgcacctgcggtgtcctaggcgactcttcagccggcgcagtcccgccaagctgcacgagctgtacgaaaaggtgttttcccggcgcgccgacaggcactctgatttcagtcggcttgctagggtgctaacaggcaatacaattgccttggttctcggcgggggcggggctcggggctgcagtcatattggtgtgctgaaggccctggaagaggccggagttcccgtcgacctggtcggtggcacctcaatcggcagcttcatcggcgccctttatgcagaggagagaagcgcgagcagaacaaagcagagagcccgggaatgggccaagtccatgaccagtgtcctggaacctgtccttgatctcacatatcccgtcacgtcaatgttcacagggtccgcttttaatcgcagtattcatcgtgtgttccaggacaagcagatcgaagacctgtggttgccttactttaacgtgacaactgacatcaccgcttcagcaatgagggttcacaaagatggctctctgtggcgatatgtgcgagccagtatgaccctctctggctatctaccgcctctgtgcgaccccaaggatgggcatctgctgatggacgggggttacattaataacttgccagccgatatcgcccgctcaatgggagctaagaccgtcattgcaattgacgtaggatcacaagacgaaactgacttgagtacatacggtgacagtctgtcaggctggtggctgctgtggaaacgactgaatccctgggcggacaaggtgaaggtccctgatatggccgagatacagtccaggctggcatacgtatcctgcgtgaggcagctggaagtcgtgaagagttcttcttactgtgaatatttaagaccccccatcgattgcttcaagacaatggatttcggaaagttcgaccaaatttacgacgttgggtaccagtatggtaaggccgtttttgggggatggagccgcggaaatgtcattgagaaaatgctgacagacaggagatctaccgatctgaacgagagcaggcgtgcagacgtgcttgccttcccttcttcggggtttactgatctggcagagattgttagccggatcgaaccacccacttcatatgtctctgacggctgcgcagacggtgaagagtcagactgtctcactgaatacgaagaggacgctgggccagactgcagtagagacgaaggagggtcccctgaaggggcatcgccaagtacagccagtgagatggaagaggagaaatctattctgcgccagagaaggtgcctgccacaggagcctcccggttccgcgaccgacgcttag

SEQ ID NO: 64362 - DNA, 4128 bp, Artificial Sequence
  derived and/or modified sequence
atggaggcccccctgcagacaggcatgatgggcaccagcagccacggcctggccaccaacagcagcggggccaaggtggccgagagagatggcttccaggatgtgctggcccctggagagggcagcgctggccgcatctgtggggcccagcctgtgccctttgtgccccaggtgctgggcgtgatgattggagctggggtggccgtggtggtgacagctgtgctgatcctgctggtggtgcggcggctgcgggtgcccaagaccccagccccagatggcccccgctaccgcttcaggaagagggacaaggtgctcttctacggcaggaagatcatgaggaaggtgtcccagagcaccagcagcctggtggacacctctgtgtctgccaccagccggcccaggatgaggaagaagctgaagatgctgaacatcgccaagaagatcctgcgcatccagaaggagacccccaccctgcagaggaaggagcccccacctgctgtgctggaggccgacctgacagaaggagacctggccaacagccacctgcccagcgaggtgctgtacatgctgaagaatgtgcgggtgctgggccactttgagaagcccctcttcctggagctgtgccgccacatggtgttccagaggctgggccagggcgactatgtgttccggcccggccagccagatgccagcatctacgtggtgcaggacggcctgctggagctgtgcctgcccggcccagatggcaaggaatgtgtggtgaaggaggtggtgcctggggacagcgtgaacagcctgctgagcatcctggatgtgatcaccggccaccagcacccccagaggacagtgtctgcccgggccgcccgggacagcacagtgctgcggctgcctgtggaggccttctctgctgtgttcaccaagtacccagagagcctggtgcgggtggtgcagatcatcatggtgcggctgcagagggtgaccttcctggccctgcacaactacctgggcctgaccaatgaactcttcagccatgagatccagcccctgcggctcttccccagccctggcctgcccaccaggaccagccctgtgcggggcagcaagaggatggtgtccaccagcgccacagatgagccccgggagaccccaggccggcccccagaccccaccggggcccccctgcccggccccaccggggaccctgtgaagcccaccagcctggagaccccatctgcccccctgctgagccgctgtgtgtccatgcctggggacatcagcggcctgcagggcggccccaggagtgactttgacatggcctatgaaagaggccgcatctctgtgtccctgcaggaggaggccagcggcggcagcctggccgccccagcccggacccccacccaggagccccgggagcagcctgctggggcctgtgagtacagctactgtgaagatgagagcgccaccggcggctgccccttcggcccctaccagggccggcagaccagcagcatctttgaagctgccaagcaggagctggccaagctgatgagaattgaggaccccagcctgctgaacagccgggtgctgctgcaccacgccaaggccggcaccatcatcgcccggcagggcgaccaggatgtgtccctgcactttgtgctgtggggctgcctgcacgtgtaccagaggatgattgacaaggccgaggatgtgtgcctgtttgtggcccagcctggagagctggtgggccagctggccgtgctgaccggggagcccctcatcttcaccctgcgggcccagagggactgcaccttcctgcgcatcagcaagagtgacttctatgagatcatgagggcccagcccagcgtggtgctgtctgctgcccacacagtggccgccaggatgagcccctttgtgcggcagatggactttgccatcgactggacagctgtggaggccggccgggccctgtaccggcagggcgacagaagtgactgcacctacatcgtgctgaatggccgcctgcggagcgtcatccagaggggcagcggcaagaaggagctggtgggggagtatggccgcggggacctgattggagtggtggaggccctgacccggcagccccgggccaccaccgtgcatgctgtgcgggacacagagctggccaagctgcctgagggcaccctgggccacatcaagaggcgctacccccaggtggtgaccaggctcatccacctgctgagccagaagatcctgggcaacctgcagcagctgcagggccccttccctgctggcagcggcctgggcgtgcccccccacagcgagctgaccaacccagccagcaacctggccaccgtggccatcctgcctgtgtgtgccgaggtgcccatggtggccttcaccctggagctgcagcacgccctgcaggccatcggccccaccctgctgctgaacagcgacatcatccgggcccggctgggcgccagcgccctggacagcatccaggagttccggctgagcggctggctggcccagcaggaggatgcccacagaattgtgctgtaccagacagatgccagcctgaccccctggacagtgcgctgcctgcggcaggccgactgcatcctgattgtgggcctgggggaccaggagcccaccctgggccagctggagcagatgctggagaacacagctgtgcgggccctgaagcagctggtgctgctgcaccgggaggagggcgccggccccaccaggacagtggagtggctgaacatgaggtcctggtgcagcggccacctgcacctgcgctgcccccggcggctcttcagcagaagaagccctgccaagctgcacgagctgtatgagaaggtgttcagcagaagagctgacagacacagcgacttcagccggctggcccgggtgctgactggaaacaccatcgccctggtgctgggcggcggcggggcccggggctgcagccacatcggcgtgctgaaggccctggaggaggccggcgtgcctgtggacctggtgggcggcaccagcatcggcagcttcatcggggccctgtatgcagaggagaggtctgccagcaggaccaagcagagggcccgggagtgggccaagtccatgacctctgtgctggagcctgtgctggacctgacctaccctgtgacctccatgttcaccggcagcgccttcaacagaagcatccacagggtcttccaggacaagcagatcgaggacctgtggctgccctacttcaacgtgaccacagacatcacagccagcgccatgagggtgcacaaggatggcagcctgtggaggtatgtgcgggcctccatgaccctgagcggctacctgccccccctgtgtgaccccaaggatggccacctgctgatggatggcggctacatcaacaacctgcctgctgacatcgcccgctccatgggcgccaagacagtgattgccattgatgtgggcagccaggatgaaacagacctgagcacctacggggacagcctgagcggctggtggctgctgtggaagaggctgaacccctgggccgacaaggtgaaggtgcctgacatggccgagatccagagccggctggcctacgtgtcctgtgtgcggcagctggaggtggtgaagagcagcagctactgtgagtacctgcggccccccatcgactgcttcaagaccatggactttgggaagtttgaccagatctatgatgtgggctaccagtatggcaaggctgtgtttggaggctggagcagaggaaatgtgattgagaagatgctgacagaccggcgcagcacagacctgaatgaaagcagaagagcagatgtgctggccttccccagcagcggcttcacagacctggccgagatcgtgtccagaattgagccccccaccagctatgtgtctgatggctgtgctgatggagaggagagtgactgcctgacagaatatgaggaggatgctggccctgactgcagcagagatgaaggaggcagccctgagggcgccagccccagcacagccagcgagatggaggaggagaagagcatcctgcggcagaggcgctgcctgccccaggagcccccaggcagcgccacagatgcctag

SEQ ID NO: 64363 - DNA, 4128 bp, Artificial Sequence
  derived and/or modified sequence
atggaggcccccctgcagaccggcatgatgggcaccagcagccacggcctagcaactaattcgtctggggccaaggtagcggagagggacggttttcaggacgtgcttgcaccgggagaggggtccgcgggcaggatctgtggcgcccagccggtgccctttgtgccgcaggtgctgggcgtgatgattggcgccggcgtggccgttgtggtgacggccgtgctgatcttacttgtggtgagaaggttgcgcgtcccaaagaccccagctcccgatggtcccaggtaccggttcagaaagagggacaaggtcctgttctatgggagaaaaatcatgagaaaggtctcccagagcacctcgtctctagtggatactagcgtctctgcaacatcccgacccaggatgcgtaaaaagctaaagatgcttaatattgcaaaaaagattttgcggattcagaaggaaacccctactttacagcggaaggagccgcctccagcagtcctggaggccgaccttacagagggagatttagcaaactcgcacctacctagtgaagtgctttacatgctgaagaacgttagggtgttaggccacttcgagaagccactcttcctggaactgtgccgccatatggttttccagagactcgggcagggagattacgtatttagacccggtcagcccgacgcctccatttatgtggtccaggacggtctgctcgagctctgtttgccagggcccgacgggaaggaatgtgtcgttaaggaagtggtaccaggcgatagtgtcaactcactgctgtctatcctagatgtgattaccggccatcagcacccacaaagaactgtgagtgcacgcgctgctcgggacagcacagttttacgcctgcccgtggaggcctttagtgccgttttcaccaaataccctgagtctttggtgcgagtggtgcaaatcattatggtcaggctacagcgggtcacatttctcgctctccacaactacctgggccttacaaatgaactgtttagccacgagattcagccactgcgtctgttcccctctccaggacttcctactaggacatctcctgtacggggctccaaaaggatggtcagcacctctgctacagacgaacctagggaaactcctggaaggccgcctgatcctacaggtgccccgctccctgggccaacgggggatccggtcaaaccaacctcacttgaaaccccttccgccccactgctcagtagatgcgtgtcaatgcccggagacataagcgggctccagggcggcccaagatctgactttgatatggcatatgagagaggtcgcatctctgtcagcctgcaggaagaggcttctgggggatcccttgctgctcccgctagaacccccacgcaggaacctagagaacagccagcaggcgcctgcgagtattcatactgtgaagatgagtcggccaccggcggctgcccgtttggcccataccaaggtagacagaccagcagcatatttgaagctgcgaagcaggaactcgccaagctaatgcggattgaggaccctagccttttgaactcacgggtccttctgcaccacgcaaaggccggtaccatcatcgccaggcagggggatcaggatgttagtttgcattttgtgctgtggggctgcctgcacgtgtaccaacggatgatcgataaggcagaagatgtgtgtctcttcgtggctcaacctggtgagttggtaggccaactagccgtcctgacgggagaacctttaatcttcaccttgcgggcgcagcgagactgtacatttttgagaataagcaaaagcgacttctatgagattatgcgcgctcagccctcagtcgttctgtctgctgctcacaccgtggcagcccggatgagtccctttgtgagacaaatggacttcgcaattgactggacagctgtcgaggcagggagggccctgtaccgacaaggtgaccgcagtgattgcacctacatagtcttgaacggccgtctacggtcagttattcagagagggtccggcaaaaaggagttagttggcgagtatggtcgcggtgatctgatcggcgtggtcgaggctctcacgcggcagcctcgagcaaccaccgtgcatgctgtgagagacacagaattggctaagctgcctgaaggtacgctcggacacattaaaagacgctacccccaggtggtgaccaggctgatacatttactgtcacagaaaatcctgggaaatctacaacaactgcagggtcctttccctgccggttccgggcttggcgttcctccccactcagagttaacaaaccctgcctcgaacctagccacagttgcaattttaccagtttgtgccgaagttccaatggtcgccttcaccctcgagctacagcacgctcttcaggccatcggacccactctcttactgaatagcgatatcatccgcgctcgactaggggctagcgcattggattcaatccaagaatttcggttgtcaggatggttggcccagcaggaggacgcgcaccgcatcgtgctttatcaaacagatgcttctctgaccccctggacagtccggtgcctcagacaggccgactgcatcctaatcgtgggcctgggggaccaggaaccaacgctagggcagctggagcagatgctggagaacacggccgtccgggctctcaagcagctcgttctcctccaccgggaggagggagcggggccaacccgcaccgttgagtggctcaatatgagaagctggtgcagtggtcacctgcacttacgatgtccacgtcgcctcttttctaggcgctcgcccgctaagctgcacgagttgtatgagaaggtgttctctcggagggcagacaggcacagcgatttctcaagactggccagggtactgaccggcaacactatcgccctggtactgggaggcggaggagctaggggctgctcacacattggcgtcctgaaggccctggaggaagccggtgttcccgtggatctggtcggaggcacttcaatcggctcctttattggagccttgtatgccgaggagagaagcgccagccgcaccaagcaacgtgcccgagagtgggccaaatctatgacatctgttctcgaacccgttctcgacctgacctacccagtcacctccatgttcaccggctccgcgttcaaccggagcattcaccgggtattccaagacaagcagattgaagacctgtggctgccgtactttaatgtgacaaccgacatcaccgccagtgccatgcgggtgcacaaagacggttccctctggcgttacgtcagggcaagcatgacactgtcgggctacctcccacccctgtgtgacccaaaggatggccaccttctgatggatggaggctacatcaataatttgccagccgacatcgctcgcagcatgggggccaagactgtgattgctatagatgtgggctcgcaggacgagacggacctgagtacgtatggcgatagcctctcaggctggtggctgctgtggaagagactgaatccgtgggccgacaaagttaaagtgccagacatggcagaaattcagtcccgactcgcgtatgtctcctgtgtgcgccagctcgaagtagtgaagtcaagctcctactgcgaatatttacggccacctatagactgctttaagacaatggattttggcaagtttgaccaaatatacgacgttggatatcaatacggcaaggccgtgttcggcggctggagtcgaggcaacgtgatagaaaaaatgttaactgataggagaagcacggacctgaacgagtcacgacgcgccgatgttcttgccttcccgagttcaggcttcacagatctggcagaaatagtgagtcgaatcgagccgcctacctcctatgtgtctgatgggtgcgccgacggagaggagtcagattgcctgactgagtacgaggaggacgccggcccagactgctcaagggacgaaggtgggtcaccagagggcgcatccccaagtaccgcgagtgaaatggaggaggagaaatctattttacggcaaaggagatgtctgcctcaggaaccgccaggttctgcaacagatgcttag

SEQ ID NO: 64364 - DNA, 4573 bp, Artificial Sequence
  derived and/or modified sequence
gcatccccacccactaatcccagcgtctctggttacgcctcccagcaatggcgccaccatcggtcccggagtcccagtgatgctctgtgccatagagcccccataacttcactactacgtgatagtaaatccccggcaaaaaccagcagcgccttgcaagcccacgccaccccaagcatcccaggactcttctgaaacgactccgggctaccagatcggccgtccagctggaatcaaccgatggaggctccgctgcaaactggaatgatggggacatcgagtcacgggctggctacgaactcctcgggggcgaaggtggcggagagggatgggttccaggacgtcctggcgcccggggaaggctcggcgggacggatttgcggtgcgcagccagtgccgttcgtccctcaggtgcttggcgtgatgatcggggccggagtggcggtggtggtcacggccgtgctcatcctcctggtggtgcggaggctgcgagtgccaaaaaccccagccccggatggcccccggtatcggttccggaagagggacaaagtgctcttctatggccggaagattatgcggaaggtgtcacaatccacctcctccctcgtggatacctctgtctccgccacctcccggccacgcatgaggaagaaactgaagatgctcaacattgccaagaagatcctgcgcatccagaaagagacgcccacgctgcagcggaaggagcccccgcccgcagtgctagaagctgacctgaccgagggcgacctggctaactcccatctgccctctgaagtgctttatatgctcaagaacgtccgggtgctgggccacttcgagaagccactcttcctggagctctgccgccacatggtcttccagcggctgggccagggtgactacgtcttccggccgggccagccagatgccagcatctacgtggtgcaggacgggctgctggagctctgtctgccagggcctgacgggaaggagtgtgtggtgaaggaagtggttcctggggacagcgtcaacagccttctcagcatcctggatgtcatcaccggtcaccagcatccccagcggaccgtgtctgcccgggcggcccgggactccacggtgctgcgcctgccggtggaagcattctccgcggtcttcaccaagtacccggagagcttggtgcgggtcgtgcagatcatcatggtgcggctgcagcgagtcaccttcctggcactgcacaactacctgggtctgaccaatgagctcttcagccacgagatccagcccctgcgtctgttccccagccccggcctcccaactcgcaccagccctgtgcggggctccaagagaatggtcagcacctcagctacagacgagcccagggagaccccagggcggccacccgatcccaccggggccccgctgcctggacctacaggggaccctgtgaagcccacatccctggaaaccccctcggcccctctgctgagccgctgcgtctccatgccaggggacatctcaggcttgcagggtggcccccgctccgacttcgacatggcctatgagcgtggccggatctccgtgtccctgcaggaagaggcctccggggggtccctggcagcccccgctcggacccccactcaggagcctcgtgagcagccggcaggcgcctgtgaatacagctactgtgaggatgagtcggccactggtggctgccctttcgggccctaccagggccgccagaccagcagcatcttcgaggcagcaaagcaggagctggccaagctgatgcggattgaggacccctccctcctgaacagcagagtcttgctgcaccacgccaaagctggcaccatcattgcccgccagggagaccaggacgtgagcctgcacttcgtgctctggggctgcctgcacgtgtaccagcgcatgatcgacaaggcggaggacgtgtgcctgttcgtagcgcagcccggggaactggtggggcagctggcggtgctcactggcgaacctctcatcttcacactgcgagcccaacgcgactgcaccttcctgcggatctccaagtccgacttctatgagatcatgcgcgcacagcccagtgtggtgctgagtgcggcgcacacggtggcagccaggatgtcgcccttcgtgcgccagatggacttcgccatcgactggactgcagtggaggcgggacgcgcgctgtacaggcagggcgaccgctccgactgcacttacatcgtgctcaatgggcggctgcgtagcgtgatccagcgaggcagtggcaagaaggagctggtgggcgagtacggccgcggcgacctcatcggcgtggtggaggcactgacccggcagccgcgagccacgacggtgcacgcggtgcgcgacacggagctggccaagcttcccgagggcaccttgggtcacatcaaacgccggtacccgcaggtcgtgacccgccttatccacctactgagccagaaaattctagggaatttgcagcagctgcaaggacccttcccagcaggctctgggttgggtgtgcccccacactcggaactcaccaacccagccagcaacctggcaactgtggcaatcctgcctgtgtgtgctgaggtccccatggtggccttcacgctggagctgcagcacgccctgcaggccatcggtccgacgctactccttaacagtgacatcatccgggcacgcctgggggcctccgcactggatagcatccaagagttccggctgtcagggtggctggcccagcaggaggatgcacaccgtatcgtactctaccagacggacgcctcgctgacgccctggaccgtgcgctgcctgcgacaggccgactgcatcctcattgtgggcctgggggaccaggagcctaccctcggccagctggagcagatgctggagaacacggctgtgcgcgcccttaagcagctagtcctgctccaccgagaggagggcgcgggccccacgcgcaccgtggagtggctaaatatgcgcagctggtgctcggggcacctgcacctgcgctgtccgcgccgcctcttttcgcgccgcagccctgccaagctgcatgagctctacgagaaggttttctccaggcgcgcggaccggcacagcgacttctcccgcttggcgagggtgctcacggggaacaccattgcccttgtgctaggcgggggcggggccaggggctgctcgcacatcggagtactaaaggcattagaggaggcgggggtccccgtggacctggtgggcggcacgtccattggctctttcatcggagcgttgtacgcggaggagcgcagcgccagccgcacgaagcagcgggcccgggagtgggccaagagcatgacttcggtgctggaacctgtgttggacctcacgtacccagtcacctccatgttcactgggtctgcctttaaccgcagcatccatcgggtcttccaggataagcagattgaggacctgtggctgccttacttcaacgtgaccacagatatcaccgcctcagccatgcgagtccacaaagatggctccctgtggcggtacgtgcgcgccagcatgacgctgtcgggctacctgcccccgctgtgcgaccccaaggacgggcacctactcatggatggcggctacatcaacaatctgccagcggacatcgcccgcagcatgggtgccaaaacggtcatcgccattgacgtggggagccaggatgagacggacctcagcacctacggggacagcctgtccggctggtggctgctgtggaagcggctgaatccctgggctgacaaggtaaaggttccagacatggctgaaatccagtcccgcctggcctacgtgtcctgtgtgcggcagctagaggttgtcaagtccagctcctactgcgagtacctgcgcccgcccatcgactgcttcaagaccatggactttgggaagttcgaccagatctatgatgtgggctaccagtacgggaaggcggtgtttggaggctggagccgtggcaacgtcattgagaaaatgctcacagaccggcggtctacagaccttaatgagagccgccgtgcagacgtgcttgccttcccaagctctggcttcactgacttggcagagattgtgtcccggattgagccccccacgagctatgtctctgatggctgtgctgacggagaggagtcagattgtctgacagagtatgaggaggacgccggacccgactgctcgagggatgaaggggggtcccccgagggcgcaagccccagcactgcctccgagatggaggaggagaagtcgattctccggcaacgacgctgtctgccccaggagccgcccggctcagccacagatgcctgaggacctcgacaggggtcaccccctccctcccacccctggactgggctgggggtggccccgtgggggtagctcactccccctcctgctgctatgcctgtgacccccgcggcccacacactggactgacctgccctgagcggggatgcagtgttgcactgatgacttgaccagcccctcccccaataaactcgcctcttggaaatgg

SEQ ID NO: 64365 - DNA, 4128 bp, Artificial Sequence
  derived and/or modified sequence
atggaggcacccctccagactggcatgatgggcacatctagccacggactggccacaaattcatcaggagctaaagtagcggagcgggatggcttccaggacgtgctggcacccggtgagggatccgcagggagaatatgtggagcccagcctgtaccattcgtgcctcaggttctcggggtgatgattggagcaggagtggctgtagtcgtgaccgctgtactcatactcctggtggtaagacggctgcgagtgccgaagacccctgcccctgacgggccaagatatcgctttcgcaaaagagataaagtcctgttttatggcagaaagattatgcgtaaagtctcgcagtctacctcaagtctcgtggacaccagcgtatcagcaaccagccgcccaagaatgcgtaagaagctcaagatgctgaatatagccaagaaaatcctgagaatccaaaaggagacaccgactctgcaaaggaaagaaccaccgccagctgtactggaagccgatctgacagagggcgacctggccaatagtcaccttccaagcgaagttctgtatatgctgaaaaacgtgagagtccttggacactttgagaagcccctttttttagagctgtgtaggcatatggttttccagagactgggacaaggagattacgtttttaggccaggacagcccgacgcttcgatttacgtggtccaggatggcctgctggaactatgcttgccaggtcctgacggtaaagagtgcgtggtgaaagaagtagtgccaggggactcagttaacagcctcctaagcatcctggacgtaatcactggacaccagcatcctcagcggacagtgtccgcgagggccgcacgggatagcactgtccttcgtttgccggttgaggcattctcggccgtcttcaccaagtaccctgagtccttggtccgcgtcgtacagataattatggtcagactccagcgagtgacttttttagccctacacaactacctggggttgaccaacgagctgtttagtcacgaaatccagccactgcgcttgtttccctcacctggtttgcctacccgaacctcacccgtaagaggtagtaagcggatggtgtctacatcggctactgatgagccacgggagactcccggacgccctcctgaccctacaggagctcctcttcctggaccaacaggagatccagtcaaaccaacgtctttggagacaccaagtgctccccttctttcccggtgcgtgtccatgccaggggacatctcaggcctacagggtggacctcgttccgatttcgatatggcctatgagcgtgggaggatttccgtgtcactgcaggaggaagcctccggcggttcattagccgctcctgcacggactcccacacaggaaccgagggagcaaccagctggagcctgcgaatacagctattgcgaagacgagagcgctaccggcggttgccccttcggtccttaccaaggcaggcagacttccagcattttcgaagccgcaaagcaggaactggccaagttgatgcgtattgaagatccttcactgctgaattcacgcgtgttactacatcacgctaaggccggaactataattgcgcgtcaaggagaccaggacgtttctctgcactttgtactgtggggatgcctacacgtctaccagcgaatgattgacaaagcagaagacgtgtgtctgtttgtggcccaaccaggggagctcgttggccagctggcagtcctgacgggcgagcccttgatttttaccctcagagctcagagggactgcacattcctccgcataagtaaatccgacttttatgaaatcatgagagcgcaacccagcgtggtactttcagccgcacacaccgtggcggctagaatgtcacccttcgttagacagatggacttcgccattgactggactgctgtggaggccggacgcgctctgtacaggcaaggggatagaagcgattgcacatatatcgtgctgaacggccgtctgaggagtgtgattcagcggggttctggaaaaaaggagctagtgggtgagtacggcagaggagatctgatcggtgtagtggaagcactcacccggcagccaagggcaaccacagtgcatgcagtgcgcgacaccgagctcgcaaaacttccagaagggactcttggccacatcaagcggagatacccacaagtggttacccgtcttatccacctgttgtcccagaagattctggggaacctgcagcagctgcagggcccattccctgctgggtcaggtctgggcgtgccaccccattccgaactcacaaaccccgcttccaacctagctacagtggctattttgcctgtctgtgccgaggtacccatggtggctttcactcttgaactccaacatgcccttcaggctattggccctactctgctgctcaattctgatataatccgggctcggttaggtgctagtgccctggattccatacaggagttccggttgtcaggctggctggcccaacaagaggacgcacaccgcattgtgttgtatcagactgacgcatctctcaccccttggaccgtacgctgcctaaggcaggctgactgtattctgatcgtagggctcggcgatcaggagcccacactggggcagctggaacaaatgctggagaacactgccgtcagggcactgaaacagctggttttactccacagagaggagggggctgggccaactcgaaccgtggagtggttgaatatgaggagctggtgttcgggccacctccacctacgatgcccacgacgactttttagtagacgtagccctgcaaaactgcacgagctgtacgagaaagttttctctaggcgggctgataggcactccgactttagccgactcgcccgagtcctgacagggaacacaatagcactggtgttgggtggaggtggcgctcgaggctgcagtcacattggagtcctgaaagcccttgaggaggctggtgtgcccgttgatctggtgggcggtacgagcattgggtctttcatcggagcactctacgcggaggagagatccgcttcacgtacgaagcagagggcgagagagtgggctaagagtatgaccagcgtcctggaacctgtgctggacctaacctatcccgtcacttccatgttcacaggcagcgcgtttaaccgctccatccatagggtttttcaggataagcaaatcgaggacttgtggttgccgtatttcaatgtgactaccgacatcaccgcctccgccatgagagtccacaaagacggttctctgtggagatacgtcagggcctcaatgacactgtccggatatcttcctccactctgcgaccccaaagatggccacctgctgatggacgggggatatataaacaacctgcccgcagatattgcccgatcaatgggagcaaaaaccgtcattgccatcgacgtggggtctcaggacgagacagacctctcaacatacggcgatagcctgtcgggctggtggctgctatggaagcgcctcaatccatgggctgataaggtcaaggtgccggacatggccgagattcaaagtcggttggcctacgtgagctgtgtgcggcagctggaggtcgtcaaaagtagctcatattgcgagtacctgcgacctcccatcgactgtttcaagaccatggactttggcaaattcgaccaaatctatgacgtcggctatcaatatggcaaagctgttttcggcggttggagtcgaggcaacgttatagagaagatgctaactgacaggaggtccaccgaccttaacgaaagtagaagggccgatgttcttgcttttccttcaagcggatttaccgatctcgcagagatcgtttctcgaattgaaccccctactagctatgtctcggatgggtgtgcggatggagaggaatccgattgcctgacggagtacgaagaggatgctgggccagactgctcacgggacgaaggcggtagccccgagggagcctctccgtcaacagcctcagaaatggaagaggaaaaaagcattctgagacagcggagatgtttaccccaagaaccgcctggatctgccaccgatgcctag

SEQ ID NO: 64366 - DNA, 4128 bp, Artificial Sequence
  derived and/or modified sequence
atggaggcccccctgcagaccggcatgatgggcaccagcagccacggcctggccaccaacagcagcggcgccaaggtggccgagagagacggcttccaggacgtgctggcccccggcgagggcagcgccggcagaatctgcggcgcccagcccgtgcccttcgtgccccaggtgctgggcgtgatgatcggcgccggcgtggccgtggtggtgaccgccgtgctgatcctgctggtggtgagaagactgagagtgcccaagacccccgcccccgacggccccagatacagattcagaaagagagacaaggtgctgttctacggcagaaagatcatgagaaaggtgagccagagcaccagcagcctggtggacaccagcgtgagcgccaccagcagacccagaatgagaaagaagctgaagatgctgaacatcgccaagaagatcctgagaatccagaaggagacccccaccctgcagagaaaggagcccccccccgccgtgctggaggccgacctgaccgagggcgacctggccaacagccacctgcccagcgaggtgctgtacatgctgaagaacgtgagagtgctgggccacttcgagaagcccctgttcctggagctgtgcagacacatggtgttccagagactgggccagggcgactacgtgttcagacccggccagcccgacgccagcatctacgtggtgcaggacggcctgctggagctgtgcctgcccggccccgacggcaaggagtgcgtggtgaaggaggtggtgcccggcgacagcgtgaacagcctgctgagcatcctggacgtgatcaccggccaccagcacccccagagaaccgtgagcgccagagccgccagagacagcaccgtgctgagactgcccgtggaggccttcagcgccgtgttcaccaagtaccccgagagcctggtgagagtggtgcagatcatcatggtgagactgcagagagtgaccttcctggccctgcacaactacctgggcctgaccaacgagctgttcagccacgagatccagcccctgagactgttccccagccccggcctgcccaccagaaccagccccgtgagaggcagcaagagaatggtgagcaccagcgccaccgacgagcccagagagacccccggcagaccccccgaccccaccggcgcccccctgcccggccccaccggcgaccccgtgaagcccaccagcctggagacccccagcgcccccctgctgagcagatgcgtgagcatgcccggcgacatcagcggcctgcagggcggccccagaagcgacttcgacatggcctacgagagaggcagaatcagcgtgagcctgcaggaggaggccagcggcggcagcctggccgcccccgccagaacccccacccaggagcccagagagcagcccgccggcgcctgcgagtacagctactgcgaggacgagagcgccaccggcggctgccccttcggcccctaccagggcagacagaccagcagcatcttcgaggccgccaagcaggagctggccaagctgatgagaatcgaggaccccagcctgctgaacagcagagtgctgctgcaccacgccaaggccggcaccatcatcgccagacagggcgaccaggacgtgagcctgcacttcgtgctgtggggctgcctgcacgtgtaccagagaatgatcgacaaggccgaggacgtgtgcctgttcgtggcccagcccggcgagctggtgggccagctggccgtgctgaccggcgagcccctgatcttcaccctgagagcccagagagactgcaccttcctgagaatcagcaagagcgacttctacgagatcatgagagcccagcccagcgtggtgctgagcgccgcccacaccgtggccgccagaatgagccccttcgtgagacagatggacttcgccatcgactggaccgccgtggaggccggcagagccctgtacagacagggcgacagaagcgactgcacctacatcgtgctgaacggcagactgagaagcgtgatccagagaggcagcggcaagaaggagctggtgggcgagtacggcagaggcgacctgatcggcgtggtggaggccctgaccagacagcccagagccaccaccgtgcacgccgtgagagacaccgagctggccaagctgcccgagggcaccctgggccacatcaagagaagatacccccaggtggtgaccagactgatccacctgctgagccagaagatcctgggcaacctgcagcagctgcagggccccttccccgccggcagcggcctgggcgtgcccccccacagcgagctgaccaaccccgccagcaacctggccaccgtggccatcctgcccgtgtgcgccgaggtgcccatggtggccttcaccctggagctgcagcacgccctgcaggccatcggccccaccctgctgctgaacagcgacatcatcagagccagactgggcgccagcgccctggacagcatccaggagttcagactgagcggctggctggcccagcaggaggacgcccacagaatcgtgctgtaccagaccgacgccagcctgaccccctggaccgtgagatgcctgagacaggccgactgcatcctgatcgtgggcctgggcgaccaggagcccaccctgggccagctggagcagatgctggagaacaccgccgtgagagccctgaagcagctggtgctgctgcacagagaggagggcgccggccccaccagaaccgtggagtggctgaacatgagaagctggtgcagcggccacctgcacctgagatgccccagaagactgttcagcagaagaagccccgccaagctgcacgagctgtacgagaaggtgttcagcagaagagccgacagacacagcgacttcagcagactggccagagtgctgaccggcaacaccatcgccctggtgctgggcggcggcggcgccagaggctgcagccacatcggcgtgctgaaggccctggaggaggccggcgtgcccgtggacctggtgggcggcaccagcatcggcagcttcatcggcgccctgtacgccgaggagagaagcgccagcagaaccaagcagagagccagagagtgggccaagagcatgaccagcgtgctggagcccgtgctggacctgacctaccccgtgaccagcatgttcaccggcagcgccttcaacagaagcatccacagagtgttccaggacaagcagatcgaggacctgtggctgccctacttcaacgtgaccaccgacatcaccgccagcgccatgagagtgcacaaggacggcagcctgtggagatacgtgagagccagcatgaccctgagcggctacctgccccccctgtgcgaccccaaggacggccacctgctgatggacggcggctacatcaacaacctgcccgccgacatcgccagaagcatgggcgccaagaccgtgatcgccatcgacgtgggcagccaggacgagaccgacctgagcacctacggcgacagcctgagcggctggtggctgctgtggaagagactgaacccctgggccgacaaggtgaaggtgcccgacatggccgagatccagagcagactggcctacgtgagctgcgtgagacagctggaggtggtgaagagcagcagctactgcgagtacctgagaccccccatcgactgcttcaagaccatggacttcggcaagttcgaccagatctacgacgtgggctaccagtacggcaaggccgtgttcggcggctggagcagaggcaacgtgatcgagaagatgctgaccgacagaagaagcaccgacctgaacgagagcagaagagccgacgtgctggccttccccagcagcggcttcaccgacctggccgagatcgtgagcagaatcgagccccccaccagctacgtgagcgacggctgcgccgacggcgaggagagcgactgcctgaccgagtacgaggaggacgccggccccgactgcagcagagacgagggcggcagccccgagggcgccagccccagcaccgccagcgagatggaggaggagaagagcatcctgagacagagaagatgcctgccccaggagccccccggcagcgccaccgacgcctag

SEQ ID NO: 64367 - protein, 1300 aa, Artificial Sequence
  derived and/or modified sequence
MEAPLQTGMVLGVMIGAGVAVVVTAVLILLVVRRLRVPKTPAPDGPRYRFRKRDKVLFYGRKIMRKVSQSTSSLVDTSVSATSRPRMRKKLKMLNIAKKILRIQKETPTLQRKEPPPAVLEADLTEGDLANSHLPSEVLYMLKNVRVLGHFEKPLFLELCRHMVFQRLGQGDYVFRPGQPDASIYVVQDGLLELCLPGPDGKECVVKEVVPGDSVNSLLSILDVITGHQHPQRTVSARAARDSTVLRLPVEAFSAVFTKYPESLVRVVQIIMVRLQRVTFLALHNYLGLTNELFSHEIQPLRLFPSPGLPTRTSPVRGSKRMVSTSATDEPRETPGRPPDPTGAPLPGPTGDPVKPTSLETPSAPLLSRCVSMPGDISGLQGGPRSDFDMAYERGRISVSLQEEASGGSLAAPARTPTQEPREQPAGACEYSYCEDESATGGCPFGPYQGRQTSSIFEAAKQELAKLMRIEDVSLHFVLWGCLHVYQRMIDKAEDVCLFVAQPGELVGQLAVLTGEPLIFTLRAQRDCTFLRISKSDFYEIMRAQPSVVLSAAHTVAARMSPFVRQMDFAIDWTAVEAGRALYRQGDRSDCTYIVLNGRLRSVIQRGSGKKELVGEYGRGDLIGVVEALTRQPRATTVHAVRDTELAKLPEGTLGHIKRRYPQVVTRLIHLLSQKILGNLQQLQGPFPGSGLGVPPHSELTNPASNLATVAILPVCAEVPMVAFTLELQHALQAIGPTLLLNSDIIRARLGASALDSIQEFRLSGWLAQQEDAHRIVLYQTDASLTPWTVRCLRQADCILIVGLGDQEPTLGQLEQMLENTAVRALKQLVLLHREEGAGPTRTVEWLNMRSWCSGHLHLRCPRRLFSRRSPAKLHELYEKVFSRRADRHSDFSRLARVLTGNTIALVLGGGGARGCSHIGVLKALEEAGVPVDLVGGTSIGSFIGALYAEERSASRTKQRAREWAKSMTSVLEPVLDLTYPVTSMFTGSAFNRSIHRVFQDKQIEDLWLPYFNVTTDITASAMRVHKDGSLWRYVRASMTLSGYLPPLCDPKDGHLLMDGGYINNLPADIARSMGAKTVIAIDVGSQDETDLSTYGDSLSGWWLLWKRLNPWADKVKVPDMAEIQSRLAYVSCVRQLEVVKSSSYCEYLRPPIDCFKTMDFGKFDQIYDVGYQYGKAVFGGWSRGNVIEKMLTDRRSTDLNESRRADVLAFPSSGFTDLAEIVSRIEPPTSYVSDGCADGEESDCLTEYEEDAGPDCSRDEGGSPEGASPSTASEMEEEKSILRQRRCLPQEPPGSATDA

SEQ ID NO: 64368 - DNA, 3903 bp, Artificial Sequence
  derived and/or modified sequence
atggaggcccccttgcagacagggatggtcttgggagtaatgatcggagctggagtggcagttgtcgtgaccgcagtgctgatcttgctggtggttagacggctgagggtgcctaagacccctgcaccggatggtcctcggtaccgcttccggaaaagagacaaggtcctgttttatggcaggaaaataatgcgtaaggtttcccagagcacttcctccctggttgatacaagtgtgagcgccacaagccggccgagaatgcgcaagaagcttaaaatgctgaacatagcaaagaaaatcctgcgcattcagaaagaaactccaacgctgcaaaggaaggagcctccgcccgcggttcttgaggccgacttgacagagggagacctagctaacagtcatctgccttccgaagtgctgtacatgctcaagaacgtccgcgtcctaggtcacttcgaaaaaccactctttttggagctgtgtaggcacatggtttttcagagactgggacagggagattacgtcttcaggcccggccagcccgatgcttccatatacgtagttcaagatgggttgttggaactttgtctgcctgggccggacggaaaggaatgcgtcgtgaaagaggtggtccctggtgacagtgtgaacagtctgctgtccatcctggacgttatcaccggccatcagcacccccagcgtacggtgtcagcacgggctgcgcgtgactccactgtgctgagactcccagtagaggccttttccgcagtgtttaccaaatatcccgagtccctggttcgagtggtccagatcatcatggttaggttacagcgcgtgacctttctcgcccttcataactatctgggcctgacgaacgagctgttttcacacgagatccagcctctcagactattcccgagcccaggtctgccaacacgaacatcacctgtccgggggtccaaacgaatggtgagtacttctgctacagatgaacccagggagactcccggccggccgcctgaccccacaggcgcacctcttcctggcccaaccggtgacccggtcaagccaacgtcattagagaccccatcagctccattgctctcaaggtgtgtgagcatgcccggagatatatctgggctgcagggcggccctagatctgactttgacatggcttatgagaggggtagaattagcgtgtccctgcaggaggaggcttctggtggaagcctggcagcaccagcccggacgcctactcaggaacctcgtgagcagcctgctggagcctgtgagtattcctactgcgaagatgaaagtgcaacaggggggtgccccttcggcccttatcaaggacgtcagacctcaagtatctttgaagctgctaagcaagagctggctaagcttatgagaatagaggacgtctctctccactttgtgctctggggctgcctgcacgtctaccagcgcatgatcgataaggccgaggacgtttgcctgttcgtggcgcaacctggcgaattagtcggacagctggctgtgctgacaggagagccactgattttcaccctgcgtgcacaaagagactgcaccttcctcaggatttccaaatcagacttttacgaaatcatgagggcacagccgtcggtagtgttgtcagctgcgcataccgtcgcagcacggatgtcacctttcgtgaggcaaatggattttgcaatcgattggacggctgtcgaagcagggagagcactgtacagacagggagaccgttccgactgcacctatattgtcctgaacggcaggctgaggagtgtgatccagagaggaagcggcaaaaaggaattggttggcgagtacgggcggggggaccttatcggcgtggttgaagcgttgacacgccagcctagagctacaacagtgcatgccgtgagggatacagaactcgccaagctacctgaggggacattaggccacatcaaacggaggtatccccaggtcgtgactagactgatccaccttctgagtcagaagatactcggtaacttgcagcagctacagggaccatttcccgggagcggacttggggttcccccgcactctgaactgacaaacccggcctcaaatttagctaccgtcgccattttgcctgtttgcgcagaggttccgatggtagcttttaccctggagctgcagcatgccctccaagctatcgggcctactttactgctcaattccgatatcattcgcgcaagactgggggcctcagctcttgatagtatccaagaattcagattgtctggctggctggcccaacaggaggacgcccataggatagtactctaccagactgacgcttccttgactccctggaccgtgaggtgcctgcggcaggctgattgtatcctcatcgtggggctcggcgatcaagagccaacactggggcaactcgaacaaatgctggagaacacggctgtgagggcgctgaagcagctagtcttacttcatcgggaagagggtgctggccctacacgtaccgtcgagtggttgaatatgagaagttggtgctccgggcatctgcatctgcggtgccctcgaaggctgttttctcgtcggtcccccgctaagctgcacgagctctacgagaaagttttttcaagaagggcggaccgccattcagacttttctaggctggctcgtgtcctcacagggaataccatcgccctagtgctgggaggtgggggcgctcgcgggtgctcccacatcggagtattaaaagctctcgaggaagcaggtgtgcccgtggatctggtgggtggcacctcgatcggctcattcataggcgcactttatgcggaagaaaggtcagcctcccggaccaagcagcgggcacgcgagtgggccaagtcaatgacgtcagtactggagcctgttctagacctgacctacccggtcaccagcatgtttaccggctccgcgtttaatcgttctatccatcgcgtcttccaggacaaacaaatcgaggacttgtggcttccttatttcaacgtcacaacggatattacagcaagcgctatgagggtgcataaggatgggagcttatggagatatgtgcgcgcgagcatgacacttagtggctacctcccccctctgtgcgatcctaaggacggccatctactcatggatggaggatacataaataacctgccagccgatattgcccgctccatgggagcaaagacagtgatcgcaatcgacgttgggagccaagacgagacagacctgagcacatacggagattcccttagcggatggtggctcctgtggaagagactgaacccatgggcagacaaggtcaaggtcccggatatggccgagatccagagcaggctggcttatgtctcctgcgttcgccagttggaggtagtgaagtcttccagttactgcgaatacctccgtccgcccatcgactgtttcaaaacaatggattttggaaaatttgatcagatatatgacgtcggttatcaatacgggaaggccgttttcggtggctggtcaaggggcaacgtaatcgaaaagatgctaacagatcgacgcagcaccgacctgaatgagtctcgcagagccgacgtgttagccttcccgtcctcaggattcaccgacctcgctgaaatcgttagcaggatcgaaccaccaactagttatgtgtctgacgggtgtgccgatggcgaagagagcgactgcctcacagagtatgaggaggacgctggaccagattgtagcagagatgaaggtgggagcccagagggagctagtccgagtacagcctcagagatggaagaagaaaagagcatcttaaggcagaggcgctgcttaccccaggagcccccaggttcagcgacagatgcctag

SEQ ID NO: 64369 - DNA, 3903 bp, Artificial Sequence
  derived and/or modified sequence
atggaggcccccctgcagacaggcatggtgctgggcgtgatgattggagctggggtggccgtggtggtgacagctgtgctgatcctgctggtggtgcggcggctgcgggtgcccaagaccccagccccagatggcccccgctaccgcttcaggaagagggacaaggtgctcttctacggcaggaagatcatgaggaaggtgtcccagagcaccagcagcctggtggacacctctgtgtctgccaccagccggcccaggatgaggaagaagctgaagatgctgaacatcgccaagaagatcctgcgcatccagaaggagacccccaccctgcagaggaaggagcccccacctgctgtgctggaggccgacctgacagaaggagacctggccaacagccacctgcccagcgaggtgctgtacatgctgaagaatgtgcgggtgctgggccactttgagaagcccctcttcctggagctgtgccgccacatggtgttccagaggctgggccagggcgactatgtgttccggcccggccagccagatgccagcatctacgtggtgcaggacggcctgctggagctgtgcctgcccggcccagatggcaaggaatgtgtggtgaaggaggtggtgcctggggacagcgtgaacagcctgctgagcatcctggatgtgatcaccggccaccagcacccccagaggacagtgtctgcccgggccgcccgggacagcacagtgctgcggctgcctgtggaggccttctctgctgtgttcaccaagtacccagagagcctggtgcgggtggtgcagatcatcatggtgcggctgcagagggtgaccttcctggccctgcacaactacctgggcctgaccaatgaactcttcagccatgagatccagcccctgcggctcttccccagccctggcctgcccaccaggaccagccctgtgcggggcagcaagaggatggtgtccaccagcgccacagatgagccccgggagaccccaggccggcccccagaccccaccggggcccccctgcccggccccaccggggaccctgtgaagcccaccagcctggagaccccatctgcccccctgctgagccgctgtgtgtccatgcctggggacatcagcggcctgcagggcggccccaggagtgactttgacatggcctatgaaagaggccgcatctctgtgtccctgcaggaggaggccagcggcggcagcctggccgccccagcccggacccccacccaggagccccgggagcagcctgctggggcctgtgagtacagctactgtgaagatgagagcgccaccggcggctgccccttcggcccctaccagggccggcagaccagcagcatctttgaagctgccaagcaggagctggccaagctgatgagaattgaagatgtgtccctgcactttgtgctgtggggctgcctgcacgtgtaccagaggatgattgacaaggccgaggatgtgtgcctgtttgtggcccagcctggagagctggtgggccagctggccgtgctgaccggggagcccctcatcttcaccctgcgggcccagagggactgcaccttcctgcgcatcagcaagagtgacttctatgagatcatgagggcccagcccagcgtggtgctgtctgctgcccacacagtggccgccaggatgagcccctttgtgcggcagatggactttgccatcgactggacagctgtggaggccggccgggccctgtaccggcagggcgacagaagtgactgcacctacatcgtgctgaatggccgcctgcggagcgtcatccagaggggcagcggcaagaaggagctggtgggggagtatggccgcggggacctgattggagtggtggaggccctgacccggcagccccgggccaccaccgtgcatgctgtgcgggacacagagctggccaagctgcctgagggcaccctgggccacatcaagaggcgctacccccaggtggtgaccaggctcatccacctgctgagccagaagatcctgggcaacctgcagcagctgcagggccccttccctggcagcggcctgggcgtgcccccccacagcgagctgaccaacccagccagcaacctggccaccgtggccatcctgcctgtgtgtgccgaggtgcccatggtggccttcaccctggagctgcagcacgccctgcaggccatcggccccaccctgctgctgaacagcgacatcatccgggcccggctgggcgccagcgccctggacagcatccaggagttccggctgagcggctggctggcccagcaggaggatgcccaccgcatcgtgctgtaccagacagatgccagcctgaccccctggacagtgcgctgcctgcggcaggccgactgcatcctgattgtgggcctgggggaccaggagcccaccctgggccagctggagcagatgctggagaacacagctgtgcgggccctgaagcagctggtgctgctgcaccgggaggagggcgccggccccaccaggacagtggagtggctgaacatgaggtcctggtgcagcggccacctgcacctgcgctgccccaggaggctcttcagccgccgcagccctgccaagctgcacgagctgtatgagaaggtgttcagccggcgggctgacagacacagcgacttcagccggctggcccgggtgctgaccggcaacaccatcgccctggtgctgggcggcggcggggcccggggctgcagccacatcggcgtgctgaaggccctggaggaggccggcgtgcctgtggacctggtgggcggcaccagcatcggcagcttcatcggggccctgtatgcagaggagaggtctgccagcaggaccaagcagagggcccgggagtgggccaagtccatgacctctgtgctggagcctgtgctggacctgacctaccctgtgacctccatgttcaccggcagcgccttcaacagaagcatccacagggtcttccaggacaagcagatcgaggacctgtggctgccctacttcaacgtgaccacagacatcacagccagcgccatgagggtgcacaaggatggcagcctgtggaggtatgtgcgggcctccatgaccctgagcggctacctgccccccctgtgtgaccccaaggatggccacctgctgatggatggcggctacatcaacaacctgcctgctgacatcgcccgctccatgggcgccaagacagtcatcgccattgatgtgggcagccaggatgaaacagacctgagcacctatggagacagcctgagcggctggtggctgctgtggaagaggctgaacccctgggccgacaaggtgaaggtgcctgacatggccgagatccagagccggctggcctacgtgtcctgtgtgcggcagctggaggtggtgaagagcagcagctactgtgagtacctgcggccccccatcgactgcttcaagaccatggactttgggaagtttgaccagatctatgatgtgggctaccagtatggcaaggctgtgtttggaggctggagcagaggaaatgtcatcgagaagatgctgacagacagaagaagcacagacctgaatgaaagccggcgggcagatgtgctggccttccccagcagcggcttcacagacctggccgagatcgtgagccgcatcgagccccccaccagctatgtgtctgatggctgtgctgatggagaggagagtgactgcctgacagaatatgaagaagatgctggccctgactgcagcagagatgagggcggcagccctgagggcgccagccccagcacagccagcgagatggaggaggagaagagcatcctgcggcagaggcgctgcctgccccaggagcccccaggcagcgccacagatgcctag

SEQ ID NO: 64370 - DNA, 3903 bp, Artificial Sequence
  derived and/or modified sequence
atggaggcccccctgcagaccggcatggtgctgggcgtgatgatcggcgctggcgtggccgtcgtggtaactgccgtactcattcttctggtggtcagaagactgcgtgtacctaaaacgcctgccccggatggcccacggtaccgcttccgcaagagggacaaggtgctgttttacggaaggaaaatcatgcgcaaggtttcccagagcacatcttctctggtggatacttctgtgtccgcaaccagtaggccaaggatgcggaaaaagctgaaaatgttaaatattgcaaaaaaaatcttaaggatccagaaggagacccctaccctgcagaggaaggaaccgcccccggcggtacttgaggctgatctcacggaaggcgatcttgccaacagtcacctgccgtccgaagtgctttacatgttgaagaacgtgagagtattaggccactttgaaaaacccctctttcttgaactttgtcggcacatggtcttccaacgactgggtcagggagattatgtgtttcgacccggacagcctgacgcaagcatatatgtcgtgcaagatggtctgcttgaactctgcttgcccggccccgacggcaaggagtgtgtcgtaaaagaagtggtgccaggggacagtgtcaacagtcttctgtccatactggacgttatcacgggccatcagcatcctcagagaaccgtgagtgctagggcagcaagggactcaacagtcttgagactgcccgtcgaagccttctctgcggttttcactaagtatcctgagagcctcgtccgagtggttcagatcataatggtccgactgcagcgtgtgactttccttgccctacataattacctgggcctgaccaacgagctgttcagccacgagatccagcctctccgcctctttccttccccaggtctccccacacgaacgtcccccgtccgggggtccaagcggatggtgtctaccagtgcgaccgatgagccccgcgaaaccccaggccggccgccggatccaaccggagctccactgccaggacccaccggagaccctgtgaaaccaacctctctggaaactccgagcgcccccttgctaagccgatgcgtctccatgcctggtgatatctcaggacttcagggagggccacgcagtgatttcgatatggcatacgaaagaggccgaatctctgtgagcctgcaggaagaggcaagcggagggagcttagccgctccagctagaacacctacacaggagccgcgcgagcagcctgccggggcatgtgagtattcatactgtgaggacgagtcagcgacgggggggtgccctttcggcccctaccagggccgccagacttctagcatatttgaagccgccaaacaagagctggccaagttgatgcggatcgaagacgtctcattgcattttgtcctttgggggtgtctgcacgtctaccagcgaatgattgacaaggctgaagatgtgtgcctgttcgtcgcgcaacctggggagttggttgggcagctggctgtcctgactggtgagcccctgatcttcactctgcgcgctcaacgcgattgcacttttctacggatttctaaatctgatttctacgagataatgagggcgcaaccctcagtggttctgtcggctgctcacaccgtcgctgcaaggatgtcccccttcgttaggcaaatggacttcgccatcgattggaccgccgtggaagcaggtagggcactgtataggcagggagacagaagtgattgcacatatattgtcctgaatggtcggctgcgatcagtcatccaacggggatctggcaagaaggagttggtgggggaatatgggcgaggcgatttgatcggagtggttgaggctctgactcgtcagcctagggcaacaaccgtccacgctgtccgggatactgagctcgcaaagctacccgaagggaccttgggccacatcaagcgcaggtatcctcaggtggtaacaagactcatacatctgctgagccagaagatcctgggtaaccttcagcagctgcaagggcccttcccaggttctggcctgggagtgcccccccattctgagctaaccaatccggcgagcaatctcgctaccgttgccatcttgccagtgtgtgcagaggtgcctatggtcgcattcacactcgagctgcaacacgcactgcaggcaataggccccacactcttgctgaacagtgacattatccgcgccaggctgggtgcctcagccctcgacagcattcaggagttcagactgtccggctggctggctcagcaggaagacgcccatcgtatcgttctgtaccagacggacgcctctctgacaccatggacagtgagatgtctgcgccaagcagattgtattcttatcgtgggacttggagatcaggagccaacactgggacagcttgaacagatgctggagaacacagctgtaagagcactgaagcagctggtgctcctacatcgggaggagggagcagggcccacaaggacagtggaatggctgaacatgaggtcttggtgcagtggccacctccacctgaggtgtcctcgtcgcttattctctcgccgcagccccgccaaactgcacgagttgtatgagaaggtatttagcagacgggcagacagacactccgatttttcccgcctggccagagtcctcactggcaatacgatcgccctggtcctgggggggggtggggcaagaggatgtagccatattggtgtgttaaaagccctagaggaggctggcgtccccgtggatttagtaggcggaaccagcattggatccttcattggagcactgtatgccgaggaacggagtgcgtcccgcactaagcaaagagctcgggagtgggcaaagagtatgaccagcgttctggaaccggtgctcgatcttacttatccagtaaccagcatgtttactggctccgccttcaaccgatctatccatcgcgtctttcaggacaaacagatcgaggacttgtggctgccatactttaacgtgactaccgatatcacagctagcgccatgagggtgcacaaggacggctctctctggagatacgtgcgagcatcaatgaccctgtcgggttatctgccccccctctgcgaccccaaagacggacaccttctgatggatggaggctatatcaataacctaccagctgatatcgcaaggtccatgggggccaagactgtgatcgccatcgatgtgggtagccaggacgagaccgacctgagtacctatggcgattctctctcaggctggtggctgctctggaagcggcttaacccctgggccgacaaggtgaaagttcccgatatggctgagatccagtctcggctcgcctacgtttcatgcgtgagacagttagaggtagtgaagtctagttcctactgcgaatatctccggccccccattgactgctttaaaaccatggacttcgggaagttcgatcagatctatgatgtgggctatcagtatggtaaagccgtgtttggtggatggtctcgcggtaacgttatcgaaaaaatgctgacggataggcggagtactgacctgaacgaatcacgacgtgccgatgtgctggcttttccgtcctctggtttcactgatcttgccgagatcgtatccagaattgagccacctacaagctatgtgagcgacggatgtgctgacggcgaggagtcagattgcttgactgaatatgaagaggacgccggaccagactgtagtcgggacgaaggaggaagcccagaaggcgcctccccaagcaccgcctccgagatggaagaggaaaaatccatactccgccagaggcgatgccttccacaggagccgccaggcagcgcaactgatgcatag

SEQ ID NO: 64371 - DNA, 4508 bp, Artificial Sequence
  derived and/or modified sequence
gagtctgggtttccgttagcctcgcaggggtgtcccttcgagggtcgttagcgagcctccgctttcccacgatctgtcctccgattcctgttaactctagactttctgatgttcccataccccccacgtctcggcaggtgtttccacaccggtagccagctgtgccctgaggtggaagaggaccggccacccaggaattttccaacaatggcgccaccatcggtcccggagtcccagtgatgctctgtgccatagagcccccataacttcactactacgtgatagtaaatccccggcaaaaaccagcagcgccttgcaagcccacgccaccccaagcatcccaggactcttctgaaacgactccgggctaccagatcggccgtccagctggaatcaaccgatggaggctccgctgcaaactggaatggtgcttggcgtgatgatcggggccggagtggcggtggtggtcacggccgtgctcatcctcctggtggtgcggaggctgcgagtgccaaaaaccccagccccggatggcccccggtatcggttccggaagagggacaaagtgctcttctatggccggaagattatgcggaaggtgtcacaatccacctcctccctcgtggatacctctgtctccgccacctcccggccacgcatgaggaagaaactgaagatgctcaacattgccaagaagatcctgcgcatccagaaagagacgcccacgctgcagcggaaggagcccccgcccgcagtgctagaagctgacctgaccgagggcgacctggctaactcccatctgccctctgaagtgctttatatgctcaagaacgtccgggtgctgggccacttcgagaagccactcttcctggagctctgccgccacatggtcttccagcggctgggccagggtgactacgtcttccggccgggccagccagatgccagcatctacgtggtgcaggacgggctgctggagctctgtctgccagggcctgacgggaaggagtgtgtggtgaaggaagtggttcctggggacagcgtcaacagccttctcagcatcctggatgtcatcaccggtcaccagcatccccagcggaccgtgtctgcccgggcggcccgggactccacggtgctgcgcctgccggtggaagcattctccgcggtcttcaccaagtacccggagagcttggtgcgggtcgtgcagatcatcatggtgcggctgcagcgagtcaccttcctggcactgcacaactacctgggtctgaccaatgagctcttcagccacgagatccagcccctgcgtctgttccccagccccggcctcccaactcgcaccagccctgtgcggggctccaagagaatggtcagcacctcagctacagacgagcccagggagaccccagggcggccacccgatcccaccggggccccgctgcctggacctacaggggaccctgtgaagcccacatccctggaaaccccctcggcccctctgctgagccgctgcgtctccatgccaggggacatctcaggcttgcagggtggcccccgctccgacttcgacatggcctatgagcgtggccggatctccgtgtccctgcaggaagaggcctccggggggtccctggcagcccccgctcggacccccactcaggagcctcgtgagcagccggcaggcgcctgtgaatacagctactgtgaggatgagtcggccactggtggctgccctttcgggccctaccagggccgccagaccagcagcatcttcgaggcagcaaagcaggagctggccaagctgatgcggattgaggacgtgagcctgcacttcgtgctctggggctgcctgcacgtgtaccagcgcatgatcgacaaggcggaggacgtgtgcctgttcgtagcgcagcccggggaactggtggggcagctggcggtgctcactggcgaacctctcatcttcacactgcgagcccaacgcgactgcaccttcctgcggatctccaagtccgacttctatgagatcatgcgcgcacagcccagtgtggtgctgagtgcggcgcacacggtggcagccaggatgtcgcccttcgtgcgccagatggacttcgccatcgactggactgcagtggaggcgggacgcgcgctgtacaggcagggcgaccgctccgactgcacttacatcgtgctcaatgggcggctgcgtagcgtgatccagcgaggcagtggcaagaaggagctggtgggcgagtacggccgcggcgacctcatcggcgtggtggaggcactgacccggcagccgcgagccacgacggtgcacgcggtgcgcgacacggagctggccaagcttcccgagggcaccttgggtcacatcaaacgccggtacccgcaggtcgtgacccgccttatccacctactgagccagaaaattctagggaatttgcagcagctgcaaggacccttcccaggctctgggttgggtgtgcccccacactcggaactcaccaacccagccagcaacctggcaactgtggcaatcctgcctgtgtgtgctgaggtccccatggtggccttcacgctggagctgcagcacgccctgcaggccatcggtccgacgctactccttaacagtgacatcatccgggcacgcctgggggcctccgcactggatagcatccaagagttccggctgtcagggtggctggcccagcaggaggatgcacaccgtatcgtactctaccagacggacgcctcgctgacgccctggaccgtgcgctgcctgcgacaggccgactgcatcctcattgtgggcctgggggaccaggagcctaccctcggccagctggagcagatgctggagaacacggctgtgcgcgcccttaagcagctagtcctgctccaccgagaggagggcgcgggccccacgcgcaccgtggagtggctaaatatgcgcagctggtgctcggggcacctgcacctgcgctgtccgcgccgcctcttttcgcgccgcagccctgccaagctgcatgagctctacgagaaggttttctccaggcgcgcggaccggcacagcgacttctcccgcttggcgagggtgctcacggggaacaccattgcccttgtgctaggcgggggcggggccaggggctgctcgcacatcggagtactaaaggcattagaggaggcgggggtccccgtggacctggtgggcggcacgtccattggctctttcatcggagcgttgtacgcggaggagcgcagcgccagccgcacgaagcagcgggcccgggagtgggccaagagcatgacttcggtgctggaacctgtgttggacctcacgtacccagtcacctccatgttcactgggtctgcctttaaccgcagcatccatcgggtcttccaggataagcagattgaggacctgtggctgccttacttcaacgtgaccacagatatcaccgcctcagccatgcgagtccacaaagatggctccctgtggcggtacgtgcgcgccagcatgacgctgtcgggctacctgcccccgctgtgcgaccccaaggacgggcacctactcatggatggcggctacatcaacaatctgccagcggacatcgcccgcagcatgggtgccaaaacggtcatcgccattgacgtggggagccaggatgagacggacctcagcacctacggggacagcctgtccggctggtggctgctgtggaagcggctgaatccctgggctgacaaggtaaaggttccagacatggctgaaatccagtcccgcctggcctacgtgtcctgtgtgcggcagctagaggttgtcaagtccagctcctactgcgagtacctgcgcccgcccatcgactgcttcaagaccatggactttgggaagttcgaccagatctatgatgtgggctaccagtacgggaaggcggtgtttggaggctggagccgtggcaacgtcattgagaaaatgctcacagaccggcggtctacagaccttaatgagagccgccgtgcagacgtgcttgccttcccaagctctggcttcactgacttggcagagattgtgtcccggattgagccccccacgagctatgtctctgatggctgtgctgacggagaggagtcagattgtctgacagagtatgaggaggacgccggacccgactgctcgagggatgaaggggggtcccccgagggcgcaagccccagcactgcctccgagatggaggaggagaagtcgattctccggcaacgacgctgtctgccccaggagccgcccggctcagccacagatgcctgaggacctcgacaggggtcaccccctccctcccacccctggactgggctgggggtggccccgtgggggtagctcactccccctcctgctgctatgcctgtgacccccgcggcccacacactggactgacctgccctgagcggggatgcagtgttgcactgatgacttgaccagcccctcccccaataaactcgcctcttggaaatgg

SEQ ID NO: 64372 - DNA, 3903 bp, Artificial Sequence
  derived and/or modified sequence
atggaagcaccgttgcagacaggcatggtgctcggtgtgatgattggggctggggttgcagtggtggtgactgccgtactgatcctcttggtggttaggcggctgcgggtccctaaaactccagctccagacggccctcggtacagattcagaaaaagggataaggttctcttctatggccgtaagattatgagaaaggtatcgcaaagtaccagctctttggttgatacgagcgtttcagctaccagccgaccacggatgcgaaagaagttaaagatgctcaatatcgccaaaaagatacttagaattcagaaagagactcctaccctacagcgcaaggagcctccaccagcagtgcttgaggcagacctgacagagggtgaccttgccaattcgcatctgccatctgaggtgttgtacatgctgaagaacgtgcgcgtgctggggcattttgaaaagccccttttcctagagttatgtcggcatatggtgttccagcggttaggacagggagattacgtgtttaggcctggacagcccgatgccagtatatatgttgtacaagacgggctgctggaactgtgtctgcccggtcccgatggtaaggagtgcgtggtcaaagaagtggttcccggagatagcgtaaactcgctgctgtcgatactggatgtgatcacaggacatcaacaccctcagcgaaccgtgagcgcacgtgccgctagggattcgaccgttctgcgattgcccgtggaggcattcagcgctgttttcacaaaataccccgaatctctggttagggttgtccagattattatggttcgcctgcagagagttacctttctggccctccacaactacctggggctgactaacgaactgttcagccatgaaatacaacccttgaggcttttccccagccccggtctgcccacccgcacttctcccgtgaggggatcgaagcgcatggtgagtacctcagcgacagacgagccgcgtgaaactcctggtagaccgccagaccctacgggtgctcccttgccagggccaacaggggatccagtgaagccaacttcattagagacccccagtgcccctttgctgagcagatgtgtttctatgccgggagacattagtggactgcaaggaggcccacgctctgactttgatatggcctatgagagaggacggatctctgtgagcctgcaggaggaagcgtcaggcggttccctcgccgctccggcaaggaccccaactcaggaaccccgagaacagcctgcaggggcttgtgaatatagttactgtgaggacgaatctgccacaggaggatgcccctttggcccataccagggccgacaaacgtctagtatctttgaggctgcaaaacaggagctagccaaactgatgcgtattgaggatgtctctctccactttgtcctgtggggatgtctgcacgtgtaccaaagaatgatagacaaggccgaggatgtatgtctctttgttgcccagcccggtgaactggtggggcaacttgctgtccttactggagagcccctgatttttacactcagggcccagagagattgtacgtttctgaggataagcaaaagtgacttctatgaaatcatgcgcgctcagccatccgtcgtactgagcgccgcacacaccgtcgccgcacggatgagccccttcgtgagacagatggatttcgctatcgactggactgcagtggaggcaggaagagccctgtacagacaaggggaccgcagcgactgcacatacatcgtacttaacggaagattacggagcgtaattcagcgaggctccggaaaaaaggaattggttggcgagtacggcaggggcgacctcattggtgtcgtggaggccctgaccagacagcccagggcaactacagttcacgctgtgagggatactgagctggccaagttacccgaaggtactctcggccacattaagaggaggtacccccaagtcgttacccgattaattcatctgttatctcagaagattcttggaaatctgcagcaattgcagggcccttttccaggatccggactgggagtgcccccacattcagagctaacgaaccccgcttccaacttggccacggttgctatcctgccagtctgtgccgaggtcccaatggtggctttcactctcgaacttcaacatgctctacaggcgattggcccaacactgctgctaaactcagatataataagggctcgtctgggggcatcagctcttgatagcatccaggagttcaggctatcaggatggcttgcgcagcaggaagatgcccaccgaattgtgctgtaccaaactgacgcctccctgaccccctggacagtgcgttgcctgaggcaggccgattgcattctgattgtcggcttgggagatcaggagcccacacttggccagcttgaacagatgctggaaaatacggccgttagagctctcaagcagcttgtgctgctacacagggaggaaggggcaggcccaacacggactgtcgagtggctgaacatgaggtcatggtgctctggacacctgcacctgaggtgtccccgaaggttgttcagtcggaggtctccagccaaactccatgaactttatgaaaaagttttctccagaagagccgatcgccactccgatttctccagattggcaagggtgttgaccggaaacacaatagccttagtcctgggcggtgggggagcacgcggttgcagccacatcggagttcttaaggcgcttgaggaagccggagtgccggtcgacctggtaggcggtacaagtatcggaagtttcatcggcgcactctacgcagaagagcgatctgcgagtagaacaaagcagcgggcaagagaatgggcgaaaagcatgacaagcgtcctcgaacctgtcctggatttgacataccccgtgacctcaatgttcaccgggtcagcattcaataggtctatccaccgtgtttttcaggataaacagattgaggacctgtggttgccttactttaacgttaccaccgatattacggcctctgccatgcgagtgcataaagatggctcgctttggcggtatgtcagggccagcatgacactgagcgggtacctgccaccgctgtgcgatcccaaagacggccatctgctcatggatgggggatatatcaacaacctgccagccgatatcgcccgttccatgggagctaagactgtaattgcgatcgacgtcggtagccaagacgagactgatttgtcaacatacggggacagcctttcgggatggtggctcctctggaaacgcctgaatccttgggccgacaaggtcaaagtcccagacatggctgagatccagtcacgcctcgcttatgtgtcctgcgtgcgacagctggaagtggtaaagtccagttcatattgcgaatacctgaggcctccaatcgactgctttaaaaccatggactttgggaagttcgatcagatctatgacgtgggatatcagtatgggaaagctgtttttggcggttggtcaagaggcaacgtcatcgagaagatgctgactgatcggcgatctactgatctcaacgaaagcagaagggcagatgtgttagcctttccttcctctggattcactgatctggcagagatcgtatcccgcatagagcccccaacctcttatgttagcgatgggtgtgccgatggggaggagtcggattgccttaccgagtatgaagaggacgctggccctgattgtagccgagatgagggaggttccccggagggcgcaagtccatctacagcttctgagatggaagaggagaaaagtatcctccgacagcggaggtgcctcccccaggagccaccgggttcggcaacagacgcctag

SEQ ID NO: 64373 - DNA, 3903 bp, Artificial Sequence
  derived and/or modified sequence
atggaggcccccctgcagaccggcatggtgctgggcgtgatgatcggcgccggcgtggccgtggtggtgaccgccgtgctgatcctgctggtggtgagaagactgagagtgcccaagacccccgcccccgacggccccagatacagattcagaaagagagacaaggtgctgttctacggcagaaagatcatgagaaaggtgagccagagcaccagcagcctggtggacaccagcgtgagcgccaccagcagacccagaatgagaaagaagctgaagatgctgaacatcgccaagaagatcctgagaatccagaaggagacccccaccctgcagagaaaggagcccccccccgccgtgctggaggccgacctgaccgagggcgacctggccaacagccacctgcccagcgaggtgctgtacatgctgaagaacgtgagagtgctgggccacttcgagaagcccctgttcctggagctgtgcagacacatggtgttccagagactgggccagggcgactacgtgttcagacccggccagcccgacgccagcatctacgtggtgcaggacggcctgctggagctgtgcctgcccggccccgacggcaaggagtgcgtggtgaaggaggtggtgcccggcgacagcgtgaacagcctgctgagcatcctggacgtgatcaccggccaccagcacccccagagaaccgtgagcgccagagccgccagagacagcaccgtgctgagactgcccgtggaggccttcagcgccgtgttcaccaagtaccccgagagcctggtgagagtggtgcagatcatcatggtgagactgcagagagtgaccttcctggccctgcacaactacctgggcctgaccaacgagctgttcagccacgagatccagcccctgagactgttccccagccccggcctgcccaccagaaccagccccgtgagaggcagcaagagaatggtgagcaccagcgccaccgacgagcccagagagacccccggcagaccccccgaccccaccggcgcccccctgcccggccccaccggcgaccccgtgaagcccaccagcctggagacccccagcgcccccctgctgagcagatgcgtgagcatgcccggcgacatcagcggcctgcagggcggccccagaagcgacttcgacatggcctacgagagaggcagaatcagcgtgagcctgcaggaggaggccagcggcggcagcctggccgcccccgccagaacccccacccaggagcccagagagcagcccgccggcgcctgcgagtacagctactgcgaggacgagagcgccaccggcggctgccccttcggcccctaccagggcagacagaccagcagcatcttcgaggccgccaagcaggagctggccaagctgatgagaatcgaggacgtgagcctgcacttcgtgctgtggggctgcctgcacgtgtaccagagaatgatcgacaaggccgaggacgtgtgcctgttcgtggcccagcccggcgagctggtgggccagctggccgtgctgaccggcgagcccctgatcttcaccctgagagcccagagagactgcaccttcctgagaatcagcaagagcgacttctacgagatcatgagagcccagcccagcgtggtgctgagcgccgcccacaccgtggccgccagaatgagccccttcgtgagacagatggacttcgccatcgactggaccgccgtggaggccggcagagccctgtacagacagggcgacagaagcgactgcacctacatcgtgctgaacggcagactgagaagcgtgatccagagaggcagcggcaagaaggagctggtgggcgagtacggcagaggcgacctgatcggcgtggtggaggccctgaccagacagcccagagccaccaccgtgcacgccgtgagagacaccgagctggccaagctgcccgagggcaccctgggccacatcaagagaagatacccccaggtggtgaccagactgatccacctgctgagccagaagatcctgggcaacctgcagcagctgcagggccccttccccggcagcggcctgggcgtgcccccccacagcgagctgaccaaccccgccagcaacctggccaccgtggccatcctgcccgtgtgcgccgaggtgcccatggtggccttcaccctggagctgcagcacgccctgcaggccatcggccccaccctgctgctgaacagcgacatcatcagagccagactgggcgccagcgccctggacagcatccaggagttcagactgagcggctggctggcccagcaggaggacgcccacagaatcgtgctgtaccagaccgacgccagcctgaccccctggaccgtgagatgcctgagacaggccgactgcatcctgatcgtgggcctgggcgaccaggagcccaccctgggccagctggagcagatgctggagaacaccgccgtgagagccctgaagcagctggtgctgctgcacagagaggagggcgccggccccaccagaaccgtggagtggctgaacatgagaagctggtgcagcggccacctgcacctgagatgccccagaagactgttcagcagaagaagccccgccaagctgcacgagctgtacgagaaggtgttcagcagaagagccgacagacacagcgacttcagcagactggccagagtgctgaccggcaacaccatcgccctggtgctgggcggcggcggcgccagaggctgcagccacatcggcgtgctgaaggccctggaggaggccggcgtgcccgtggacctggtgggcggcaccagcatcggcagcttcatcggcgccctgtacgccgaggagagaagcgccagcagaaccaagcagagagccagagagtgggccaagagcatgaccagcgtgctggagcccgtgctggacctgacctaccccgtgaccagcatgttcaccggcagcgccttcaacagaagcatccacagagtgttccaggacaagcagatcgaggacctgtggctgccctacttcaacgtgaccaccgacatcaccgccagcgccatgagagtgcacaaggacggcagcctgtggagatacgtgagagccagcatgaccctgagcggctacctgccccccctgtgcgaccccaaggacggccacctgctgatggacggcggctacatcaacaacctgcccgccgacatcgccagaagcatgggcgccaagaccgtgatcgccatcgacgtgggcagccaggacgagaccgacctgagcacctacggcgacagcctgagcggctggtggctgctgtggaagagactgaacccctgggccgacaaggtgaaggtgcccgacatggccgagatccagagcagactggcctacgtgagctgcgtgagacagctggaggtggtgaagagcagcagctactgcgagtacctgagaccccccatcgactgcttcaagaccatggacttcggcaagttcgaccagatctacgacgtgggctaccagtacggcaaggccgtgttcggcggctggagcagaggcaacgtgatcgagaagatgctgaccgacagaagaagcaccgacctgaacgagagcagaagagccgacgtgctggccttccccagcagcggcttcaccgacctggccgagatcgtgagcagaatcgagccccccaccagctacgtgagcgacggctgcgccgacggcgaggagagcgactgcctgaccgagtacgaggaggacgccggccccgactgcagcagagacgagggcggcagccccgagggcgccagccccagcaccgccagcgagatggaggaggagaagagcatcctgagacagagaagatgcctgccccaggagccccccggcagcgccaccgacgcctag

SEQ ID NO: 64374 - protein, 1327 aa, Artificial Sequence
  derived and/or modified sequence
MEAPLQTGMVLGVMIGAGVAVVVTAVLILLVVRRLRVPKTPAPDGPRYRFRKRDKVLFYGRKIMRKVSQSTSSLVDTSVSATSRPRMRKKLKMLNIAKKILRIQKETPTLQRKEPPPAVLEADLTEGDLANSHLPSEVLYMLKNVRVLGHFEKPLFLELCRHMVFQRLGQGDYVFRPGQPDASIYVVQDGLLELCLPGPDGKECVVKEVVPGDSVNSLLSILDVITGHQHPQRTVSARAARDSTVLRLPVEAFSAVFTKYPESLVRVVQIIMVRLQRVTFLALHNYLGLTNELFSHEIQPLRLFPSPGLPTRTSPVRGSKRMVSTSATDEPRETPGRPPDPTGAPLPGPTGDPVKPTSLETPSAPLLSRCVSMPGDISGLQGGPRSDFDMAYERGRISVSLQEEASGGSLAAPARTPTQEPREQPAGACEYSYCEDESATGGCPFGPYQGRQTSSIFEAAKQELAKLMRIEDPSLLNSRVLLHHAKAGTIIARQGDQDVSLHFVLWGCLHVYQRMIDKAEDVCLFVAQPGELVGQLAVLTGEPLIFTLRAQRDCTFLRISKSDFYEIMRAQPSVVLSAAHTVAARMSPFVRQMDFAIDWTAVEAGRALYRQGDRSDCTYIVLNGRLRSVIQRGSGKKELVGEYGRGDLIGVVEALTRQPRATTVHAVRDTELAKLPEGTLGHIKRRYPQVVTRLIHLLSQKILGNLQQLQGPFPAGSGLGVPPHSELTNPASNLATVAILPVCAEVPMVAFTLELQHALQAIGPTLLLNSDIIRARLGASALDSIQEFRLSGWLAQQEDAHRIVLYQTDASLTPWTVRCLRQADCILIVGLGDQEPTLGQLEQMLENTAVRALKQLVLLHREEGAGPTRTVEWLNMRSWCSGHLHLRCPRRLFSRRSPAKLHELYEKVFSRRADRHSDFSRLARVLTGNTIALVLGGGGARGCSHIGVLKALEEAGVPVDLVGGTSIGSFIGALYAEERSASRTKQRAREWAKSMTSVLEPVLDLTYPVTSMFTGSAFNRSIHRVFQDKQIEDLWLPYFNVTTDITASAMRVHKDGSLWRYVRASMTLSGYLPPLCDPKDGHLLMDGGYINNLPADIARSMGAKTVIAIDVGSQDETDLSTYGDSLSGWWLLWKRLNPWADKVKVPDMAEIQSRLAYVSCVRQLEVVKSSSYCEYLRPPIDCFKTMDFGKFDQIYDVGYQYGKAVFGGWSRGNVIEKMLTDRRSTDLNESRRADVLAFPSSGFTDLAEIVSRIEPPTSYVSDGCADGEESDCLTEYEEDAGPDCSRDEGGSPEGASPSTASEMEEEKSILRQRRCLPQEPPGSATDA

SEQ ID NO: 64375 - DNA, 3984 bp, Artificial Sequence
  derived and/or modified sequence
atggaggcccccctgcagaccggcatggtgctgggcgtgatgatcggcgccggcgtggccgtggtggtgaccgccgtgctgatcctgctggtggtgagaagactgagagtgcccaagacccccgcccccgacggccccagatacagattcagaaagagagacaaggtgctgttctacggcagaaagatcatgagaaaggtgagccagagcaccagcagcctggtggacaccagcgtgagcgccaccagcagacccagaatgagaaagaagctgaagatgctgaacatcgccaagaagatcctgagaatccagaaggagacccccaccctgcagagaaaggagcccccccccgccgtgctggaggccgacctgaccgagggcgacctggccaacagccacctgcccagcgaggtgctgtacatgctgaagaacgtgagagtgctgggccacttcgagaagcccctgttcctggagctgtgcagacacatggtgttccagagactgggccagggcgactacgtgttcagacccggccagcccgacgccagcatctacgtggtgcaggacggcctgctggagctgtgcctgcccggccccgacggcaaggagtgcgtggtgaaggaggtggtgcccggcgacagcgtgaacagcctgctgagcatcctggacgtgatcaccggccaccagcacccccagagaaccgtgagcgccagagccgccagagacagcaccgtgctgagactgcccgtggaggccttcagcgccgtgttcaccaagtaccccgagagcctggtgagagtggtgcagatcatcatggtgagactgcagagagtgaccttcctggccctgcacaactacctgggcctgaccaacgagctgttcagccacgagatccagcccctgagactgttccccagccccggcctgcccaccagaaccagccccgtgagaggcagcaagagaatggtgagcaccagcgccaccgacgagcccagagagacccccggcagaccccccgaccccaccggcgcccccctgcccggccccaccggcgaccccgtgaagcccaccagcctggagacccccagcgcccccctgctgagcagatgcgtgagcatgcccggcgacatcagcggcctgcagggcggccccagaagcgacttcgacatggcctacgagagaggcagaatcagcgtgagcctgcaggaggaggccagcggcggcagcctggccgcccccgccagaacccccacccaggagcccagagagcagcccgccggcgcctgcgagtacagctactgcgaggacgagagcgccaccggcggctgccccttcggcccctaccagggcagacagaccagcagcatcttcgaggccgccaagcaggagctggccaagctgatgagaatcgaggaccccagcctgctgaacagcagagtgctgctgcaccacgccaaggccggcaccatcatcgccagacagggcgaccaggacgtgagcctgcacttcgtgctgtggggctgcctgcacgtgtaccagagaatgatcgacaaggccgaggacgtgtgcctgttcgtggcccagcccggcgagctggtgggccagctggccgtgctgaccggcgagcccctgatcttcaccctgagagcccagagagactgcaccttcctgagaatcagcaagagcgacttctacgagatcatgagagcccagcccagcgtggtgctgagcgccgcccacaccgtggccgccagaatgagccccttcgtgagacagatggacttcgccatcgactggaccgccgtggaggccggcagagccctgtacagacagggcgacagaagcgactgcacctacatcgtgctgaacggcagactgagaagcgtgatccagagaggcagcggcaagaaggagctggtgggcgagtacggcagaggcgacctgatcggcgtggtggaggccctgaccagacagcccagagccaccaccgtgcacgccgtgagagacaccgagctggccaagctgcccgagggcaccctgggccacatcaagagaagatacccccaggtggtgaccagactgatccacctgctgagccagaagatcctgggcaacctgcagcagctgcagggccccttccccgccggcagcggcctgggcgtgcccccccacagcgagctgaccaaccccgccagcaacctggccaccgtggccatcctgcccgtgtgcgccgaggtgcccatggtggccttcaccctggagctgcagcacgccctgcaggccatcggccccaccctgctgctgaacagcgacatcatcagagccagactgggcgccagcgccctggacagcatccaggagttcagactgagcggctggctggcccagcaggaggacgcccacagaatcgtgctgtaccagaccgacgccagcctgaccccctggaccgtgagatgcctgagacaggccgactgcatcctgatcgtgggcctgggcgaccaggagcccaccctgggccagctggagcagatgctggagaacaccgccgtgagagccctgaagcagctggtgctgctgcacagagaggagggcgccggccccaccagaaccgtggagtggctgaacatgagaagctggtgcagcggccacctgcacctgagatgccccagaagactgttcagcagaagaagccccgccaagctgcacgagctgtacgagaaggtgttcagcagaagagccgacagacacagcgacttcagcagactggccagagtgctgaccggcaacaccatcgccctggtgctgggcggcggcggcgccagaggctgcagccacatcggcgtgctgaaggccctggaggaggccggcgtgcccgtggacctggtgggcggcaccagcatcggcagcttcatcggcgccctgtacgccgaggagagaagcgccagcagaaccaagcagagagccagagagtgggccaagagcatgaccagcgtgctggagcccgtgctggacctgacctaccccgtgaccagcatgttcaccggcagcgccttcaacagaagcatccacagagtgttccaggacaagcagatcgaggacctgtggctgccctacttcaacgtgaccaccgacatcaccgccagcgccatgagagtgcacaaggacggcagcctgtggagatacgtgagagccagcatgaccctgagcggctacctgccccccctgtgcgaccccaaggacggccacctgctgatggacggcggctacatcaacaacctgcccgccgacatcgccagaagcatgggcgccaagaccgtgatcgccatcgacgtgggcagccaggacgagaccgacctgagcacctacggcgacagcctgagcggctggtggctgctgtggaagagactgaacccctgggccgacaaggtgaaggtgcccgacatggccgagatccagagcagactggcctacgtgagctgcgtgagacagctggaggtggtgaagagcagcagctactgcgagtacctgagaccccccatcgactgcttcaagaccatggacttcggcaagttcgaccagatctacgacgtgggctaccagtacggcaaggccgtgttcggcggctggagcagaggcaacgtgatcgagaagatgctgaccgacagaagaagcaccgacctgaacgagagcagaagagccgacgtgctggccttccccagcagcggcttcaccgacctggccgagatcgtgagcagaatcgagccccccaccagctacgtgagcgacggctgcgccgacggcgaggagagcgactgcctgaccgagtacgaggaggacgccggccccgactgcagcagagacgagggcggcagccccgagggcgccagccccagcaccgccagcgagatggaggaggagaagagcatcctgagacagagaagatgcctgccccaggagccccccggcagcgccaccgacgcctag

SEQ ID NO: 64376 - DNA, 3984 bp, Artificial Sequence
  derived and/or modified sequence
atggaggctccattgcaaacaggtatggtgcttggtgtcatgatcggcgcgggcgtcgcggtcgtagtgacagcagtgctgatcctgctggtggtgcgtcgactgagagtgcccaagacccctgcacctgacggtcccaggtaccgctttaggaaacgggacaaggtccttttctatggtcggaagattatgagaaaagtatctcagtccacaagctcactggtggacacaagtgtttccgcaacttcgcggccgagaatgaggaagaagctgaaaatgctaaatattgccaagaagatactcagaattcagaaggaaactcctactctgcagagaaaagagcctcccccagccgtgttggaagctgatcttaccgaaggcgacctggccaattctcacctaccgtctgaggttctctacatgctgaagaatgtgcgagtgcttggccatttcgagaaaccactgttccttgaactgtgccggcacatggtgttccagcgtttagggcagggcgactacgtatttagacctgggcaaccggatgcctccatatatgtggtccaggacggcctgctggaactctgcctgccaggtcccgacgggaaggagtgtgtggtgaaagaggtagtgcctggtgacagtgttaatagcctgcttagtatcctggacgtgatcactggccaccaacatccccagcgcactgtgtcggcccgggcggctagggacagtaccgtgctgcggctgcccgtggaggccttcagcgcggtgttcactaaatatccggaatcactcgtgcgcgtggtacaaatcatcatggtccggctgcagcgggtaacattcttggcgcttcacaattacctcgggctgactaacgaattgttcagtcacgagatccaaccactgcgcctgtttccctcgccagggttgccgacacgaacctcaccagtcagaggctcgaaaaggatggttagcacatctgccaccgatgagccaagggagactcctggccgcccacctgacccaactggtgctccactgcctggccctaccggggaccctgttaagcctacctccctggaaactcctagtgcccccctgcttagccggtgtgtgtcgatgcccggcgatatttcaggtctgcagggcggaccacgttccgactttgacatggcatatgaacggggccgaatcagtgtgagtttgcaggaggaggcatctgggggctccttggccgcccccgcaagaaccccaacacaggagccaagagaacaacccgctggtgcctgtgaatacagctattgtgaagacgagtctgctacaggagggtgcccgttcggcccctaccaagggcgccagacctcctcaatttttgaggctgcaaaacaggagttagcaaagttgatgagaattgaagatcccagcctgctcaacagccgcgtgctgctgcaccacgctaaggcaggtactatcatcgcccgtcagggagaccaggatgtctccctgcactttgtgttgtgggggtgtctgcatgtgtaccagcggatgatagataaagctgaggatgtttgtctgtttgtggcgcaaccaggcgagctggtggggcagctggcggtacttacaggagaaccattgatatttacactgcgggcccagcgggactgcacattcctgcgaattagcaaatcagacttctatgaaatcatgcgcgcccagccgtcagtcgttttatccgctgcacatactgtcgccgcgcgaatgtcgcccttcgtcaggcaaatggactttgccatcgattggacggcagtggaagccggtcgtgccttgtatcgccagggtgaccggagtgattgtacatatatagtgctcaacggacgtcttaggagcgtaatccagaggggctccggaaaaaaagagttggtgggcgaatacggacgtggtgacctgatcggagtagttgaggcccttacgcgtcagccgcgggccactactgtgcatgccgtgcgggatactgaactggccaagttgcccgagggtaccctgggtcatatcaagagaaggtacccgcaggtggtgacgagattgattcatctcctgtcccagaaaatcctcggcaaccttcaacaattgcaaggcccgtttcctgcaggctccgggctcggagtgcccccgcactcagagctcacaaatccagcctcaaatctagccaccgtggccattctccccgtgtgtgccgaagtcccgatggtggccttcaccctggagctgcagcatgccctccaagcaatcggaccaacccttctgttgaactcggacataatccgggcacggctgggtgcttcggccctggacagcatccaggagtttcgtcttagtggttggctagctcagcaagaagacgctcacaggatagttctgtaccaaaccgatgcttctctcacaccttggaccgttagatgcttgagacaggccgattgtatcttaatcgttggcctcggcgaccaggaacccacccttggccagttggagcaaatgctcgagaacaccgcagtgagggcactcaagcaacttgtgttgctccatcgcgaagagggagcgggccctacccgcactgtagaatggttgaacatgaggagctggtgttcaggacacctgcaccttaggtgcccacgtcggctcttctctcgccggtccccggccaagctccacgaactgtacgagaaagttttctcaaggcgtgcagatagacatagcgatttctctaggctcgctcgggtgcttaccgggaacaccatcgccctagtactggggggaggcggagccaggggctgttcacatattggcgtactgaaagccttagaggaagctggcgtgcccgtggacctagttggcggcacaagcatcggatcatttatcggggctttgtacgcagaagagcgtagcgcttcccggacgaagcagcgggcgagagagtgggctaaaagtatgacaagcgtgctggaacctgtcctggatctgacctaccccgtaacttccatgtttacagggagcgcctttaatcgctccatccatagagtgttccaggataaacagatcgaagatctgtggctgccctactttaacgtgacaacggatattactgcatcggcgatgagagtccacaaggatgggagcctctggcgctacgtccgggcctctatgaccctgtccggctatcttccgcccctttgtgatcccaaggacggtcatcttctgatggacggggggtacattaacaacctaccagccgatattgcccgcagcatgggtgcaaagacggtgatcgcgatcgatgtgggttctcaggatgagacagacctgagcacctacggggacagtctttcagggtggtggctgttgtggaagcgtctcaatccctgggccgacaaagtgaaggttcccgacatggctgaaattcaatctcgcctcgcctacgtctcttgcgtcagacagctggaggttgtgaagtcttcctcgtattgtgagtacctgcgcccaccaattgactgttttaaaactatggactttggtaagtttgaccagatttacgatgtgggttatcagtacgggaaagctgtgttcgggggttggtcgagagggaatgtcatcgagaagatgttgaccgatagaaggtctacggacctcaacgagagtagaagggccgatgtgctggcttttccaagctctggatttaccgacctggcagagatcgttagtcggatcgagccaccaacctcgtacgtttctgacggctgtgcggatggggaagaaagcgactgcctcaccgaatacgaagaagacgcaggcccagattgctccagagacgagggaggaagcccagaaggcgcttcaccatcaactgcctccgagatggaggaggagaaatccatcctgcgccaaaggcgctgtcttccgcaggaacccccaggcagtgcaaccgatgcatag

SEQ ID NO: 64377 - DNA, 3984 bp, Artificial Sequence
  derived and/or modified sequence
atggaggcccccctgcagacaggcatggtgctgggcgtgatgattggagctggggtggccgtggtggtgacagctgtgctgatcctgctggtggtgcggcggctgcgggtgcccaagaccccagccccagatggcccccgctaccgcttcaggaagagggacaaggtgctcttctacggcaggaagatcatgaggaaggtgtcccagagcaccagcagcctggtggacacctctgtgtctgccaccagccggcccaggatgaggaagaagctgaagatgctgaacatcgccaagaagatcctgcgcatccagaaggagacccccaccctgcagaggaaggagcccccacctgctgtgctggaggccgacctgacagaaggagacctggccaacagccacctgcccagcgaggtgctgtacatgctgaagaatgtgcgggtgctgggccactttgagaagcccctcttcctggagctgtgccgccacatggtgttccagaggctgggccagggcgactatgtgttccggcccggccagccagatgccagcatctacgtggtgcaggacggcctgctggagctgtgcctgcccggcccagatggcaaggaatgtgtggtgaaggaggtggtgcctggggacagcgtgaacagcctgctgagcatcctggatgtgatcaccggccaccagcacccccagaggacagtgtctgcccgggccgcccgggacagcacagtgctgcggctgcctgtggaggccttctctgctgtgttcaccaagtacccagagagcctggtgcgggtggtgcagatcatcatggtgcggctgcagagggtgaccttcctggccctgcacaactacctgggcctgaccaatgaactcttcagccatgagatccagcccctgcggctcttccccagccctggcctgcccaccaggaccagccctgtgcggggcagcaagaggatggtgtccaccagcgccacagatgagccccgggagaccccaggccggcccccagaccccaccggggcccccctgcccggccccaccggggaccctgtgaagcccaccagcctggagaccccatctgcccccctgctgagccgctgtgtgtccatgcctggggacatcagcggcctgcagggcggccccaggagtgactttgacatggcctatgaaagaggccgcatctctgtgtccctgcaggaggaggccagcggcggcagcctggccgccccagcccggacccccacccaggagccccgggagcagcctgctggggcctgtgagtacagctactgtgaagatgagagcgccaccggcggctgccccttcggcccctaccagggccggcagaccagcagcatctttgaagctgccaagcaggagctggccaagctgatgagaattgaggaccccagcctgctgaacagccgggtgctgctgcaccacgccaaggccggcaccatcatcgcccggcagggcgaccaggatgtgtccctgcactttgtgctgtggggctgcctgcacgtgtaccagaggatgattgacaaggccgaggatgtgtgcctgtttgtggcccagcctggagagctggtgggccagctggccgtgctgaccggggagcccctcatcttcaccctgcgggcccagagggactgcaccttcctgcgcatcagcaagagtgacttctatgagatcatgagggcccagcccagcgtggtgctgtctgctgcccacacagtggccgccaggatgagcccctttgtgcggcagatggactttgccatcgactggacagctgtggaggccggccgggccctgtaccggcagggcgacagaagtgactgcacctacatcgtgctgaatggccgcctgcggagcgtcatccagaggggcagcggcaagaaggagctggtgggggagtatggccgcggggacctgattggagtggtggaggccctgacccggcagccccgggccaccaccgtgcatgctgtgcgggacacagagctggccaagctgcctgagggcaccctgggccacatcaagaggcgctacccccaggtggtgaccaggctcatccacctgctgagccagaagatcctgggcaacctgcagcagctgcagggccccttccctgctggcagcggcctgggcgtgcccccccacagcgagctgaccaacccagccagcaacctggccaccgtggccatcctgcctgtgtgtgccgaggtgcccatggtggccttcaccctggagctgcagcacgccctgcaggccatcggccccaccctgctgctgaacagcgacatcatccgggcccggctgggcgccagcgccctggacagcatccaggagttccggctgagcggctggctggcccagcaggaggatgcccacagaattgtgctgtaccagacagatgccagcctgaccccctggacagtgcgctgcctgcggcaggccgactgcatcctgattgtgggcctgggggaccaggagcccaccctgggccagctggagcagatgctggagaacacagctgtgcgggccctgaagcagctggtgctgctgcaccgggaggagggcgccggccccaccaggacagtggagtggctgaacatgaggtcctggtgcagcggccacctgcacctgcgctgcccccggcggctcttcagcagaagaagccctgccaagctgcacgagctgtatgagaaggtgttcagcagaagagctgacagacacagcgacttcagccggctggcccgggtgctgactggaaacaccatcgccctggtgctgggcggcggcggggcccggggctgcagccacatcggcgtgctgaaggccctggaggaggccggcgtgcctgtggacctggtgggcggcaccagcatcggcagcttcatcggggccctgtatgcagaggagaggtctgccagcaggaccaagcagagggcccgggagtgggccaagtccatgacctctgtgctggagcctgtgctggacctgacctaccctgtgacctccatgttcaccggcagcgccttcaacagaagcatccacagggtcttccaggacaagcagatcgaggacctgtggctgccctacttcaacgtgaccacagacatcacagccagcgccatgagggtgcacaaggatggcagcctgtggaggtatgtgcgggcctccatgaccctgagcggctacctgccccccctgtgtgaccccaaggatggccacctgctgatggatggcggctacatcaacaacctgcctgctgacatcgcccgctccatgggcgccaagacagtgattgccattgatgtgggcagccaggatgaaacagacctgagcacctacggggacagcctgagcggctggtggctgctgtggaagaggctgaacccctgggccgacaaggtgaaggtgcctgacatggccgagatccagagccggctggcctacgtgtcctgtgtgcggcagctggaggtggtgaagagcagcagctactgtgagtacctgcggccccccatcgactgcttcaagaccatggactttgggaagtttgaccagatctatgatgtgggctaccagtatggcaaggctgtgtttggaggctggagcagaggaaatgtgattgagaagatgctgacagaccggcgcagcacagacctgaatgaaagcagaagagcagatgtgctggccttccccagcagcggcttcacagacctggccgagatcgtgtccagaattgagccccccaccagctatgtgtctgatggctgtgctgatggagaggagagtgactgcctgacagaatatgaggaggatgctggccctgactgcagcagagatgaaggaggcagccctgagggcgccagccccagcacagccagcgagatggaggaggagaagagcatcctgcggcagaggcgctgcctgccccaggagcccccaggcagcgccacagatgcctag

SEQ ID NO: 64378 - DNA, 3984 bp, Artificial Sequence
  derived and/or modified sequence
atggaggcccccctgcagaccggcatggtgctgggcgtgatgatcggcgctggagtggctgtcgtagtgacggcagtcctgatattactggtagtgaggaggctgcgcgtacctaagactccggctccagacgggcctcgctatcggtttaggaagagagataaggtgttattttatggccgtaaaattatgagaaaagttagccagagtacaagctcactcgttgacactagtgttagcgccacgtccagacctcggatgcgaaagaagttgaaaatgttgaatatcgctaaaaaaatcctgaggattcagaaagaaacgcctaccttacagagaaaggagcccccccccgctgtcctcgaagcggacctgactgagggtgacctggctaacagtcatttgccatctgaagtcctgtacatgctcaagaacgtcagagtcctgggccactttgaaaaacctctttttcttgagctgtgtaggcacatggtgtttcaaagactcggtcagggcgattacgtttttcgtcctgggcagcccgacgcctctatatatgtggtgcaggacggattgctagagttgtgcctgccaggacccgacggtaaggaatgtgttgtaaaggaagtggttcccggtgattcggtcaattcattactatcaatcctcgacgtgatcacaggacaccagcatccccagcgaaccgtgagtgccagggcagcccgtgactccactgttctgcgtctgcctgttgaagcattcagcgccgtgttcacaaaatatcccgagtctcttgtcagggtcgtgcagatcataatggtgagactccagcgagtcaccttcctcgctcttcataactatctcggactcacaaacgagctgttctcgcacgagattcagcctctcaggctatttccgagccccggattgcctacccgaacctcaccagtgcggggcagcaagaggatggtctctacatccgctactgacgagccacgcgagaccccagggaggccgcccgacccgacaggagccccactacctgggccaactggggatccagtaaaacccacaagtctcgagaccccgtccgccccgttgctttcacggtgtgtgtctatgcctggcgacatttcaggactgcagggtggcccgcgtagtgatttcgatatggcgtacgagaggggccgaatcagcgtgagtctccaggaagaagctagcggtggctccctggctgcacccgcccggaccccgacacaggagccgcgggagcagcccgcgggggcatgtgaatactcatattgcgaagatgaatcggccactggtgggtgtccgtttggtccttatcaaggaaggcagacctctagcatctttgaggcagcgaaacaggaactcgcgaagttgatgcgcatagaggacccaagcctgttgaacagccgggttctcctgcatcatgcaaaagccggcacaatcattgcccggcagggtgaccaggacgtatcattacattttgtattgtggggctgtttacacgtctaccaacgcatgatagataaagcagaggatgtgtgtcttttcgtagcccagcctggcgagctggtgggacagttagctgtgctgaccggggagcctctgatctttactctcagagcccagcgcgactgcacatttctcagaatttccaagtctgacttttatgaaatcatgcgagctcagccgtcggtcgttctttctgctgcccacactgtagccgctagaatgagtccttttgtgaggcagatggactttgccatcgactggacagctgtcgaggcaggtagagccctgtacagacagggggacaggagcgactgtacttacattgttctcaacggcaggctcagatccgtaattcagagagggtccggcaaaaaagagttagtcggggagtacggtcgaggcgatttgatcggagtggtggaggctttgaccaggcagcctagagccaccactgtgcatgctgtgcgtgacacggaactggcaaaactacccgaaggtacactcggtcacattaagagaagataccctcaggtcgtaacacgactgatccatctcctcagccagaagatcctgggaaacctccaacagctccagggccccttccctgctggtagcgggctgggcgttcccccccactctgagttgacaaatccagcttccaatctggccaccgtcgccatacttcccgtgtgcgcagaggtgccaatggttgcattcactctggagttgcagcatgccctgcaggcgattggccccaccctcctgctcaacagcgacattattagggcccggctcggagcatccgcacttgacagcattcaggagttccggttgagtggctggcttgcccagcaagaagatgcccaccgcatcgtcctctaccagacagacgcctcattaacaccctggaccgtcaggtgcttacggcaagccgactgcatcctcatagtgggacttggcgaccaagaacccacactgggtcagctggagcagatgctcgagaacaccgcagtgcgcgcactaaagcagctggtgctgcttcaccgggaggaaggggcaggcccgacgcggaccgtggaatggcttaatatgcgttcatggtgcagcgggcatctgcacctgcgatgtccccggcgcctatttagtagacgatcacccgccaagctccatgagttatacgagaaagtcttttcgaggcgcgcagaccgccactcggacttctccaggcttgcgcgtgtccttactggaaacacaatcgcactcgtacttggcgggggaggggctcgaggttgttctcacattggcgtcctgaaagcgttggaggaagccggggtacctgtggacttggttggcggtactagtattggaagtttcattggggccttatacgccgaggaacgttcggcctcacgcacaaagcagagggccagagaatgggcgaaatcgatgacatccgttcttgagcccgtgctggatctgacctaccctgtcacgagcatgttcacaggatcagctttcaacagatccattcaccgggtgttccaagacaaacaaatcgaagatctatggctcccatacttcaatgtgactaccgacattacggcttcggctatgcgcgtccataaggatgggagcttatggaggtacgtccgggcaagcatgactctctccggctacctacccccgttgtgcgaccccaaagatggccatctgcttatggacgggggatatatcaacaatcttcccgcagatattgcgcggtctatgggggcaaagaccgtgatcgcgatagatgtgggatctcaagacgaaactgatctctccacctacggcgatagcctatcgggctggtggctgctttggaagcggctaaacccctgggccgataaggtcaaggtgcccgacatggcagagatccagtctcgactcgcctatgtctcatgtgtgcggcagcttgaggtggtgaagtcgagcagctactgtgaatacctcaggcctccgattgattgtttcaagaccatggatttcggtaaatttgaccagatctatgacgtggggtatcaatatggaaaggccgtgttcgggggttggagtcgtggaaacgtgattgagaagatgctgaccgataggcgcagcaccgatctcaatgaatcaagaagggcagatgtgcttgcttttccctcctctggttttaccgacctggctgagattgtctctcgcattgagcctcccacttcatacgtttctgatggatgtgcagatggcgaggaaagcgactgtctgacagagtatgaagaggatgctggcccggattgtagcagggacgagggaggcagtcctgaaggagcatccccctccacagcaagcgagatggaggaagagaagagcatcctgaggcagagacgatgtttaccccaggagcccccgggcagcgccactgacgcgtag

SEQ ID NO: 64379 - DNA, 3984 bp, Artificial Sequence
  derived and/or modified sequence
atggaagctccactgcagacaggaatggtgctgggagttatgatcggagccggagtagctgtggttgtgaccgccgtgctgatactgctcgtcgtgagacgactccgcgttcccaaaacccctgctccggatggtccacgttatcggtttcgtaaacgagacaaggtgcttttttatgggagaaaaatcatgagaaaggtctctcagtctactagctccctggtggatactagtgtgtcagcgactagcagacctcgtatgaggaagaaattgaagatgcttaatatcgccaaaaaaatactcaggatacaaaaggagactcccaccctgcagagaaaggagcctccccctgcagtgctggaggctgatcttactgaaggcgacctcgcaaatagtcaccttccttctgaggtgctctatatgctgaagaacgtccgggtcctgggacacttcgagaagcccctgttcctcgagttgtgtcggcacatggtgttccagcgcctcggccagggagattacgtgttccgccctgggcaaccagatgcatctatatacgtggttcaggacgggctgctggagctttgcctccctggtcctgatggcaaggagtgtgtggtaaaagaggtggtccctggggacagcgtaaattccctattatccatcctcgacgtgatcactggacaccaacatccccagagaacggtgagcgctcgcgcagccagagactccacagtcctgcgcctcccagtcgaggcttttagtgctgtgttcacaaagtacccagaatccctcgtgcgggtggtgcaaatcatcatggtacgactgcagcgagtgactttcctcgctttacacaactatctgggtcttacaaacgagctgtttagccacgagatccagccgctccggttattcccgtcccctggcctccctacccgcacaagccctgtgcgcggaagcaagcggatggtcagcaccagcgccaccgatgaacctcgagagacccccggacgaccaccagaccccactggcgcaccccttcccggtccaacaggagatcccgtgaaacctactagtctggaaacacccagtgctcctcttctatctcgctgcgtctctatgccgggtgacataagcggcctacaaggcggaccacggtccgacttcgatatggcttacgaaagggggaggatttctgtgtcactccaagaagaggcttcgggagggtccttagcagctccagcacgaactcctacccaagagcccagggaacagcctgccggtgcctgtgagtatagctactgtgaggatgagagcgccactgggggatgcccattcgggccttatcaggggaggcagacgagtagcattttcgaggctgcaaagcaagagttggccaagctgatgcggattgaggatccctcattattaaattccagagtgctgctgcatcacgctaaagcaggaacaattattgcgaggcagggggatcaggatgtcagccttcactttgtactgtggggttgcctccatgtgtatcaacgcatgattgacaaagccgaagatgtgtgcctgttcgtggcgcagccaggagagttggtcggacagttggcagttcttactggcgaacccctaatcttcactctgagagcgcaaagagattgcactttccttcgcataagcaaatcagacttttacgaaatcatgcgcgcacaaccatccgtggtgctgtcagcagctcatactgtggccgctcggatgagcccattcgtccgccaaatggacttcgctatcgattggaccgccgtagaagcaggtcgcgcattgtatcgccagggagaccgtagcgactgcacatacattgtcctcaacggaaggttacgttctgtgatccagcggggaagtggaaagaaagagcttgttggggaatatggaaggggggacttaattggggtggttgaggcccttacgagacagccaagggcaacgacggttcatgccgtgagggacaccgaattggccaaactgcctgaaggcaccctagggcatatcaagcggaggtatcctcaggtagtgacacgactcatccatctgctgagccagaagatactgggaaacttacagcagttgcagggcccattcccagccggatccgggctcggagtgccccctcacagtgagctcacaaatccagcctccaatctggccaccgtagctatactgcctgtctgtgccgaggtgcccatggtcgcttttacgttggagctgcagcatgccctgcaggctattggacccacactgctcctgaatagtgacataattcgtgccagactgggagcgtccgctctggacagcattcaagaatttcggctgagcggatggctggcccagcaagaggacgctcatcgcatagtgctgtatcagaccgacgcgtcattgacaccctggaccgtgagatgcctgagacaggcagactgcatcttgatcgtgggacttggcgatcaggagccaaccctgggccaactggagcaaatgctcgagaatacagccgttcgagctctaaaacaactggtactgttgcaccgagaagagggcgcaggcccaacccgcaccgtggagtggctgaatatgcgatcttggtgttcaggccatctccacttgcgctgtccccgaagactcttttctagacggtctcctgctaaactgcacgagctgtacgagaaagtgttcagccggagagctgataggcacagcgatttttctaggttggcacgcgtgcttaccggaaacacgatcgcactggtgctgggaggaggcggagctcgaggatgttctcatataggtgtactgaaagctctcgaggaagccggtgtcccggtcgatctggtgggtggaacatctataggcagtttcattggcgcattatacgcagaagaaagatcggcctcaaggacaaaacagagagccagggagtgggcaaaaagtatgacctccgtcctggaacccgtcctcgatctgacatatccggtgaccagcatgtttacaggttccgctttcaatcgctcaatacaccgcgtgttccaggacaagcagatcgaggacctgtggctcccctacttcaacgtgactaccgacattaccgcctcagcaatgcgggtacacaaggatggaagcctgtggcgatacgtgcgggcatcaatgacactgtccgggtatcttccgcctctatgtgaccccaaagatggacacctgctgatggatgggggttatataaataatctgccggctgacattgctcgatccatgggggcaaagacggttattgccatagatgtgggctcgcaagatgagaccgacttaagtacctatggcgatagcttgagtggctggtggctcctctggaaacgcctgaatccctgggcggacaaggtgaaggtccctgacatggccgaaattcagagtcgcctcgcatatgttagctgtgtccgccagctggaggtggtgaaaagttcttcctactgtgaatacctgcggccacccatcgattgcttcaagaccatggacttcggcaaatttgatcagatatatgatgtgggctatcagtacggaaaggctgtcttcggaggctggagtcgcggtaatgtgatcgagaaaatgttgacagaccgcaggtcgacagacttgaacgaatcacggagggctgacgtgcttgcctttccctcgtctggctttaccgacttggctgaaatcgtttcccgtatcgagcctcctacgagttacgtctcagacgggtgcgctgacggagaggagtcagattgtctgactgaatacgaagaagatgccggtcctgattgttcgcgcgatgagggaggcagtcctgagggggcatccccatccaccgcttcagagatggaagaagaaaagtccattctaaggcagaggagatgtctgccccaggagcccccagggtcagcaacggatgcgtag

SEQ ID NO: 64380 - DNA, 3984 bp, Artificial Sequence
  derived and/or modified sequence
atggaggcaccactgcagactgggatggttctgggggtgatgataggggccggcgtggccgtggttgtgacggccgtcctgatcttactagttgtgagaagattgagggtgccaaagactcccgcccctgacggaccaagataccgtttccggaagcgggacaaagtgctgttctatgggaggaaaatcatgagaaaagtgagtcagtctacctcctcgctagtggacacaagtgttagtgccaccagtaggcccaggatgcgcaaaaaactcaagatgctcaatatcgccaagaagattctgcgaatccagaaggaaactcccactctgcaaagaaaagaaccacctcctgccgtgttggaggccgatctaactgagggggacctagcgaacagccatctcccttccgaggtcttatatatgctgaagaacgtgagggtcctcgggcattttgagaagcccctctttcttgagctgtgtcgccatatggtgttccagcgtctaggacagggcgactatgtgttcaggcccggtcagccagatgccagcatttacgtggtgcaggatggactactggagctgtgcttgcctggtccggatgggaaggaatgcgtggtgaaggaggtggttcctggggactcagtgaacagtctactgagcatcttggacgtgattactggccatcagcacccacagaggactgtctctgcacgggcggcacgcgacagtaccgtgcttaggctgccagtggaagcttttagcgcggtgttcactaagtatccagagtccctcgtgagggtagtgcaaataattatggtcaggttgcagcgtgtcaccttcctggccctgcacaactacctgggacttacaaacgaactgttttcacacgagatccagcctctccggctgttcccgtctcccggcttgcccacgcgcacctctcccgtaaggggaagcaaacggatggtcagcacctcagccactgatgaaccacgcgagactcccggaaggcctcccgaccccacaggggctcccttgcctggaccgacaggggatcccgtgaagcccacttccctggagacgcctagcgctcctctgctgtcaagatgtgtgagtatgcccggagatatttcaggtctgcagggcggccctcgaagtgattttgatatggcttacgagaggggccgtatctctgtatcgttgcaggaggaggcatccggaggctctctggctgccccagcaagaacccctacacaagaacctagagagcagccagccggggcctgtgagtatagctactgtgaagatgaatctgccaccggcgggtgtcctttcgggccatatcaggggcggcagacttcttcgattttcgaagccgccaaacaagaacttgctaagctcatgaggattgaggacccctccctgctcaattcccgggtccttttgcatcatgccaaagcagggacaataattgccaggcagggcgaccaggacgtgtcactccactttgtgttatggggttgtctgcatgtgtaccagcgcatgattgacaaggctgaggacgtctgcctcttcgtggcccagcccggcgagctggtgggtcagctggccgtcttgactggggagccgttgatatttacactccgggcccagcgggattgcacttttctccgcatctccaaaagcgacttctacgaaatcatgcgtgcccagccctccgtagtgctgagcgccgcgcacaccgtggctgctcggatgtctcccttcgtgaggcaaatggatttcgctatcgactggaccgcggtcgaggcgggcagggcactctatcgacagggcgaccgctctgactgcacctatatcgtattgaacggacgcctgaggagcgtgatccagcgcggctctggaaaaaaggagctggtgggtgagtatggaagaggtgacttgatcggggtagtggaagcccttacccgtcagccccgggccactaccgtccatgccgtcagggacaccgagctggcaaaactacctgaggggaccctcgggcatatcaagcgccgctacccccaggttgtgacaaggctgattcatctgctgtcacagaaaattctggggaacctgcaacaactgcagggtccctttcccgccggctccggcctaggggtcccaccccactctgaactcacaaatcctgcctcgaacttagccacagtcgcaatcctgccggtttgcgccgaggttcccatggtcgcctttaccctggagcttcaacacgctttgcaagccataggacctactcttcttctgaatagcgacattatccgagcaaggctgggcgcctccgcacttgactcaattcaggagtttcggcttagcggctggttggcacagcaagaagatgctcacaggattgttctctatcagactgacgcttcactgaccccatggacggtgaggtgtctgcgccaggccgattgtatccttatcgtcgggctcggcgatcaagagccaactctaggccaactggagcagatgctggagaatacagccgtgcgagctctgaaacagcttgtccttttgcatcgggaggagggagcagggcctacaaggaccgtggagtggctcaacatgcggtcttggtgttcgggacacctacacctccggtgcccaagaagactattttccagacggagcccagctaaactgcatgaactatatgaaaaagtgttttcccgacgagccgacaggcactcggacttctcgcgcttggccagagtgctgaccggcaacacaatcgcccttgtactgggtgggggtggtgctcgcggatgttctcacattggcgtcttgaaagcattggaggaagctggcgtgcctgttgatctcgtcgggggcacatcaatcggatcctttattggtgccctatatgccgaggaacggagcgcttcccgtaccaaacagagggccagggagtgggcgaaaagcatgacatctgtgctggagccagttttggacctgacatatcccgttacttctatgtttaccggatccgcattcaatagaagtatccacagggtctttcaggataagcagattgaagacctctggctaccctatttcaacgtgaccaccgatattacagcctctgccatgcgggtgcacaaggacggaagtttgtggaggtacgtgagggcctccatgacactgtctggttatctccccccactatgtgaccctaaagacggtcatctgttgatggacggagggtacattaataatctcccagcagatatcgccaggagcatgggggccaagacagtcatcgcaatcgatgtcgggtcccaggatgagaccgatttatcaacatatggggactccctctcagggtggtggctgctgtggaagcgactgaacccttgggctgataaggtgaaggtgcctgacatggcggagatccaatcacgcctcgcatacgtcagttgtgtgcgtcagctggaggtggtaaaatcgagttcatactgtgaatatctgcggccgccaattgactgtttcaagacaatggacttcggaaaatttgatcagatctacgacgtcggatatcagtatggtaaggcggtgttcggcggatggtcgagaggaaatgtcatcgagaaaatgctcacggaccgcagatccaccgatctgaacgaatctcgaagggccgacgtactggcattcccctcgagcggctttactgacctggcggaaatcgtcagtcggatcgagccacccacaagctatgtgagcgacggatgcgcggatggagaggagagtgattgcttaactgagtacgaggaagatgctggccctgactgctccagagacgagggcggctctcccgaaggagcctcaccatctacagcatctgagatggaggaagagaaatccattcttcgccagaggcgctgtttgccacaggaacctcccggtagcgctacggacgcgtag

SEQ ID NO: 64381 - DNA, 1371 bp, Artificial Sequence
  derived and/or modified sequence
atgcgcaaggtgagtcagtccacgagcagcctagtggacacgtctgtctccgcgacttcaagaccgaggatgagaaagaaactgaagatgctgaacatcgcaaagaagatcctcaggatccagaaggaaacccccactctgcaacgtaaagagccacctcctgccgtgctagaggcagatctaactgaaggtgacctcgcaaatagtcatttaccatccgaggtcttgtatatgctcaagaacgtccgggtacttgggcacttcgagaagcctttgtttttagaattgtgtcgccatatggtttttcagaggctgggacagggtgattatgtgttcaggccagggcagcctgatgcctctatctatgtcgtgcaggatggtctgctggagctgtgcctgcctggcccagacgggaaggaatgcgtcgttaaagaggtcgtgcccggcgactctgtaaattccctcttgtccattcttgacgtgattacaggacaccagcatccccagcgcacagtatccgctcgggccgctagggattcgacagtgttgcgactgcccgtggaggccttcagtgccgtattcactaaatatccggaatcactggtgagggtggtgcaaatcatcatggtcagattgcagcgggtgacatttcttgctcttcacaactacctgggcctcaccaatgagttgttttcacacgaaatccagcccctgcgactgtttccctccccagggctgcctactagaaccagcccggttagaggctctaagagaatggtgagcactagcgcaactgacgagccacgcgaaactcctggacggcccccagacccaacgggagccccgctgccaggtcctaccggggacccagtaaaaccaacctccctggaaacaccgagtgccccactgttgtccagatgcgtaagcatgccaggcgatatcagcggcctgcaaggcggcccacgttccgatttcgatatggcatacgagagaggacggataagtgtctctctgcaggaggaagcctctgggggttccctcgcagcacccgcgcggacccccacccaggaacctagggagcagcccgccggtgcatgtgaatactcatattgtgaagatgaatctgccaccggagggtgtccgtttggcccatatcaagggcgtcagactagcagcatctttgaggcagctaaacaggagttggctaagctgatgcggattgaggacccctccctcctcaactcaagggtcctgctgcaccacgccaaggcgggcactatcatcgctcggcagggcgatcaggacgtctcaggaccgcacaccgggctgacatgcccggagagaggatgcagcgtggctcttatgacttag

SEQ ID NO: 64382 - DNA, 1371 bp, Artificial Sequence
  derived and/or modified sequence
atgaggaaggtgtcccagagcaccagcagcctggtggacacctctgtgtctgccaccagccggcccaggatgaggaagaagctgaagatgctgaacatcgccaagaagatcctgcgcatccagaaggagacccccaccctgcagaggaaggagcccccacctgctgtgctggaggccgacctgacagaaggagacctggccaacagccacctgcccagcgaggtgctgtacatgctgaagaatgtgcgggtgctgggccactttgagaagcccctcttcctggagctgtgccgccacatggtgttccagaggctgggccagggcgactatgtgttccggcccggccagccagatgccagcatctacgtggtgcaggacggcctgctggagctgtgcctgcccggcccagatggcaaggaatgtgtggtgaaggaggtggtgcctggggacagcgtgaacagcctgctgagcatcctggatgtgatcaccggccaccagcacccccagaggacagtgtctgcccgggccgcccgggacagcacagtgctgcggctgcctgtggaggccttctctgctgtgttcaccaagtacccagagagcctggtgcgggtggtgcagatcatcatggtgcggctgcagagggtgaccttcctggccctgcacaactacctgggcctgaccaatgagctgttcagccatgagatccagcccctgcggctcttccccagccctggcctgcccaccaggaccagccctgtgcggggcagcaagaggatggtgtccaccagcgccacagatgagccccgggagaccccaggccggcccccagaccccactggagcccccctgcccggccccactggagaccctgtgaagcccaccagcctggagacccccagcgcccccctgctgagccgctgtgtgtccatgcctggggacatcagcggcctgcagggcggccccaggagtgactttgacatggcctatgagcggggccgcatctctgtgtccctgcaggaggaggccagcggcggcagcctggccgccccagcccggacccccacccaggagccccgggagcagcctgctggggcctgtgagtacagctactgtgaagatgaaagtgccactggaggctgccccttcggcccctaccagggccggcagaccagcagcatctttgaggccgccaagcaggagctggccaagctgatgagaattgaggaccccagcctgctgaacagccgggtgctgctgcaccacgccaaggccggcaccatcatcgcccggcagggcgaccaggatgtgtctggcccccacacaggcctgacctgcccagagcggggctgcagcgtggccctgatgacctag

SEQ ID NO: 64383 - DNA, 3984 bp, Artificial Sequence
  derived and/or modified sequence
atggaggcccccctgcagaccggcatggtgctgggcgtgatgatcggagccggagtcgctgtggtggttaccgctgtcctcattctgctcgttgtgaggcgcctccgcgtgccaaagacaccggcccctgatggccccagatacagattcaggaaacgtgacaaagtcttgttttatgggcggaagattatgcgaaaggtcagtcaatccactagcagtctagtggacaccagcgtgagcgccactagtcgcccaaggatgagaaagaagttgaaaatgttaaacatcgccaagaagattttgaggatccaaaaagagaccccgacgctgcagcgaaaagagcctcccccagccgtgctggaggccgacctgacagagggcgatcttgctaactcgcacctgcctagcgaggtcctgtacatgttaaaaaatgtcagggtcttggggcattttgagaagcctctgttcttggagctgtgcagacacatggtgtttcagcgtctagggcagggagactatgttttccgtccgggccaaccggatgcgtccatctacgtggttcaggatggcctcttggagttatgcttgccaggccccgacgggaaagagtgcgttgtaaaggaagtggtgccaggagactccgtgaatagcctgttgagcattctcgacgttatcaccgggcaccagcaccctcaaagaacagtctccgccagagccgctcgtgacagtactgttctgagactccctgtggaggcattttctgctgtcttcacaaaatacccagagagtttagtgagagtcgtgcagatcattatggtgaggctgcagcgtgtcacgttcctggcactgcacaactacctggggcttactaatgaactgttcagccatgaaatccagccactgcggctcttccctagtccagggctgcccaccagaaccagtcccgttcgggggtctaagaggatggtgtccacatcagcaaccgatgagccacgggaaacaccaggaagacccccagatcccacaggggctcctttgcctggcccaaccggcgatcccgtgaagccaacaagccttgagactccatctgcaccgttgttatcccgttgcgtcagcatgcccggggacatcagtggtctgcaagggggcccccgaagtgattttgacatggcttacgagcgtgggcgcatttcagtcagtctgcaggaagaggcttctggggggtcactggccgctcccgctcgaactccaactcaagagcctagagagcagcctgccggagcatgtgaatattcctactgcgaagacgaatcagcgaccggcggctgtcccttcggcccttatcagggtaggcagacctcatcaattttcgaggctgccaaacaggaactggcaaagctgatgcgcatagaggatccatctctcttgaactctagggtgttgctccaccatgcgaaggccggtacaattatcgcacggcagggtgatcaggacgtttctctgcatttcgtgctttggggttgcctgcacgtttaccagaggatgatcgataaagccgaagacgtctgccttttcgtcgcccagccaggggagctggtgggtcagctggcagtcctcacaggggagcctttaatattcaccctaagggcccagcgagactgtacgttcctgagaatcagcaagtcagatttctatgagatcatgagagcacagccttcagttgtactcagcgccgcccatacggtggccgcccggatgagcccttttgtcaggcagatggacttcgccatagactggactgccgttgaagccggacgcgctctgtatagacagggcgacagatctgattgtacatatatagtcctaaatgggaggctacggagtgtgatccaaaggggcagcggcaagaaagaattggtgggagaatatggccgcggcgatctgattggggtggttgaagcacttaccagacagccccgagcgacgaccgtgcatgcggtgcgagacacggaactcgccaaactccccgagggcacactgggtcacatcaagaggcggtaccctcaggtcgttacacgccttattcacctgctcagccaaaaaatcctcggcaacctccagcaactgcaggggcctttccctgctggcagtggcctgggcgtgccacctcacagcgaactgaccaatcctgccagcaatcttgcaaccgtcgccattctccccgtgtgcgcagaggtgcctatggtggcatttacacttgagttgcagcatgctctccaggcgatcggccccactctgcttttgaatagcgacatcatccgggccaggctcggagccagcgccctcgatagcattcaagagtttaggctcagcggatggctagcccagcaggaggacgcgcatcggatcgttctctaccagactgatgcctctttgacgccttggacggtgcggtgtctccgccaggctgactgtatactcatcgttggcctcggagaccaggagcctacactgggtcagctcgagcagatgttggaaaacaccgccgtcagagctctcaagcagcttgtcctccttcatagagaagaaggcgccggtcccactcggaccgttgagtggttgaacatgcggtcatggtgttctggacatcttcacctgaggtgtcctcgacgactgttcagccggcggagcccagcaaaacttcacgagctttacgagaaggttttttctagaagggccgaccggcattccgactttagtagacttgctagggtgctgaccggtaatacaatcgccttggtgttgggtggggggggagcacgggggtgctcacacatcggtgtactcaaggccctggaggaagccggtgtgcctgtggacctcgtaggaggcacaagcatcggcagcttcatcggcgcattgtatgcagaggagcgctcagcttccaggaccaaacagcgggcccgcgagtgggcgaagagcatgacctccgtgctcgaaccagtactagacctgacatacccagtaacctctatgtttacaggtagcgcttttaacaggtctatccacagagtctttcaggacaaacagattgaggatctgtggctcccctattttaatgttacaacggacattaccgccagtgctatgcgggtgcataaagacggttccctctggcgttacgtacgggcctccatgacgctcagcggctatctccccccactgtgcgatccaaaggacggccacctcctgatggacgggggctacatcaataatttgcccgcagatatcgcgagaagcatgggcgcaaagacagtgattgccatagacgttggctcgcaggatgagactgacctatctacctacggagattcgctcagtggttggtggctgctctggaagcgcctcaacccttgggccgataaggtcaaggtcccggatatggcggaaattcaaagcagactggcatacgtaagctgcgtgagacagctggaggtggtgaagtcctcttcatactgtgagtaccttcgccctccgattgactgcttcaagaccatggattttggaaagtttgatcagatctacgatgtgggataccagtacggaaaagccgtgtttggcgggtggtcaaggggtaatgtgatcgaaaaaatgctcaccgataggaggtcgaccgatttgaatgagtctaggcgggctgatgttcttgcctttccgagcagcggcttcactgacttagcggagatagtgtcccggatcgagcccccaaccagctacgtctcggacggctgtgccgacggcgaggagtcagattgcctgactgaatacgaagaggacgccgggccggattgctcacgcgatgaaggcgggagccccgagggggcttctccatccacagcatcagaaatggaagaagagaagagcattctgcgtcaacgacgctgtttacctcaggagccccctggctcagccaccgatgcttag

SEQ ID NO: 64384 - DNA, 1371 bp, Artificial Sequence
  derived and/or modified sequence
atgcggaaggtgagccagagcaccagcagcctggtggacaccagcgtatccgctacctccagaccgcgaatgcgcaaaaaacttaaaatgctgaatattgctaagaagatactgcggatccaaaaggaaactccaacactgcagcggaaagaaccgcctcccgccgtgttagaggcagatctgaccgagggcgatctggcaaatagccatctgccctcagaggtgctctatatgttgaagaacgtaagggtgttgggccactttgagaagccgctgttcctggagctgtgcagacacatggtgttccagaggctgggacagggtgactacgttttcaggcctggtcaaccagatgcctctatctacgtggtgcaagatggactcctagagttgtgcctgcctggccccgacggcaaggagtgcgtggtgaaagaagtggtccctggtgacagcgtcaacagcttattaagcatactggacgtgattactggacaccagcacccgcagcgcactgtctctgccagagccgcacgcgactcaaccgtgttgcggctgcctgtcgaggctttttccgccgtttttacaaaatatccagaatctctggtcagggtcgttcaaataataatggtgaggttacagcgggtgaccttcctcgctctccataactatctcggcctaaccaacgaattattcagtcacgaaatccaaccactcagattgttcccttcccctggcctccctacccgcacaagcccggttcgcggaagcaagcgcatggtctcaacctctgcaaccgatgagccgcgagagacacccggccggccgcctgacccgaccggtgcaccccttcctgggcctaccggtgaccctgtgaagcccacctccttggagacacccagcgctcctctactgtctcggtgcgtgagtatgcccggagacatttctgggttgcaaggtggccctaggtccgacttcgatatggcctacgaacgaggccgtattagtgtgagtctgcaggaagaagcatccggcggctcactggccgcacccgcaaggacgcctacacaggagccgagggaacagccagcgggagcctgtgagtatagctattgcgaggatgaaagtgcaactggaggatgcccctttggaccgtaccagggccggcagacttcttccatcttcgaggcagctaagcaagaactagctaaattgatgcgtatcgaagaccccagcctgctgaatagcagagtgttgttgcatcacgccaaggctgggactatcatcgcgcggcaaggcgatcaagatgtgtccgggccccacactggcctcacctgtcccgagagaggatgctctgtggccctgatgacctag

SEQ ID NO: 64385 - DNA, 4472 bp, Artificial Sequence
  derived and/or modified sequence
agtgaataatttaaaggggccgtgcctgcggagccgggcggaacgctagcggtgttggcgcggagtggaccccggctgcggcccctggcaatggcgccaccatcggtcccggagtcccagtgatgctctgtgccatagagcccccataacttcactactacgtgatagtaaatccccggcaaaaaccagcagcgccttgcaagcccacgccaccccaagcatcccaggactcttctgaaacgactccgggctaccagatcggccgtccagctggaatcaaccgatggaggctccgctgcaaactggaatggtgcttggcgtgatgatcggggccggagtggcggtggtggtcacggccgtgctcatcctcctggtggtgcggaggctgcgagtgccaaaaaccccagccccggatggcccccggtatcggttccggaagagggacaaagtgctcttctatggccggaagattatgcggaaggtgtcacaatccacctcctccctcgtggatacctctgtctccgccacctcccggccacgcatgaggaagaaactgaagatgctcaacattgccaagaagatcctgcgcatccagaaagagacgcccacgctgcagcggaaggagcccccgcccgcagtgctagaagctgacctgaccgagggcgacctggctaactcccatctgccctctgaagtgctttatatgctcaagaacgtccgggtgctgggccacttcgagaagccactcttcctggagctctgccgccacatggtcttccagcggctgggccagggtgactacgtcttccggccgggccagccagatgccagcatctacgtggtgcaggacgggctgctggagctctgtctgccagggcctgacgggaaggagtgtgtggtgaaggaagtggttcctggggacagcgtcaacagccttctcagcatcctggatgtcatcaccggtcaccagcatccccagcggaccgtgtctgcccgggcggcccgggactccacggtgctgcgcctgccggtggaagcattctccgcggtcttcaccaagtacccggagagcttggtgcgggtcgtgcagatcatcatggtgcggctgcagcgagtcaccttcctggcactgcacaactacctgggtctgaccaatgagctcttcagccacgagatccagcccctgcgtctgttccccagccccggcctcccaactcgcaccagccctgtgcggggctccaagagaatggtcagcacctcagctacagacgagcccagggagaccccagggcggccacccgatcccaccggggccccgctgcctggacctacaggggaccctgtgaagcccacatccctggaaaccccctcggcccctctgctgagccgctgcgtctccatgccaggggacatctcaggcttgcagggtggcccccgctccgacttcgacatggcctatgagcgtggccggatctccgtgtccctgcaggaagaggcctccggggggtccctggcagcccccgctcggacccccactcaggagcctcgtgagcagccggcaggcgcctgtgaatacagctactgtgaggatgagtcggccactggtggctgccctttcgggccctaccagggccgccagaccagcagcatcttcgaggcagcaaagcaggagctggccaagctgatgcggattgaggacccctccctcctgaacagcagagtcttgctgcaccacgccaaagctggcaccatcattgcccgccagggagaccaggacgtgagcctgcacttcgtgctctggggctgcctgcacgtgtaccagcgcatgatcgacaaggcggaggacgtgtgcctgttcgtagcgcagcccggggaactggtggggcagctggcggtgctcactggcgaacctctcatcttcacactgcgagcccaacgcgactgcaccttcctgcggatctccaagtccgacttctatgagatcatgcgcgcacagcccagtgtggtgctgagtgcggcgcacacggtggcagccaggatgtcgcccttcgtgcgccagatggacttcgccatcgactggactgcagtggaggcgggacgcgcgctgtacaggcagggcgaccgctccgactgcacttacatcgtgctcaatgggcggctgcgtagcgtgatccagcgaggcagtggcaagaaggagctggtgggcgagtacggccgcggcgacctcatcggcgtggtggaggcactgacccggcagccgcgagccacgacggtgcacgcggtgcgcgacacggagctggccaagcttcccgagggcaccttgggtcacatcaaacgccggtacccgcaggtcgtgacccgccttatccacctactgagccagaaaattctagggaatttgcagcagctgcaaggacccttcccagcaggctctgggttgggtgtgcccccacactcggaactcaccaacccagccagcaacctggcaactgtggcaatcctgcctgtgtgtgctgaggtccccatggtggccttcacgctggagctgcagcacgccctgcaggccatcggtccgacgctactccttaacagtgacatcatccgggcacgcctgggggcctccgcactggatagcatccaagagttccggctgtcagggtggctggcccagcaggaggatgcacaccgtatcgtactctaccagacggacgcctcgctgacgccctggaccgtgcgctgcctgcgacaggccgactgcatcctcattgtgggcctgggggaccaggagcctaccctcggccagctggagcagatgctggagaacacggctgtgcgcgcccttaagcagctagtcctgctccaccgagaggagggcgcgggccccacgcgcaccgtggagtggctaaatatgcgcagctggtgctcggggcacctgcacctgcgctgtccgcgccgcctcttttcgcgccgcagccctgccaagctgcatgagctctacgagaaggttttctccaggcgcgcggaccggcacagcgacttctcccgcttggcgagggtgctcacggggaacaccattgcccttgtgctaggcgggggcggggccaggggctgctcgcacatcggagtactaaaggcattagaggaggcgggggtccccgtggacctggtgggcggcacgtccattggctctttcatcggagcgttgtacgcggaggagcgcagcgccagccgcacgaagcagcgggcccgggagtgggccaagagcatgacttcggtgctggaacctgtgttggacctcacgtacccagtcacctccatgttcactgggtctgcctttaaccgcagcatccatcgggtcttccaggataagcagattgaggacctgtggctgccttacttcaacgtgaccacagatatcaccgcctcagccatgcgagtccacaaagatggctccctgtggcggtacgtgcgcgccagcatgacgctgtcgggctacctgcccccgctgtgcgaccccaaggacgggcacctactcatggatggcggctacatcaacaatctgccagcggacatcgcccgcagcatgggtgccaaaacggtcatcgccattgacgtggggagccaggatgagacggacctcagcacctacggggacagcctgtccggctggtggctgctgtggaagcggctgaatccctgggctgacaaggtaaaggttccagacatggctgaaatccagtcccgcctggcctacgtgtcctgtgtgcggcagctagaggttgtcaagtccagctcctactgcgagtacctgcgcccgcccatcgactgcttcaagaccatggactttgggaagttcgaccagatctatgatgtgggctaccagtacgggaaggcggtgtttggaggctggagccgtggcaacgtcattgagaaaatgctcacagaccggcggtctacagaccttaatgagagccgccgtgcagacgtgcttgccttcccaagctctggcttcactgacttggcagagattgtgtcccggattgagccccccacgagctatgtctctgatggctgtgctgacggagaggagtcagattgtctgacagagtatgaggaggacgccggacccgactgctcgagggatgaaggggggtcccccgagggcgcaagccccagcactgcctccgagatggaggaggagaagtcgattctccggcaacgacgctgtctgccccaggagccgcccggctcagccacagatgcctgaggacctcgacaggggtcaccccctccctcccacccctggactgggctgggggtggccccgtgggggtagctcactccccctcctgctgctatgcctgtgacccccgcggcccacacactggactgacctgccctgagcggggatgcagtgttgcactgatgacttgaccagcccctcccccaataaactcgcctcttggaaatgg

SEQ ID NO: 64386 - DNA, 4460 bp, Artificial Sequence
  derived and/or modified sequence
caatggcgccaccatcggtcccggagtcccagtgatgctctgtgccatagagcccccataacttcactactacgtgatagtaaatccccggcaaaaaccagcagcgccttgcaagcccacgccaccccaagcatcccaggactcttctgaaacagggcagtgacccgggaggaagtcaccaggtgcagaggaccgtgccctgtggggacctgcctgcaggctgctgacagactccgggctaccagatcggccgtccagctggaatcaaccgatggaggctccgctgcaaactggaatggtgcttggcgtgatgatcggggccggagtggcggtggtggtcacggccgtgctcatcctcctggtggtgcggaggctgcgagtgccaaaaaccccagccccggatggcccccggtatcggttccggaagagggacaaagtgctcttctatggccggaagattatgcggaaggtgtcacaatccacctcctccctcgtggatacctctgtctccgccacctcccggccacgcatgaggaagaaactgaagatgctcaacattgccaagaagatcctgcgcatccagaaagagacgcccacgctgcagcggaaggagcccccgcccgcagtgctagaagctgacctgaccgagggcgacctggctaactcccatctgccctctgaagtgctttatatgctcaagaacgtccgggtgctgggccacttcgagaagccactcttcctggagctctgccgccacatggtcttccagcggctgggccagggtgactacgtcttccggccgggccagccagatgccagcatctacgtggtgcaggacgggctgctggagctctgtctgccagggcctgacgggaaggagtgtgtggtgaaggaagtggttcctggggacagcgtcaacagccttctcagcatcctggatgtcatcaccggtcaccagcatccccagcggaccgtgtctgcccgggcggcccgggactccacggtgctgcgcctgccggtggaagcattctccgcggtcttcaccaagtacccggagagcttggtgcgggtcgtgcagatcatcatggtgcggctgcagcgagtcaccttcctggcactgcacaactacctgggtctgaccaatgagctcttcagccacgagatccagcccctgcgtctgttccccagccccggcctcccaactcgcaccagccctgtgcggggctccaagagaatggtcagcacctcagctacagacgagcccagggagaccccagggcggccacccgatcccaccggggccccgctgcctggacctacaggggaccctgtgaagcccacatccctggaaaccccctcggcccctctgctgagccgctgcgtctccatgccaggggacatctcaggcttgcagggtggcccccgctccgacttcgacatggcctatgagcgtggccggatctccgtgtccctgcaggaagaggcctccggggggtccctggcagcccccgctcggacccccactcaggagcctcgtgagcagccggcaggcgcctgtgaatacagctactgtgaggatgagtcggccactggtggctgccctttcgggccctaccagggccgccagaccagcagcatcttcgaggcagcaaagcaggagctggccaagctgatgcggattgaggacccctccctcctgaacagcagagtcttgctgcaccacgccaaagctggcaccatcattgcccgccagggagaccaggacgtgagcctgcacttcgtgctctggggctgcctgcacgtgtaccagcgcatgatcgacaaggcggaggacgtgtgcctgttcgtagcgcagcccggggaactggtggggcagctggcggtgctcactggcgaacctctcatcttcacactgcgagcccaacgcgactgcaccttcctgcggatctccaagtccgacttctatgagatcatgcgcgcacagcccagtgtggtgctgagtgcggcgcacacggtggcagccaggatgtcgcccttcgtgcgccagatggacttcgccatcgactggactgcagtggaggcgggacgcgcgctgtacaggcagggcgaccgctccgactgcacttacatcgtgctcaatgggcggctgcgtagcgtgatccagcgaggcagtggcaagaaggagctggtgggcgagtacggccgcggcgacctcatcggcgtggtggaggcactgacccggcagccgcgagccacgacggtgcacgcggtgcgcgacacggagctggccaagcttcccgagggcaccttgggtcacatcaaacgccggtacccgcaggtcgtgacccgccttatccacctactgagccagaaaattctagggaatttgcagcagctgcaaggacccttcccagcaggctctgggttgggtgtgcccccacactcggaactcaccaacccagccagcaacctggcaactgtggcaatcctgcctgtgtgtgctgaggtccccatggtggccttcacgctggagctgcagcacgccctgcaggccatcggtccgacgctactccttaacagtgacatcatccgggcacgcctgggggcctccgcactggatagcatccaagagttccggctgtcagggtggctggcccagcaggaggatgcacaccgtatcgtactctaccagacggacgcctcgctgacgccctggaccgtgcgctgcctgcgacaggccgactgcatcctcattgtgggcctgggggaccaggagcctaccctcggccagctggagcagatgctggagaacacggctgtgcgcgcccttaagcagctagtcctgctccaccgagaggagggcgcgggccccacgcgcaccgtggagtggctaaatatgcgcagctggtgctcggggcacctgcacctgcgctgtccgcgccgcctcttttcgcgccgcagccctgccaagctgcatgagctctacgagaaggttttctccaggcgcgcggaccggcacagcgacttctcccgcttggcgagggtgctcacggggaacaccattgcccttgtgctaggcgggggcggggccaggggctgctcgcacatcggagtactaaaggcattagaggaggcgggggtccccgtggacctggtgggcggcacgtccattggctctttcatcggagcgttgtacgcggaggagcgcagcgccagccgcacgaagcagcgggcccgggagtgggccaagagcatgacttcggtgctggaacctgtgttggacctcacgtacccagtcacctccatgttcactgggtctgcctttaaccgcagcatccatcgggtcttccaggataagcagattgaggacctgtggctgccttacttcaacgtgaccacagatatcaccgcctcagccatgcgagtccacaaagatggctccctgtggcggtacgtgcgcgccagcatgacgctgtcgggctacctgcccccgctgtgcgaccccaaggacgggcacctactcatggatggcggctacatcaacaatctgccagcggacatcgcccgcagcatgggtgccaaaacggtcatcgccattgacgtggggagccaggatgagacggacctcagcacctacggggacagcctgtccggctggtggctgctgtggaagcggctgaatccctgggctgacaaggtaaaggttccagacatggctgaaatccagtcccgcctggcctacgtgtcctgtgtgcggcagctagaggttgtcaagtccagctcctactgcgagtacctgcgcccgcccatcgactgcttcaagaccatggactttgggaagttcgaccagatctatgatgtgggctaccagtacgggaaggcggtgtttggaggctggagccgtggcaacgtcattgagaaaatgctcacagaccggcggtctacagaccttaatgagagccgccgtgcagacgtgcttgccttcccaagctctggcttcactgacttggcagagattgtgtcccggattgagccccccacgagctatgtctctgatggctgtgctgacggagaggagtcagattgtctgacagagtatgaggaggacgccggacccgactgctcgagggatgaaggggggtcccccgagggcgcaagccccagcactgcctccgagatggaggaggagaagtcgattctccggcaacgacgctgtctgccccaggagccgcccggctcagccacagatgcctgaggacctcgacaggggtcaccccctccctcccacccctggactgggctgggggtggccccgtgggggtagctcactccccctcctgctgctatgcctgtgacccccgcggcccacacactggactgacctgccctgagcggggatgcagtgttgcactgatgacttgaccagcccctcccccaataaactcgcctcttggaaatgg

SEQ ID NO: 64387 - DNA, 1482 bp, Artificial Sequence
  derived and/or modified sequence
agcaatggcgccaccatcggtcccggagtcccagtgatgctctgtgccatagagcccccggtatcggttccggaagagggacaaagtgctcttctatggccggaagattatgcggaaggtgtcacaatccacctcctccctcgtggatacctctgtctccgccacctcccggccacgcatgaggaagaaactgaagatgctcaacattgccaagaagatcctgcgcatccagaaagagacgcccacgctgcagcggaaggagcccccgcccgcagtgctagaagctgacctgaccgagggcgacctggctaactcccatctgccctctgaagtgctttatatgctcaagaacgtccgggtgctgggccacttcgagaagccactcttcctggagctctgccgccacatggtcttccagcggctgggccagggtgactacgtcttccggccgggccagccagatgccagcatctacgtggtgcaggacgggctgctggagctctgtctgccagggcctgacgggaaggagtgtgtggtgaaggaagtggttcctggggacagcgtcaacagccttctcagcatcctggatgtcatcaccggtcaccagcatccccagcggaccgtgtctgcccgggcggcccgggactccacggtgctgcgcctgccggtggaagcattctccgcggtcttcaccaagtacccggagagcttggtgcgggtcgtgcagatcatcatggtgcggctgcagcgagtcaccttcctggcactgcacaactacctgggtctgaccaatgagctcttcagccacgagatccagcccctgcgtctgttccccagccccggcctcccaactcgcaccagccctgtgcggggctccaagagaatggtcagcacctcagctacagacgagcccagggagaccccagggcggccacccgatcccaccggggccccgctgcctggacctacaggggaccctgtgaagcccacatccctggaaaccccctcggcccctctgctgagccgctgcgtctccatgccaggggacatctcaggcttgcagggtggcccccgctccgacttcgacatggcctatgagcgtggccggatctccgtgtccctgcaggaagaggcctccggggggtccctggcagcccccgctcggacccccactcaggagcctcgtgagcagccggcaggcgcctgtgaatacagctactgtgaggatgagtcggccactggtggctgccctttcgggccctaccagggccgccagaccagcagcatcttcgaggcagcaaagcaggagctggccaagctgatgcggattgaggacccctccctcctgaacagcagagtcttgctgcaccacgccaaagctggcaccatcattgcccgccagggagaccaggacgtgagcggcccacacactggactgacctgccctgagcggggatgcagtgttgcactgatgacttgacc

SEQ ID NO: 64388 - DNA, 3984 bp, Artificial Sequence
  derived and/or modified sequence
atggaagctcccctgcaaactggtatggtcctgggagtcatgatcggcgctggggttgcagtggtggtgaccgctgtgctgattcttcttgtcgtgcgacggctaagagtcccgaaaactccagccccagacggccctcgttatcgtttccgcaagcgcgacaaggttctcttctatggcagaaagatcatgcgaaaggttagccagtccacttccagcctggttgacactagcgtatccgccacgtcgcggcctcgaatgagaaaaaagctgaagatgctgaatatagctaagaaaattttgcgcatacaaaaggaaacccccacgttacagaggaaagagccccctcctgctgtgcttgaggcagatctgacggaaggggatttggcaaactcccacctgccatctgaggtgttatacatgctgaagaacgtgcgagtactggggcattttgagaagccgctttttcttgagttatgtcggcatatggtgttccaaagattgggtcagggagattatgtgttcaggcccggtcagccagatgcttccatctatgtagttcaagacggccttctcgagctgtgtttgccaggccctgatggcaaggaatgtgtagtgaaggaggtggtccctggcgacagcgttaattcccttctctctattctcgatgtgattacaggccatcagcatcctcagagaacagtctccgccagagccgctcgtgactcaactgtacttcgtctccctgttgaagctttctcagccgtctttaccaagtatcctgaatcccttgttagggtggtccagattataatggtacgtctccagcgggttacttttttggccctgcacaactacctgggcctgaccaatgagcttttcagccatgagatccagccactccggcttttcccaagcccgggactgcctactaggacttcacccgtccgcggatcaaaaaggatggtgagcacttccgcgacagacgagcctcgagagacaccgggaagaccccctgatcccacaggagcgccattgccaggcccaactggagaccctgtgaaaccaacttccttggagaccccctccgcgccactcctaagcagatgcgtctccatgcccggtgatatatccggactccagggcggaccgcgaagtgattttgacatggcttacgaaagaggtcgcataagcgttagtctgcaggaagaagccagcggcggaagcctggccgcacctgccaggacaccaacacaagaacctagagagcaacccgcaggagcgtgcgaatactcctactgtgaggatgagtctgctacggggggttgtcccttcggcccatatcaaggaagacagacatcgtccattttcgaagccgctaagcaggagcttgccaagctgatgcgtatagaagacccctctctgctaaacagccgcgtgttgttgcaccacgccaaagcaggcactataatagctcggcagggcgaccaggacgtttctttgcatttcgtactttggggctgcctgcacgtgtatcagcggatgatagacaaagccgaggacgtgtgcctgtttgttgcccaaccaggagagttggtgggacagctggctgtgctgaccggcgaaccattaatttttaccttgcgtgcgcagcgggactgtacatttctacgcatttccaaatccgatttctatgaaatcatgcgcgcacagcccagcgtggtgctaagcgcagcccacacagttgctgctagaatgtctccctttgttaggcaaatggattttgcgattgattggactgctgtggaggctggccgtgccctgtataggcagggcgataggtctgattgtacttatattgtgctgaacggacggctgcgttcagtgatccagagaggcagcggcaaaaaggaactggtcggagagtatggacggggtgatttgatcggtgtcgtggaagcgctgactcgtcaaccacgagccaccactgttcatgcggtgcgagacactgaacttgcaaaattgcccgagggcaccctggggcacataaagcggagatatccccaggtggtgacgagactcatccatcttttgagccaaaagattttaggcaacctgcagcagctgcaaggtcctttcccagcagggtcaggacttggagtcccacctcactccgagctgaccaacccagcgtctaacctggcaaccgttgccatcctgccggtatgtgcagaagtacctatggttgcatttaccttggagctccaacacgcacttcaggccatcggcccaacgctgctcctcaatagcgacatcatcagggctaggttaggggcttccgcccttgattccatccaggagtttcggctttccgggtggttagcacaacaagaagacgcacataggatcgttttgtaccaaaccgatgcctccttgaccccttggactgtcaggtgcctgcgacaggcggattgtattcttattgtgggcttaggggaccaagagcccactctgggccaactggagcagatgcttgagaatacggctgtgagagccttgaagcaactggtactgctgcatcgcgaggagggggctggccctacacgcacggtggaatggctgaacatgaggagctggtgtagtggtcacctgcaccttcgctgccctcggcgactattttctcggagatcccccgcaaaactgcacgagctctatgaaaaggtgttctccagacgcgctgatcgccattctgacttttccagactggctagagttctgaccgggaacacaatcgcgctggtcctcggtggtggaggcgcacgcggatgcagtcacattggtgtgcttaaggcattggaagaagccggagtgcccgtggacttggtcggagggaccagcataggtagttttattggggcattatacgcggaggagaggagcgcgagtcgaacgaagcaacgtgcgagggagtgggccaagtctatgacatcggtactggagcccgtgctggaccttacctatccggtgactagtatgttcacgggctcggcttttaaccgaagtatccatcgcgtgttccaggacaaacagattgaagacctgtggttaccctattttaacgtcacaaccgacattacagcatctgcaatgcgcgtccataaggatggaagcctctggcgctacgttcgggcaagtatgacattatccggctacctgccccctttatgtgacccaaaagacggccacctgttgatggacgggggttacattaacaacctccccgctgacattgccaggtctatgggggcaaaaacagtgatcgccattgacgtgggttcccaagacgaaactgacctatctacttacggggactcgctgtctggatggtggctgctatggaagcgcctaaacccttgggctgataaggtcaaggtgcctgacatggctgaaatccaatcccgcctggcttatgtctcctgcgtgagacagctggaagttgtcaaaagtagtagctattgcgagtaccttaggccgcctatagactgcttcaagacgatggactttggcaagttcgaccagatctatgatgttggttatcagtacgggaaggccgtgttcgggggttggtcccggggtaacgtgattgagaagatgcttacagatcgcagatcaaccgatctgaacgaaagtcgccgagctgatgttttagccttcccatcatctggctttacggacctggctgagattgtgtcacggattgaaccacccaccagttacgtgtcggacggttgcgccgacggggaagagtcagactgcttaactgaatacgaggaggacgcgggacccgactgctcccgagatgagggcggtagcccagaaggagcttctccatctactgccagtgagatggaagaagagaagagcatattacgacagcggcgatgcctgcctcaggagcccccagggtcagccaccgatgcttag

SEQ ID NO: 64389 - DNA, 1371 bp, Artificial Sequence
  derived and/or modified sequence
atgaggaaagtctcccagagcacatcttctctcgtagacacttcggtctccgccacctctcggccaagaatgaggaaaaagttgaagatgctcaatatcgccaaaaaaatactcaggatccagaaggagacacccaccctccaacgaaaagagccccctccggcagttctcgaggcagatctgactgaaggagacctggctaactcacacttgccaagcgaggtgctgtacatgctaaaaaacgtacgggtgctcggtcacttcgaaaagccactcttcctcgagctctgtcgccacatggtatttcaacgactggggcagggagactacgtcttccgtcctggccagcccgacgccagcatatacgtggtgcaagatggtctgttggagctgtgtctcccgggaccagatggaaaggagtgtgttgtcaaggaggtcgtgcccggagatagcgtcaactctctgctgtctatcctggacgttatcaccggacatcaacacccacagagaactgtgtccgcccgagccgctagagactctacagttctccgcctccctgtcgaagccttctcggccgtcttcacaaaataccctgaatcgctggtccgtgtggttcagatcataatggttcggttgcagcgagtcacgttcctcgctctgcacaactacctgggcctgaccaacgagcttttcagccacgaaatccaacctttgagactgtttccgtcacccggactgccaacacgaacctccccagtcagaggctctaagaggatggtctctacatcggctaccgacgagcccagagagacacctggtagaccccctgaccctaccggggctcccttgcccggtcccaccggcgatcctgtcaagccaacttcactcgaaaccccatctgcgccactgctcagccgatgcgtgagcatgcctggcgacatttctgggctgcaggggggtcctaggagtgacttcgatatggcgtacgagcggggaagaatttccgtttcattgcaggaagaggcaagtgggggttctttggcagctcctgctaggacgccaactcaggagccaagggaacagccggctggggcttgcgagtactcctactgcgaagatgaatcagccacgggtggatgtcctttcgggccataccaggggaggcagaccagctccatttttgaagcagctaagcaggaactggccaagctgatgcgaattgaggacccgagtctgcttaatagtagagttttactccaccatgccaaagccggaacgattatcgctagacaaggcgaccaggacgtgagcggtcctcacacggggcttacctgtcccgagagagggtgtagtgtcgcgttgatgacctag

SEQ ID NO: 64390 - DNA, 1371 bp, Artificial Sequence
  derived and/or modified sequence
atgagaaaggtgagccagagcaccagcagcctggtggacaccagcgtgagcgccaccagcagacccagaatgagaaagaagctgaagatgctgaacatcgccaagaagatcctgagaatccagaaggagacccccaccctgcagagaaaggagcccccccccgccgtgctggaggccgacctgaccgagggcgacctggccaacagccacctgcccagcgaggtgctgtacatgctgaagaacgtgagagtgctgggccacttcgagaagcccctgttcctggagctgtgcagacacatggtgttccagagactgggccagggcgactacgtgttcagacccggccagcccgacgccagcatctacgtggtgcaggacggcctgctggagctgtgcctgcccggccccgacggcaaggagtgcgtggtgaaggaggtggtgcccggcgacagcgtgaacagcctgctgagcatcctggacgtgatcaccggccaccagcacccccagagaaccgtgagcgccagagccgccagagacagcaccgtgctgagactgcccgtggaggccttcagcgccgtgttcaccaagtaccccgagagcctggtgagagtggtgcagatcatcatggtgagactgcagagagtgaccttcctggccctgcacaactacctgggcctgaccaacgagctgttcagccacgagatccagcccctgagactgttccccagccccggcctgcccaccagaaccagccccgtgagaggcagcaagagaatggtgagcaccagcgccaccgacgagcccagagagacccccggcagaccccccgaccccaccggcgcccccctgcccggccccaccggcgaccccgtgaagcccaccagcctggagacccccagcgcccccctgctgagcagatgcgtgagcatgcccggcgacatcagcggcctgcagggcggccccagaagcgacttcgacatggcctacgagagaggcagaatcagcgtgagcctgcaggaggaggccagcggcggcagcctggccgcccccgccagaacccccacccaggagcccagagagcagcccgccggcgcctgcgagtacagctactgcgaggacgagagcgccaccggcggctgccccttcggcccctaccagggcagacagaccagcagcatcttcgaggccgccaagcaggagctggccaagctgatgagaatcgaggaccccagcctgctgaacagcagagtgctgctgcaccacgccaaggccggcaccatcatcgccagacagggcgaccaggacgtgagcggcccccacaccggcctgacctgccccgagagaggctgcagcgtggccctgatgacctag

SEQ ID NO: 64391 - protein, 456 aa, Artificial Sequence
  derived and/or modified sequence
MRKVSQSTSSLVDTSVSATSRPRMRKKLKMLNIAKKILRIQKETPTLQRKEPPPAVLEADLTEGDLANSHLPSEVLYMLKNVRVLGHFEKPLFLELCRHMVFQRLGQGDYVFRPGQPDASIYVVQDGLLELCLPGPDGKECVVKEVVPGDSVNSLLSILDVITGHQHPQRTVSARAARDSTVLRLPVEAFSAVFTKYPESLVRVVQIIMVRLQRVTFLALHNYLGLTNELFSHEIQPLRLFPSPGLPTRTSPVRGSKRMVSTSATDEPRETPGRPPDPTGAPLPGPTGDPVKPTSLETPSAPLLSRCVSMPGDISGLQGGPRSDFDMAYERGRISVSLQEEASGGSLAAPARTPTQEPREQPAGACEYSYCEDESATGGCPFGPYQGRQTSSIFEAAKQELAKLMRIEDPSLLNSRVLLHHAKAGTIIARQGDQDVSGPHTGLTCPERGCSVALMT

SEQ ID NO: 64392 - protein, 359 aa, Artificial Sequence
  derived and/or modified sequence
MSYRRELEKYRDLDEDEILGALTEEELRTLENELDELDPDNALLPAGLRQKDQTTKAPTGPFKREELLDHLEKQAKEFKDREDLVPYTGEKRGKVWVPKQKPLDPVLESVTLEPELEEALANASDAELCDIAAILGMHTLMSNQQYYQALSSSSIMNKEGLNSVIKPTQYKPVPDEEPNSTDVEETLERIKNNDPKLEEVNLNNIRNIPIPTLKAYAEALKENSYVKKFSIVGTRSNDPVAYALAEMLKENKVLKTLNVESNFISGAGILRLVEALPYNTSLVEMKIDNQSQPLGNKVEMEIVSMLEKNATLLKFGYHFTQQGPRLRASNAMMNNNDLVRKRRLADLTGPIIPKCRSGV

SEQ ID NO: 64393 - protein, 232 aa, Artificial Sequence
  derived and/or modified sequence
MSQVLSILGMHTLMSNQQYYQALSSSSIMNKEGLNSVIKPTQYKPVPDEEPNSTDVEETLERIKNNDPKLEEVNLNNIRNIPIPTLKAYAEALKENSYVKKFSIVGTRSNDPVAYALAEMLKENKVLKTLNVESNFISGAGILRLVEALPYNTSLVEMKIDNQSQPLGNKVEMEIVSMLEKNATLLKFGYHFTQQGPRLRASNAMMNNNDLVRKRRLADLTGPIIPKCRSGV

SEQ ID NO: 64394 - DNA, 699 bp, Artificial Sequence
  derived and/or modified sequence
atgagccaggtgctgagcatcctgggcatgcacaccctgatgagcaaccagcagtactaccaggccctgagcagcagcagcatcatgaacaaggagggcctgaacagcgtgatcaagcccacccagtacaagcccgtgcccgacgaggagcccaacagcaccgacgtggaggagaccctggagagaatcaagaacaacgaccccaagctggaggaggtgaacctgaacaacatcagaaacatccccatccccaccctgaaggcctacgccgaggccctgaaggagaacagctacgtgaagaagttcagcatcgtgggcaccagaagcaacgaccccgtggcctacgccctggccgagatgctgaaggagaacaaggtgctgaagaccctgaacgtggagagcaacttcatcagcggcgccggcatcctgagactggtggaggccctgccctacaacaccagcctggtggagatgaagatcgacaaccagagccagcccctgggcaacaaggtggagatggagatcgtgagcatgctggagaagaacgccaccctgctgaagttcggctaccacttcacccagcagggccccagactgagagccagcaacgccatgatgaacaacaacgacctggtgagaaagagaagactggccgacctgaccggccccatcatccccaagtgcagaagcggcgtgtag

SEQ ID NO: 64395 - DNA, 1080 bp, Artificial Sequence
  derived and/or modified sequence
atgtcctaccgcagggaactcgaaaaatatcgggacttagacgaagatgaaattttgggagctctgacagaagaggagctgcggacactcgagaatgaactcgatgaactcgaccctgataacgctttattacccgcaggtctgaggcagaaggaccagactactaaggcacctacgggcccgttcaagagggaagaattgctcgatcatctggaaaaacaggccaaagaattcaaggacagagaggaccttgtcccctatactggcgaaaagcggggcaaggtgtgggtgccaaagcagaaacctttagatccggtgctcgagtctgtgaccttggaacctgaattagaggaggccctggccaacgcctcagacgctgaactatgcgacatagccgccatattgggcatgcacacactgatgtctaatcagcagtactatcaggcgttaagcagcagctctattatgaataaagagggcctaaactccgtgatcaagcctactcagtacaagcctgttccagacgaagaaccaaactctactgatgtagaagaaacactggagcgtatcaaaaataatgaccctaagttagaagaagttaacctgaataatattaggaacattcccatccctactctgaaagcgtatgctgaggctctgaaggaaaatagctatgtcaagaagttttctatcgtgggcacgaggtctaacgacccagtcgcatacgcactggcggaaatgcttaaggaaaacaaagtgttgaaaaccctgaacgtcgagtccaattttattagtggtgccggcatcctcaggctggtggaagccctgccatacaacacaagtctagttgagatgaagattgacaaccaaagccagcctttaggtaacaaagtggagatggaaatcgtgtccatgcttgaaaaaaatgcgactctcctgaaatttgggtaccacttcacacagcaagggccccggcttagagcctctaatgccatgatgaataataatgatttagtcagaaaaaggagattggccgatctcaccggtcctattatccctaagtgcaggtccggcgtgtag

SEQ ID NO: 64396 - DNA, 699 bp, Artificial Sequence
  derived and/or modified sequence
atgtcacaggttctgtctatcctcggaatgcacacactgatgtcaaatcagcagtattaccaggcgctgtccagtagcagtattatgaacaaggagggactcaacagcgttataaaacctactcaatataaacccgtcccggatgaagagccaaactctacagacgtggaggagaccttggaacgcattaaaaacaatgaccccaagcttgaagaggtcaatctgaataatattaggaatatccccattcctacacttaaggcctacgcagaagcgctgaaggagaatagttatgtgaaaaagtttagtattgtcggtacccgcagcaatgaccccgttgcctatgcccttgcagaaatgttaaaggagaataaagtcctcaaaaccctcaatgttgaatctaactttatcagcggagccggaattcttcgactcgtggaagcattgccctataacacctcgcttgtggagatgaagatcgataaccaatcccagcctctaggcaacaaagtggaaatggagatcgtgagtatgctcgagaagaacgctacactcctgaaattcggataccactttactcaacagggcccacgcctgcgcgcaagcaatgcgatgatgaacaacaacgacctagtgagaaagcgccgactggctgatttgaccggtcccatcattcccaagtgtcggtctggggtctag

SEQ ID NO: 64397 - DNA, 1080 bp, Artificial Sequence
  derived and/or modified sequence
atgagctacagacgtgaactggagaaatatcgggatctcgacgaggacgagattcttggtgctctaactgaagaggagttgcggaccctagagaatgagctggacgagttggaccccgacaatgcactccttcccgccggccttcggcaaaaggaccagacaacaaaagcccctactggtccgtttaaaagggaggaactgctggaccacttggagaaacaggccaaagaattcaaagaccgggaggaccttgtgccctataccggcgaaaaaagaggcaaagtgtgggttcctaaacagaagcccctggacccggtcttggaatctgtaactcttgaacccgaactggaggaggccctggcaaatgccagcgacgcagaattgtgcgatatagccgcaatcctgggcatgcacacgttaatgtcaaatcagcaatactatcaagcactgagctcaagctctattatgaataaagaaggtctaaactctgtgattaagcccacccagtataagccagttccggatgaagagccaaactccacggatgtggaggagaccctcgagagaattaaaaacaatgaccctaagctggaagaagtcaatctaaacaacattcggaacattcctataccaaccctcaaggcctacgctgaagcattgaaagaaaattcatatgttaaaaaattctctatcgtcggaactcggtccaacgatcccgtagcctatgccctggctgagatgctgaaggagaacaaagtactgaagactttaaacgtggagagcaatttcatctcaggtgcgggaatactgcgactcgtcgaagctctgccatataatactagtctcgttgagatgaaaatcgacaatcagtcgcagccactggggaacaaggtggaaatggagatcgtgagcatgctcgaaaaaaacgcaacactgctgaagtttggctatcattttacccaacaaggtcccagactgcgtgcatccaatgcgatgatgaataacaatgacctggtacggaagcggagactcgctgacctaaccggaccaattatcccaaagtgccgttccggcgtctag

SEQ ID NO: 64398 - DNA, 1080 bp, Artificial Sequence
  derived and/or modified sequence
atgagctaccgccgggagctggagaagtacagagacctggatgaagatgagatcctgggcgccctgacagaggaggagctgcggaccctggagaatgagctggatgagctggaccctgacaatgccctgctgcctgctggcctgcggcagaaggaccagaccaccaaggcccccaccggccccttcaagcgggaggagctgctggaccacctggagaagcaggccaaggagttcaaggaccgggaggacctggtgccctacaccggggagaagaggggcaaggtgtgggtgcccaagcagaagcccctggaccctgtgctggagagcgtgaccctggagcctgagctggaggaggccctggccaatgccagtgatgctgagctgtgtgacattgctgccatcctgggcatgcacaccctgatgagcaaccagcagtactaccaggccctgagcagcagcagcatcatgaacaaggagggcctgaacagcgtcatcaagcccacccagtacaagcctgtgcctgatgaggagcccaacagcacagatgtggaggagaccctggagcgcatcaagaacaatgaccccaagctggaggaggtgaacctgaacaacatccggaacatccccatccccaccctgaaggcctatgcagaggccctgaaggagaacagctatgtgaagaagttcagcatcgtgggcaccaggagcaatgaccctgtggcctatgccctggccgagatgctgaaggagaacaaggtgctgaagaccctgaatgtggagagcaacttcatctctggagctggcatcctgcggctggtggaggccctgccctacaacaccagcctggtggagatgaagattgacaaccagagccagcccctgggcaacaaggtggagatggagatcgtgtccatgctggagaagaatgccaccctgctgaagtttggctaccacttcacccagcagggcccccggctgcgggccagcaatgccatgatgaacaacaatgacctggtgaggaagaggcggctggccgacctgaccggccccatcatccccaagtgccgctctggagtgtag

SEQ ID NO: 64399 - DNA, 2516 bp, Artificial Sequence
  derived and/or modified sequence
gtgccaggtcagagctgcaactctgtgctacgtttctgtgtggctttcttgaaactacttctctttatttttgttggcgtggctatttattgttatctgtaacgacgcaatatgctgccgaagtctgggaaggagaggggagctgtaagtctacaccagtgttaactggctaaccttggatgcctgtcatttgatgttggacatttgaaagatggcagcatctctggggaaggagggactgaacacttttgaccacctaccatgtcccaggttctatcgatcctgggcatgcacacgctcatgagtaaccagcagtactaccaggccctgagcagcagctccatcatgaacaaggaggggctcaacagcgtgattaaacccacacaatacaagcctgtgcccgacgaagaaccaaattcaacagacgtagaggaaacgctggaacggataaagaacaacgacccaaaacttgaagaagttaacctcaataatatccggaatatccccatccccaccctcaaggcatatgcagaagccctgaaagaaaactcatatgtgaagaagttcagcatcgtggggacacggagtaatgaccccgtggcgtatgcccttgctgagatgctcaaggagaacaaggtgttgaagacactgaatgtggaatccaacttcatttctggagctgggattctgcgcctggtagaagccctcccatacaacacttctctggtggaaatgaaaattgacaaccagagccagcccctgggcaacaaagtggaaatggagattgtgagcatgttggaaaaaaacgcaacacttctcaaattcggctaccactttacccagcaaggaccccggcttcgggcatccaacgcaatgatgaacaacaatgaccttgtgaggaagaggaggcttgcggacctgactgggcccatcattcccaagtgccggagtggtgtctagtgtgtggcggtggagtccatgcctttgaactggatgtgttctattgatgacctgtgctctgcaggggaaaccagaaggcaaaatgctggcagcatgaaacccttttgtggttcagttctttatgcactaaggttttaggttgactagtggttgtagttgaaaattttataaaataccgttaatgtgaagtttttctttagtcacagaagttgaatctggttattatttaaaaactagaagcccccaaaccagcagatcttactgaagatgatgttccagcagcagcgacttagccccaggagcccagtttcaatggccttgctgtgtggtgtttcaagtgcatttaaaatgtgtgacacagaaacggcacactcttccacatgcttttgaagtattataaaacactttattacaaatttgtcttagctattagcaaataaaactgattatcattctttattaaccctccttggaattttgaaaacctcgattaaagttgccaaattgattactggatccagaacacaattttcccctcagaacagatagacagactgaagccactgaactctgccaggagtcaacatgagattccttttgctggatatgcagaaatgataggaaaaaaaccaatggtgaaatttcaagtttcaaaaaccaacctttcattaccaatcccaggcaacaaacatgtccctgagtgttctttaagaacatttgggatttatgtacaatttaatactggagttagaactttttccttattgaatgccaaccttatgatggatgtgaaaatctacggccaaatacttttgaaaacacctttctatattgcacagtgggcaaatggcttatgtgaggtaagacactagagggataaatttccagatcaacatggctatggtatttagtaatggcccagcttagagacttcagctactgatctcatcacttattagacaaattgctgctgaccttacgcctgtatattaagcctccgcaggatgccggacaatggtgaagaaactccagatatcaaggaattgggaaatcctggccaaaccaccccaagatgattacactgaaatgtagtattagtactgctgccagatctctttttaacatcatgtgcgtctcttgggatccagcaaaagtgttaagccacaatgcccttgtgccttttaatataccacagtgccagttaaactaatatttttgtttgttgcttttgggagttattttcattagtgatttcagcaaatctcatgataaaggacaaggtcaagaactccagagcactgagcagagaggctggtgatgaaaaggtgaaggcctgcgcactgaactgtaaggcagtgggcagtacagggtaactggaggcggggccagggcctcagcgctatggaagagtgtccactgaggctgcacatggcccaggagtggcaccatgttgcagggacaaccatccccatttggcttctccttaaaacacaattgcagctgcattctgcatcgctgaaaactgcaatataatattaaatctgttggtctatgca

SEQ ID NO: 64400 - DNA, 699 bp, Artificial Sequence
  derived and/or modified sequence
atgagccaggtgctgagcatcctgggcatgcacaccctgatgagcaaccagcagtactaccaggccctgagcagcagcagcatcatgaacaaggagggcctgaacagcgtcatcaagcccacccagtacaagcctgtgcctgatgaggagcccaacagcacagatgtggaggagaccctggagcgcatcaagaacaatgaccccaagctggaggaggtgaacctgaacaacatccggaacatccccatccccaccctgaaggcctatgcagaggccctgaaggaaaattcctatgtgaagaagttcagcatcgtgggcaccaggagcaatgaccctgtggcctatgccctggccgagatgctgaaggagaacaaggtgctgaagaccctgaatgtggagagcaacttcatcagcggggccggcatcctgcggctggtggaggccctgccctacaacaccagcctggtggagatgaagattgacaaccagagccagcccctgggcaacaaggtggagatggagatcgtgtccatgctggagaagaatgccaccctgctgaagtttggctaccacttcacccagcagggcccccggctgcgggccagcaatgccatgatgaacaacaatgacctggtgaggaagaggcggctggccgacctgaccggccccatcatccccaagtgccgcagcggcgtgtag

SEQ ID NO: 64401 - DNA, 1080 bp, Artificial Sequence
  derived and/or modified sequence
atgagctaccggcgggagctggagaagtaccgggacctggacgaggatgagatcctgggtgccttgactgaggaagagctgcggactctcgagaacgagttggacgagcttgaccccgacaacgcattgctgccggctggccttcgtcaaaaagaccaaacgactaaagcccctaccggtcctttcaagcgcgaagaactcctagatcacttagagaagcaggcgaaggagtttaaggacagggaagacttagtcccttacactggcgagaaaagggggaaagtctgggtcccgaaacagaagcccctggaccctgtgctagaaagcgtcacactagagccagagctcgaagaggctcttgccaacgcatctgatgccgagctgtgcgacatcgctgccatattaggaatgcacacactcatgtccaaccaacagtattatcaggccctatcttcctcctccataatgaacaaggaaggcctgaactctgtaattaaacccacacagtataagccggtgcctgacgaggaaccaaatagcactgacgtagaggagaccctcgagcgaatcaagaataatgaccccaaacttgaagaggtgaacttgaacaatattagaaacattcccattcccacactgaaggcctacgcggaagctctgaaagaaaattcctatgtgaagaaattcagcattgttggcacaagaagcaacgacccagtcgcatacgccctggcagagatgttgaaagaaaacaaggtgttgaagactttgaatgtcgagtcaaacttcatttctggagccggaatactccgtctcgtggaagccttgccctacaatacaagcctcgtcgagatgaaaatagataatcaaagtcagcccttaggcaacaaggttgagatggaaatagtatccatgctggaaaaaaacgcaaccctgctgaagttcgggtaccactttacccagcagggccctaggctacgagcctccaatgcaatgatgaataataacgatttggtccgcaagcgtcgcctggcagacttaaccggccctataattcccaagtgtagaagcggggtttag

SEQ ID NO: 64402 - DNA, 3259 bp, Artificial Sequence
  derived and/or modified sequence
agacaaaacgatcgcggttaaagcttgcggctcagagcccacctggccgcgctgctgggaaacggacggagcggcgcttcaatcagaggtattactcagcacagaaattcaggagacacagacaagttcttccacgatgtcgtacagacgagaactagagaaataccgtgacctggatgaagatgaaatccttggagccctaacagaggaagagctgaggaccctggaaaatgagctggatgagctggaccctgataatgcactgctgcctgcaggcctgaggcagaaggatcagaccaccaaggcgcccacgggcccctttaaaagagaggagctcttggatcacttggaaaagcaagcaaaggagtttaaggaccgagaagatctggtcccctacacaggggaaaaacgaggaaaggtctgggttcctaagcagaagccactggatcctgtgctggaaagtgtgacgctggaaccggagctggaggaagccttggcaaatgcttcagatgcagaactctgtgacattgcagcgatcctgggcatgcacacgctcatgagtaaccagcagtactaccaggccctgagcagcagctccatcatgaacaaggaggggctcaacagcgtgattaaacccacacaatacaagcctgtgcccgacgaagaaccaaattcaacagacgtagaggaaacgctggaacggataaagaacaacgacccaaaacttgaagaagttaacctcaataatatccggaatatccccatccccaccctcaaggcatatgcagaagccctgaaagaaaactcatatgtgaagaagttcagcatcgtggggacacggagtaatgaccccgtggcgtatgcccttgctgagatgctcaaggagaacaaggtgttgaagacactgaatgtggaatccaacttcatttctggagctgggattctgcgcctggtagaagccctcccatacaacacttctctggtggaaatgaaaattgacaaccagagccagcccctgggcaacaaagtggaaatggagattgtgagcatgttggaaaaaaacgcaacacttctcaaattcggctaccactttacccagcaaggaccccggcttcgggcatccaacgcaatgatgaacaacaatgaccttgtgaggaagaggaggcttgcggacctgactgggcccatcattcccaagtgccggagtggtgtctagtgtgtggcggtggagtccatgcctttgaactggatgtgttctattgatgacctgtgctctgcaggggaaaccagaaggcaaaatgctggcagcatgaaacccttttgtggttcagttctttatgcactaaggttttaggttgactagtggttgtagttgaaaattttataaaataccgttaatgtgaagtttttctttagtcacagaagttgaatctggttattatttaaaaactagaagcccccaaaccagcagatcttactgaagatgatgttccagcagcagcgacttagccccaggagcccagtttcaatggccttgctgtgtggtgtttcaagtgcatttaaaatgtgtgacacagaaacggcacactcttccacatgcttttgaagtattataaaacactttattacaaatttgtcttagctattagcaaataaaactgattatcattctttattaaccctccttggaattttgaaaacctcgattaaagttgccaaattgattactggatccagaacacaattttcccctcagaacagatagacagactgaagccactgaactctgccaggagtcaacatgagattccttttgctggatatgcagaaatgataggaaaaaaaccaatggtgaaatttcaagtttcaaaaaccaacctttcattaccaatcccaggcaacaaacatgtccctgagtgttctttaagaacatttgggatttatgtacaatttaatactggagttagaactttttccttattgaatgccaaccttatgatggatgtgaaaatctacggccaaatacttttgaaaacacctttctatattgcacagtgggcaaatggcttatgtgaggtaagacactagagggataaatttccagatcaacatggctatggtatttagtaatggcccagcttagagacttcagctactgatctcatcacttattagacaaattgctgctgaccttacgcctgtatattaagcctccgcaggatgccggacaatggtgaagaaactccagatatcaaggaattgggaaatcctggccaaaccaccccaagatgattacactgaaatgtagtattagtactgctgccagatctctttttaacatcatgtgcgtctcttgggatccagcaaaagtgttaagccacaatgcccttgtgccttttaatataccacagtgccagttaaactaatatttttgtttgttgcttttgggagttattttcattagtgatttcagcaaatctcatgataaaggacaaggtcaagaactccagagcactgagcagagaggctggtgatgaaaaggtgaaggcctgcgcactgaactgtaaggcagtgggcagtacagggtaactggaggcggggccagggcctcagcgctatggaagagtgtccactgaggctgcacatggcccaggagtggcaccatgttgcagggacaaccatccccatttggcttctccttaaaacacaattgcagctgcattctgcatcgctgaaaactgcaatataatattaaatctgttggtctatgcatggctgcgtatgtgtttcttggaacctgtgtgacagggacatgtgcctggcacactggccagaagactgggcagccaccatggcagtgctggatgacctcagtaagaatgtgtcatgtattccaggtgctgatctaaaaactgtggctcaaatgtcaccgagcttatatgaagctcccagagagaacatttaaaagctcagagagtaagtgctggggaaagcagagctatcagaggaaatctctcatagaaacgaaaccaaaccaacagaaaatgaagaaggccacatctttaaggccacctctgcctctatcagatgagctgctggtctagatcaggggctggcaaacttttctgtaaaaggccagacagtaaaaatttccgattttgcaggccacatagtgtctgttgcaactattcaactctgccatagatcatgtgtaaaggaatgggtgtggctgttcaataaactatacagttgacccttg

SEQ ID NO: 64403 - DNA, 699 bp, Artificial Sequence
  derived and/or modified sequence
atgagccaggtgctgagcatcctgggcatgcacaccctgatgagcaaccagcagtattaccaggctctgtctagctcaagcataatgaataaagagggtctgaactccgtgattaaacctacccagtataagccggtcccggacgaggagcctaatagtacagacgttgaggagaccctggagcgcatcaaaaataatgatcccaaactggaagaggtgaacttgaacaatatcaggaacattcccatcccaacattgaaagcttatgccgaggcccttaaggagaactcctacgtgaaaaaattttccattgtggggacccgctccaatgaccctgtcgcatacgccctggctgagatgctgaaggaaaataaggtgctcaaaacacttaacgtcgagagcaattttatatcaggggcaggtatcttaagactggtggaagcacttccctataatacttcacttgtcgagatgaaaattgataatcagagccaacctcttgggaataaggtggaaatggagatagtaagtatgctggagaagaacgctaccctcctgaagtttgggtatcacttcacccaacagggaccacgtctccgagcttccaatgctatgatgaacaataacgatttggtgcggaagagaaggctggccgatctgaccggccccatcatcccaaagtgccgaagtggcgtgtag

SEQ ID NO: 64404 - DNA, 1080 bp, Artificial Sequence
  derived and/or modified sequence
atgagctaccggcgggagctggagaagtaccgggacctggacgaggacgagattctcggcgccctgaccgaagaggaactgaggaccctggaaaacgaattagacgaattggatcccgacaacgctttgttgccagccggcctgcgccaaaaagaccagaccacgaaagctcccactggaccctttaagagagaagagctgctggaccacttagagaagcaggcgaaggaatttaaagatagggaggacctcgttccctatactggcgagaagaggggcaaagtctgggtgccgaaacagaagcccctcgatcccgtgcttgagagcgtgacactagaacccgagcttgaggaggcgttagcaaatgcatctgacgcagaactgtgcgacatcgcggccatcctgggcatgcacacactcatgagtaatcagcagtactaccaagccctgtcctcctcctcaataatgaataaggagggtttgaattctgtgatcaagccaactcagtacaagcccgtcccggatgaagaacccaacagcaccgatgtagaggagactttggagaggattaagaacaacgacccgaagcttgaggaggtgaatctcaacaacataaggaatatacccatcccaactcttaaagcatacgctgaagcactgaaagagaactcctacgtcaagaaattctccatcgttggaactaggagcaacgatcccgtggcttatgcgctcgcagagatgctgaaagaaaacaaagtgctcaagacgctgaacgttgagagtaattttatttccggcgctggcatcctgagactggtcgaagccctgccctacaatacctctctcgtggagatgaagattgacaatcagagccagcctttgggcaataaggtggagatggaaattgtgagcatgttggagaagaacgccacacttctgaaatttggctatcacttcacccaacaagggccccgactcagagcctcaaatgctatgatgaacaacaatgatctggtgagaaagaggaggctggcagacctgactggtccaattatccctaaatgccggtcgggggtttag

SEQ ID NO: 64405 - DNA, 1080 bp, Artificial Sequence
  derived and/or modified sequence
atgtcatatcgcagggagctggaaaagtaccgggacctggatgaggacgaaatcctcggggcattgactgaggaggagttgcgcactctcgaaaatgaactggacgagctggatcccgataacgccctgctgcccgcaggcctccggcagaaggaccaaacgaccaaggcacctactggtccatttaaacgcgaggagctgctggaccacctggagaaacaagcgaaagaattcaaagacagggaagatttggtgccctataccggcgagaagagaggaaaggtgtgggtgccaaaacagaaacccctggaccccgtactggagtcagttacactggagcccgaactcgaagaggccctggcaaacgcaagcgacgccgagctgtgcgatatcgctgccatcctgggcatgcacacgctcatgagtaaccagcagtactaccaagcactgtcatcctcgagcattatgaataaagaaggtttaaacagtgtgataaagcccacacaatacaaacctgtccccgacgaggaacccaattctacagacgtagaagaaacactggagaggataaaaaataatgatcccaagctggaggaagtgaatcttaacaatattagaaatatccctatacccacactgaaggcgtacgcagaggcattgaaggaaaattcgtatgtgaaaaaattcagcatcgtgggtacccgaagcaacgatcccgtggcctacgcactcgctgagatgctcaaagagaataaggtcctgaagacccttaatgtagaatcaaacttcattagtggcgcaggaattcttaggttggtggaagcactcccttacaatacaagcctcgtggagatgaagatcgacaatcagagtcagcctctgggcaataaggtggagatggaaattgtttcaatgcttgagaagaacgcaacgttgcttaagttcggttatcattttactcagcaggggcctcgcctgagggctagtaacgctatgatgaataacaacgatctagtgaggaaacgaagactggcagatctcactggtcctatcattcctaagtgtaggtcaggcgtctag

SEQ ID NO: 64406 - DNA, 699 bp, Artificial Sequence
  derived and/or modified sequence
atgtctcaagttctgagtattctaggcatgcatactttgatgtctaaccagcagtattaccaggctctgtcatccagcagcatcatgaataaagagggactaaattcggtgatcaagccaacccagtataagcccgtccccgacgaggagccgaatagcaccgacgttgaggaaacactggagcggatcaaaaacaacgacccaaaactggaggaggtaaacctaaacaacatccgcaacattcccatccctacattaaaggcttatgctgaggccttgaaggagaatagttacgttaagaaattttctatagtggggactagatctaatgatcccgtcgcctacgcgttggccgagatgctgaaggaaaacaaagtgcttaagactttgaacgtggaatctaatttcattagcggagccggaatcctgagactcgtggaagcgctgccgtacaacacaagtctcgtggagatgaagatcgacaaccaaagtcagccactgggtaacaaagtagagatggagatcgtgtccatgcttgagaagaacgctaccctgctaaagtttggctaccactttacacaacaaggaccaaggctgcgtgctagcaatgctatgatgaataataacgacttggtacggaaaagacggctcgctgacctgactggtcccatcattcctaaatgccggtcaggggtgtag

SEQ ID NO: 64407 - DNA, 1080 bp, Artificial Sequence
  derived and/or modified sequence
atgtcataccgccgagagctcgaaaaataccgcgacctagacgaagacgaaattttgggcgctctgaccgaggaggaacttcgcactctcgaaaacgagctggatgaactcgacccggacaacgcacttttacctgcagggcttcgccagaaggatcagaccactaaagctcccaccggcccattcaaaagggaggaactcctggatcatttggaaaagcaagcaaaggaatttaaagaccgcgaagatctggtcccctataccggtgagaagcggggtaaagtatgggtcccaaagcagaagccattggaccccgtgctggaaagcgtgacgttggaaccagaactggaggaagctctggctaatgctagtgacgcagagctgtgtgatattgccgctatcctaggcatgcacaccctgatgtctaatcaacagtactatcaggccctgagctctagtagcataatgaacaaagaaggactgaactccgtgataaagcccacacaatacaaaccagttcctgacgaggagcccaattccactgatgttgaagaaacattagaaagaatcaagaacaatgacccaaaacttgaagaagtgaaccttaacaacattagaaatatacccatacccacgcttaaggcttacgccgaagctctcaaggagaactcatatgttaaaaagtttagcatcgtggggacccggtccaatgatccagtggcttacgctctcgcggagatgttgaaagagaataaagtactaaagacacttaacgtcgagtccaatttcatttctggcgcagggatcctgcgtctggtggaggctctcccttataatacaagcctggtggagatgaagatcgataaccagagtcagcctctgggcaataaggtggaaatggagattgtcagcatgcttgaaaaaaatgctactctgttgaaatttggctatcattttacacagcaaggaccccgactacgggcttccaacgccatgatgaataacaatgatctggtaagaaaacgacgtctggcagacttgaccggacccattatcccaaagtgtcgatccggtgtctag

SEQ ID NO: 64408 - DNA, 2849 bp, Artificial Sequence
  derived and/or modified sequence
agctcccgcccgcccgcggccgcccgggagctcgtccagccccgcgctgcgctcgcccgcccgctgcccgccggagcaccgcggcctccgcccgcgtccatctgcccgccgcccgcgcctgttccgcagcccgcgtccgcgccggccccacagctctgcgtccgggtattactcagcacagaaattcaggagacacagacaagttcttccacgatgtcgtacagacgagaactagagaaataccgtgacctggatgaagatgaaatccttggagccctaacagaggaagagctgaggaccctggaaaatgagctggatgagctggaccctgataatgcactgctgcctgcaggcctgaggcagaaggatcagaccaccaaggcgcccacgggcccctttaaaagagaggagctcttggatcacttggaaaagcaagcaaaggagtttaaggaccgagaagatctggtcccctacacaggggaaaaacgaggaaaggtctgggttcctaagcagaagccactggatcctgtgctggaaagtgtgacgctggaaccggagctggaggaagccttggcaaatgcttcagatgcagaactctgtgacattgcagcgatcctgggcatgcacacgctcatgagtaaccagcagtactaccaggccctgagcagcagctccatcatgaacaaggaggggctcaacagcgtgattaaacccacacaatacaagcctgtgcccgacgaagaaccaaattcaacagacgtagaggaaacgctggaacggataaagaacaacgacccaaaacttgaagaagttaacctcaataatatccggaatatccccatccccaccctcaaggcatatgcagaagccctgaaagaaaactcatatgtgaagaagttcagcatcgtggggacacggagtaatgaccccgtggcgtatgcccttgctgagatgctcaaggagaacaaggtgttgaagacactgaatgtggaatccaacttcatttctggagctgggattctgcgcctggtagaagccctcccatacaacacttctctggtggaaatgaaaattgacaaccagagccagcccctgggcaacaaagtggaaatggagattgtgagcatgttggaaaaaaacgcaacacttctcaaattcggctaccactttacccagcaaggaccccggcttcgggcatccaacgcaatgatgaacaacaatgaccttgtgaggaagaggaggcttgcggacctgactgggcccatcattcccaagtgccggagtggtgtctagtgtgtggcggtggagtccatgcctttgaactggatgtgttctattgatgacctgtgctctgcaggggaaaccagaaggcaaaatgctggcagcatgaaacccttttgtggttcagttctttatgcactaaggttttaggttgactagtggttgtagttgaaaattttataaaataccgttaatgtgaagtttttctttagtcacagaagttgaatctggttattatttaaaaactagaagcccccaaaccagcagatcttactgaagatgatgttccagcagcagcgacttagccccaggagcccagtttcaatggccttgctgtgtggtgtttcaagtgcatttaaaatgtgtgacacagaaacggcacactcttccacatgcttttgaagtattataaaacactttattacaaatttgtcttagctattagcaaataaaactgattatcattctttattaaccctccttggaattttgaaaacctcgattaaagttgccaaattgattactggatccagaacacaattttcccctcagaacagatagacagactgaagccactgaactctgccaggagtcaacatgagattccttttgctggatatgcagaaatgataggaaaaaaaccaatggtgaaatttcaagtttcaaaaaccaacctttcattaccaatcccaggcaacaaacatgtccctgagtgttctttaagaacatttgggatttatgtacaatttaatactggagttagaactttttccttattgaatgccaaccttatgatggatgtgaaaatctacggccaaatacttttgaaaacacctttctatattgcacagtgggcaaatggcttatgtgaggtaagacactagagggataaatttccagatcaacatggctatggtatttagtaatggcccagcttagagacttcagctactgatctcatcacttattagacaaattgctgctgaccttacgcctgtatattaagcctccgcaggatgccggacaatggtgaagaaactccagatatcaaggaattgggaaatcctggccaaaccaccccaagatgattacactgaaatgtagtattagtactgctgccagatctctttttaacatcatgtgcgtctcttgggatccagcaaaagtgttaagccacaatgcccttgtgccttttaatataccacagtgccagttaaactaatatttttgtttgttgcttttgggagttattttcattagtgatttcagcaaatctcatgataaaggacaaggtcaagaactccagagcactgagcagagaggctggtgatgaaaaggtgaaggcctgcgcactgaactgtaaggcagtgggcagtacagggtaactggaggcggggccagggcctcagcgctatggaagagtgtccactgaggctgcacatggcccaggagtggcaccatgttgcagggacaaccatccccatttggcttctccttaaaacacaattgcagctgcattctgcatcgctgaaaactgcaatataatattaaatctgttggtctatgca

SEQ ID NO: 64409 - DNA, 1080 bp, Artificial Sequence
  derived and/or modified sequence
atgagctacagaagagagctggagaagtacagagacctggacgaggacgagatcctgggcgccctgaccgaggaggagctgagaaccctggagaacgagctggacgagctggaccccgacaacgccctgctgcccgccggcctgagacagaaggaccagaccaccaaggcccccaccggccccttcaagagagaggagctgctggaccacctggagaagcaggccaaggagttcaaggacagagaggacctggtgccctacaccggcgagaagagaggcaaggtgtgggtgcccaagcagaagcccctggaccccgtgctggagagcgtgaccctggagcccgagctggaggaggccctggccaacgccagcgacgccgagctgtgcgacatcgccgccatcctgggcatgcacaccctgatgagcaaccagcagtactaccaggccctgagcagcagcagcatcatgaacaaggagggcctgaacagcgtgatcaagcccacccagtacaagcccgtgcccgacgaggagcccaacagcaccgacgtggaggagaccctggagagaatcaagaacaacgaccccaagctggaggaggtgaacctgaacaacatcagaaacatccccatccccaccctgaaggcctacgccgaggccctgaaggagaacagctacgtgaagaagttcagcatcgtgggcaccagaagcaacgaccccgtggcctacgccctggccgagatgctgaaggagaacaaggtgctgaagaccctgaacgtggagagcaacttcatcagcggcgccggcatcctgagactggtggaggccctgccctacaacaccagcctggtggagatgaagatcgacaaccagagccagcccctgggcaacaaggtggagatggagatcgtgagcatgctggagaagaacgccaccctgctgaagttcggctaccacttcacccagcagggccccagactgagagccagcaacgccatgatgaacaacaacgacctggtgagaaagagaagactggccgacctgaccggccccatcatccccaagtgcagaagcggcgtgtag

SEQ ID NO: 64410 - protein, 42 aa, Artificial Sequence
  derived and/or modified sequence
MPEFQKSSVRIKNPTRVEEIICGLIKGGAAKLQIITDFDMTL

SEQ ID NO: 64411 - DNA, 858 bp, Artificial Sequence
  derived and/or modified sequence
atgccggagtttcagaagtcttccgtgcggatcaaaaatcccacaagggtggaggagatcatttgcggcctgattaagggaggcgctgccaagttgcagattatcaccgattttgatatgaccttaagtagattcagctataaaggtaagaggtgtccgacttgccacaatataattgacaattgcaaacttgtgacagatgagtgccgcaaaaagcttctccagcttaaagagaaatattacgccattgaagtagacccagtcctcacagtagaggaaaaatatccatacatggtggagtggtacactaagagccacggcttactagtacagcaggctcttcccaaagctaagctcaaagagatcgtggcagaaagcgatgtaatgctgaaggagggatacgaaaatttctttgacaaactccaacagcactccatccccgtattcatcttcagcgccggaattggagatgtcctcgaggaagtgataaggcaggcgggagtgtatcaccctaatgttaaggtggtatcgaactttatggatttcgatgagacaggcgtgttgaaaggcttcaagggggagctgattcacgtgttcaataagcacgatggggcgctgcgtaacacggagtacttcaatcaactcaaggacaactccaatataatcttgctgggggactcccaaggggacttgaggatggccgatggcgttgctaacgttgagcatatcctgaagatcggctacttgaacgaccgcgtagacgagcttctagagaagtatatggactcttacgacatcgtccttgtccaggatgagagtttggaagtggctaatagcatactgcagaaaattctgtag

SEQ ID NO: 64412 - DNA, 858 bp, Artificial Sequence
  derived and/or modified sequence
atgcccgaattccaaaagtcatccgtgagaattaagaatcctacccgggtcgaggagatcatttgcggcctgataaaggggggggcagccaaactccaaattatcaccgatttcgacatgactctttctcgattttcttacaaagggaagcgctgccccacctgccataacatcattgataactgtaaactggtcaccgacgagtgccgcaagaagctgttacagctgaaagagaagtactatgcaattgaggttgatccagtgctcacagtcgaggagaaatacccttatatggttgagtggtacacgaaatctcatggtttactcgtgcagcaagcgttgccgaaagcgaaattaaaagagattgtcgcagaatctgacgttatgttgaaggagggttacgagaactttttcgataaactgcagcaacatagcatccctgtatttatattctcggccgggattggtgatgtgctggaggaagtgattaggcaggctggagtgtatcacccaaacgtcaaagtggttagcaattttatggattttgacgaaaccggcgttctgaaaggcttcaagggtgaactgattcatgtgtttaacaaacatgacggcgcactgcgcaacactgagtacttcaatcagttaaaggacaattcaaatatcattctccttggtgactcccagggagatctcagaatggccgatggagtggcaaacgtcgaacacatcctaaagatcggatacctgaacgatcgggtggatgagttgctggaaaaatatatggattcttacgatattgtcttagtgcaggatgagtccttggaggtggccaatagcatccttcagaagatactctag

SEQ ID NO: 64413 - DNA, 129 bp, Artificial Sequence
  derived and/or modified sequence
atgcccgagttccagaagtcctcggtacgaatcaagaaccctacccgggtggaagaaattatatgcgggctgataaaaggcggggctgctaaactgcagatcattacagattttgacatgactttgtag

SEQ ID NO: 64414 - DNA, 858 bp, Artificial Sequence
  derived and/or modified sequence
atgcctgagttccagaagagctctgtgcgcatcaagaaccccaccagggtggaggagatcatctgtggcctcatcaagggcggggccgccaagctgcagatcatcacagactttgacatgaccctgagccgcttctcctacaagggcaagcgctgccccacctgccacaacatcatcgacaactgcaagctggtgacagatgagtgcaggaagaagctgctgcagctgaaggagaagtactatgccatcgaggtggaccctgtgctgactgtggaggagaagtacccctacatggtggagtggtacaccaagagccacggcctgctggtgcagcaggccctgcccaaggccaagctgaaggagatcgtggccgagagtgatgtgatgctgaaggagggctatgagaacttctttgacaagctgcagcagcacagcatccctgtgttcatcttctctgctggcattggagatgtgctggaggaggtgatccggcaggccggcgtgtaccaccccaacgtgaaggtggtgagcaacttcatggactttgatgaaacaggagtgctgaagggcttcaagggggagctgattcatgtgttcaacaagcatgatggagccctgaggaacacagagtacttcaaccagctgaaggacaacagcaacatcatcctgctgggggacagccagggcgacctgaggatggctgatggagtggccaacgtggagcacatcctgaagattggctacctgaatgacagagtggatgagctgctggagaagtacatggacagctatgacatcgtgctggtgcaggatgagagcctggaggtggccaacagcatcctgcagaagatcctgtag

SEQ ID NO: 64415 - DNA, 129 bp, Artificial Sequence
  derived and/or modified sequence
atgcctgagttccagaagagctctgtgcgcatcaagaaccccaccagggtggaggagatcatctgtggcctcatcaagggcggggccgccaagctgcagatcatcacagactttgacatgaccctgtag

SEQ ID NO: 64416 - DNA, 858 bp, Artificial Sequence
  derived and/or modified sequence
atgcccgagttccagaagagcagcgtgcggatcaagaaccccaccagggtggaggaaatcatttgcgggcttattaagggcggggcagcaaagttacagatcatcactgacttcgacatgaccctcagtagatttagctacaagggcaagcgctgtcccacttgccataatatcatcgataattgtaagttagtgacggatgagtgtagaaagaagctgttacagttaaaagaaaaatattatgccattgaggtcgatccagtgctgaccgtcgaagagaaatatccatatatggtcgagtggtatacaaaaagtcacggcctcctggttcagcaggcactgccaaaagctaagctcaaagaaatcgtggcagaaagtgatgttatgctaaaagagggatatgagaacttctttgacaagctgcagcagcattcaatccccgtctttattttcagcgctggcattggtgacgtgctggaagaagtaatcaggcaggccggggtctatcatcccaacgtgaaagtcgtgtctaacttcatggatttcgacgaaaccggggtgctgaaaggctttaaaggtgagctcatccacgtgtttaacaaacatgatggggcgctgagaaatactgagtacttcaatcaattgaaagataacagtaatatcatcctgctgggggactcgcagggagacctgaggatggccgacggggttgccaatgtggaacacatcctcaagattggttatctgaatgaccgggtggatgagctgttagagaaatacatggatagttacgacatcgttctagtacaggacgaatctctcgaagtggccaatagtatcctccagaagatcctttag

SEQ ID NO: 64417 - DNA, 858 bp, Artificial Sequence
  derived and/or modified sequence
atgcccgagttccagaagagcagcgtgcggatcaagaaccccacccgcgtcgaggagatcatctgcggactgatcaaagggggagctgccaagctgcagattattactgactttgacatgacactctcgcgcttcagttataaaggaaaacggtgccccacttgccataacattattgataattgtaaactggttacagatgagtgccggaagaagctgctgcagctgaaagagaagtattatgccattgaagtggaccctgtgcttactgtggaagagaagtacccgtatatggtcgagtggtacacaaagtcgcacggactcctggtgcagcaggccctgcccaaggctaagctaaaagagatagtggctgaatcagacgtcatgctcaaagaaggctacgagaatttcttcgataagctccagcaacattcgataccagtgtttattttctccgctggaattggggacgtgctcgaggaagtaattaggcaggccggcgtctaccaccctaatgtgaaggtggtaagtaacttcatggactttgatgagaccggggtgttgaagggcttcaagggggagttgattcacgtattcaataagcatgatggcgcactgcggaatacggaatattttaatcagctcaaagataacagcaacattatcttgctgggagacagccaaggtgacttgagaatggctgacggcgtggcaaacgtggaacatatcctgaagatcggatacctgaacgatagggtggatgaactattggaaaaatacatggattcttatgatatcgtgctggtccaggacgagtcattagaagtcgccaactccatcctacaaaagatcctatag

SEQ ID NO: 64418 - DNA, 129 bp, Artificial Sequence
  derived and/or modified sequence
atgcccgagttccagaagagcagcgtgcggatcaagaaccccacccgggtggaagaaatcatatgcgggttgatcaagggaggagcagccaagctccagattattaccgactttgacatgactttatag

SEQ ID NO: 64419 - DNA, 858 bp, Artificial Sequence
  derived and/or modified sequence
atgccggagttccagaaatcctccgtacgcatcaaaaaccccaccagagttgaggaaattatatgcggcctcatcaaagggggagccgcaaagctccagatcattacagatttcgatatgacgctgtccagattttcttacaagggaaaacggtgtccaacatgccacaatattattgacaactgcaagttggtgactgatgaatgccggaaaaagctgctgcaactaaaggagaaatattacgcaatcgaggtagatcctgtcctgaccgttgaggagaagtatccttatatggtcgagtggtacacaaagtcccatgggctcctggtgcagcaggccttaccgaaagccaaactgaaagagattgttgcagagtcggacgtgatgctaaaggagggatatgagaatttttttgacaagcttcagcagcattccatcccagtcttcattttcagtgcaggtatcggtgatgtgctcgaggaggttattcggcaggccggagtctaccatcccaatgtgaaagtggtttccaacttcatggatttcgatgaaaccggcgttctcaaaggattcaaaggtgagctgatacacgttttcaacaagcacgatggtgcacttaggaatactgagtatttcaatcagttgaaagataatagcaacataatcctgctaggtgattctcagggcgatctgagaatggctgatggtgtggccaatgtggaacacatcctgaagatcggttatctgaacgaccgagtcgacgagcttcttgagaagtacatggactcctatgacatcgtcttagttcaggacgagtcgctggaggtggccaattcgattcttcaaaagatattgtag

SEQ ID NO: 64420 - DNA, 858 bp, Artificial Sequence
  derived and/or modified sequence
atgccagagttccagaaatcgagcgtcaggattaaaaatcccacacgcgtggaagaaataatctgcggacttatcaagggcggagctgcgaagctccaaatcatcaccgactttgacatgactcttagcaggttcagctacaagggcaagcgctgtcccacttgccacaacatcattgacaattgcaagctggtcacagacgaatgtaggaaaaagctccttcagttaaaggaaaaatactacgctattgaagttgatccagtgctcactgtggaggagaaatatccgtacatggtcgaatggtacacaaaatctcacggcctgcttgttcaacaggcgctgcctaaggccaaactaaaggaaatcgtggccgagtcagatgtgatgcttaaggaaggctacgagaacttctttgacaagcttcaacagcattccatccctgtctttattttctctgccggtatcggggacgtgctggaggaagttataagacaggcaggcgtgtatcatccaaatgtgaaggtcgtctctaatttcatggactttgacgagactggcgtactgaaaggctttaaaggggaacttatccacgtgttcaacaaacacgatggcgctctgaggaacaccgagtatttcaatcaactcaaggacaacagcaatatcatactgctcggagatagccagggcgacttaagaatggctgatggcgtggctaatgtggaacacatccttaagattggatacttgaacgatagggtggatgaactgctcgagaagtacatggattcctacgatattgtgctcgtccaggacgagtctcttgaagttgccaactcaatcctacagaaaattctgtag

SEQ ID NO: 64421 - DNA, 129 bp, Artificial Sequence
  derived and/or modified sequence
atgccagaatttcagaagtcctccgtgcgtatcaaaaaccccaccagagtggaggaaatcatttgtggtctgatcaaggggggagcagccaaacttcagatcataacagatttcgatatgactttgtag

SEQ ID NO: 64422 - DNA, 1635 bp, Artificial Sequence
  derived and/or modified sequence
tttcttttgctggtgtagctcgtccggttaccttcaggaagattggataaccaagaaatgactaatcaagagtctgccgtacatgtgaaaatgtgtagcagaaaccagccttcttcgaagtggtcttggtgtgattctcctatccgttatcaaaaacttgaagctgtgatttgcctgagatgccagaattccagaaaagttcagttcgaatcaagaaccctacaagagtagaagaaattatctgtggtcttatcaaaggaggagctgccaaacttcagataataacggactttgatatgacactcagtagattttcatataaagggaaaagatgcccaacatgtcataatatcattgacaactgtaagctggttacagatgaatgtagaaaaaagttattgcaactaaaggaaaaatattacgctattgaagttgatcctgttcttactgtagaagagaagtacccttatatggtggaatggtatactaaatcacatggtttgcttgttcagcaagctttaccaaaagctaaacttaaagaaattgtggcagaatctgacgttatgctcaaagaaggatatgagaatttctttgataagctccaacaacatagcatccccgtgttcatattttcggctggaatcggcgatgtactagaggaagttattcgtcaagctggtgtttatcatcccaatgtcaaagttgtgtccaattttatggattttgatgaaactggggtgctcaaaggatttaaaggagaactaattcatgtatttaacaaacatgatggtgccttgaggaatacagaatatttcaatcaactaaaagacaatagtaacataattcttctgggagactcccaaggagacttaagaatggcagatggagtggccaatgttgagcacattctgaaaattggatatctaaatgatagagtggatgagcttttagaaaagtacatggactcttatgatattgttttagtacaagatgaatcattagaagtagccaactctattttacagaagattctataaacaagcattctccaagaagacctctctcctgtgggtgcaattgaactgttcatccgttcatcttgctgagagacttatttataatatatccttactctcgaagtgttccctttgtataactgaagtattttcagatatggtgaatgcattgactggaagctccttttctccacctctctcaacacactcctcaccgtatcttttaacccatttaaaaaaaaaaaaaagctaaaattagaaaaataactccctacttttccaaagtgaattttgtagtttaatgttatcatgcagcttttgaggagtcttttacactgggaaagtttgtagaaattttaaaataagttttatgaaatggtgaaataatatgcatgattttaagtattgccatttttgtaatttgggttattatgctgatggtatcaccatctcttgaaattgtgttaggtttggttattttgtctggggaaaaaatatttactggaaaagactagcagttagtgttggaaaaacctggtggtgtttacaatgttgctaatcattacaaaacattctatattgaagcactgataataaatatgaaatgcaaaaccttttt

SEQ ID NO: 64423 - DNA, 306 bp, Artificial Sequence
  derived and/or modified sequence
tttcttttgctggtgtagctcgtccggttaccttcaggaagattggataaccaagaaatgactaatcaagagtctgccgtacatgtgaaaatgtgtagcagaaaccagccttcttcgaagtggtcttggtgtgattctcctatccgttatcaaaaacttgaagctgtgatttgcctgagatgccagaattccagaaaagttcagttcgaatcaagaaccctacaagagtagaagaaattatctgtggtcttatcaaaggaggagctgccaaacttcagataataacggactttgatatgacactca

SEQ ID NO: 64424 - DNA, 858 bp, Artificial Sequence
  derived and/or modified sequence
atgcccgagttccagaagagcagcgtgagaatcaagaaccccaccagagtggaggagatcatctgcggcctgatcaagggcggcgccgccaagctgcagatcatcaccgacttcgacatgaccctgagcagattcagctacaagggcaagagatgccccacctgccacaacatcatcgacaactgcaagctggtgaccgacgagtgcagaaagaagctgctgcagctgaaggagaagtactacgccatcgaggtggaccccgtgctgaccgtggaggagaagtacccctacatggtggagtggtacaccaagagccacggcctgctggtgcagcaggccctgcccaaggccaagctgaaggagatcgtggccgagagcgacgtgatgctgaaggagggctacgagaacttcttcgacaagctgcagcagcacagcatccccgtgttcatcttcagcgccggcatcggcgacgtgctggaggaggtgatcagacaggccggcgtgtaccaccccaacgtgaaggtggtgagcaacttcatggacttcgacgagaccggcgtgctgaagggcttcaagggcgagctgatccacgtgttcaacaagcacgacggcgccctgagaaacaccgagtacttcaaccagctgaaggacaacagcaacatcatcctgctgggcgacagccagggcgacctgagaatggccgacggcgtggccaacgtggagcacatcctgaagatcggctacctgaacgacagagtggacgagctgctggagaagtacatggacagctacgacatcgtgctggtgcaggacgagagcctggaggtggccaacagcatcctgcagaagatcctgtag

SEQ ID NO: 64425 - DNA, 129 bp, Artificial Sequence
  derived and/or modified sequence
atgcccgagttccagaagagcagcgtgagaatcaagaaccccaccagagtggaggagatcatctgcggcctgatcaagggcggcgccgccaagctgcagatcatcaccgacttcgacatgaccctgtag

SEQ ID NO: 64426 - protein, 303 aa, Artificial Sequence
  derived and/or modified sequence
MAEVARQAQTSQEPYHDKAREHPDDGKHPDGGLYNKGPSYSSYSGYIMMPNMNNDPYMSNGSLSPPIPRTSNKVPVVQPSHAVHPLTPLITYSDEHFSPGSHPSHIPSDVNSKQGMSRHPPAPDIPTFYPLSPGGVGQITPPLGWFSHHMIPGPPGPHTTGIPHPAIVTPQVKQEHPHTDSDLMHVKPQHEQRKEQEPKRPHIKKPLNAFMLYMKEMRANVVAECTLKESAAINQILGRRWHALSREEQAKYYELARKERQLHMQLYPGWSARDNYGKKKKRKREKLQESASGTGPRMTAAYI

SEQ ID NO: 64427 - DNA, 912 bp, Artificial Sequence
  derived and/or modified sequence
atggccgaggtggccagacaggcccagaccagccaggagccctaccacgacaaggccagagagcaccccgacgacggcaagcaccccgacggcggcctgtacaacaagggccccagctacagcagctacagcggctacatcatgatgcccaacatgaacaacgacccctacatgagcaacggcagcctgagcccccccatccccagaaccagcaacaaggtgcccgtggtgcagcccagccacgccgtgcaccccctgacccccctgatcacctacagcgacgagcacttcagccccggcagccaccccagccacatccccagcgacgtgaacagcaagcagggcatgagcagacacccccccgcccccgacatccccaccttctaccccctgagccccggcggcgtgggccagatcaccccccccctgggctggttcagccaccacatgatccccggcccccccggcccccacaccaccggcatcccccaccccgccatcgtgaccccccaggtgaagcaggagcacccccacaccgacagcgacctgatgcacgtgaagccccagcacgagcagagaaaggagcaggagcccaagagaccccacatcaagaagcccctgaacgccttcatgctgtacatgaaggagatgagagccaacgtggtggccgagtgcaccctgaaggagagcgccgccatcaaccagatcctgggcagaagatggcacgccctgagcagagaggagcaggccaagtactacgagctggccagaaaggagagacagctgcacatgcagctgtaccccggctggagcgccagagacaactacggcaagaagaagaagagaaagagagagaagctgcaggagagcgccagcggcaccggccccagaatgaccgccgcctacatctag

SEQ ID NO: 64428 - DNA, 912 bp, Artificial Sequence
  derived and/or modified sequence
atggcagaggtggcccgacaggctcagacatctcaggaaccgtaccacgataaggcacgagaacacccagatgacgggaaacaccccgacgggggcctgtacaacaagggaccctcatacagttcctacagcggctatatcatgatgcccaacatgaataatgacccatatatgagcaacggctccttgtctcccccaatacctcgcaccagtaataaagtaccggtagtgcagcctagccacgctgtacatcctctgaccccactgataacttattcggacgagcatttcagccctggatctcatccctcacacattccaagcgatgtcaatagcaagcagggcatgagtcgacacccgcctgcacccgacataccaactttttaccctctgagccccggtggggtcggacagattaccccccccctgggttggttctcccatcacatgattccgggaccaccggggccacacaccactggaatcccccatcctgctatcgtgactccccaggtaaagcaggaacaccctcacaccgattcggatctgatgcacgtgaaaccccaacatgagcagaggaaagaacaggaaccaaaacgcccccatatcaagaaacccctcaacgctttcatgctgtacatgaaggagatgcgggcaaacgttgtggcagaatgcaccctaaaagagagcgcagccatcaaccagattttgggccggcgctggcacgctctcagcagggaagagcaggccaaatattacgagttagcccggaaggagcgccagctgcatatgcagttatacccaggatggagcgccagagacaattatggtaaaaaaaagaaaaggaaaagggaaaaactgcaggaaagcgcctctggcacaggtcccagaatgaccgctgcctacatatag

SEQ ID NO: 64429 - DNA, 912 bp, Artificial Sequence
  derived and/or modified sequence
atggccgaggtggcccggcaggcccagaccagccaggagccctaccatgacaaggcccgggagcacccagatgatggcaagcacccagatggcggcctgtacaacaagggccccagctacagcagctacagcggctacatcatgatgcccaacatgaacaatgacccctacatgagcaatggcagcctgagcccccccatccccaggaccagcaacaaggtgcctgtggtgcagcccagccatgctgtgcaccccctgacccccctcatcacctacagtgatgagcacttcagccctggcagccaccccagccacatccccagtgatgtgaacagcaagcagggcatgagccgccaccccccagccccagacatccccaccttctaccccctgagccctggaggagtgggccagatcaccccacccctgggctggttcagccaccacatgatccctggccccccaggcccccacaccaccggcatcccccacccagccatcgtgaccccccaggtgaagcaggagcacccccacacagacagcgacctgatgcacgtgaagccccagcacgagcagaggaaggagcaggagcccaagaggccccacatcaagaagcccctgaatgccttcatgctgtacatgaaggagatgagggccaacgtggtggccgagtgcaccctgaaggagagcgctgccatcaaccagatcctgggccgccgctggcacgccctgagccgggaggagcaggccaagtactatgagctggccaggaaggagcggcagctgcacatgcagctgtacccaggctggagcgcccgggacaactacggcaagaagaagaagaggaagcgggagaagctgcaggagagcgccagcggcaccggccccaggatgacagctgcctacatctag

SEQ ID NO: 64430 - DNA, 1472 bp, Artificial Sequence
  derived and/or modified sequence
actagtcctgcagggtggaaggcgctttatcgggtcttctggcccgctgcgggcgatagagctggtaacctgagtagagtaaatagagacacgtgggtgctggctagagaaagcgcggagcagggccgcgctggagggctgtttgaagcctagtccagagctggtctagggggcggatggaccctgatacccgacactccactggtcacccttgttccacaactgggaaaccctctggaggaaatccggtagaaaagtcctgacacccgaatgatttaaccaacgccttttccctccaaagaaacttggaggatatacctttttttccttaaatggcatctttctacccccaaaaagaaagtgtgtggttttgagggcggggacattttgggttttaaacagcgcgtttaagaacacctcagatctgccttctctatcccaatggcagaggtggccagacaagcacaaacctctcaggagccctaccacgacaaggccagagaacaccccgatgacggaaagcatccagatggaggcctctacaacaagggaccctcctactcgagttattccgggtacataatgatgccaaatatgaataacgacccatacatgtcaaatggatctctttctccacccatcccgagaacatcaaataaagtgcccgtggtgcagccatcccatgcggtccatcctctcacccccctcatcacttacagtgacgagcacttttctccaggatcacacccgtcacacatcccatcagatgtcaactccaaacaaggcatgtccagacatcctccagctcctgatatccctactttttatcccttgtctccgggtggtgttggacagatcaccccacctcttggctggttttcccatcatatgattcccggtcctcctggtccccacacaactggcatccctcatccagctattgtaacacctcaggtcaaacaggaacatccccacactgacagtgacctaatgcacgtgaagcctcagcatgaacagagaaaggagcaggagccaaaaagacctcacattaagaagcctctgaatgcttttatgttatacatgaaagaaatgagagcgaatgtcgttgctgagtgtactctaaaagaaagtgcagctatcaaccagattcttggcagaaggtggcatgccctctcccgtgaagagcaggctaaatattatgaattagcacggaaagaaagacagctacatatgcagctttatccaggctggtctgcaagagacaattatggtaagaaaaagaagaggaagagagagaaactacaggaatctgcatcaggtacaggtccaagaatgacagctgcctacatctgaaacatggtggaaaacgaagctcattcccaacgtgcaaagccaaggcagcgaccccaggacctcttctggagatggaagcttgttgaaaacccagactgtctccacggcctgcccagtcg

SEQ ID NO: 64431 - DNA, 912 bp, Artificial Sequence
  derived and/or modified sequence
atggccgaggtggcccggcaggcccagaccagccaggagccctaccatgataaagcaagggaacaccctgacgatggaaagcacccagacggaggactgtacaacaagggaccgtcctattcatcctactctggctatattatgatgcccaatatgaacaatgatccttatatgagcaatggttctctcagcccgcctatcccgcgaacgtccaacaaagtgccggtggtacaacccagtcacgctgtgcacccactgacaccccttataacatatagcgacgagcattttagccccggcagccacccttcacatattccgtccgatgtgaactcaaagcagggcatgagcaggcacccgccagcccccgacattccaaccttttatccgttaagtccagggggagtggggcagattacacctccccttggttggttcagccatcatatgatacccggccctccggggccgcacacaaccggtatcccccacccggcaatcgttactcctcaggtgaaacaggagcatcctcatactgatagtgacttaatgcacgtgaaaccacaacacgaacagcggaaagaacaggagccaaagaggccacacatcaaaaaaccacttaatgcatttatgctatatatgaaggaaatgcgggcgaatgtggtcgcagaatgcactttaaaggaaagtgcggccatcaatcagatactgggccgcagatggcatgcattgtcccgggaggagcaggcgaagtactacgaattagctagaaaggagcggcagctccacatgcagctgtatcccgggtggtcagccagggacaattatggaaagaagaaaaaaagaaagcgcgagaagctccaggagagtgctagtggaaccgggcctcgtatgaccgcggcgtatatctag

SEQ ID NO: 64432 - DNA, 912 bp, Artificial Sequence
  derived and/or modified sequence
atggccgaggtggcgaggcaggcccagacgtcgcaggagccctatcatgacaaagcaagggagcatccagatgatgggaagcatccggatggcggattgtataataagggaccttcatactctagctacagcggatatataatgatgccaaacatgaacaacgatccttacatgagtaacggttctctgagtcctcctataccaaggactagcaacaaggtccccgtggtacagccctctcacgccgtccacccattgacccccctaattacatactcggatgagcacttctctcccggttcacacccgtctcacatcccttctgatgtgaactccaagcaaggcatgtctcggcacccacccgcacctgatatcccaactttctatcctctgagccctggcggagtgggacagataacccctccgctcgggtggttctcacatcacatgattcctggtccccctgggcctcacactaccgggatcccgcatcctgcaattgtgacaccccaggttaagcaggaacatcctcacacggattccgacctaatgcacgtgaaaccacagcatgagcaacggaaggaacaggagccaaagagaccccacattaagaaaccattgaatgcattcatgctctacatgaaggaaatgcgagccaacgtcgtggcggagtgcacgctgaaggagtctgccgctatcaatcagattcttgggagaaggtggcatgcactgtcaagagaagaacaggcgaagtattatgaactagctcggaaggagcggcagctgcacatgcagctatatccagggtggagtgctcgagataattacggcaagaagaagaaacgcaagagggagaagctccaggagagcgcatcaggaacaggcccacgaatgactgcagcctacatatag

SEQ ID NO: 64433 - protein, 279 aa, Artificial Sequence
  derived and/or modified sequence
MVLTIHLLPSDQQLPVFQVTAPRLAVSPGGSTSVGLQVVVRDAETAPKELFFELRRPPQHGVLLKHTAEFRRPMATGDTFTYEDVEKNALQYIHDGSSTREDSMEISVTDGLTVTMLEVRVEVSLSEDRGPRLAAGSSLSITVASKSTAIITRSHLAYVDDSSPDPEIWIQLNYLPSYGTLLRISGSEVEELSEVSNFTMEDINNKKIRYSAVFETDGHLVTDSFYFSVSDMDHNHLDNQIFTIMITPAENPPPVIAFADLITVDEGGRAPLSFHHFCY

SEQ ID NO: 64434 - DNA, 2654 bp, Artificial Sequence
  derived and/or modified sequence
aactttaaaaagctgcttcggacaaaccagagccaggatttccactgtcggggacccgggatcggaagggtctagcccgagggaaatgctggaagatcccatcggccagtgaccagcaactttccggcgagattttgacgcggagaactgtgctctgcctcctcttattctcccaaagctcacgttggcgtcctgccttgcgggggaactcggcgcgctctctgcctgagcagcgagtgaattgaaccccagcccgctccggcgcctccgggctgatgagtgtcgctctccgcccgtccatctctttttcccggaggtaaaggcccgcggtcccccaccttcagtgcgcccgggttccaagcgccggagccagcgttttggcggagccgcttcttggatgctgaaggctgggctcctccatcgtgggtgccgaggcggcgatgggtgtcctcaaagtgtggctcgggctggccctagcgttggcggaatttgcagtattgcctcatcattccgaaggtgcttgtgtctatcaggattccttgttggcggatgccacaatttggaagcccgattcatgccagagctgccgttgccatggtgatattgttatctgcaaacctgctgtttgcagaaaccctcaatgtgcctttgagaagggagaagtgcttcaaatagctgccaaccaatgctgtcctgagtgtgttttgaggactccaggatcttgccatcatgaaaagaaaatccatgagcatgggacagaatgggcctcttctccatgtagtgtgtgctcttgcaatcatggggaagtccgatgtaccccccaaccatgcccaccgctgtcatgtggacaccaggagctggcattcatccctgaaggaagctgctgcccagtttgtgtgggccttgggaaaccctgttcctatgaaggccatgtgtttcaggatggggaggactggcggctgagccggtgtgccaaatgtctgtgtagaaatggggttgcccagtgcttcacagctcagtgtcagcctctattttgtaaccaggatgagactgtagtccgagtccctggaaaatgttgcccgcagtgctctgcaagatcctgctctgcagctggccaagtatacgagcatggtgagcagtggagcgaaaatgcctgcaccacgtgtatatgtgaccggggtgaggtcaggtgtcacaagcaggcctgcctgcccctgagatgcggaaagggtcagagcagggctcggcgtcatgggcaatgctgtgaggaatgtgtgtctcctgccgggagctgctcctatgatggagttgtgcggtaccaggacgaaatgtggaagggctcggcctgtgagttctgcatgtgtgatcatggccaagtgacctgccagactggagagtgtgccaaagtggagtgtgcccgggatgaagaattaattcacttagatggaaagtgttgtcctgaatgcatttcaaggaatggttattgtgtttatgaagaaactggagaatttatgtcatcaaatgctagtgaagttaaacgtattccagagggagagaagtgggaagatggcccttgcaaggtgtgtgagtgccgaggggctcaggtaacttgctacgagccctcttgcccaccatgtccagtgggcacactggccttagaggtgaagggacagtgctgtccagactgcacatcagttcattgccatccagattgtttgacatgctctcagtctccagaccactgtgacctctgccaagatcctaccaagttactgcagaatggatggtgtgtgcacagctgtggactgggtttttaccaagctggcagtctctgtttagcctgccagccccagtgctccacgtgtaccagtgggctggagtgctcatcctgccagcctcccctgctgatgcggcacgggcagtgtgtgcctacctgtggggacggcttctaccaagatcgccattcctgtgcagtctgccatgagtcctgtgcaggttgctggggcccaacggagaagcactgcttggcctgcagagatcccctccacgtgctgagagatggcggctgtgagagcagctgtggaaaaggcttctacaacaggcagggcacctgtagcgcttgtgaccaatcctgtgacagttgtggccccagtagccccaggtgtcttacctgtactgagaagacagtgctgcatgatgggaaatgcatgtctgaatgccctggcgggtactatgctgatgccactggcaggtgcaaagtttgtcataactcatgtgccagctgctctgggcccacaccctctcactgtacagcctgcagcccccccaaggctctgcgtcaaggccactgtctgccccgctgtggagagggtttctactctgaccatggagtctgcaaagcctgtcactcctcctgcctggcttgtatgggtcccgcaccctctcactgtactgggtgtaagaagccagaggaaggactgcaagtggagcagctgtctgacgtgggcatcccctctggcgagtgtctagcccagtgtagagcccatttttacttggagagcactggcatatgtgaagggcaaaatctggacttctgtcagaatttagaagtgatttctgctgtttgccttggcatatcatctacagagaattga

SEQ ID NO: 64435 - DNA, 3330 bp, Artificial Sequence
  derived and/or modified sequence
ggctcctccatcgtgggtgccgaggcggcgatgggtgtcctcaaagtgtggctcgggctggccctagcgttggcggaatttgcagtattgcctcatcattccgaaggtgcttgtgtctatcaggattccttgttggcggatgccacaatttggaagcccgattcatgccagagctgccgttgccatggtgatattgttatctgcaaacctgctgtttgcagaaaccctcaatgtgcctttgagaagggagaagtgcttcaaatagctgccaaccaatgctgtcctgagtgtgttttgaggactccaggatcttgccatcatgaaaagaaaatccatgagcatgggacagaatgggcctcttctccatgtagtgtgtgctcttgcaatcatggggaagtccgatgtaccccccaaccatgcccaccgctgtcatgtggacaccaggagctggcattcatccctgaaggaagctgctgcccagtttgtgtgggccttgggaaaccctgttcctatgaaggccatgtgtttcaggatggggaggactggcggctgagccggtgtgccaaatgtctgtgtagaaatggggttgcccagtgcttcacagctcagtgtcagcctctattttgtaaccaggatgagactgtagtccgagtccctggaaaatgttgcccgcagtgctctgcaagatcctgctctgcagctggccaagtatacgagcatggtgagcagtggagcgaaaatgcctgcaccacgtgtatatgtgaccggggtgaggtcaggtgtcacaagcaggcctgcctgcccctgagatgcggaaagggtcagagcagggctcggcgtcatgggcaatgctgtgaggaatgtgtgtctcctgccttggcctcccaaagtgttgggattacaggcatgagccaccatgcccagtcactacttgggccatttttgactcaaataaagaagccacatttctcctgtttagagtgataaatttaagaaaaaagtaaaaattggaaggaattttagccgttccttctggaaaccctgaactgtatagcctaatgattattgggtcactggccgcttagacctctctcagcttctgttgcctagaggaataaaatctgaggggtaaaatttaaaaaaattcatgttattgaagaaaaaaaaatggtgttgagctcttctttcaaatgaattctaataaatatgacactgtctataattcaggaagttaatagccttttaattttggatctgatttttgcaaagggtcatggagaagggaaggggaaagcctgttgccttcagatctgctagctgcacttttctgtgttgatgtatatccaggcaatgtttgaagacacaagggttttcttggtctcctctctctagaataacattgtgatgacaatttcaaatcaatcagttagactcaaattaaaatcaagtaaaaaacaagacatctatcatttagatattgcttactcttcccctgggccttttgcagtgtttggggttgggatgagaggagtaatctgagccagcattttctgtggagctctgaatggtaactgggcatctcggtacctgaatggtggtacccaagcgcctcagtgcctgaatcccacctgagcatcatagtatctgaatggtacctgagctctgaatggtcctggagcatcacaatagccctggtgctctatcccaggggctgggctctgacccatgcagaggttcccttaagaaactgggaggtccaatgaaaacatgctgcaaatgtttcttcgattaaaagatacacagttaacactacagatgtttttagattaaaagatatgcatttaacattttcttatgtagtgaaagagggttcctcatgcaggatatgccagatagaatggttttgaaactagctggagcttaaggtagaatctctgcttctgtattgtcacttgccctagtaacagaagttatgatcagagactcctaataaaacaaccagtggttctatgttatataaattattgtaagtttttttgcatattatctcatttgattccttttggaaatggcagggcaggtatatccatttatagatgagaaatagtcagtgaggaaacggatctgacccaggccttccaattcctggtcttgtgcttatcccactctcccaactttatcctcaaatacattttctttttttttgccgaaaatgataccttgttttctagttcagcctagtaagcaggaattgatagatcaaggtaaaaatgctctcttgatgttgatgcaggtgatcgttttggccctgaaactgccagtgacctagaggcatcatttcctattcaagacgtcctggaaaactacatttactactttcagagtgttcatgaaagcattgagccaacccatgatatttttagtttttatgtgagtgatggaaccagtcgttcagaaattcacagcatcaatatcaccattgaggtaaagactttggaagttggaaaggttgagcccttgaccacaatatttcacaccattagagagctttctttatagggactcaaaagcaaagaagattggatttgaccttcaaaattgaaggtcgttcttaaaatatagccttcaggaatcttgtagaattaaggttggcatttggggaaggcttgagttagaaatctaaatttccatttcaggattgaatttatttgttcggtgtgaaaaacagtttgtgaaggtcagagatgctttgccagtctcatatataaatgaaaacttacatatgtctatgtttctctgaaattgtgtttggttctatatgcatatttgccttttcttattttactgcatttatttatttaattgtaacatcaaagaaatgtgttccttgatgctgtatttattctcatttgagcaactacacaggcttgctctaccgagagagagacacaggggaggggaaagataaatctcagaatgaaataccctctgccttgggaaaataaaatgtaaagaaccctctgcactcttaagggtcagtggtggaaaggggctggcaccagggcagggagacagctttagagacccacactttcaaatatagtgtccttctacaggtactgtggtatgcttagcattttctaagagagttctgagttatattagtatggtcttttatcttcaaagtatgttaatacttgtacttgtcaaagcacatatccatatttttggtctagaaaatatggtcattgtacttacggaagatatctgagaaaacttttatgaaatgtccatcagcttcttttgaagggggcattttgttgcctggac

SEQ ID NO: 64436 - DNA, 2121 bp, Artificial Sequence
  derived and/or modified sequence
cactctacctctgcatccaaatcaaggtctcccagaatcagtgaaattccacttcacagtttcagatggagaacacacaagtccggagatggtcctcaccattcacttacttcccagtgatcagcaactgccagtgttccaggtcacagctccacggctggcggtcagcccaggaggcagcacttctgtaggacttcaggtggtagtaagagatgctgagacagcgcccaaagaactcttctttgagcttcggagacctccacagcatggtgtgcttcttaagcatacagctgagttccgaaggccgatggccacaggtgacactttcacctatgaggatgttgagaaaaatgctctacagtatatacatgatggttcctctacccgggaagacagcatggagatctcagtcacagatggcctcacagtgacaatgctggaggtgagagtagaggtgtccctgtcagaagaccgagggcctcgactggctgctggctcctctctgagcattactgttgccagtaaaagcacagccataatcactaggtcacaccttgcttacgtggatgattcttcccccgacccagagatctggattcagttaaattatctgccctcatatggtactctcttaagaatctcaggatctgaggtggaagagctctcagaagtttccaatttcacaatggaagacatcaataacaagaaaatcagatactcagctgtgtttgaaactgatggtcatctggttactgatagcttctatttctctgtctctgacatggaccacaaccatctggataatcagatatttaccatcatgatcactcctgctgaaaatccacctccagtcattgcttttgctgaccttatcacggttgatgagggagggagagcaccactctcatttcaccatttttgctactgatgatgatgacaacctccagagagatgccatcattaaactaagtgctctgcccaaatatggctgcattgagaacacaggaacaggtgatcgttttggccctgaaactgccagtgacctagaggcatcatttcctattcaagacgtcctggaaaactacatttactactttcagagtgttcatgaaagcattgagccaacccatgatatttttagtttttatgtgagtgatggaaccagtcgttcagaaattcacagcatcaatatcaccattgaggtaaagactttggaagttggaaaggttgagcccttgaccacaatatttcacaccattagagagctttctttatagggactcaaaagcaaagaagattggatttgaccttcaaaattgaaggtcgttcttaaaatatagccttcaggaatcttgtagaattaaggttggcatttggggaaggcttgagttagaaatctaaatttccatttcaggattgaatttatttgttcggtgtgaaaaacagtttgtgaaggtcagagatgctttgccagtctcatatataaatgaaaacttacatatgtctatgtttctctgaaattgtgtttggttctatatgcatatttgccttttcttattttactgcatttatttatttaattgtaacatcaaagaaatgtgttccttgatgctgtatttattctcatttgagcaactacacaggcttgctctaccgagagagagacacaggggaggggaaagataaatctcagaatgaaataccctctgccttgggaaaataaaatgtaaagaaccctctgcactcttaagggtcagtggtggaaaggggctggcaccagggcagggagacagctttagagacccacactttcaaatatagtgtccttctacaggtactgtggtatgcttagcattttctaagagagttctgagttatattagtatggtcttttatcttcaaagtatgttaatacttgtacttgtcaaagcacatatccatatttttggtctagaaaatatggtcattgtacttacggaagatatctgagaaaacttttatgaaatgtccatcagcttcttttgaagggggcattttgttgcctggacttgctctcttttcaaactaactattttgcttgggaagtaaagatggtgccacattaaatgctattttgaggtg

SEQ ID NO: 64437 - DNA, 7142 bp, Artificial Sequence
  derived and/or modified sequence
aactttaaaaagctgcttcggacaaaccagagccaggatttccactgtcggggacccgggatcggaagggtctagcccgagggaaatgctggaagatcccatcggccagtgaccagcaactttccggcgagattttgacgcggagaactgtgctctgcctcctcttattctcccaaagctcacgttggcgtcctgccttgcgggggaactcggcgcgctctctgcctgagcagcgagtgaattgaaccccagcccgctccggcgcctccgggctgatgagtgtcgctctccgcccgtccatctctttttcccggaggtaaaggcccgcggtcccccaccttcagtgcgcccgggttccaagcgccggagccagcgttttggcggagccgcttcttggatgctgaaggctgggctcctccatcgtgggtgccgaggcggcgatgggtgtcctcaaagtgtggctcgggctggccctagcgttggcggaatttgcagtattgcctcatcattccgaaggtgcttgtgtctatcaggattccttgttggcggatgccacaatttggaagcccgattcatgccagagctgccgttgccatggtgatattgttatctgcaaacctgctgtttgcagaaaccctcaatgtgcctttgagaagggagaagtgcttcaaatagctgccaaccaatgctgtcctgagtgtgttttgaggactccaggatcttgccatcatgaaaagaaaatccatgagcatgggacagaatgggcctcttctccatgtagtgtgtgctcttgcaatcatggggaagtccgatgtaccccccaaccatgcccaccgctgtcatgtggacaccaggagctggcattcatccctgaaggaagctgctgcccagtttgtgtgggccttgggaaaccctgttcctatgaaggccatgtgtttcaggatggggaggactggcggctgagccggtgtgccaaatgtctgtgtagaaatggggttgcccagtgcttcacagctcagtgtcagcctctattttgtaaccaggatgagactgtagtccgagtccctggaaaatgttgcccgcagtgctctgcaagatcctgctctgcagctggccaagtatacgagcatggtgagcagtggagcgaaaatgcctgcaccacgtgtatatgtgaccggggtgaggtcaggtgtcacaagcaggcctgcctgcccctgagatgcggaaagggtcagagcagggctcggcgtcatgggcaatgctgtgaggaatgtgtgtctcctgccgggagctgctcctatgatggagttgtgcggtaccaggacgaaatgtggaagggctcggcctgtgagttctgcatgtgtgatcatggccaagtgacctgccagactggagagtgtgccaaagtggagtgtgcccgggatgaagaattaattcacttagatggaaagtgttgtcctgaatgcatttcaaggaatggttattgtgtttatgaagaaactggagaatttatgtcatcaaatgctagtgaagttaaacgtattccagagggagagaagtgggaagatggcccttgcaaggtgtgtgagtgccgaggggctcaggtaacttgctacgagccctcttgcccaccatgtccagtgggcacactggccttagaggtgaagggacagtgctgtccagactgcacatcagttcattgccatccagattgtttgacatgctctcagtctccagaccactgtgacctctgccaagatcctaccaagttactgcagaatggatggtgtgtgcacagctgtggactgggtttttaccaagctggcagtctctgtttagcctgccagccccagtgctccacgtgtaccagtgggctggagtgctcatcctgccagcctcccctgctgatgcggcacgggcagtgtgtgcctacctgtggggacggcttctaccaagatcgccattcctgtgcagtctgccatgagtcctgtgcaggttgctggggcccaacggagaagcactgcttggcctgcagagatcccctccacgtgctgagagatggcggctgtgagagcagctgtggaaaaggcttctacaacaggcagggcacctgtagcgcttgtgaccaatcctgtgacagttgtggccccagtagccccaggtgtcttacctgtactgagaagacagtgctgcatgatgggaaatgcatgtctgaatgccctggcgggtactatgctgatgccactggcaggtgcaaagtttgtcataactcatgtgccagctgctctgggcccacaccctctcactgtacagcctgcagcccccccaaggctctgcgtcaaggccactgtctgccccgctgtggagagggtttctactctgaccatggagtctgcaaagcctgtcactcctcctgcctggcttgtatgggtcccgcaccctctcactgtactgggtgtaagaagccagaggaaggactgcaagtggagcagctgtctgacgtgggcatcccctctggcgagtgtctagcccagtgtagagcccatttttacttggagagcactggcatatgtgaagcttgccaccagtcctgtttcagatgtgcagggaaaagcccacataactgcacagactgtgggccttcccatgtgctgttggatgggcagtgcctctcccagtgcccagatggctactttcaccaggaaggtagttgcacagagtgtcacccaacctgcaggcagtgtcatgggccgttggagtctgactgcatctcctgttaccctcacatctctcttaccaatggtaactgcaggaccagctgcagggaagagcagttcctcaacctcgtgggatactgtgctgactgccatcacctgtgccagcactgtgcagctgatctccacaacactgggagcatctgcctcaggtgccagaatgcccactacctgctgctcggggaccactgtgttcctgactgcccttcaggatactatgcagagagaggagcttgtaaaaaatgccactcctcctgcagaacctgccagggcagaggacctttctcctgctcctcatgtgacaccaacctcgtgctgtcccacactggcacctgcagcaccacctgcttccctgggcactatcttgatgacaatcatgtttgccagccatgcaacacacactgtggaagctgtgattcacaggccagctgtacctcctgccgagatccaaacaaggttctgctctttggggaatgtcaatacgagagctgcgccccacagtactatcttgacttctccaccaacacgtgcaaagagtgtgattggagctgcagtgcatgcagtgggcccctgaaaacagactgcctgcagtgcatggatggctatgttctccaggatggggcctgcgtggagcagtgcttgtcatcattttaccaggactcgggcctctgcaagaactgtgacagctactgtctccagtgccaaggtccccatgagtgtacccgctgcaaagggccatttctcctcttggaagcccagtgtgtccaggaatgtgggaaggggtactttgcagatcatgcaaagcacaaatgcacagcctgccctcaggggtgcttgcagtgcagccacagggaccgttgtcacctctgtgaccatgggttctttctgaagagtggcctctgtgtttacaactgtgttcctggcttttctgtccacacctctaatgaaacatgttctggcaaaatacacacccctagtcttcatgtgaatggttccctgatcctcccaattggttcaataaagccactggatttttccctcctgaatgtccaagaccaggagggtagggtcgaagatctcctatttcatgttgtgagcactcccaccaatggtcagctagtgctctcaagaaatggaaaagaggttcagctggacaaggctggccgttttagctggaaagatgtgaacgagaagaaagtgcgttttgtgcacagcaaagaaaaactcaggaaaggttaccttttcctgaaaattagtgaccagcagttcttctctgagccacagctgatcaacatacaagcattttcaacacaggccccctatgtgctgagaaatgaagttctccacattagcagaggagagagggcaaccatcaccacccagatgcttgacatccgagatgatgacaacccacaggatgtggtcattgaaataatcgatcctccacttcatggccaattgcttcagacacttcagtccccggcaacccctatctatcaattccagctggatgaactctctagaggccttctccactatgctcatgatggttcagacagcacatccgatgttgcagtcttgcaggccaatgatggacactccttccataatatactgttccaagtgaagaccgtgcctcagaatgacaggggtcttcagcttgtggctaattcgatggtgtgggttccagaaggggggatgctgcagatcaccaacagaatcttacaggccgaggctcctggtgccagtgctgaagaaatcatctacaagattacacaagactacccccagtttggggaggtggtccttctagtgaatatgcctgcagacagccctgcagatgaagggcagcacctgcctgatgggaggacagctacccccaccagcaccttcacccagcaggacatcaatgaaggcatcgtatggtacaggcactcaggagccccagcccagagcgactccttccgcttcgaggtgtccagtgcctccaatgcccagacccgcctggagagccacatgttcaacatcgcgatcttaccacagacacctgaagcacctaaagtgtctctggaagcatctctccatatgactgctagagaagatggcctgactgttattcagcctcattccctctccttcataaactctgagaagccaagtggaaagattgtctacaacatcactctacctctgcatccaaatcaaggtatcatcgagcaccgggaccaccctcactctcctatccggtatttcacgcaagaggatattaaccagggcaaagtcatgtaccgccctcccccggcagcaccccacctccaggagctcatggccttctcgttcgctggtctcccagaatcagtgaaattccacttcacagtttcagatggagaacacacaagtccggagatggtcctcaccattcacttacttcccagtgatcagcaactgccagtgttccaggtcacagctccacggctggcggtcagcccaggaggcagcacttctgtaggacttcaggtggtagtaagagatgctgagacagcgcccaaagaactcttctttgagcttcggagacctccacagcatggtgtgcttcttaagcatacagctgagttccgaaggccgatggccacaggtgacactttcacctatgaggatgttgagaaaaatgctctacagtatatacatgatggttcctctacccgggaagacagcatggagatctcagtcacagatggcctcacagtgacaatgctggaggtgagagtagaggtgtccctgtcagaagaccgagggcctcgactggctgctggctcctctctgagcattactgttgccagtaaaagcacagccataatcactaggtcacaccttgcttacgtggatgattcttcccccgacccagagatctggattcagttaaattatctgccctcatatggtactctcttaagaatctcaggatctgaggtggaagagctctcagaagtttccaatttcacaatggaagacatcaataacaagaaaatcagatactcagctgtgtttgaaactgatggtcatctggttactgatagcttctatttctctgtctctgacatggaccacaaccatctggataatcagatatttaccatcatgatcactcctgctgaaaatccacctccagtcattgcttttgctgaccttatcacggttgatgagggagggagagcaccactctcatttcaccatttttttgctactgatgatgatgacaacctccagagagatgccatcattaaactaagtgctctgcccaaatatggctgcattgagaacacaggaacaggtgatcgttttggccctgaaactgccagtgacctagaggcatcatttcctattcaagacgtcctggaaaactacatttactactttcagagtgttcatgaaagcattgagccaacccatgatatttttagtttttatgtgagtgatggaaccagtcgttcagaaattcacagcatcaatatcaccattgaggtaaagactttggaagttggaaaggttgagcccttgaccacaatatttcacaccattagagagctttctttatagggactcaaaagcaaagaagattggatttgaccttcaaaattgaaggtcgttcttaaaatatagccttcaggaatcttgtagaattaaggttggcatttggggaaggcttgagttagaaatctaaatttccatttcaggattgaatttatttgttcggtgtgaaaaacagtttgtgaaggtcagagatgctttgccagtctcatatataaatgaaaacttacatatgtctatgtttctctgaaattgtgtttggttctatatgcatatttgccttttcttattttactgcatttatttatttaattgtaacatcaaagaaatgtgttccttgatgctgtatttattctcatttgagcaactacacaggcttgctctaccgagagagagacacaggggaggggaaagataaatctcagaatgaaataccctctgccttgggaaaataaaatgtaaagaaccctctgcactcttaagggtcagtggtggaaaggggctggcaccagggcagggagacagctttagagacccacactttcaaatatagtgtccttctacaggtactgtggtatgcttagcattttctaagagagttctgagttatattagtatggtcttttatcttcaaagtatgttaatacttgtacttgtcaaagcacatatccatatttttggtctagaaaatatggtcattgtacttacggaagatatctgagaaaacttttatgaaatgtccatcagcttcttttgaagggggcattttgttgcctggac

SEQ ID NO: 64438 - DNA, 2214 bp, Artificial Sequence
  derived and/or modified sequence
atgggggtgctgaaagtgtggctggggcttgccctggccctggctgagtttgctgtcttgccccatcactcagagggtgcctgcgtgtaccaggatagcctgcttgcagacgccaccatctggaaacccgattcgtgccagagctgtcgctgccatggagatattgtgatctgcaagccggctgtttgtcgaaatccccagtgcgctttcgagaaaggcgaggttctgcagattgccgctaaccagtgctgccccgagtgcgtattgaggacacctgggtcctgtcaccacgagaaaaaaattcatgaacatggaacagaatgggcatcgagtccctgtagtgtgtgcagttgtaaccatggtgaagtgcgctgtacgccacagccatgtccacccctgtcttgtggacaccaggagctcgccttcatacccgagggttcttgttgccctgtctgtgtgggcctgggcaagccctgtagctacgagggacatgtgttccaagatggcgaggactggaggctgagtagatgtgcaaaatgcttatgtcgcaacggagttgcccagtgctttactgctcagtgccagccgctcttttgcaatcaggatgaaactgtcgtgcgggtgccaggaaagtgctgcccccagtgctctgctcgtagttgttcagccgcgggccaagtgtatgagcatggagagcagtggtcagagaatgcgtgtacaacctgtatttgcgaccgtggcgaagtacggtgccataagcaggcctgtctgccccttaggtgcgggaagggacagagtcgcgcccgccgacacgggcagtgttgtgaagaatgtgtttcaccggccggttcttgctcttacgatggggtggtgagatatcaagatgaaatgtggaaaggttccgcctgtgagttctgcatgtgtgaccacggccaggtgacgtgccagaccggagaatgtgccaaagtggaatgcgcaagagacgaagaactgattcatcttgacggtaaatgctgcccggaatgcatcagccggaacgggtattgtgtctacgaggagaccggagagttcatgtcctccaatgcgtcagaagtgaaacggatcccggagggcgagaaatgggaggacggaccttgcaaggtatgtgagtgtagaggcgcacaggttacgtgctatgagcctagctgcccaccttgcccagtcggaacattggctctggaggtgaagggccagtgctgcccagattgcacgagtgtacactgtcaccctgactgtctgacctgctctcagtctcccgatcactgcgacttgtgccaggatcccaccaaacttctccagaatggctggtgcgtgcactcctgcggactcggattctatcaagctgggagtctgtgcctcgcgtgccaaccccagtgcagtacctgcacatccggcctggagtgctccagctgtcagcccccactgctcatgcggcacgggcagtgcgtacccacatgcggggatggattctaccaggatcgccacagttgtgcagtttgccacgagtcatgcgcagggtgttggggcccaaccgagaagcactgcttggcgtgtcgagatccattgcatgtcctgcgggatggtggatgcgaaagctcttgcggtaagggcttctataacaggcagggaacctgttcggcctgtgaccagtcctgtgactcttgtgggccttctagtcctagatgtttaacatgtacggaaaagactgtgctccacgatgggaagtgcatgagcgaatgccccgggggttattacgcagatgccacggggagatgtaaagtgtgtcacaattcgtgtgcgagctgtagtggaccgactccatcacactgtaccgcctgctcaccgcccaaggctttaagacagggccactgcttgcccagatgcggggagggcttctactcggatcatggagtgtgcaaggcatgccactccagttgcctggcctgcatgggacctgctccatctcattgtaccggctgcaagaaaccggaagagggacttcaggtagagcaactcagtgatgttggcatacccagtggagaatgtctggcccagtgcagggctcatttctacctggaatccacgggtatctgcgagggtcagaacctggatttttgtcagaatctcgaggttattagcgccgtgtgtctcggtatttccagcactgagaactag

SEQ ID NO: 64439 - DNA, 954 bp, Artificial Sequence
  derived and/or modified sequence
atgggagtgttgaaagtctggctcggcctcgcgctggccctggctgagttcgccgtcctgccgcatcactctgagggggcctgcgtttatcaggattccttgctggcggacgctaccatctggaagccagactcctgccaatcttgcagatgccacggcgacatcgttatatgcaagcccgccgtatgccgaaatccccaatgcgccttcgaaaagggggaagtgttgcagatcgccgctaaccagtgttgtccggagtgtgtcctgcgaaccccagggtcctgccaccacgagaagaagatccacgaacatggaactgagtgggccagttctccttgtagcgtgtgttcttgcaaccatggagaggttcgctgcacaccgcagccttgccctcccctgagttgcggccatcaggaattggctttcatcccagaaggaagctgctgtccggtgtgcgtgggactaggcaaaccctgcagctacgaaggacacgtgttccaagatggagaagactggcggctatcaagatgcgccaaatgtctgtgtagaaacggcgtcgcccagtgttttactgcccagtgccagccgctgttctgtaaccaggacgaaactgtagtgagagtcccgggtaaatgctgtccacaatgctccgcaagatcgtgcagcgcagccggacaggtttatgaacacggggagcaatggagcgagaacgcatgcactacctgcatatgcgaccgcggcgaggtccgctgccacaagcaagcctgtctgccactccggtgcggcaaggggcagtcacgcgcccggaggcatggtcagtgttgtgaagaatgcgtatctcccgcattagcaagccagtccgtcggaattaccggtatgtcacatcacgcgcaatctctcctgggacctttcctgactcagatcaaaaaaccccacttctcctgtctggaatag

SEQ ID NO: 64440 - DNA, 768 bp, Artificial Sequence
  derived and/or modified sequence
gagcggcaaggacagagtcgggcaaggcggcatggtcagtgctgcgaagaatgtgtcagtccagctggatcgtgctcctacgacggagtggtccggtatcaggacgagatgtggaaagggtctgcgtgcgaattttgtatgtgcgatcatggccaggtaacatgtcaaaccggagaatgcgctaaggtagagtgtgcacgtgatgaggagctgatccatctggatggcaagtgctgcccggagtgtattagtcgaaatggctactgtgtgtacgaggagactggcgagtttatgagctccaatgctagcgaagtgaaacgaatccctgagggcgaaaagtgggaggacggaccatgtaaagtctgcgagtgtaggggcgctcaggtgacctgctatgaaccaagctgcccgccctgtcctgtaggcacgttggcccttgaggtgaaagggcagtgctgccctgactgcacttccgttcactgtcatcccgattgtctcacctgtagtcagtctccggaccattgtgatctgtgccaagaccccaccaagcttttgcagaacggctggtgcgtgcactcttgtggactgggattctatcaggctggtagcctctgtttggacgacgggttcagcctgcccgcccccgttctgcatgtgtatcagtgggccggggtccttatcctaccggccagtcccgccgacgccgctcgcgccgtttgcgcctatctgtgggggagactcctcccaagaagtcccttcctttgctag

SEQ ID NO: 64441 - DNA, 840 bp, Artificial Sequence
  derived and/or modified sequence
atggtcctcacaatccacctactgcctagtgaccagcagttgcccgtctttcaggtgaccgcccctaggctggccgtttcacccgggggctctacaagtgttggcctgcaggtcgtggttcgtgacgctgagacagcacccaaagagctgttcttcgagctcagacggcccccacaacatggcgttctgctgaaacatacggctgagttccgtaggcctatggccaccggagataccttcacttacgaagatgtggagaaaaacgctctccagtatatccatgatgggagcagcactcgggaggattccatggaaattagtgtcacagacggtctcacggtgactatgctggaagtgagggtggaagtctctctgagcgaagaccgcgggcctaggctggcagccgggtcatctctgtcaatcacggtcgccagtaagtcaaccgccatcatcaccaggtctcacctggcgtatgtagatgatagctcacccgaccctgagatatggatccagctgaattacttgccgtcatacggcacgttactacggatatccggatccgaagtggaggagctgagcgaggtgtctaactttactatggaggatatcaacaacaagaagattcgttacagcgcagtgttcgaaactgacgggcacctcgtcacggactccttctatttttcagtaagcgacatggatcacaatcatcttgataaccagatttttaccatcatgataacccctgcagaaaacccgccccccgttattgcctttgctgacttaattacggtagatgagggcggcagggccccactgtctttccaccacttttgctactag

SEQ ID NO: 64442 - DNA, 5931 bp, Artificial Sequence
  derived and/or modified sequence
atgggcgtcctgaaggtgtggctgggtctggctctcgcgctcgccgagtttgccgtgctgccccatcacagtgagggcgcctgtgtttaccaggattctctcctggcagatgccactatttggaaacccgactcatgccagagctgtcggtgtcatggcgatattgtgatttgcaagccagcagtatgccgcaaccctcagtgcgcgttcgagaaaggcgaagtgttgcaaatagccgcaaatcaatgttgtcctgaatgcgtcctgagaacgccgggttcttgtcatcacgaaaagaaaatccacgaacacggaaccgagtgggcatcaagcccctgttcagtgtgctcatgcaatcacggcgaggtgcgctgcaccccacaaccatgtcctcccctaagctgcggccatcaagaactcgcattcataccagaagggtcgtgttgtccggtttgcgttgggctgggcaaaccttgctcctatgaaggccacgtgtttcaggacggggaagactggaggctttctcggtgcgccaaatgtctttgcagaaatggagttgcccagtgcttcaccgcccagtgtcaacctctgttctgcaaccaagacgagacggtagtgcgtgtgcccgggaagtgctgtccgcagtgttccgctcgtagctgcagcgcagcgggacaggtatacgagcatggcgaacagtggagtgaaaatgcttgtaccacctgtatttgtgataggggtgaagtgcgttgtcacaagcaagcatgtttgccattgcgctgtgggaagggacagtccagggctcgcaggcatgggcagtgctgcgaagagtgcgtgagccctgctggatcttgctcatacgacggggtggttagataccaggatgagatgtggaagggctccgcttgcgaattctgtatgtgcgatcacggacaagtgacatgtcagacaggagaatgtgccaaggtagaatgcgcaagagatgaggagctgattcacctcgacggtaaatgttgccctgaatgtatttcacggaatggttactgtgtctacgaggagacaggagagttcatgagttctaacgccagcgaggtgaagcgcatccctgagggagagaagtgggaagatggaccttgcaaggtgtgcgaatgtcggggggcacaggtaacctgctacgagccttcctgtcctccctgtcctgtggggacattggctttggaagttaaggggcagtgttgtccagactgtacctctgttcactgccaccctgattgccttacttgtagtcaaagtcctgaccactgtgatctgtgccaggaccccactaaactgttgcagaatggatggtgcgtgcatagctgtgggctgggcttttaccaggccggctccctgtgtctggcctgtcagccacagtgctcaacctgcacctcgggactcgaatgttcatcctgtcagccaccattgcttatgcgtcacggccagtgtgtgccaacttgcggcgatggcttttatcaggatcgtcactcatgcgccgtttgccacgaatcctgcgccggctgttggggcccaactgagaaacattgtcttgcatgccgggatcccctacatgtcctgcgagatgggggttgcgagtcctcctgtggaaaggggttctataacagacaggggacctgctcagcatgcgaccaatcatgcgatagttgtgggccatcatctcctaggtgtttgacctgcacggaaaaaaccgtgctgcatgatggcaagtgtatgtctgagtgtcccggtggatactacgctgacgctacaggacggtgcaaggtctgccacaatagctgcgcctcctgttcagggccaaccccttcccactgtaccgcatgttctcctcccaaagcactgagacaaggacactgtctgcctcgctgcggggaagggttctatagcgatcatggggtatgtaaggcttgccactctagctgcctggcttgcatggggcctgcccccagccactgtaccggctgtaagaagcctgaggagggactgcaggtggagcaattatccgatgttggtatcccctctggtgaatgcctggcccagtgtcgcgcgcacttttatctggagtccactggtatctgtgaagcctgccatcaatcctgcttccgatgcgccggcaagtcaccccataactgcacagactgcggtccgtctcatgtgctgcttgatggccagtgcctttcgcagtgtcccgacggctacttccatcaggaggggtcctgcaccgagtgtcacccaacctgcagacaatgccatggtcctttagagagcgactgcatttcatgttatcctcacatctcactgacaaacgggaattgtcgaacctcttgccgagaggaacagttcttgaatctggttgggtattgcgctgattgccaccatctttgccagcactgcgcagccgacctccataatacagggtcgatttgtttgaggtgtcagaatgcccactacttactgttgggtgaccactgtgtgcctgattgcccctcggggtactatgccgagaggggcgcatgtaagaagtgtcattctagttgtcgaacgtgccagggtcggggcccgttctcatgcagtagctgtgacactaacctggtgctttcacatacaggcacatgctccacaacttgcttccccggtcattatttggacgacaaccatgtgtgtcagccatgcaacacacactgcgggagctgcgattctcaggcttcttgtactagctgccgcgaccctaacaaggtgcttctgttcggtgagtgccagtatgaatcttgcgcaccccagtattatctcgacttcagcacaaacacttgcaaagagtgtgattggagctgctctgcctgtagcggcccgcttaaaactgactgtctgcaatgtatggatgggtatgtactacaggatggcgcctgcgtggaacagtgcctgagctccttctatcaggatagtgggctgtgcaaaaactgtgatagctactgtcttcagtgccagggcccacacgaatgtactcgttgtaagggcccattcttgttgctggaggctcaatgcgtccaggagtgcggcaaggggtatttcgccgatcatgcgaagcacaaatgcacagcctgcccccaggggtgcctgcaatgcagccaccgggacaggtgtcacttgtgtgatcacggattcttccttaagagcgggctctgcgtgtataattgcgtgccaggattttctgtccacacaagcaatgaaacctgctctgggaaaattcatactccttctttacatgtgaacggctcacttattttacccataggtagcatcaaaccacttgacttctcgctgctgaacgtgcaggaccaggaagggagggtggaagaccttttattccacgtcgtgtccactcccactaacggacagctcgttctttcccggaatggaaaggaggtacaactggataaggctgggaggttcagctggaaggacgtgaacgagaagaaggtgaggtttgtgcactccaaggagaaactgcgcaaagggtatctgttcctgaaaatttctgaccagcagttcttttctgagccacagctcatcaatattcaggccttctccactcaagctccatacgtgctgcgcaatgaggtattacatatctcgcgaggggaaagagccactataacaacccagatgcttgatattcgggatgatgacaacccccaagatgtggtcatcgaaataatagacccaccccttcacggccaactccttcaaacattgcagagtccagccacacctatttaccagttccagctagatgaactgtcacgtgggctgctgcattatgctcacgacggaagtgacagcacttccgacgtggccgttttgcaggcgaacgacggccactccttccacaacatcctctttcaggttaagaccgttccccagaacgacaggggcttacaattagtcgccaactccatggtttgggtaccggaaggaggaatgttacagattactaatcgaattctgcaagctgaggcacccggagcctctgccgaggagataatatacaagataacacaggattatccccagtttggagaagtcgtcttgttagtgaatatgccagcagatagtcctgcggacgagggtcagcatctccccgacggcaggactgccacgccgaccagtacatttacccagcaggatatcaatgaagggatcgtctggtacaggcactcgggtgcccccgcccagtctgatagctttcggttcgaggtcagctcagcctccaacgctcagaccaggttagaatcccacatgttcaatatagccattctgccgcaaacccccgaagcgccaaaggtcagcctggaggctagcctgcatatgaccgctagggaggacgggctgacggtcatccaaccgcatagtctttcgttcattaactccgaaaaaccctcgggtaaaattgtctacaacatcacgcttccgcttcatcctaatcagggaattatcgagcaccgggaccatcctcacagccctatcagatatttcacgcaggaggacatcaatcagggaaaggtgatgtataggccgccacccgccgcgccccatctgcaggaacttatggccttcagttttgcgggactgcctgagtcagtgaaatttcatttcacggtcagtgacggagagcatactagtccagaaatggtgctcaccattcacctgctgcccagcgaccagcagctcccagtgttccaagtgactgcaccccggttagcagtgagtcctgggggctccactagcgtgggtctgcaggtggtggttcgggatgccgaaacggctcccaaagagctgttcttcgagctacggagacccccacagcacggcgttcttcttaagcataccgccgagtttcgccgccccatggctacgggggatacttttacgtacgaggacgtcgagaagaacgctttgcagtatattcacgacggctccagtacaagggaggatagtatggagatttcggtgacagatggccttacggtgacaatgctcgaggttcgggttgaggtctctctctctgaggatcggggaccccgactggcagcaggaagctccctgtccatcaccgtggccagcaagagcactgcaatcattactcgcagccatctagcctatgtagatgattctagccccgaccctgagatctggattcagctcaattatctgccctcatacggcaccctcctaagaatctcaggcagcgaggtggaggagctgagcgaagtgtctaattttaccatggaggacattaacaacaaaaagatccgatatagcgccgttttcgagactgacggtcacttagttaccgatagcttttattttagcgtgtccgatatggaccacaatcacctggacaaccagattttcactatcatgatcacccccgccgaaaatccacccccggtgatcgcatttgcagatttgatcacagtcgacgagggaggccgagctcctctgagctttcaccatttcttcgcaactgatgatgatgataatctccaacgggacgccataatcaagttgagcgccctgccaaagtacgggtgcatagagaacacgggtacgggagataggttcggtcccgaaacagcgtccgacttggaggccagcttccccatccaggatgtgcttgagaactacatttactactttcaaagtgttcacgagagcatcgaacctactcatgacatctttagcttctacgtgtcagacgggaccagccgttcggagatccactctatcaacatcactatagaggtcaaaacactagaagtagggaaagtcgaacccttgacaactatcttccacacaattcgagagcttagcctgtag

SEQ ID NO: 64443 - DNA, 2214 bp, Artificial Sequence
  derived and/or modified sequence
atgggcgtgctgaaggtgtggctgggcctggccctggccctggccgagtttgctgtgctgccccaccacagcgagggcgcctgtgtgtaccaggacagcctgctggctgatgccaccatctggaagccagacagctgccagagctgccgctgccacggggacatcgtcatctgcaagccagctgtgtgcaggaacccccagtgtgcctttgagaagggggaggtgctgcagattgctgccaaccagtgctgcccagaatgtgtgctgcggaccccaggcagctgccaccacgagaagaagatccacgagcacggcacagagtgggccagcagcccctgcagcgtgtgcagctgcaaccacggggaggtgcgctgcaccccccagccctgcccccccctgagctgtggccaccaggagctggccttcatccctgagggcagctgctgccctgtgtgtgtgggcctgggcaagccctgcagctatgagggccacgtgttccaggatggagaggactggaggctgagccgctgtgccaagtgcctgtgcagaaatggagtggcccagtgcttcaccgcccagtgccagcccctcttctgcaaccaggatgagaccgtggtgcgggtgcctgggaagtgctgcccccagtgcagcgcccggagctgcagcgctgctggccaggtgtatgagcacggggagcagtggagcgaaaatgcctgcaccacctgcatctgtgacagaggagaggtgcgctgccacaagcaggcctgcctgcccctgcgctgtgggaagggccagagccgggccaggagacatggccagtgctgtgaagaatgtgtgtccccagctggcagctgcagctatgatggagtggtgcgctaccaggatgagatgtggaagggcagcgcctgtgagttctgcatgtgtgaccacggccaggtgacctgccagacaggagaatgtgccaaggtggagtgtgccagagatgaggagctgatccacctggatggcaagtgctgcccagagtgcatcagcagaaatggctactgtgtgtatgaggagaccggggagttcatgagcagcaatgccagcgaggtgaagagaattcctgagggggagaagtgggaggatggcccctgcaaggtgtgtgaatgtagaggagcccaggtgacctgctatgagcccagctgccccccctgccctgtgggcaccctggccctggaggtgaagggccagtgctgcccagactgcacctctgtgcactgccacccagactgcctgacctgcagccagagcccagaccactgtgacctgtgccaggaccccaccaagctgctgcagaatggctggtgtgtgcacagctgtggcctgggcttctaccaggccggcagcctgtgcctggcctgccagccccagtgcagcacctgcaccagcggcctggagtgcagcagctgccagccccccctgctgatgagacatggccagtgtgtgcccacctgtggagatggcttctaccaggacagacacagctgtgctgtgtgccacgagagctgtgccggctgctggggccccacagagaagcactgcctggcctgccgggaccccctgcacgtgctgagagatggcggctgtgagagcagctgtgggaagggcttctacaaccggcagggcacctgcagcgcctgtgaccagagctgtgacagctgtggccccagcagcccccgctgcctgacctgcacagagaagacagtgctgcatgatggcaagtgcatgtctgagtgccctgggggctactatgcagatgccaccggccgctgcaaggtgtgccacaacagctgtgccagctgcagcggccccacccccagccactgcacagcctgcagcccccccaaggccctgcggcagggccactgcctgccccgctgtggggagggcttctacagcgaccatggagtgtgcaaggcctgccacagcagctgcctggcctgcatgggccctgcccccagccactgcaccggctgcaagaagccagaggagggcctgcaggtggagcagctgagtgatgtgggcatccccagcggggagtgcctggcccagtgccgggcccacttctacctggagagcacaggcatctgtgagggccagaacctggacttctgccagaacctggaggtgatctctgctgtgtgcctgggcatcagcagcacagagaactag

SEQ ID NO: 64444 - DNA, 954 bp, Artificial Sequence
  derived and/or modified sequence
atgggcgtgctgaaggtgtggctgggcctggccctggccctggccgagtttgctgtgctgccccaccacagcgagggcgcctgtgtgtaccaggacagcctgctggctgatgccaccatctggaagccagacagctgccagagctgccgctgccacggggacatcgtcatctgcaagccagctgtgtgcaggaacccccagtgtgcctttgagaagggggaggtgctgcagattgctgccaaccagtgctgcccagaatgtgtgctgcggaccccaggcagctgccaccacgagaagaagatccacgagcacggcacagagtgggccagcagcccctgcagcgtgtgcagctgcaaccacggggaggtgcgctgcaccccccagccctgcccccccctgagctgtggccaccaggagctggccttcatccctgagggcagctgctgccctgtgtgtgtgggcctgggcaagccctgcagctatgagggccacgtgttccaggatggagaggactggaggctgagccgctgtgccaagtgcctgtgcagaaatggagtggcccagtgcttcaccgcccagtgccagcccctcttctgcaaccaggatgagaccgtggtgcgggtgcctgggaagtgctgcccccagtgcagcgcccggagctgcagcgctgctggccaggtgtatgagcacggggagcagtggagcgaaaatgcctgcaccacctgcatctgtgacagaggagaggtgcgctgccacaagcaggcctgcctgcccctgcgctgtgggaagggccagagccgggccaggagacatggccagtgctgtgaagaatgtgtgtccccagccctggccagccagagcgtgggcatcaccggcatgagccaccacgcccagagcctgctgggccccttcctgacccagatcaagaagccccacttcagctgcctggagtag

SEQ ID NO: 64445 - DNA, 768 bp, Artificial Sequence
  derived and/or modified sequence
gagcggcagggccagagccgggccaggagacatggccagtgctgtgaagaatgtgtgtccccagctggcagctgcagctatgatggagtggtgcgctaccaggatgagatgtggaagggcagcgcctgtgagttctgcatgtgtgaccacggccaggtgacctgccagacaggagaatgtgccaaggtggagtgtgccagagatgaggagctgatccacctggatggcaagtgctgcccagagtgcatcagcagaaatggctactgtgtgtatgaggagaccggggagttcatgagcagcaatgccagcgaggtgaagagaattcctgagggggagaagtgggaggatggcccctgcaaggtgtgtgaatgtagaggagcccaggtgacctgctatgagcccagctgccccccctgccctgtgggcaccctggccctggaggtgaagggccagtgctgcccagactgcacctctgtgcactgccacccagactgcctgacctgcagccagagcccagaccactgtgacctgtgccaggaccccaccaagctgctgcagaatggctggtgtgtgcacagctgtggcctgggcttctaccaggccggcagcctgtgcctggatgatggcttcagcctgcctgcccctgtgctgcacgtgtaccagtgggccggcgtgctgatcctgcctgccagccctgcagatgctgcccgggctgtgtgtgcctacctgtggggccgcctgctgcccaggagccccttcctgtgctag

SEQ ID NO: 64446 - DNA, 840 bp, Artificial Sequence
  derived and/or modified sequence
atggtgctgaccatccacctgctgcccagcgaccagcagctgcctgtgttccaggtgacagccccccggctggccgtgtcccctgggggcagcacctctgtgggcctgcaggtggtggtgagagatgctgagacagcccccaaggagctgttctttgagctgcggcggcccccccagcacggcgtgctgctgaagcacacagctgagttcagaagacccatggccaccggggacaccttcacctatgaagatgtggagaagaatgccctgcagtacatccatgatggcagcagcaccagagaagattccatggagatctctgtgacagatggcctgactgtgaccatgctggaggtgcgggtggaggtgtccctgtctgaagatcggggcccccggctggccgccggcagcagcctgagcatcaccgtggccagcaagagcacagccatcatcaccaggagccacctggcctacgtggatgacagcagcccagaccctgagatctggatccagctgaactacctgcccagctatggcaccctgctgcgcatcagcggcagcgaggtggaggagctgtctgaggtgagcaacttcaccatggaggacatcaacaacaagaagatccgctacagcgctgtgtttgaaacagatggccacctggtgacagacagcttctacttctctgtgtctgacatggaccacaaccacctggacaaccagatcttcaccatcatgatcaccccagctgagaaccccccacctgtgattgcctttgctgacctgatcaccgtggatgaaggaggccgggcccccctgtccttccaccacttctgctactag

SEQ ID NO: 64447 - DNA, 5931 bp, Artificial Sequence
  derived and/or modified sequence
atgggcgtgctgaaggtgtggctgggcctggccctggccctggccgagtttgctgtgctgccccaccacagcgagggcgcctgtgtgtaccaggacagcctgctggctgatgccaccatctggaagccagacagctgccagagctgccgctgccacggggacatcgtcatctgcaagccagctgtgtgcaggaacccccagtgtgcctttgagaagggggaggtgctgcagattgctgccaaccagtgctgcccagaatgtgtgctgcggaccccaggcagctgccaccacgagaagaagatccacgagcacggcacagagtgggccagcagcccctgcagcgtgtgcagctgcaaccacggggaggtgcgctgcaccccccagccctgcccccccctgagctgtggccaccaggagctggccttcatccctgagggcagctgctgccctgtgtgtgtgggcctgggcaagccctgcagctatgagggccacgtgttccaggatggagaggactggaggctgagccgctgtgccaagtgcctgtgcagaaatggagtggcccagtgcttcaccgcccagtgccagcccctcttctgcaaccaggatgagaccgtggtgcgggtgcctgggaagtgctgcccccagtgcagcgcccggagctgcagcgctgctggccaggtgtatgagcacggggagcagtggagcgaaaatgcctgcaccacctgcatctgtgacagaggagaggtgcgctgccacaagcaggcctgcctgcccctgcgctgtgggaagggccagagccgggccaggagacatggccagtgctgtgaagaatgtgtgtccccagctggcagctgcagctatgatggagtggtgcgctaccaggatgagatgtggaagggcagcgcctgtgagttctgcatgtgtgaccacggccaggtgacctgccagacaggagaatgtgccaaggtggagtgtgccagagatgaggagctgatccacctggatggcaagtgctgcccagagtgcatcagcagaaatggctactgtgtgtatgaggagaccggggagttcatgagcagcaatgccagcgaggtgaagagaattcctgagggggagaagtgggaggatggcccctgcaaggtgtgtgaatgtagaggagcccaggtgacctgctatgagcccagctgccccccctgccctgtgggcaccctggccctggaggtgaagggccagtgctgcccagactgcacctctgtgcactgccacccagactgcctgacctgcagccagagcccagaccactgtgacctgtgccaggaccccaccaagctgctgcagaatggctggtgtgtgcacagctgtggcctgggcttctaccaggccggcagcctgtgcctggcctgccagccccagtgcagcacctgcaccagcggcctggagtgcagcagctgccagccccccctgctgatgagacatggccagtgtgtgcccacctgtggagatggcttctaccaggacagacacagctgtgctgtgtgccacgagagctgtgccggctgctggggccccacagagaagcactgcctggcctgccgggaccccctgcacgtgctgagagatggcggctgtgagagcagctgtgggaagggcttctacaaccggcagggcacctgcagcgcctgtgaccagagctgtgacagctgtggccccagcagcccccgctgcctgacctgcacagagaagacagtgctgcatgatggcaagtgcatgtctgagtgccctgggggctactatgcagatgccaccggccgctgcaaggtgtgccacaacagctgtgccagctgcagcggccccacccccagccactgcacagcctgcagcccccccaaggccctgcggcagggccactgcctgccccgctgtggggagggcttctacagcgaccatggagtgtgcaaggcctgccacagcagctgcctggcctgcatgggccctgcccccagccactgcaccggctgcaagaagccagaggagggcctgcaggtggagcagctgagtgatgtgggcatccccagcggggagtgcctggcccagtgccgggcccacttctacctggagagcacaggcatctgtgaggcctgccaccagagctgcttccgctgtgccggcaagagcccccacaactgcacagactgtggccccagccacgtgctgctggatggccagtgcctgagccagtgcccagatggctacttccaccaggagggcagctgcacagagtgccaccccacctgccggcagtgccacggccccctggagagtgactgcatcagctgctacccccacatcagcctgaccaatggaaactgcaggaccagctgccgggaggagcagttcctgaacctggtgggctactgtgccgactgccaccacctgtgccagcactgtgccgctgacctgcacaacacaggcagcatctgcctgcgctgccagaatgcccactacctgctgctgggggaccactgtgtgcctgactgccccagcggctactatgcagagcggggggcctgcaagaagtgccacagcagctgcaggacctgccagggccggggccccttcagctgcagcagctgtgacaccaacctggtgctgagccacacaggcacctgcagcaccacctgcttccctggccactacctggatgacaaccacgtgtgccagccctgcaacacccactgcggcagctgtgacagccaggccagctgcaccagctgccgggaccccaacaaggtgctgctgtttggagagtgccagtatgagagctgtgccccccagtactacctggacttcagcaccaacacctgcaaggaatgtgactggagctgcagcgcctgcagcggccccctgaagacagactgcctgcagtgcatggatggctacgtgctgcaggatggagcctgtgtggagcagtgcctgagcagcttctaccaggacagcggcctgtgcaagaactgtgacagctactgcctgcagtgccagggcccccatgaatgtacccgctgcaagggccccttcctgctgctggaggcccagtgtgtgcaggagtgtgggaagggctactttgctgaccacgccaagcacaagtgcacagcctgcccccagggctgcctgcagtgcagccaccgggaccgctgccacctgtgtgaccacggcttcttcctgaagagcggcctgtgtgtgtacaactgtgtgcccggcttctctgtgcacaccagcaatgagacctgcagcggcaagatccacacccccagcctgcacgtgaatggcagcctcatcctgcccatcggcagcatcaagcccctggacttcagcctgctgaatgtgcaggaccaggagggccgggtggaggacctgctcttccacgtggtgtccacccccaccaacggccagctggtgctgagcagaaatggcaaggaggtgcagctggacaaggccggccgcttctcctggaaggatgtgaatgagaagaaggtgcgctttgtgcacagcaaggagaagctgaggaagggctacctgttcctgaagatcagtgaccagcagttcttcagcgagccccagctgatcaacatccaggccttcagcacccaggccccctacgtgctgagaaatgaggtgctgcacatcagcagaggagagcgggccaccatcaccacccagatgctggacatcagagatgatgacaacccccaggatgtggtgattgagatcattgatcctcccctgcacggccagctgctgcagaccctgcagagccctgccacccccatctaccagttccagctggatgagctgagccggggcctgctgcactacgcccatgatggcagtgacagcaccagtgatgtggccgtgctgcaggccaatgatggccacagcttccacaacatcctcttccaggtgaagacagtgccccagaatgaccggggcctgcagctggtggccaacagcatggtgtgggtgcctgagggcggcatgctgcagatcaccaaccgcatcctgcaggccgaggcccctggggccagcgctgaggagatcatctacaagatcacccaggactacccccagtttggagaggtggtgctgctggtgaacatgcctgctgacagccctgcagatgagggccagcacctgcctgatggccgcacagccacccccaccagcaccttcacccagcaggacatcaatgaaggcatcgtgtggtaccgccacagcggggccccagcccagagcgacagcttccgctttgaggtgtcctctgccagcaatgcccagacccggctggagagccacatgttcaacatcgccatcctgccccagaccccagaggcccccaaggtgtccctggaggccagcctgcacatgacagcccgggaggatggcctgaccgtcatccagccccacagcctgtccttcatcaacagcgagaagcccagcggcaagatcgtgtacaacatcaccctgcccctgcaccccaaccagggcatcatcgagcaccgggaccacccccacagccccatccgctacttcacccaggaggacatcaaccagggcaaggtgatgtacagacctcctcctgctgccccccacctgcaggagctgatggccttctcctttgctggcctgcctgagagcgtgaagttccacttcaccgtgtctgatggagagcacaccagccctgagatggtgctgaccatccacctgctgcccagcgaccagcagctgcctgtgttccaggtgacagccccccggctggccgtgtcccctgggggcagcacctctgtgggcctgcaggtggtggtgagagatgctgagacagcccccaaggagctgttctttgagctgcggcggcccccccagcacggcgtgctgctgaagcacacagctgagttcagaagacccatggccaccggggacaccttcacctatgaagatgtggagaagaatgccctgcagtacatccatgatggcagcagcaccagagaagattccatggagatctctgtgacagatggcctgactgtgaccatgctggaggtgcgggtggaggtgtccctgtctgaagatcggggcccccggctggccgccggcagcagcctgagcatcaccgtggccagcaagagcacagccatcatcaccaggagccacctggcctacgtggatgacagcagcccagaccctgagatctggatccagctgaactacctgcccagctatggcaccctgctgcgcatcagcggcagcgaggtggaggagctgtctgaggtgagcaacttcaccatggaggacatcaacaacaagaagatccgctacagcgctgtgtttgaaacagatggccacctggtgacagacagcttctacttctctgtgtctgacatggaccacaaccacctggacaaccagatcttcaccatcatgatcaccccagctgagaaccccccacctgtgattgcctttgctgacctgatcaccgtggatgaaggaggccgggcccccctgtccttccaccacttctttgccacagatgatgatgacaacctgcagagagatgccatcatcaagctgagcgccctgcccaagtatggctgcatcgagaacacaggcaccggggaccgcttcggccctgagacagccagtgacctggaggccagcttccccatccaggatgtgctggagaactacatctactacttccagagcgtgcatgagagcattgagcccacccatgacatcttctccttctacgtgtctgatggcaccagccgctctgagatccacagcatcaacatcaccatcgaggtgaagaccctggaggtgggcaaggtggagcccctgaccaccatcttccacaccatccgggagctgagcctgtag

SEQ ID NO: 64448 - DNA, 2214 bp, Artificial Sequence
  derived and/or modified sequence
atgggcgtgctgaaggtgtggctgggcctggccctggccctggccgagttcgcagtgttaccccaccactcggaaggtgcctgcgtttatcaggatagtctcctggccgatgcaactatatggaaacctgacagttgtcaaagctgtaggtgtcatggggacatcgtgatatgtaaacccgcagtatgccggaatccacaatgtgcattcgaaaaaggtgaagtcctgcaaatcgccgccaatcagtgctgtccagagtgtgtccttcggacaccgggctcgtgtcaccacgaaaagaaaatccacgaacatggcaccgagtgggcttcctccccttgctcagtgtgttcctgcaatcacggagaggtgaggtgtaccccccagccttgcccgccactctcctgcgggcatcaggaattggcttttatccccgagggctcctgctgccccgtctgtgtaggattaggcaaaccgtgcagctacgaagggcacgtctttcaggacggcgaggactggcggctgtcacgctgtgccaaatgcctgtgcaggaatggagtcgctcaatgctttactgctcaatgccaacccttgttttgcaatcaggatgagacagtggtgcgtgtgcctggcaagtgctgtccacagtgctctgcccgctcttgcagtgctgcaggccaggtctatgagcacggcgaacagtggagcgagaatgcgtgcactacttgcatatgtgatcgaggagaggtgcgctgccacaaacaggcctgtcttccgctcagatgcggcaaggggcagagtagggccagacgtcacgggcagtgctgcgaggagtgcgttagcccagcgggctcctgcagctacgatggggtggtcagataccaggatgagatgtggaaaggaagcgcctgcgaattttgtatgtgtgatcacggccaggtgacctgccagacaggagagtgtgcaaaagttgagtgcgctagagatgaagaactgatacacctcgacggcaaatgctgcccagaatgtatatcccgaaatgggtactgtgtctatgaggagactggtgagtttatgagttccaatgccagcgaagttaagcgtatccccgaaggcgaaaaatgggaagacgggccttgtaaagtttgtgaatgccgtggagcacaagtaacctgttacgaaccttcctgccccccatgtcccgtgggtactcttgccctagaagtgaagggtcaatgttgtcccgactgtacgtcagtccattgtcatcccgattgtcttacttgcagtcagagcccagatcattgtgacctatgtcaggatcctacaaaactgctccagaatggctggtgcgtccattcgtgtggacttggcttttatcaggccggctcactttgtttagcatgccagccgcaatgttccacttgcacctcaggactggaatgtagcagctgtcagccaccactgttaatgagacatggacaatgtgttccaacctgtggcgatggcttttatcaggatcgccactcctgtgccgtctgccacgaaagctgcgcgggatgctggggacccacggagaagcattgcctggcctgtagagaccctttgcatgtgctccgcgatggggggtgcgaaagcagttgtggaaagggattttacaatagacaaggcacctgctcggcgtgcgatcagagctgtgactcatgtggaccctcttcgcctaggtgtctgacatgcactgagaaaacggtgctccacgatggaaaatgcatgtccgagtgccctggcggttactacgcggatgcaacggggcgctgtaaagtgtgccacaactcttgtgcctcttgcagcgggccaacccctagtcactgtaccgcttgcagcccgccaaaagctctgaggcagggacattgtcttcccaggtgcggagaaggtttctacagtgatcatggagtttgtaaggcctgtcattctagctgcctcgcctgcatgggtccagctcccagtcactgcaccgggtgcaaaaagcctgaagaaggattgcaagtcgagcagctcagcgacgtcgggattccatcaggggagtgtctcgcgcagtgtagggcccacttctatctggagagcaccggaatttgtgagggccaaaacctggatttctgccagaatcttgaggttatcagtgctgtctgtctgggaataagtagcacggaaaactag

SEQ ID NO: 64449 - DNA, 954 bp, Artificial Sequence
  derived and/or modified sequence
atgggcgtgctgaaggtgtggctgggcctggccctggccctggccgagtttgccgtccttccacaccactccgagggcgcctgcgtttatcaggactccttactcgctgacgcaactatttggaagccggatagctgccagagttgccgatgtcacggagatattgtcatttgtaagcccgctgtttgtagaaatcctcaatgcgcatttgagaagggcgaagtgctacagatagccgctaatcagtgttgtcccgaatgtgtgctgcgcacccccggaagttgccaccatgagaaaaaaattcatgagcacggcacagaatgggcaagtagtccgtgtagcgtgtgcagctgcaaccacggcgaagtgagatgcaccccgcaaccctgtccaccactatcttgtggacaccaagagcttgccttcatcccagagggttcatgctgcccggtgtgcgtggggctggggaagccttgttcctatgaggggcacgtttttcaggacggagaggactggagactctcacgctgtgccaagtgcttgtgtcggaatggcgtggcacagtgctttactgctcagtgccagccgttattctgcaaccaggatgaaaccgttgtacgcgtcccgggtaagtgctgcccccaatgcagtgctcgttcttgctccgccgcagggcaggtgtatgagcacggggagcagtggagcgagaatgcttgcacaacttgtatctgtgaccgcggagaggttcggtgccataaacaggcatgtctgcccttgagatgcgggaaagggcagagtcgggcccgcagacacgggcagtgctgcgaggagtgtgtaagtcctgccttggcctcgcagagcgttgggataacaggcatgtcccaccacgcccagagccttctggggccttttctgacccagatcaagaagccgcacttctcttgccttgagtag

SEQ ID NO: 64450 - DNA, 768 bp, Artificial Sequence
  derived and/or modified sequence
gagcggcagggccagagccgggcccggcggcacggccagtgctgcgaagaatgtgtatcgccggccgggtcatgtagctatgacggcgtggtccgctatcaagatgagatgtggaaaggttctgcttgtgagttttgtatgtgcgaccatgggcaagtcacctgccaaacgggggaatgcgcgaaggtggagtgcgctagggacgaggaactcattcaccttgacggcaagtgctgtcccgagtgcatttctcgcaatgggtattgtgtgtacgaggaaaccggcgaattcatgagctctaacgcttcagaagtcaaacggattcctgaaggcgagaaatgggaggacggcccgtgcaaagtctgcgaatgcagaggagcgcaagtcacctgctatgagccctcttgccccccatgtccagtcgggacactggccctggaagttaagggtcaatgttgccctgattgcactagcgtgcattgtcatcccgactgcctgacctgcagccagtcccctgaccactgcgatctgtgccaggaccccacaaagttgctgcagaacgggtggtgtgtgcattcttgtgggctggggttttaccaggccggcagcttgtgcctcgatgacggattcagccttccagctccggtcttgcacgtctaccagtgggccggtgtgcttatcctccccgcgtccccagcagacgccgctagggctgtgtgtgcgtatctttggggacgcttactgccacgatctccatttctgtgctag

SEQ ID NO: 64451 - DNA, 840 bp, Artificial Sequence
  derived and/or modified sequence
atggtgctgaccatccacctgctgcccagcgaccagcagctgcccgtttttcaagtgactgcccctcggcttgccgtgtcgccaggcggatcaacctcggtcgggttgcaggttgtcgtgagggacgccgaaactgcacctaaggaactattcttcgaactcaggcgtcctccgcagcacggcgtgcttctgaagcacaccgcggagttcagacgcccgatggctacaggagatacttttacctatgaggacgttgaaaagaacgcgctgcagtatatccacgacggcagctccacacgcgaggatagtatggagatttcagtgacggacggtctgactgtgaccatgctggaggtgcgtgtggaagtctccttgtccgaggacaggggacctaggctggccgccggtagttctctctctataacggtggcgagcaagtccacagcaatcattacaagatctcatctggcctacgtggacgactccagtccagaccctgagatctggattcagcttaactacctgccatcttacggcacactgcttcggatctccggttccgaggttgaggagttgtccgaggtctctaacttcacgatggaggacattaacaacaagaagataaggtatagcgccgtgttcgagactgacgggcatctcgtcacagatagcttctacttttccgtctcagatatggatcataaccatctcgataatcagatattcacaatcatgattaccccggctgaaaatcccccaccagtaatcgcatttgccgacctcataacagtagacgaaggggggagggcacccctgtcttttcaccacttctgctattag

SEQ ID NO: 64452 - DNA, 5931 bp, Artificial Sequence
  derived and/or modified sequence
atgggcgtgctgaaggtgtggctgggcctggccctggccctggccgagtttgccgttctgcctcaccatagcgagggggcctgtgtgtatcaggattcacttctggctgacgctaccatttggaaacctgatagctgtcaaagttgtcggtgtcacggcgatatagtaatttgcaaaccggctgtgtgcaggaacccccagtgtgctttcgaaaaaggagaagtgctccagattgccgctaaccagtgctgtccagaatgtgtgctccggacgccaggaagctgtcaccatgaaaagaaaatccatgagcatggcactgagtgggctagctctccatgcagcgtgtgctcctgtaaccacggggaggtgcgatgcactccgcagccatgccccccactctcttgtggtcatcaggagctagccttcatacccgaggggagctgttgtcccgtctgtgtgggactcgggaaaccctgtagctacgaaggccatgtcttccaagacggggaggattggcgcctaagtagatgcgcaaagtgcttatgtcgcaatggagtggcccagtgtttcacagcacaatgccagccattattctgtaaccaggacgagacagtggtgagggtgcccggaaaatgttgtccccagtgttctgccaggagctgtagcgcggcgggacaggtgtatgagcacggggaacagtggtcagagaacgcttgcacaacatgcatttgtgataggggcgaggtcagatgccataagcaggcttgtctaccactccgttgtggcaaaggtcagtccagggcacggcggcatggccaatgctgtgaagagtgcgtgagtcctgccggctcctgttcttatgatggtgttgtgaggtatcaggatgaaatgtggaagggatccgcatgtgagttctgtatgtgcgaccacggccaagtgacttgccagactggtgaatgcgctaaagtcgagtgtgcgcgtgacgaggaattgatacacctggacggaaaatgctgtcccgagtgtatttctcgcaatggctactgcgtgtacgaagaaaccggagagttcatgagttctaatgcctccgaggtgaaaaggattcctgaaggtgagaagtgggaggatggaccgtgcaaggtttgcgaatgtaggggagcccaggtaacatgctacgaaccaagctgtcccccttgccctgtgggtacactcgccctcgaggtcaaggggcagtgctgtcccgactgcacctcggtgcactgccacccagattgcttgacctgtagccagtctcccgatcactgcgatctctgccaggacccaacaaaactcctccagaacggatggtgcgtgcacagctgtgggttagggttctaccaggcgggaagcttgtgcctggcatgccagcctcaatgcagcacttgtacctcaggcctggaatgtagcagctgtcaaccccccctcctcatgcggcacggtcagtgcgtgccaacttgcggcgacggcttctatcaggaccggcatagctgcgctgtgtgtcacgaatcctgtgcaggatgctggggcccgacagaaaaacactgcctcgcctgtcgcgacccactgcacgtgctgcgggacggaggctgtgaaagctcatgtggcaaggggttctataaccggcagggcacctgctcagcttgcgaccagtcgtgtgacagctgcggaccttccagtccgaggtgtttgacctgcactgaaaaaaccgtgttgcatgacggcaagtgtatgtctgaatgtccaggcggatactacgctgatgcaacgggaagatgtaaggtgtgccataactcttgcgcgagctgtagcggacccacaccttcacattgtacggcgtgctcaccccccaaggctctgcgccaagggcactgcctgcccagatgtggagaaggattttattccgaccatggagtctgtaaggcttgccactcctcatgcctagcatgtatgggcccggcaccttcccactgtactggctgtaagaagcctgaggaaggcctgcaagttgaacagttgagcgacgtcggcattccctcaggcgaatgtcttgctcagtgtcgagctcatttttatttggagagcacagggatatgtgaggcttgccatcaatcctgcttcagatgtgcaggaaaaagccctcataattgcacagactgtggccctagccacgttcttctagacgggcagtgtctctcccagtgtccagatggatacttccaccaggaagggagctgcacggagtgccatccaacctgccggcagtgtcacggtcctcttgagagtgattgcataagctgttatccacatatttccctgaccaacggcaattgtcgaacatcttgtagggaggaacagttcctcaatctcgttgggtactgtgccgactgccatcatctgtgtcagcactgcgcggccgatttacacaacaccggatccatctgtttgcgctgccaaaacgcacactacctccttctcggcgaccattgcgtacccgactgccccagtgggtactacgcggagcgcggagcttgtaaaaaatgtcacagctcttgcagaacttgtcaaggccgaggcccgttttcgtgctcatcttgtgacactaatctggtgctgtctcatacaggcacttgctccacaacctgcttccctggtcactacctggatgataaccatgtgtgtcaaccttgtaacactcactgcgggtcgtgtgacagccaggcaagctgcaccagttgtagggaccctaacaaggtgctgctctttggggaatgccagtacgagtcctgtgcgccccaatattacttagactttagcaccaacacgtgcaaggaatgcgactggtcttgctctgcttgtagcgggcctcttaagacggactgtctgcagtgcatggatggctatgtactgcaagatggcgcgtgtgttgagcagtgtctgtcatcattttatcaggatagtggcctgtgtaaaaactgtgattcatactgcttgcagtgtcagggacctcatgagtgtacccgttgcaaaggacctttccttttgctggaggctcaatgcgtgcaggagtgcgggaagggatactttgctgaccatgccaaacataaatgcaccgcctgtccccaggggtgtctgcaatgctctcaccgcgaccgctgtcacttgtgtgaccacggatttttcctgaaatccggcctctgcgtttacaattgcgtccccggcttctcagtgcacactagtaatgagacctgcagcggtaaaattcatacgccttccttgcacgtgaacgggagtctgatcctgcccataggatctatcaaaccgcttgatttttccctgctgaatgtccaggaccaggaaggacgtgtggaggatcttctgtttcacgtggtgagcactcctaccaatggtcagctcgtgctctctcgtaatgggaaggaagtgcagcttgacaaggctgggcgcttctcttggaaggacgttaacgagaagaaggtcagattcgtccactccaaagaaaaactaaggaagggctacctatttctcaagatttctgatcaacagttttttagtgaaccccagttaatcaacattcaggcattctcgactcaggctccctatgtgttaagaaatgaggttctgcatatcagtcgtggcgaacgcgccaccatcacgacacaaatgctggatattagagatgacgacaatccacaggacgtggttatcgagattatagatccccccctgcacggtcagttactccagaccttacaaagtcccgccacgcccatctatcagtttcagctcgacgaactgagccgcgggctgttacattatgctcatgacggatccgacagcaccagcgatgtggccgtcttgcaggccaatgacggtcatagcttccacaacattctttttcaggtcaaaacagtgccgcagaacgaccggggcctacagttagttgcaaattctatggtgtgggtgcctgaggggggtatgctccagatcacaaatcggattctccaggcagaagccccaggagcctctgcggaagagattatttacaagatcacacaggactaccctcagtttggtgaagttgtcctcttagttaatatgcccgccgactcgcctgctgacgagggccagcacctccccgacggccgtactgccaccccaacctcaacctttactcaacaggatattaacgaggggatcgtttggtacagacactctggagcccccgcccagagcgattccttccgcttcgaagtaagtagcgcaagcaacgcccagaccagactggagagtcatatgtttaatatcgccattctaccacagacgcctgaagcaccaaaagtgtcgttagaggcatctctacatatgacagcgcgcgaagatgggctgactgtgattcagccccattccctgtcttttatcaactctgaaaagccttccggaaagattgtgtacaatatcacacttcccctccatcctaaccaggggattatcgagcaccgagaccatcctcattcaccaatcaggtattttactcaggaggatatcaaccaggggaaagtcatgtacagacctccacctgcagctccgcatctgcaggaattaatggccttctccttcgcgggcctccctgaaagcgtaaagttccattttacagttagcgacggagaacatacctccccagagatggtgttgacaatccacctcctccctagtgatcagcagcttcccgtctttcaggtaactgctcccagactagcggtgagccccggtggaagtacgtcggttgggctgcaagttgtggtgagagatgccgagactgcacctaaggaactgttctttgagcttcgcagaccacctcagcacggtgtgttgctgaagcataccgccgagttccggcgcccgatggcgactggggacacattcacatacgaagatgtggagaagaacgcccttcagtatattcatgacgggtcaagcactcgcgaagattctatggaaatttccgtgacagacggtctaacggtaacgatgttggaagtgcgggtggaggtctccttgtccgaagaccgcggtccacgcctcgcggcaggcagtagcctttctatcactgtggcaagcaaatccaccgcaattataactcgatcacatttggcctatgtagacgattcatctcccgatcccgagatctggatccagctaaattatctgccgtcatacggcaccttactgcgaatttctggatcggaagtggaggagctgtcggaggtgtcgaattttacaatggaagatattaacaataagaaaattcgatatagcgcagtgttcgaaaccgacggacatctcgtgacggacagcttttactttagcgtctccgatatggaccataatcacctcgataaccagatattcacaataatgatcacgcctgccgaaaaccccccgccagtaatagcattcgcggacctgatcaccgtcgacgagggggggagagctccgttaagcttccatcatttctttgctaccgatgacgacgacaatctccagcgcgacgccattatcaagctatctgcgcttccgaaatatgggtgcattgaaaacaccggaaccggggaccgctttggcccggagaccgctagcgatcttgaagcttcattcccaattcaggacgtgctcgagaattacatttactacttccaatctgtacacgagagcattgagcccacacacgacatcttttccttctacgtgtcagatggaacctcacgcagtgaaattcattctatcaacatcaccattgaagtcaagaccctggaggtcggtaaggtagagcccctaaccaccatcttccacacgattagagaactttcgctgtag

SEQ ID NO: 64453 - DNA, 2214 bp, Artificial Sequence
  derived and/or modified sequence
atgggagtgctgaaggtgtggctcggactcgctttggccttggccgagttcgctgtcctgcctcatcattcggagggcgcttgcgtgtatcaggacagcctgctggccgacgcaactatttggaagccagattcttgtcagagttgcagatgccacggtgacattgtgatatgtaagcctgccgtctgtcgtaaccctcaatgcgcgtttgagaaaggagaggtgctgcaaatcgccgcaaaccagtgttgccctgagtgcgtcctgcgcaccccgggtagttgtcaccacgaaaaaaaaatacatgaacacggaaccgaatgggctagctcaccgtgctctgtctgcagctgtaaccacggagaagtgcgttgtacgccacagccatgccctcccctgagttgcggtcaccaggaactcgccttcatacccgaaggctcgtgttgccctgtgtgtgtgggattgggcaaaccctgctcgtatgagggccatgtttttcaggacggagaggactggaggctgagtcgatgcgcaaagtgtctatgccggaacggtgtggcccagtgtttcacggcccagtgccagccccttttctgtaatcaggacgagaccgtggttcgagtgcctggaaaatgctgtcctcagtgtagcgctcggagctgtagcgctgccggacaagtttacgaacacggcgaacagtggtcagaaaatgcctgtactacatgcatctgtgatcggggagaggtgcgctgccataagcaagcgtgccttccgctgagatgcggtaaaggacagtctcgggctcggagacacggtcaatgttgcgaagaatgtgtaagccccgctggcagctgctcttacgatggagtagtaagataccaggatgaaatgtggaaagggtctgcttgcgaattctgtatgtgtgaccatggacaggtcacatgtcagaccggcgagtgtgctaaggtagagtgcgcgcgtgacgaggagctgattcatctagatggcaaatgttgccctgagtgcatatcaaggaacgggtattgcgtatatgaggagaccggagagtttatgtcttcaaatgcttcggaggtgaaacgtatccctgaaggagaaaagtgggaggacggcccttgcaaggtctgcgaatgtcgaggcgctcaggtgacatgttacgagccatcgtgtccaccttgccctgtcggcaccctggcccttgaggtgaagggccagtgttgcccagactgtacatctgtgcactgccaccccgattgcttgacctgttcccagtctcccgatcactgtgatctgtgccaggatccgaccaagctactccagaacgggtggtgcgtacacagctgtggactgggtttctaccaagctggaagcctttgccttgcctgccagcctcagtgttcaacttgtaccagcggactcgagtgctccagttgccagcctccgcttctcatgcgccatgggcaatgtgtgcctacctgcggtgacgggttttaccaggacaggcattcatgtgctgtttgccacgagagctgcgctgggtgctggggccctaccgagaagcattgcctggcctgcagagaccctctgcatgtgcttcgcgacgggggatgcgaaagctcttgtggcaagggcttctataaccgacagggtacatgctcggcatgtgaccagtcgtgcgactcctgcggtccaagctctcctaggtgcctgacctgcaccgaaaagaccgtcctccacgacggtaagtgcatgtcagagtgccctggaggctattacgcagatgcgaccggtcggtgcaaggtctgtcacaactcctgcgcttcttgttctggacccacgccatcacactgcacagcatgctcccctcctaaggctctgagacaggggcattgcttacctcggtgcggcgaaggcttttactcggaccatggggtgtgcaaggcctgtcatagcagctgcttagcctgtatggggccagccccaagccattgcacagggtgtaaaaagcctgaggagggcctgcaggtggagcagctttcagacgttggtattccaagtggcgaatgtctggctcagtgccgagcccacttctacctcgagtcaaccgggatttgcgagggtcaaaacctggacttctgccagaacttagaagtgatcagcgcagtgtgtctcggaatctcaagcactgagaactag

SEQ ID NO: 64454 - DNA, 954 bp, Artificial Sequence
  derived and/or modified sequence
atgggcgttcttaaggtttggctgggtttggccctggctctggctgaatttgccgtgctgccacatcattctgagggtgcctgtgtgtatcaggatagcttgcttgccgacgccacgatctggaaaccagacagctgccaaagctgtagatgtcatggcgacatcgtgatttgcaaacccgcagtctgcagaaacccacagtgtgcattcgagaagggggaagtgctgcaaatcgctgcgaaccaatgttgccctgaatgcgtactgaggacacctgggagttgtcatcacgaaaagaagatccacgagcacggtactgaatgggcttcctctccctgctcagtgtgctcctgtaatcacggagaagttcggtgtacaccacagccctgccctcccctgtcttgcggccaccaggaactggctttcattcccgagggcagttgttgtcccgtgtgcgtaggtctgggcaagccctgctcttacgaagggcacgtattccaggacggagaggattggaggttgtctcgctgtgctaagtgcctctgccggaatggagtggcccagtgctttaccgctcagtgtcagcccttgttttgcaaccaagacgagaccgtagtccgggtccctggtaaatgttgtcctcagtgtagcgccaggtcttgttcagccgctggtcaagtgtacgaacatggggaacagtggtccgagaatgcttgtaccacgtgtatatgtgatcggggagaagtccggtgtcataaacaggcctgtttgcccctacggtgcgggaagggacagagcagagctagaaggcacggacagtgctgtgaggagtgtgttagcccggctctggcctcgcagtcagtgggaattactggaatgtctcaccatgcccaaagtctgcttgggccattcttaacccaaattaaaaaaccgcactttagctgcctggaatag

SEQ ID NO: 64455 - DNA, 768 bp, Artificial Sequence
  derived and/or modified sequence
gagcgccagggccagagtcgggcacgcagacacgggcagtgctgcgaagagtgtgtctcccccgcaggctcctgctcttatgatggcgtcgttcggtaccaggatgaaatgtggaaaggttccgcctgcgaattctgcatgtgcgatcacggtcaggttacatgccaaaccggcgaatgcgccaaagtcgaatgcgctagggatgaggagttaattcacctagatggcaagtgttgcccggagtgtatttcccgcaacggctactgcgtgtacgaagagaccggggagtttatgagctccaacgccagtgaagtgaaacggattccagagggcgaaaaatgggaagatggcccatgtaaagtgtgcgaatgccgtggagcacaggtgacttgctacgagcctagttgccccccatgtcccgtggggacccttgcactcgaagtgaagggccagtgctgtcccgattgtaccagcgtacactgccaccctgactgtctcacttgtagccaatccccagaccactgcgacctgtgccaggatcctaccaagctgctgcagaatgggtggtgtgttcactcctgtgggctcggcttctaccaggcgggttccctgtgcctcgacgacgggttcagtctcccagcacccgttctccacgtgtaccagtgggcaggcgtgttgatccttccagcttctccggctgacgccgctcgcgctgtgtgcgcatacctgtggggcaggctcctcccaaggtctccctttctgtgctag

SEQ ID NO: 64456 - DNA, 840 bp, Artificial Sequence
  derived and/or modified sequence
atggtactgaccatccacctactgccttcagatcagcagttaccggtgtttcaggtgaccgctccgaggctggctgtatcacccggaggctcaacgagcgtcggactccaggtcgtggttcgcgacgcagagactgccccaaaggaactgttcttcgaactgcgccgaccgccacagcacggagtgctgctgaagcatactgctgagtttcgccgacccatggccacgggtgacacctttacctatgaagatgttgaaaagaacgcattacagtacatacacgatggcagctctactcgggaggattctatggagattagcgtcactgatggcttgacggtcaccatgctcgaggtgcgtgtcgaggtatctttaagcgaggacaggggaccaagattggctgcgggatcaagcctgtccattacagtggcatctaagtcaacagcaattatcacaaggagccacttggcctacgttgacgacagctctcccgacccagaaatttggatccagctgaactatctcccttcatatggcacccttctgcgcatctcaggttccgaagttgaagagctgtctgaggtgagcaatttcacaatggaggatataaataataaaaagattcgatactcggccgtgttcgagaccgacggtcatctggttaccgattcattctacttcagtgtttccgatatggatcacaatcatctcgacaatcagatctttacaataatgattacacccgcagagaacccacctcccgtcatcgcatttgccgatctgattacagtggacgagggcggtagggcgcctttgtcttttcaccacttttgctactag

SEQ ID NO: 64457 - DNA, 5930 bp, Artificial Sequence
  derived and/or modified sequence
atgggtgtgcttaaagtgtggctcggcctggccttggctctagccgaatttgccgtgcttccacatcatagcgagggcgcatgcgtctatcaggacagtctcttggctgacgctaccatctggaaacccgactcgtgccagtcttgccgctgccacggggacatcgttatctgtaaacccgctgtgtgcaggaatccacagtgtgctttcgagaaaggggaagtcttacagatcgccgctaaccagtgttgtcccgaatgtgtactgcggactcccggatcttgtcatcacgagaagaagatccacgagcatggcacggaatgggcttcatcgccctgcagcgtctgttcttgcaaccacggggaggtgagatgcaccccccaaccctgcccacctctatcctgcggacatcaggaactggcctttatccccgaaggaagctgctgtcccgtatgtgtaggactcggcaagccctgcagctatgaggggcacgtgtttcaggacggagaagattggagactctctcgctgcgccaaatgcttatgtcgtaatggagtcgcacagtgttttacagcacaatgccagcctctcttctgcaaccaggacgaaaccgtcgttagagtacctgggaaatgttgcccccagtgttctgctcgaagctgtagtgccgcaggacaggtgtacgaacatggggagcagtggagtgaaaatgcctgcacaacgtgtatttgtgaccgcggtgaggtgcgttgtcacaagcaggcctgcctgccacttaggtgcggcaaaggccaatctcgtgccagacggcacggtcagtgctgtgaggagtgcgtgtctcctgccggatcctgctcgtacgatggggtagtccgataccaagacgagatgtggaaaggcagcgcatgtgagttctgtatgtgtgaccatggccaggtgacatgtcaaaccggggagtgcgctaaagtggagtgcgcgagggatgaggagctcatccacctcgatggaaagtgttgtcccgaatgtatcagcaggaacggttactgcgtctatgaagaaaccggagaattcatgagctccaatgcgagtgaagtgaaacgaattccggaaggggagaaatgggaggatggcccttgtaaagtttgcgaatgtcggggagctcaggtgacttgctacgagccttcatgccccccttgtcccgtgggcacactggccctggaagtcaagggtcagtgctgtcccgactgcacgtccgtccactgccaccctgactgtctcacgtgctcccagagtccagatcactgcgatctctgccaagacccaacgaaactcctacagaatggctggtgcgtgcactcctgcggcctgggattttatcaggcaggctcactgtgtctggcatgccagccccagtgcagcacatgtaccagcggtttggaatgctcatcctgccagcctcccttgctaatgcgccacggacagtgtgtcccaacctgcggtgatgggttctatcaggatagacattcttgtgcagtgtgtcacgagagctgcgccggatgttggggtccaaccgagaagcactgcctggcgtgcagagacccattacacgtcctccgggacggagggtgcgaatcctcttgcggtaaaggcttttataatcggcagggtacatgctcagcatgtgatcaatcttgcgatagctgtggtccatcaagccctcgctgccttacctgcacggaaaaaacagtcctgcatgatgggaagtgcatgtccgaatgcccaggagggtattacgcggatgctaccggccgatgcaaggtatgccacaattcttgtgctagctgttctggcccaaccccctcccattgtaccgcctgttcaccgcctaaggcattacgacagggccattgcctccccagatgcggagaaggattctatagtgaccatggcgtctgtaaagcttgtcactccagttgtctggcatgtatgggaccagctccgtcccactgcactggttgtaaaaaacccgaggaaggcctacaggtggaacagctgtctgacgtcggcatcccttctggagagtgcctggcacaatgcagagctcatttctatctggagtccacaggcatctgcgaggcatgccatcagagctgcttccgctgcgccggtaaaagtccccacaattgtaccgactgtggtccatctcatgtgttattagatggccagtgcctatcacagtgcccagacggctatttccatcaggaggggtcctgtactgaatgtcatcccacttgtcgacagtgccatgggcctcttgagtccgattgtatttcatgttatcctcatataagtttgaccaatgggaattgcaggacgtcatgcagggaggagcagtttctcaaccttgtgggttactgtgccgattgccatcacttgtgccagcattgcgctgccgacctccataatacaggatctatctgtctcaggtgccagaatgctcactaccttctgttaggggatcactgcgtcccagattgccctagcgggtattacgctgagaggggcgcttgtaaaaagtgccattccagctgtaggacatgccaaggaagagggcctttcagctgtagctcctgcgataccaacctcgtgttgagccacaccggtacgtgtagtaccacttgtttcccaggtcactacctggatgacaatcatgtgtgccaaccctgtaatactcactgcggctcttgtgacagccaagcaagttgtacctcatgcagggacccaaataaagtgctgctgtttggcgaatgtcaatatgagagctgcgccccacaatactacctggacttctcaaccaacacctgtaaggagtgtgattggtcgtgctcggcatgcagcggtccactcaaaaccgattgtttacagtgtatggacgggtatgtattgcaggacggtgcctgtgtggagcaatgtctgtcatctttctaccaggactccggactgtgtaagaactgcgattcatactgtctgcagtgccaggggcctcatgagtgcaccaggtgcaaagggcctttcttgttgctggaagcccagtgcgtgcaagagtgtggcaaaggctacttcgctgatcacgccaagcataagtgcacggcctgtccccaaggctgcctacagtgtagtcaccgtgacagatgtcacctttgcgatcacggtttttttttgaagtccgggctgtgtgtctataactgcgtgccaggattctcggtgcacacatctaacgagacctgcagcggcaagattcacacacccagcctccatgtgaacggatctctgattctacctatcgggagtataaaacccctggactttagtctgctgaacgtgcaagatcaggaaggacgggttgaggatcttctgttccacgtggtgtccacaccgaccaatggtcagctggtcctctccagaaatgggaaagaggtccaactggataaagctggtcgcttcagctggaaagacgtgaatgagaaaaaagtccggttcgtgcactcaaaggagaagctgaggaaagggtacctgtttttgaagatctcagaccagcagtttttctccgaaccgcaactgatcaacatacaggcattcagtacacaggctccgtacgtgctgcggaatgaggttcttcacataagtcggggtgaacgagccacgattaccactcaaatgttggatataagggatgacgataacccacaggatgtggtgatcgagatcatagatcctcccctgcacggccaactgctccagacactgcaatcaccagccacacccatttaccagttccagttagacgagctgagccgcggactgctgcattacgctcacgacgggagcgatagtacctctgacgtcgccgtcctgcaggccaacgacggacacagtttccataacattttgtttcaggtgaagactgtgccccaaaacgatcggggtctgcaactcgtcgctaattccatggtgtgggtaccggaggggggaatgctgcagatcacaaaccggatcctgcaggctgaagcccctggggcatctgccgaagaaattatctacaagatcactcaggattacccgcagttcggcgaagtggtgttgctggtcaacatgccagctgactcacccgctgatgaaggtcagcaccttccagacggacgtacagccactcccacctcgacttttacccagcaggatatcaatgaaggaattgtctggtaccgacacagtggcgcaccggctcagagcgatagcttccggtttgaggtgtcttcagcctctaatgcccagacaagactggaatctcatatgttcaatattgcaatcttaccccagacccctgaagcacctaaagtctcactggaggctagcctgcatatgaccgcccgtgaagacgggctaaccgtgatccaaccacacagtctgtcctttatcaacagcgagaagcccagcgggaaaatagtatacaacattaccctgccattgcaccctaaccagggcattattgaacacagggatcatccccacagcccaatcaggtatttcacacaggaagatattaatcagggaaaagtaatgtaccgacctcctccagctgcccctcacctgcaggaattgatggcctttagcttcgctggcctgccagaaagtgttaaattccacttcactgtcagcgacggggaacatacatcccccgaaatggtgcttacaatccacttactcccctctgaccagcagctgcctgtgttccaggtgactgccccaaggctggcagtgtcacccggtggctctacctccgtcggtctgcaggtcgtggtgagagatgccgagacggccccaaaggagctcttctttgaactgagaaggcctcctcagcatggagtcctgctgaaacatactgccgagtttaggcgacctatggccaccggagacacattcacatacgaagatgtggagaaaaacgccctccagtacatacatgatgggagctccacacgcgaagacagtatggagatcagcgtgactgatggcctgaccgttaccatgctggaagttcgtgtggaagttagtctgtcagaggatcgaggacctcggctcgccgcaggctcctcactgtcaataaccgttgcgtcaaaaagtacagctattatcaccagatctcacctggcgtacgttgatgatagtagccccgatcccgaaatttggatacagctgaattatttgccttcctatgggactctattgagaatttctgggtcagaagtggaggaactgtcggaggtgagtaatttcactatggaggacatcaataacaaaaagatccgctattcagccgtgtttgagacagacggccacctcgtaacagactcgttctacttctccgtgtctgatatggaccacaaccatctcgataatcaaatcttcaccattatgatcacccccgcagagaatcccccaccggtgatcgccttcgccgacctgataaccgtcgacgaggggggaagagcccctctctcctttcaccactttttcgccacagacgacgacgacaatctgcagcgcgatgctatcataaagctctcagctctgccaaagtatggctgcatagaaaacactggcactggcgatcgtttcgggccagagactgcatctgatctggaagcctcattcccaattcaggacgtcctcgagaattatatctattatttccagtccgtccacgagtcaatcgaacctacccatgatatcttcagcttttatgtgagtgatggcaccagtcgaagcgaaatccatagcattaacatcacgattgaggtgaaaacactagaagttggcaaagttgagccactcactactatttttcacaccatcagggaattgtccctgta

SEQ ID NO: 64458 - DNA, 2214 bp, Artificial Sequence
  derived and/or modified sequence
atgggcgtgctgaaggtgtggctgggcctggccctggccctggccgagttcgccgtgctgccccaccacagcgagggcgcctgcgtgtaccaggacagcctgctggccgacgccaccatctggaagcccgacagctgccagagctgcagatgccacggcgacatcgtgatctgcaagcccgccgtgtgcagaaacccccagtgcgccttcgagaagggcgaggtgctgcagatcgccgccaaccagtgctgccccgagtgcgtgctgagaacccccggcagctgccaccacgagaagaagatccacgagcacggcaccgagtgggccagcagcccctgcagcgtgtgcagctgcaaccacggcgaggtgagatgcaccccccagccctgcccccccctgagctgcggccaccaggagctggccttcatccccgagggcagctgctgccccgtgtgcgtgggcctgggcaagccctgcagctacgagggccacgtgttccaggacggcgaggactggagactgagcagatgcgccaagtgcctgtgcagaaacggcgtggcccagtgcttcaccgcccagtgccagcccctgttctgcaaccaggacgagaccgtggtgagagtgcccggcaagtgctgcccccagtgcagcgccagaagctgcagcgccgccggccaggtgtacgagcacggcgagcagtggagcgagaacgcctgcaccacctgcatctgcgacagaggcgaggtgagatgccacaagcaggcctgcctgcccctgagatgcggcaagggccagagcagagccagaagacacggccagtgctgcgaggagtgcgtgagccccgccggcagctgcagctacgacggcgtggtgagataccaggacgagatgtggaagggcagcgcctgcgagttctgcatgtgcgaccacggccaggtgacctgccagaccggcgagtgcgccaaggtggagtgcgccagagacgaggagctgatccacctggacggcaagtgctgccccgagtgcatcagcagaaacggctactgcgtgtacgaggagaccggcgagttcatgagcagcaacgccagcgaggtgaagagaatccccgagggcgagaagtgggaggacggcccctgcaaggtgtgcgagtgcagaggcgcccaggtgacctgctacgagcccagctgccccccctgccccgtgggcaccctggccctggaggtgaagggccagtgctgccccgactgcaccagcgtgcactgccaccccgactgcctgacctgcagccagagccccgaccactgcgacctgtgccaggaccccaccaagctgctgcagaacggctggtgcgtgcacagctgcggcctgggcttctaccaggccggcagcctgtgcctggcctgccagccccagtgcagcacctgcaccagcggcctggagtgcagcagctgccagccccccctgctgatgagacacggccagtgcgtgcccacctgcggcgacggcttctaccaggacagacacagctgcgccgtgtgccacgagagctgcgccggctgctggggccccaccgagaagcactgcctggcctgcagagaccccctgcacgtgctgagagacggcggctgcgagagcagctgcggcaagggcttctacaacagacagggcacctgcagcgcctgcgaccagagctgcgacagctgcggccccagcagccccagatgcctgacctgcaccgagaagaccgtgctgcacgacggcaagtgcatgagcgagtgccccggcggctactacgccgacgccaccggcagatgcaaggtgtgccacaacagctgcgccagctgcagcggccccacccccagccactgcaccgcctgcagcccccccaaggccctgagacagggccactgcctgcccagatgcggcgagggcttctacagcgaccacggcgtgtgcaaggcctgccacagcagctgcctggcctgcatgggccccgcccccagccactgcaccggctgcaagaagcccgaggagggcctgcaggtggagcagctgagcgacgtgggcatccccagcggcgagtgcctggcccagtgcagagcccacttctacctggagagcaccggcatctgcgagggccagaacctggacttctgccagaacctggaggtgatcagcgccgtgtgcctgggcatcagcagcaccgagaactag

SEQ ID NO: 64459 - DNA, 954 bp, Artificial Sequence
  derived and/or modified sequence
atgggcgtgctgaaggtgtggctgggcctggccctggccctggccgagttcgccgtgctgccccaccacagcgagggcgcctgcgtgtaccaggacagcctgctggccgacgccaccatctggaagcccgacagctgccagagctgcagatgccacggcgacatcgtgatctgcaagcccgccgtgtgcagaaacccccagtgcgccttcgagaagggcgaggtgctgcagatcgccgccaaccagtgctgccccgagtgcgtgctgagaacccccggcagctgccaccacgagaagaagatccacgagcacggcaccgagtgggccagcagcccctgcagcgtgtgcagctgcaaccacggcgaggtgagatgcaccccccagccctgcccccccctgagctgcggccaccaggagctggccttcatccccgagggcagctgctgccccgtgtgcgtgggcctgggcaagccctgcagctacgagggccacgtgttccaggacggcgaggactggagactgagcagatgcgccaagtgcctgtgcagaaacggcgtggcccagtgcttcaccgcccagtgccagcccctgttctgcaaccaggacgagaccgtggtgagagtgcccggcaagtgctgcccccagtgcagcgccagaagctgcagcgccgccggccaggtgtacgagcacggcgagcagtggagcgagaacgcctgcaccacctgcatctgcgacagaggcgaggtgagatgccacaagcaggcctgcctgcccctgagatgcggcaagggccagagcagagccagaagacacggccagtgctgcgaggagtgcgtgagccccgccctggccagccagagcgtgggcatcaccggcatgagccaccacgcccagagcctgctgggccccttcctgacccagatcaagaagccccacttcagctgcctggagtag

SEQ ID NO: 64460 - DNA, 768 bp, Artificial Sequence
  derived and/or modified sequence
gagagacagggccagagcagagccagaagacacggccagtgctgcgaggagtgcgtgagccccgccggcagctgcagctacgacggcgtggtgagataccaggacgagatgtggaagggcagcgcctgcgagttctgcatgtgcgaccacggccaggtgacctgccagaccggcgagtgcgccaaggtggagtgcgccagagacgaggagctgatccacctggacggcaagtgctgccccgagtgcatcagcagaaacggctactgcgtgtacgaggagaccggcgagttcatgagcagcaacgccagcgaggtgaagagaatccccgagggcgagaagtgggaggacggcccctgcaaggtgtgcgagtgcagaggcgcccaggtgacctgctacgagcccagctgccccccctgccccgtgggcaccctggccctggaggtgaagggccagtgctgccccgactgcaccagcgtgcactgccaccccgactgcctgacctgcagccagagccccgaccactgcgacctgtgccaggaccccaccaagctgctgcagaacggctggtgcgtgcacagctgcggcctgggcttctaccaggccggcagcctgtgcctggacgacggcttcagcctgcccgcccccgtgctgcacgtgtaccagtgggccggcgtgctgatcctgcccgccagccccgccgacgccgccagagccgtgtgcgcctacctgtggggcagactgctgcccagaagccccttcctgtgctag

SEQ ID NO: 64461 - DNA, 840 bp, Artificial Sequence
  derived and/or modified sequence
atggtgctgaccatccacctgctgcccagcgaccagcagctgcccgtgttccaggtgaccgcccccagactggccgtgagccccggcggcagcaccagcgtgggcctgcaggtggtggtgagagacgccgagaccgcccccaaggagctgttcttcgagctgagaagacccccccagcacggcgtgctgctgaagcacaccgccgagttcagaagacccatggccaccggcgacaccttcacctacgaggacgtggagaagaacgccctgcagtacatccacgacggcagcagcaccagagaggacagcatggagatcagcgtgaccgacggcctgaccgtgaccatgctggaggtgagagtggaggtgagcctgagcgaggacagaggccccagactggccgccggcagcagcctgagcatcaccgtggccagcaagagcaccgccatcatcaccagaagccacctggcctacgtggacgacagcagccccgaccccgagatctggatccagctgaactacctgcccagctacggcaccctgctgagaatcagcggcagcgaggtggaggagctgagcgaggtgagcaacttcaccatggaggacatcaacaacaagaagatcagatacagcgccgtgttcgagaccgacggccacctggtgaccgacagcttctacttcagcgtgagcgacatggaccacaaccacctggacaaccagatcttcaccatcatgatcacccccgccgagaaccccccccccgtgatcgccttcgccgacctgatcaccgtggacgagggcggcagagcccccctgagcttccaccacttctgctactag

SEQ ID NO: 64462 - DNA, 5931 bp, Artificial Sequence
  derived and/or modified sequence
atgggcgtgctgaaggtgtggctgggcctggccctggccctggccgagttcgccgtgctgccccaccacagcgagggcgcctgcgtgtaccaggacagcctgctggccgacgccaccatctggaagcccgacagctgccagagctgcagatgccacggcgacatcgtgatctgcaagcccgccgtgtgcagaaacccccagtgcgccttcgagaagggcgaggtgctgcagatcgccgccaaccagtgctgccccgagtgcgtgctgagaacccccggcagctgccaccacgagaagaagatccacgagcacggcaccgagtgggccagcagcccctgcagcgtgtgcagctgcaaccacggcgaggtgagatgcaccccccagccctgcccccccctgagctgcggccaccaggagctggccttcatccccgagggcagctgctgccccgtgtgcgtgggcctgggcaagccctgcagctacgagggccacgtgttccaggacggcgaggactggagactgagcagatgcgccaagtgcctgtgcagaaacggcgtggcccagtgcttcaccgcccagtgccagcccctgttctgcaaccaggacgagaccgtggtgagagtgcccggcaagtgctgcccccagtgcagcgccagaagctgcagcgccgccggccaggtgtacgagcacggcgagcagtggagcgagaacgcctgcaccacctgcatctgcgacagaggcgaggtgagatgccacaagcaggcctgcctgcccctgagatgcggcaagggccagagcagagccagaagacacggccagtgctgcgaggagtgcgtgagccccgccggcagctgcagctacgacggcgtggtgagataccaggacgagatgtggaagggcagcgcctgcgagttctgcatgtgcgaccacggccaggtgacctgccagaccggcgagtgcgccaaggtggagtgcgccagagacgaggagctgatccacctggacggcaagtgctgccccgagtgcatcagcagaaacggctactgcgtgtacgaggagaccggcgagttcatgagcagcaacgccagcgaggtgaagagaatccccgagggcgagaagtgggaggacggcccctgcaaggtgtgcgagtgcagaggcgcccaggtgacctgctacgagcccagctgccccccctgccccgtgggcaccctggccctggaggtgaagggccagtgctgccccgactgcaccagcgtgcactgccaccccgactgcctgacctgcagccagagccccgaccactgcgacctgtgccaggaccccaccaagctgctgcagaacggctggtgcgtgcacagctgcggcctgggcttctaccaggccggcagcctgtgcctggcctgccagccccagtgcagcacctgcaccagcggcctggagtgcagcagctgccagccccccctgctgatgagacacggccagtgcgtgcccacctgcggcgacggcttctaccaggacagacacagctgcgccgtgtgccacgagagctgcgccggctgctggggccccaccgagaagcactgcctggcctgcagagaccccctgcacgtgctgagagacggcggctgcgagagcagctgcggcaagggcttctacaacagacagggcacctgcagcgcctgcgaccagagctgcgacagctgcggccccagcagccccagatgcctgacctgcaccgagaagaccgtgctgcacgacggcaagtgcatgagcgagtgccccggcggctactacgccgacgccaccggcagatgcaaggtgtgccacaacagctgcgccagctgcagcggccccacccccagccactgcaccgcctgcagcccccccaaggccctgagacagggccactgcctgcccagatgcggcgagggcttctacagcgaccacggcgtgtgcaaggcctgccacagcagctgcctggcctgcatgggccccgcccccagccactgcaccggctgcaagaagcccgaggagggcctgcaggtggagcagctgagcgacgtgggcatccccagcggcgagtgcctggcccagtgcagagcccacttctacctggagagcaccggcatctgcgaggcctgccaccagagctgcttcagatgcgccggcaagagcccccacaactgcaccgactgcggccccagccacgtgctgctggacggccagtgcctgagccagtgccccgacggctacttccaccaggagggcagctgcaccgagtgccaccccacctgcagacagtgccacggccccctggagagcgactgcatcagctgctacccccacatcagcctgaccaacggcaactgcagaaccagctgcagagaggagcagttcctgaacctggtgggctactgcgccgactgccaccacctgtgccagcactgcgccgccgacctgcacaacaccggcagcatctgcctgagatgccagaacgcccactacctgctgctgggcgaccactgcgtgcccgactgccccagcggctactacgccgagagaggcgcctgcaagaagtgccacagcagctgcagaacctgccagggcagaggccccttcagctgcagcagctgcgacaccaacctggtgctgagccacaccggcacctgcagcaccacctgcttccccggccactacctggacgacaaccacgtgtgccagccctgcaacacccactgcggcagctgcgacagccaggccagctgcaccagctgcagagaccccaacaaggtgctgctgttcggcgagtgccagtacgagagctgcgccccccagtactacctggacttcagcaccaacacctgcaaggagtgcgactggagctgcagcgcctgcagcggccccctgaagaccgactgcctgcagtgcatggacggctacgtgctgcaggacggcgcctgcgtggagcagtgcctgagcagcttctaccaggacagcggcctgtgcaagaactgcgacagctactgcctgcagtgccagggcccccacgagtgcaccagatgcaagggccccttcctgctgctggaggcccagtgcgtgcaggagtgcggcaagggctacttcgccgaccacgccaagcacaagtgcaccgcctgcccccagggctgcctgcagtgcagccacagagacagatgccacctgtgcgaccacggcttcttcctgaagagcggcctgtgcgtgtacaactgcgtgcccggcttcagcgtgcacaccagcaacgagacctgcagcggcaagatccacacccccagcctgcacgtgaacggcagcctgatcctgcccatcggcagcatcaagcccctggacttcagcctgctgaacgtgcaggaccaggagggcagagtggaggacctgctgttccacgtggtgagcacccccaccaacggccagctggtgctgagcagaaacggcaaggaggtgcagctggacaaggccggcagattcagctggaaggacgtgaacgagaagaaggtgagattcgtgcacagcaaggagaagctgagaaagggctacctgttcctgaagatcagcgaccagcagttcttcagcgagccccagctgatcaacatccaggccttcagcacccaggccccctacgtgctgagaaacgaggtgctgcacatcagcagaggcgagagagccaccatcaccacccagatgctggacatcagagacgacgacaacccccaggacgtggtgatcgagatcatcgacccccccctgcacggccagctgctgcagaccctgcagagccccgccacccccatctaccagttccagctggacgagctgagcagaggcctgctgcactacgcccacgacggcagcgacagcaccagcgacgtggccgtgctgcaggccaacgacggccacagcttccacaacatcctgttccaggtgaagaccgtgccccagaacgacagaggcctgcagctggtggccaacagcatggtgtgggtgcccgagggcggcatgctgcagatcaccaacagaatcctgcaggccgaggcccccggcgccagcgccgaggagatcatctacaagatcacccaggactacccccagttcggcgaggtggtgctgctggtgaacatgcccgccgacagccccgccgacgagggccagcacctgcccgacggcagaaccgccacccccaccagcaccttcacccagcaggacatcaacgagggcatcgtgtggtacagacacagcggcgcccccgcccagagcgacagcttcagattcgaggtgagcagcgccagcaacgcccagaccagactggagagccacatgttcaacatcgccatcctgccccagacccccgaggcccccaaggtgagcctggaggccagcctgcacatgaccgccagagaggacggcctgaccgtgatccagccccacagcctgagcttcatcaacagcgagaagcccagcggcaagatcgtgtacaacatcaccctgcccctgcaccccaaccagggcatcatcgagcacagagaccacccccacagccccatcagatacttcacccaggaggacatcaaccagggcaaggtgatgtacagacccccccccgccgccccccacctgcaggagctgatggccttcagcttcgccggcctgcccgagagcgtgaagttccacttcaccgtgagcgacggcgagcacaccagccccgagatggtgctgaccatccacctgctgcccagcgaccagcagctgcccgtgttccaggtgaccgcccccagactggccgtgagccccggcggcagcaccagcgtgggcctgcaggtggtggtgagagacgccgagaccgcccccaaggagctgttcttcgagctgagaagacccccccagcacggcgtgctgctgaagcacaccgccgagttcagaagacccatggccaccggcgacaccttcacctacgaggacgtggagaagaacgccctgcagtacatccacgacggcagcagcaccagagaggacagcatggagatcagcgtgaccgacggcctgaccgtgaccatgctggaggtgagagtggaggtgagcctgagcgaggacagaggccccagactggccgccggcagcagcctgagcatcaccgtggccagcaagagcaccgccatcatcaccagaagccacctggcctacgtggacgacagcagccccgaccccgagatctggatccagctgaactacctgcccagctacggcaccctgctgagaatcagcggcagcgaggtggaggagctgagcgaggtgagcaacttcaccatggaggacatcaacaacaagaagatcagatacagcgccgtgttcgagaccgacggccacctggtgaccgacagcttctacttcagcgtgagcgacatggaccacaaccacctggacaaccagatcttcaccatcatgatcacccccgccgagaaccccccccccgtgatcgccttcgccgacctgatcaccgtggacgagggcggcagagcccccctgagcttccaccacttcttcgccaccgacgacgacgacaacctgcagagagacgccatcatcaagctgagcgccctgcccaagtacggctgcatcgagaacaccggcaccggcgacagattcggccccgagaccgccagcgacctggaggccagcttccccatccaggacgtgctggagaactacatctactacttccagagcgtgcacgagagcatcgagcccacccacgacatcttcagcttctacgtgagcgacggcaccagcagaagcgagatccacagcatcaacatcaccatcgaggtgaagaccctggaggtgggcaaggtggagcccctgaccaccatcttccacaccatcagagagctgagcctgtag

SEQ ID NO: 64463 - protein, 618 aa, Artificial Sequence
  derived and/or modified sequence
MAGLTLFVGRLPPSARSEQLEELFSQVGPVKQCFVVTEKGRTVAVDWAVAKDKYKDTQSVSAIGEEKSHESKHQESVKKKGREEEDMEEEENDDDDDDDDEEDGVFDDEDEEEENIESKVTKPVQIQKRAVKRPAPAKSSDHSEEDSDLEESDSIDDGEELAQSDTSTEEQEDKAVQVSNKKKRKLPSDVNEGKTVFIRNLSFDSEEEELGELLQQFGELKYVRIVLHPDTEHSKGCAFAQFMTQEAAQKCLLAASPENEAGGLKLDGRQLKVDLAVTRDEAAKLQTTKVKKPTGTRNLYLAREGLIRAGTKAAEGVSAADMAKRERFELLKHQKLKDQNIFVSRTRLCLHNLPKAVDDKQLRKLLLSATSGEKGVRIKECRVMRDLKGVHGNMKGQSLGYAFAEFQEHEHALKALRLINNNPEIFGPLKRPIVEFSLEDRRKLKMKELRIQRSLQKMRSKPATGEPQKGQPEPAKDQQQKAAQHHTEEQSKVPPEQKRKAGSTSWTGFQTKAEVEQVELPDGKKRRKVLALPSHRGPKIRLRDKGKVKPVHPKKPKPQINQWKQEKQQLSSEQVSRKKAKGNKTETRFNQLVEQYKQKLLGPSKGAPLAKRSKWFDS

SEQ ID NO: 64464 - DNA, 1857 bp, Artificial Sequence
  derived and/or modified sequence
atggcgggcctgacattgttcgttggtcgtctcccaccctctgcccgctccgagcagctcgaggaactgttttctcaggtcggccctgtcaaacagtgtttcgttgtgaccgaaaaaggccgaactgtggcggtggattgggccgtcgcaaaggacaaatacaaagacacccagagcgtgtcggctattggggaggagaagtcacacgagtccaagcaccaggagtccgtcaagaaaaaaggacgagaagaagaagacatggaagaggaagagaacgatgatgacgacgatgacgatgacgaggaggatggcgtgttcgatgatgaagatgaggaagaagaaaacatagaaagcaaggtgactaagcctgtgcagatccagaaaagagctgtcaagaggcctgccccagcaaaaagctccgaccattcggaagaggactccgacttagaagagtcagattcaatcgacgatggcgaagagctcgctcagtccgacacctctaccgaagagcaggaagacaaggctgtgcaggtctctaacaagaaaaaacggaagctccctagtgacgtaaacgagggaaagactgtctttatccggaatttgtctttcgactcagaagaggaagagctcggggagctgctgcagcagtttggtgagttaaagtatgtgaggatcgtgttacacccagatactgagcactcgaagggatgcgcttttgctcaattcatgacgcaggaggcagcccagaaatgtttactggcagcctcaccagagaacgaagcaggagggctgaaattagatggaaggcagttaaaggtcgatctggccgtgacgagggacgaggctgccaaactccagacaacgaaggtcaaaaaacctacgggcacccggaatctgtaccttgctagagagggccttatccgggcgggaacaaaggcggccgagggggtaagcgctgctgatatggctaagcgagagaggtttgagctactcaaacaccagaagttaaaggatcagaacatcttcgtatcgcgcacgcgactctgcttgcacaacttgcctaaagccgtcgatgataaacaacttcgtaagctcctccttagtgctacctctggggaaaaaggcgttaggatcaaggaatgcagagtgatgcgagacctcaaaggagttcatggaaatatgaagggccagtccctcggatatgcgttcgccgaattccaagaacacgagcatgctctgaaggcgcttcggctgattaacaataacccagaaatctttgggcctctgaagcgccctatagtggagttctccctggaggatcgacgtaagctgaagatgaaggagctccggattcagaggtcgctgcaaaagatgaggtccaagcccgctaccggagagcctcagaagggccagccagagccagccaaagaccaacagcaaaaagctgcacaacaccacaccgaggaacaaagtaaggtgccacccgaacagaagcgcaaggctggttctacgtcgtggaccggctttcagacaaaggccgaagtcgaacaagtggaactgcccgatggtaagaagcgtagaaaagtcctggctctgccctcccataggggccctaagatacggctgcgtgacaaaggtaaggtcaagccggtacaccctaaaaagcccaagcctcaaataaaccagtggaagcaggaaaagcaacagctctcatcagaacaagtttcaagaaaaaaagccaagggtaataaaaccgagactagatttaaccagcttgtggagcagtataagcagaaactgcttgggccgtccaaaggcgccccattggccaagcgttccaagtggtttgattcctag

SEQ ID NO: 64465 - DNA, 1857 bp, Artificial Sequence
  derived and/or modified sequence
atggccggcctgaccctgtttgtgggccgcctgccccccagcgcccggtctgagcagctggaggagctgttcagccaggtgggccctgtgaagcagtgctttgtggtgacagagaagggccgcacagtggccgtggactgggccgtggccaaggacaagtacaaggacacccagagcgtgtctgccatcggggaggagaagagccatgagagcaagcaccaggagagcgtgaagaagaagggccgggaggaggaggacatggaggaggaggagaatgatgatgatgatgatgatgatgatgaggaggatggagtgtttgatgatgaagatgaggaggaggagaacatcgagagcaaggtgaccaagcctgtgcagatccagaagagagctgtgaagaggcctgccccagccaagagcagtgaccacagtgaagaagattctgacctggaggagagtgacagcattgatgatggagaggagctggcccagagcgacaccagcacagaggagcaggaggacaaggctgtgcaggtgagcaacaagaagaagaggaagctgcccagtgatgtgaatgaaggcaagacagtgttcatccggaacctgagctttgattctgaggaggaggagctgggggagctgctgcagcagtttggagagctgaagtatgtgagaattgtgctgcacccagacacagagcacagcaagggctgtgcctttgcccagttcatgacccaggaggccgcccagaagtgcctgctggccgccagcccagaaaatgaagctgggggcctgaagctggatggccggcagctgaaggtggacctggccgtgaccagagatgaggccgccaagctgcagaccaccaaggtgaagaagcccaccggcaccaggaacctgtacctggcccgggagggcctcatccgggccggcaccaaggctgctgagggcgtgtctgctgctgacatggccaagcgggagagatttgagctgctgaagcaccagaagctgaaggaccagaacatctttgtgtccaggacccggctgtgcctgcacaacctgcccaaggctgtggatgacaagcagctgaggaagctgctgctgagcgccaccagcggggagaagggcgtgcgcatcaaggagtgccgggtgatgagggacctgaagggcgtgcacggcaacatgaagggccagagcctgggctacgcctttgctgagttccaggagcatgaacatgccctgaaggccctgcggctcatcaacaacaaccctgagatcttcggccccctgaagaggcccatcgtggagttcagcctggaggacaggaggaagctgaagatgaaggagctgcgcatccagaggagcctgcagaagatgaggagcaagccagccaccggggagccccagaagggccagcctgagcccgccaaggaccagcagcagaaggccgcccagcaccacacagaggagcagagcaaggtgcccccagagcagaagaggaaggccggcagcacctcctggacaggcttccagaccaaggccgaggtggagcaggtggagctgcctgatggcaagaagaggaggaaggtgctggccctgcccagccaccggggccccaagatccggctgcgggacaagggcaaggtgaagcctgtgcaccccaagaagcccaagccccagatcaaccagtggaagcaggagaagcagcagctgagcagcgagcaggtgtccaggaagaaggccaagggcaacaagacagagacccgcttcaaccagctggtggagcagtacaagcagaagctgctgggccccagcaaaggagcccccctggccaagaggagcaagtggtttgacagctag

SEQ ID NO: 64466 - DNA, 1857 bp, Artificial Sequence
  derived and/or modified sequence
atggccggcctgaccctgttcgtgggccggctgccccccagcgcccgttccgaacagcttgaggaacttttctctcaggtaggtcccgtgaaacagtgtttcgtggtaacagagaagggcagaaccgtggctgtggattgggcggtggccaaagacaagtataaggacactcagtcagtgtccgcaattggcgaggagaaaagtcatgaatcaaagcaccaggagtcagtgaagaaaaaagggcgggaggaggaagatatggaggaggaagaaaacgacgacgatgacgacgacgatgacgaggaggacggagtattcgacgacgaagacgaagaagaggagaatatcgagtcgaaggtgacaaagcccgtacagatccagaagcgcgcagtaaagagacctgcacctgcgaaatcaagcgaccactctgaagaagactccgatctcgaagaatccgacagcatagacgacggagaggagctcgcccagtccgacaccagcaccgaggagcaggaagataaagccgtgcaagtttctaacaaaaagaagaggaagctaccttcagacgtgaacgaaggcaaaacagtatttattaggaacctgtctttcgattctgaagaggaagagctgggagagctccttcagcagttcggggaacttaaatatgtcagaatcgtgctacacccggatacagaacatagtaagggatgcgcgtttgcccagttcatgactcaggaagcagctcaaaagtgtctgcttgccgcatctccagaaaatgaggccggcgggttaaagttggatggccggcagttaaaggtggacctggccgtgacgagggacgaggctgccaaactgcagactacaaaggtgaaaaaacccaccggcacccggaatctatatctggctcgcgaaggtttgattcgagccgggaccaaggcagctgagggcgtcagcgctgcggatatggcaaaacgggagcgctttgaactgttgaagcaccagaagttaaaggaccagaacatcttcgttagcaggactagattgtgcctccataacttgcccaaggccgtggacgataaacagcttcggaaacttttgttgtccgcaaccagtggggaaaagggcgtccgaattaaggagtgtagggttatgcgggacttgaaaggcgtgcacgggaatatgaagggacagtcactgggctatgcattcgcggagtttcaggaacacgagcatgcactgaaggccttaagattgattaataataatcctgaaatatttggcccccttaaacggcccatcgtcgagttctctctcgaagatcgccgcaagcttaagatgaaggaactgagaatccagcggagtctgcaaaaaatgcgttccaagcctgccactggcgagccacagaaaggccagcccgagccagcgaaagaccagcagcaaaaggctgctcagcatcataccgaagagcagtctaaagtgcctccagagcagaagcgaaaggctggctcaacctcctggaccggattccaaactaaagcagaggtagaacaggttgagctgcccgacggtaagaaacgacgtaaagtgctcgccctcccaagccacagggggcccaaaatccgcctgcgagataagggtaaggtgaaaccagtgcaccctaagaagcccaagccacagatcaaccagtggaaacaggaaaagcagcagctcagctccgagcaggtgtcccgaaaaaaagctaaaggtaataagacagagactagattcaatcagttggttgagcagtataagcagaaattgctgggcccctccaagggcgctcctcttgccaaacggtctaagtggttcgacagttag

SEQ ID NO: 64467 - DNA, 1857 bp, Artificial Sequence
  derived and/or modified sequence
atggctggactgaccctattcgtgggacggctgccaccttccgccaggtccgagcagctggaagaacttttttcacaggtgggcccagtaaaacagtgttttgttgtcaccgagaagggacgtactgttgctgtcgattgggcggtcgccaaggataaatataaggatacccagtcagtgagtgctattggggaggagaagtctcatgagtcaaagcatcaggaaagtgttaagaagaagggtagagaggaagaagatatggaagaagaagagaacgatgatgacgacgatgacgacgacgaggaagacggcgtgttcgacgacgaagacgaagaagaagagaatatcgaatcaaaagtcacaaagccagtccagatacaaaaacgcgcagtgaagaggcctgctccagccaagtcctccgaccattctgaagaagactctgacctggaggaatcagatagtatagatgatggtgaggaactagcccagtcggacacaagcacagaggaacaggaggacaaagccgtccaagtgagcaataaaaagaagcggaagctcccctcagacgttaacgagggcaagacggtgtttatccgtaacctttctttcgattcagaggaggaagagctcggggaactcctgcagcagttcggtgaattaaagtatgtgagaatcgtgctccaccctgataccgaacactccaagggatgcgcattcgctcagtttatgacacaggaagccgctcaaaaatgtcttcttgctgcctctccggagaatgaggccggtggcttaaaattggatggcaggcagctgaaagttgatcttgcggtgacccgagacgaggcagccaagctgcagaccacaaaggttaaaaagccaaccggcaccagaaacctttacctcgcaagagagggtctcattagggcaggtactaaagctgctgaaggagtcagcgccgctgacatggctaagagagaaagatttgaactccttaagcaccagaaactaaaggatcagaatatcttcgtcagtcgtacacggctgtgtctccataacctgccgaaggctgtcgacgataagcagctgaggaagttactgctgagcgccacttcgggagagaaaggggtgcgtatcaaggagtgccgggtgatgcgtgatctgaagggggtgcatggaaatatgaaaggccagagcctgggatatgcctttgccgaattccaggagcacgagcatgcccttaaagccttgagactgattaataacaatccagagatctttggtccactgaaaagaccgatagtggagttctctcttgaggacagacggaaactgaaaatgaaggaactacggatacagaggtccctccagaagatgcgctctaaaccggcaacaggtgagccccagaagggacagccagagcctgccaaggatcagcagcagaaggccgctcaacaccacacagaagagcagagcaaggtgccccctgaacagaaacggaaggcaggatcaacctcctggaccggcttccagacaaaagcggaggttgaacaggtcgagttacctgacggcaagaagaggagaaaggtgctagcacttccgtctcaccggggacccaagatcaggctgcgggacaagggtaaggttaagccagtgcaccctaaaaagcccaagccgcagattaaccagtggaagcaagaaaagcagcagctatcatcggaacaagtttcccggaagaaagctaagggcaacaaaaccgaaacaagatttaaccagctggtcgaacagtataagcagaaactgttggggccatcaaagggggctcctctggctaagcggagtaagtggtttgattcctag

SEQ ID NO: 64468 - DNA, 2251 bp, Artificial Sequence
  derived and/or modified sequence
accaaagccagcgtttcggctcgcgtgcgccggcctagtttgctcgcgtcctcacgcgctttgggtttcccggtctcatggccggcctgaccttatttgtgggccgcctcccgccctcggcccgcagtgagcagctggaggaactgttcagtcaggtggggccggtgaagcagtgcttcgtggtgactgaaaaaggccggacagtggctgtggattgggccgtggcaaaggataaatataaagatacacagtctgtttctgctataggtgaggaaaagagccatgaatctaaacatcaggaatcagttaaaaagaagggcagagaggaagaggatatggaagaggaagaaaacgatgatgatgacgatgatgatgatgaagaagatggggtttttgatgatgaagatgaagaggaagagaatatagaatcaaaggtgaccaagcctgtgcaaattcagaagagagcagtcaagagaccagcccctgcaaaaagcagtgatcattctgaggaggacagtgacctagaggaaagcgatagtattgatgatggagaggaactggctcagagtgataccagcactgaggagcaagaggataaagctgtgcaagtctcaaacaaaaagaagaggaaattaccctctgatgtgaatgaagggaaaactgtttttatcagaaatctgtcctttgactcagaagaagaagaacttggggagcttctccaacagtttggagaactcaaatatgtccgcattgtcttgcatccagacacagagcattctaaaggttgtgcatttgcccagttcatgactcaagaagcagctcagaaatgccttctagctgcttctccagagaatgaggctggtgggcttaaactggatggccggcagctcaaggttgacttggcggtgacccgtgatgaggctgcaaagcttcagacgacgaaggtgaagaagccgactggcacccggaatctctatctggcccgagaaggcttgattcgtgctgggacgaaggctgcagagggtgtgagtgctgctgatatggccaaaagagaacggtttgagctgctgaagcatcagaaactcaaggaccagaatatctttgtctcccgaaccaggctctgcctgcacaatctcccaaaggctgtagatgacaaacagctcagaaagctgctgctgagtgctactagtggagagaaaggggtgcgcatcaaggagtgtagagtgatgcgagacctcaaaggagttcatgggaacatgaagggtcagtccctgggctacgcctttgcggagttccaagagcacgagcatgccctgaaagccctccgcctcatcaacaacaatccagaaatctttgggcctctgaagagaccaatagtggagttctctttagaagatcgaagaaaacttaaaatgaaggaattaaggatccagcgcagcttgcaaaaaatgagatccaagcctgcaactggtgagcctcagaaggggcaaccagagcctgcaaaagaccagcaacagaaggcagctcaacaccacacagaggaacaaagcaaggtgcccccagagcagaagagaaaggcgggctctacctcatggaccgggttccagaccaaggctgaagtggagcaggtggagctgcctgatggaaagaagagaagaaaggtcctggcgctcccctcacaccgaggccccaaaatcaggttgcgggacaaaggcaaagtgaagcccgtccatcccaaaaagccaaagccacagataaaccagtggaagcaggagaagcagcaattatcgtccgagcaggtatctaggaaaaaagctaagggaaataagacggaaacccgcttcaaccagctggtcgaacaatataagcagaaattattgggaccttctaaaggagcacctcttgcaaagaggagcaaatggtttgatagttgatgatggcagcaggctgggtaagaagctgggttgtgtactttctggtgacactcctgggctcctccccatcccccgtgtctctcactgagggaaagaaaatccccaagggcactgccactgtgctcggaggtgccctggactgtgtacatctgaactttggtccatcctttgatgtgtggttcgttagccacaaagagaaatatctgaaagtcaacatgatgcttcttgcatattatccagattattgtatgaagttgtgtctataattattaccaatttttattctttatttctcaaatggaaacacctgaaaaagc

SEQ ID NO: 64469 - DNA, 1857 bp, Artificial Sequence
  derived and/or modified sequence
atggccggcctgaccctgttcgtgggcagactgccccccagcgccagaagcgagcagctggaggagctgttcagccaggtgggccccgtgaagcagtgcttcgtggtgaccgagaagggcagaaccgtggccgtggactgggccgtggccaaggacaagtacaaggacacccagagcgtgagcgccatcggcgaggagaagagccacgagagcaagcaccaggagagcgtgaagaagaagggcagagaggaggaggacatggaggaggaggagaacgacgacgacgacgacgacgacgacgaggaggacggcgtgttcgacgacgaggacgaggaggaggagaacatcgagagcaaggtgaccaagcccgtgcagatccagaagagagccgtgaagagacccgcccccgccaagagcagcgaccacagcgaggaggacagcgacctggaggagagcgacagcatcgacgacggcgaggagctggcccagagcgacaccagcaccgaggagcaggaggacaaggccgtgcaggtgagcaacaagaagaagagaaagctgcccagcgacgtgaacgagggcaagaccgtgttcatcagaaacctgagcttcgacagcgaggaggaggagctgggcgagctgctgcagcagttcggcgagctgaagtacgtgagaatcgtgctgcaccccgacaccgagcacagcaagggctgcgccttcgcccagttcatgacccaggaggccgcccagaagtgcctgctggccgccagccccgagaacgaggccggcggcctgaagctggacggcagacagctgaaggtggacctggccgtgaccagagacgaggccgccaagctgcagaccaccaaggtgaagaagcccaccggcaccagaaacctgtacctggccagagagggcctgatcagagccggcaccaaggccgccgagggcgtgagcgccgccgacatggccaagagagagagattcgagctgctgaagcaccagaagctgaaggaccagaacatcttcgtgagcagaaccagactgtgcctgcacaacctgcccaaggccgtggacgacaagcagctgagaaagctgctgctgagcgccaccagcggcgagaagggcgtgagaatcaaggagtgcagagtgatgagagacctgaagggcgtgcacggcaacatgaagggccagagcctgggctacgccttcgccgagttccaggagcacgagcacgccctgaaggccctgagactgatcaacaacaaccccgagatcttcggccccctgaagagacccatcgtggagttcagcctggaggacagaagaaagctgaagatgaaggagctgagaatccagagaagcctgcagaagatgagaagcaagcccgccaccggcgagccccagaagggccagcccgagcccgccaaggaccagcagcagaaggccgcccagcaccacaccgaggagcagagcaaggtgccccccgagcagaagagaaaggccggcagcaccagctggaccggcttccagaccaaggccgaggtggagcaggtggagctgcccgacggcaagaagagaagaaaggtgctggccctgcccagccacagaggccccaagatcagactgagagacaagggcaaggtgaagcccgtgcaccccaagaagcccaagccccagatcaaccagtggaagcaggagaagcagcagctgagcagcgagcaggtgagcagaaagaaggccaagggcaacaagaccgagaccagattcaaccagctggtggagcagtacaagcagaagctgctgggccccagcaagggcgcccccctggccaagagaagcaagtggttcgacagctag

SEQ ID NO: 64470 - protein, 1228 aa, Artificial Sequence
  derived and/or modified sequence
MIWPKVECCHFKTAVEAPLGMKLDKKMEVFIPLSTSAASSGPWAHSLFAFIPSWPKKNLFKRESPITHRLYGDISREVQGTSENGVIFQKCALVSGSSEAQTARIWLLVNNTKTTSSANLSELLLLDSIAGLTIWDSVGNRTSEGFQAFSKKFLQVGDAFAVSYAATLQAGDLGNGESLKLPAQLTFQSSSRNRTQLKVLFSITAEENVTVLPHHGLHAAGFFIAFLLSLVLTWAALFLMVRYQCLKGNMLTRHRVWQYESKLEPLPFTSADGVNEDLSLNDQMIDILSSEDPGSMLQALEELEIATLNRADADLEACRTQISKDIIALLLKNLTSSGHLSPQVERKMSAVFKKQFLLLENEIQEEYDRKMVALTAECDLETRKKMENQYQREMMAMEEAEELLKRAGERSAVECSNLLRTLHGLEQEHLRKSLALQQEEDFAKAHRQLAVFQRNELHSIFFTQIKSAIFKGELKPEAAKMLLQNYSKIQENVEELMDFFQASKRYHLSKRFGHREYLVQNLQSSETRVQGLLSTAAAQLTHLIQKHERAGYLDEDQMEMLLERAQTEVFSIKQKLDNDLKQEKKKLHQKLITKRRRELLQKHREQRREQASVGEAFRTVEDAGQYLHQKRSLMEEHGATLEELQERLDQAALDDLRTLTLSLFEKATDELRRLQNSAMTQELLKRGVPWLFLQQILEEHGKEMAARAEQLEGEERDRDQEGVQSVRQRLKDDAPEAVTEEQAELRRWEHLIFMKLCSSVFSLSEEELLRMRQEVHGCFAQMDRSLALPKIRARVLLQQFQTAWREAEFVKLDQAVAAPELQQQSKVRKSRSKSKSKGELLKKCIEDKIHLCEEQASEDLVEKVRGELLRERVQRMEAQEGGFAQSLVALQFQKASRVTETLSAYTALLSIQDLLLEELSASEMLTKSACTQILESHSRELQELERKLEDQLVQQEAAQQQQALASWQQWVADGPGILNEPGEVDSERQVSTVLHQALSKSQTLLEQHQQCLREEQQNSVVLEDLLENMEADTFATLCSQELRLASYLARMAMVPGATLRRLLSVVLPTASQPQLLALLDSATERHVDHAAESDGGAEQADVGRRRKHQSWWQALDGKLRGDLISRGLEKMLWARKRKQSILKKTCLPLRERMIFSGKGSWPHLSLEPIGELAPVPIVGAETIDLLNTGEKLFIFRNPKEPEISLHVPPRKKKNFLNAKKAMRALGMD

SEQ ID NO: 64471 - DNA, 3687 bp, Artificial Sequence
  derived and/or modified sequence
atgatatggccgaaagttgagtgctgtcatttcaaaaccgctgttgaggctccactcgggatgaagcttgacaagaagatggaggtctttattcctctgtccacctccgccgctagttccggcccttgggcccacagcttgttcgccttcattccgtcttggcctaagaagaacctcttcaaacgagagtctcccattacccatcggctctatggagatatcagccgcgaagtgcagggcaccagtgaaaacggagtgattttccagaagtgcgctctggtaagcggtagcagcgaggcccagaccgcaagaatttggttgctagtgaacaatactaaaacaacctcatcagcgaatctgtcggagctgctgctcctggactccatcgccggtcttacaatttgggactctgttgggaaccgcacttccgaaggattccaggcattctcaaaaaagtttctacaggttggggacgcgtttgcagtcagctacgccgcaaccctccaggcgggcgacctgggcaacggtgagagtctgaaactgcctgcccagttgacctttcagagctcttcccggaatcgaacgcagctgaaagttcttttcagcatcacggccgaagagaacgtgactgtcctgcctcaccacgggctacatgccgccgggttttttatcgccttccttctaagtcttgtgctcacctgggccgcactgtttctcatggtgcgctatcaatgcctgaagggaaatatgctgacaaggcatcgcgtgtggcaatacgaaagtaaactcgagcctctaccatttacctcagcggacggggtgaatgaagacctttctctgaacgaccaaatgatcgacatactgtccagcgaggacccaggctctatgctgcaggccctggaggaacttgaaattgccactctcaacagggcagatgccgaccttgaggcctgtagaacccagatcagcaaggatatcatagccctacttctgaaaaacttgacttcatctgggcacctgtcgcctcaagtggaaaggaaaatgtcggctgtgttcaagaaacagttcctgctgctggagaatgagattcaggaggagtacgaccgtaagatggtggctctaacggcagaatgcgatctggaaactcgcaaaaagatggagaaccagtatcaacgggaaatgatggccatggaagaagcagaggaactcctcaagagagccggtgaacgtagcgccgtggagtgctcaaatttgcttaggacactgcatgggctggaacaggagcacctacgcaagtctttggccctgcagcaggaggaggatttcgctaaagctcaccggcagcttgccgtattccaacggaatgagctgcactcaatcttctttactcaaattaaatctgccattttcaaaggagagttaaagcctgaagctgctaaaatgctgttacaaaactacagcaaaattcaagagaatgtcgaggagctaatggacttctttcaagctagtaagaggtatcacctgtccaagagattcgggcaccgggaatatctggtgcagaatctgcagtcctccgaaactcgagtgcagggactgcttagtactgctgctgctcaacttacccacttgatacaaaaacacgagcgggccggctaccttgatgaggaccagatggagatgctactcgagagggcccagacagaggtcttcagcatcaaacagaagcttgacaacgacctgaagcaggagaaaaaaaagttacatcagaaactgatcactaagagacgaagagaactcttgcagaaacatcgagagcagcggcgtgagcaggcctcagtcggcgaggccttccggaccgtggaggacgcaggtcagtacctgcatcagaaacgtagtctgatggaagaacatggcgcaacactggaagaactgcaggagaggttggaccaggccgccctcgacgatctcaggaccctcacactctccctattcgagaaagctactgatgaactgcgcagactccagaactcagctatgactcaggaacttctcaaaaggggtgtgccctggctcttcctccagcagattttggaggagcacggcaaagaaatggcagccagagctgagcagctcgaaggcgaggagcgggaccgagaccaggaaggggtccagagcgtgagacagcggctgaaggatgacgctcctgaggctgttacagaggaacaggctgaactgaggagatgggagcacctaattttcatgaagttatgttcttccgtgtttagcctaagcgaagaggagctgttgcgcatgaggcaggaggtgcacgggtgcttcgcacagatggataggtcattggctctgcctaagattcgcgcccgcgtgctcctgcagcagtttcaaaccgcgtggagggaggcggagttcgtgaaactggatcaggctgtagcagcacctgaacttcagcaacaaagcaaggtgagaaaatctcgtagcaagagtaagtctaagggcgaattgttaaagaagtgtatcgaagacaagatacacctatgcgaagagcaggcttcagaggacctggtggagaaggtgagaggcgagctgcttagagagcgcgttcaacgcatggaagcacaggaggggggattcgcacagagcctggtcgcgttgcaattccagaaagcctcaagagttaccgaaacactgtctgcgtacaccgcccttctttcaatccaagacctcttactggaggagttgagcgccagcgagatgctgactaagtccgcctgcacgcagatcctcgaaagccactcgcgcgagctgcaggagctcgagaggaaactggaggaccagttagtgcagcaagaggctgcacagcagcaacaggctctcgcgagctggcaacaatgggtcgctgatggtccgggcatattgaatgagcccggggaggtcgatagtgagcgacaggtatctacggtgcttcatcaggctcttagcaagagccagacattgctggagcagcatcagcagtgcctgcgcgaggagcagcagaactccgtggtgctcgaggatttacttgagaacatggaagcggacacattcgcaactttatgcagtcaggagctgcgcctcgcatcctacctcgcccggatggctatggttcctggagcaacacttcgccgcttgttgtccgtagtgctcccgacagccagtcagcctcagctccttgcacttttagactctgcaacggagagacatgtggaccatgccgccgagagcgatgggggagccgaacaggccgatgtgggacgacgcaggaagcatcagtcgtggtggcaagctctggatggcaaactgaggggtgaccttattagcagaggcctggagaagatgttgtgggcccggaaaagaaagcagagtatacttaagaagacatgcctgccgcttagggagcgaatgattttctccggtaaaggttcgtggcctcatctgtccctggagcctatcggcgagcttgcgcctgtgcccattgtaggagctgagactattgacttactcaacacgggggaaaagctattcatcttccggaatcccaaagagcctgagatctctctgcacgtaccacctaggaaaaaaaaaaattttctgaacgctaaaaaagccatgagggcgctaggtatggattag

SEQ ID NO: 64472 - DNA, 3687 bp, Artificial Sequence
  derived and/or modified sequence
atgatctggcccaaggtggagtgctgccacttcaagacagctgtggaggcccccctgggcatgaagctggacaagaagatggaggtgttcatccccctgagcaccagcgctgccagcagcggcccctgggcccacagcctgtttgccttcatccccagctggcccaagaagaacctcttcaagcgggagagccccatcacccaccggctgtatggagacatcagccgggaggtgcagggcaccagtgaaaatggagtcatcttccagaagtgtgccctggtgtctggcagcagcgaggcccagacagcccgcatctggctgctggtgaacaacaccaagaccaccagcagcgccaacctgtctgagctgctgctgctggacagcattgctggcctgaccatctgggacagcgtgggcaacagaacatctgagggcttccaggccttcagcaagaagttcctgcaggtgggagatgcctttgctgtgtcctatgctgccaccctgcaggccggggacctgggcaatggagagagcctgaagctgcctgcccagctgaccttccagagcagcagcaggaacagaacccagctgaaggtgctcttcagcatcacagcagaagaaaatgtgacagtgctgccccaccacggcctgcatgctgctggcttcttcatcgccttcctgctgagcctggtgctgacctgggccgccctcttcctgatggtgcgctaccagtgcctgaagggcaacatgctgaccaggcaccgggtgtggcagtatgagagcaagctggagcccctgcccttcaccagcgcagatggagtgaatgaagacctgagcctgaatgaccagatgattgacatcctgagcagtgaagatcctggctccatgctgcaggccctggaggagctggagatcgccaccctgaacagagcagatgctgacctggaggcctgcaggacccagatcagcaaggacatcatcgccctgctgctgaagaacctgaccagcagcggccacctgagcccccaggtggagaggaagatgtctgctgtgttcaagaagcagttcctgctgctggagaatgagatccaggaggagtatgacaggaagatggtggccctgacagcagaatgtgacctggagaccaggaagaagatggagaaccagtaccagcgggagatgatggccatggaggaggccgaggagctgctgaagagagctggggagaggtctgctgtggagtgcagcaacctgctgcggaccctgcacggcctggagcaggagcacctgaggaagagcctggccctgcagcaggaggaggactttgccaaggcccaccggcagctggccgtgttccagagaaatgagctgcacagcatcttcttcacccagatcaagagcgccatcttcaagggggagctgaagccagaggccgccaagatgctgctgcagaactacagcaagatccaggagaatgtggaggagctgatggacttcttccaggccagcaagcgctaccacctgagcaagcgcttcggccaccgggagtacctggtgcagaacctgcagagcagcgagaccagggtgcagggcctgctgagcacagctgctgcccagctgacccacctgatccagaagcatgagcgggccggctacctggatgaggaccagatggagatgctgctggagcgggcccagacagaggtgttcagcatcaagcagaagctggacaatgacctgaagcaggagaagaagaagctgcaccagaagctgatcaccaagagaagaagagagctgctgcagaagcaccgggagcagaggcgggagcaggcctctgtgggggaggccttcagaacagtggaggatgctggccagtacctgcaccagaagaggagcctgatggaggagcacggggccaccctggaggagctgcaggagcggctggaccaggccgccctggatgacctgcggaccctgaccctgagcctgtttgagaaggccacagatgagctgcggcggctgcagaacagcgccatgacccaggagctgctgaagaggggcgtgccctggctgttcctgcagcagatcctggaggagcacggcaaggagatggccgcccgggcagagcagctggagggggaggagcgggaccgggaccaggagggcgtgcagagcgtgcggcagaggctgaaggatgatgcccctgaggccgtgacagaggagcaggccgagctgcggcgctgggagcacctgatcttcatgaagctgtgcagctctgtgttcagcctgtctgaggaggagctgctgaggatgaggcaggaggtgcacggctgctttgcccagatggacaggagcctggccctgcccaagatccgggcccgggtgctgctgcagcagttccagacagcctggagggaggccgagtttgtgaagctggaccaggccgtggccgcccctgagctgcagcagcagagcaaggtgaggaagagccgcagcaagagcaagagcaaaggagagctgctgaagaagtgcatcgaggacaagatccacctgtgtgaggagcaggccagcgaggacctggtggagaaggtgcggggggagctgctgcgggagcgggtgcagaggatggaggcccaggagggcggctttgcccagagcctggtggccctgcagttccagaaggccagccgggtgacagagaccctgagcgcctacacagccctgctgagcatccaggacctgctgctggaggagctgagcgccagcgagatgctgaccaagagcgcctgcacccagatcctggagagccacagccgggagctgcaggagctggagaggaagctggaggaccagctggtgcagcaggaggccgcccagcagcagcaggccctggcctcctggcagcagtgggtggctgatggccctggcatcctgaatgaacctggagaggtggacagcgagcggcaggtgtccacagtgctgcaccaggccctgagcaagagccagaccctgctggagcagcaccagcagtgcctgcgggaggagcagcagaacagcgtggtgctggaggacctgctggagaacatggaggccgacacctttgccaccctgtgcagccaggagctgcggctggccagctacctggccaggatggccatggtgcctggggccaccctgcggcggctgctgtctgtggtgctgcccacagccagccagccccagctgctggccctgctggacagcgccacagagcggcacgtggaccacgccgctgagagtgatggcggcgctgagcaggctgatgtgggcagaagaaggaagcaccagagctggtggcaggccctggatggcaagctgcggggggacctgatcagccggggcctggagaagatgctgtgggccaggaagaggaagcagagcatcctgaagaagacctgcctgcccctgcgggagaggatgatcttcagcggcaagggctcctggccccacctgagcctggagcccatcggggagctggcccctgtgcccatcgtgggcgctgagaccatcgacctgctgaacacaggagagaagctgttcatcttcaggaaccccaaggagcctgagatcagcctgcacgtgccccccaggaagaagaagaacttcctgaatgccaagaaggccatgagggccctgggcatggactag

SEQ ID NO: 64473 - DNA, 3687 bp, Artificial Sequence
  derived and/or modified sequence
atgatctggcccaaggtggagtgctgccacttcaagaccgccgtggaggccccgctgggcatgaagctggacaagaaaatggaggtgtttatcccactgtccacctctgcagcctctagtggcccttgggcccattctttgtttgcttttattcccagctggcctaagaagaacctgttcaagcgtgagagtccaatcacgcatagactatacggtgacatctcccgggaggttcagggcacttccgagaacggagttatctttcagaagtgcgctctcgtctcaggttcaagcgaggctcagaccgcgcggatatggttgctcgtgaacaataccaagaccacttcatcggccaaccttagcgaactactcctgctggactcaatcgccggcttaacgatctgggatagtgtgggaaaccgaacgtccgagggattccaggccttttcaaaaaagtttctgcaagtcggcgacgcattcgcagtatcgtatgctgctactctgcaagctggggatttggggaatggtgaaagtctgaaattacccgcccagttgacttttcagagtagctcccgaaatcgaactcaactgaaagtgctcttcagcataaccgccgaggaaaacgtgaccgtgctgccgcaccacggtctgcacgcagctggatttttcatagcattcctgctatcccttgtactcacatgggccgccctgtttctgatggttcgataccagtgcctcaagggaaacatgctgactagacaccgagtgtggcagtatgagtcaaaactggaaccactacccttcacctcagcggatggagtcaacgaggacctttccctgaatgaccagatgattgatatcttgtcatccgaggacccgggaagcatgcttcaagccctcgaagaacttgagatcgccactctgaatcgggctgatgccgatctcgaagcttgtaggactcaaatcagcaaagacatcatagcactgctgctgaaaaacctgaccagtagtgggcatttatccccacaagttgaacgtaagatgagtgctgtgttcaaaaagcaatttctcctgctcgaaaatgaaatccaggaagagtatgaccgcaaaatggtggcactcaccgcagagtgcgatctcgaaacccgcaaaaagatggagaaccaataccaacgcgagatgatggctatggaggaggctgaagaactcctgaaaagagctggagagcgcagtgctgttgagtgctcaaacctcctgagaacactgcatggactggagcaggagcacttgagaaaaagtctggcactgcagcaggaggaagacttcgccaaagcccaccgccagcttgcagtcttccagcgaaacgaattgcactccattttctttactcagattaagagcgccatcttcaagggagagcttaagcccgaggccgctaaaatgcttctccaaaattactcaaagattcaggagaacgtggaggaactgatggatttttttcaagccagtaaacgctatcacctttcgaaaaggtttgggcaccgcgaatatctggtacagaatctgcagagcagtgaaacgcgggtgcaggggttgctgagcactgccgccgctcagctgacacatctaattcagaagcatgaacgcgctggctatctcgatgaagatcagatggagatgttgctggaacgggcccagactgaagtgttttctatcaaacagaagctggataatgatttgaagcaggaaaagaagaaactccatcagaagctaatcaccaaacgccgacgagaactactgcagaaacaccgggagcagcgccgcgagcaggcctccgtgggggaggcattccgaacagttgaggacgccggccagtatctgcaccagaaaaggtccctgatggaggagcacggtgccaccctggaagagctacaggagaggttggatcaggctgccctcgatgatctccgaactcttactctaagtttgttcgagaaagctaccgatgagttgcgacgtctccagaatagtgctatgacccaggagttacttaagcgtggagttccttggctgtttctgcaacagatcttggaggagcacggcaaggagatggctgcgcgtgccgagcaattggaaggagaagaaagggacagggatcaggaaggcgtccagagtgtcagacagagactaaaagacgatgcccccgaggcagttactgaggagcaggcggagttgcggaggtgggaacacctgatattcatgaagctctgcagtagcgtgttctctctgagcgaagaggagttacttaggatgcggcaggaagtccacggatgcttcgcacagatggaccgctcactagctctgcctaagatccgcgctcgggtgttgctgcaacagtttcaaaccgcctggcgggaggcggagttcgtcaaactggatcaggcagtcgctgccccagagcttcagcagcagagcaaagtaaggaaaagccggtcaaaatccaagagtaagggagaattgctcaaaaaatgtatcgaggataagatccacctgtgcgaagaacaggcgtctgaggacctggtcgagaaggtgagaggcgagttgctgcgagaaagggtacagaggatggaggcccaagaaggtgggttcgcccaaagccttgtggcattgcagttccagaaagcctcacgggtgaccgaaactttatcagcttatacagcactactttctatacaggacctcctattggaagagttgtctgcaagcgagatgctgacaaagagtgcatgtacacagatcttagagtcgcattctcgggaactgcaggagctggaaagaaaactagaggatcagcttgtgcaacaggaagccgctcaacagcaacaagccctcgcttcctggcaacagtgggttgccgacggtcccggaattcttaacgagccgggcgaagtggacagtgagaggcaggttagcaccgtcctgcaccaggccctgtcaaaatcacagacacttctggaacagcaccagcaatgtctccgggaagaacagcagaattccgtcgtgctggaggacttgcttgaaaacatggaagccgacactttcgcgaccctctgtagtcaggagctgagactcgcatcttacctcgcgcgtatggccatggttcctggcgccactctgaggcggctcctcagcgtggtgcttccaacagccagccagccacagctgttagccttacttgacagcgccacagagagacatgtggaccatgccgccgagtcagacggaggtgccgagcaggcagatgttggaagaaggagaaagcaccagtcttggtggcaggcacttgatgggaagttgagaggtgacctgatcagtagaggactcgagaaaatgctctgggccaggaaaagaaagcagtccattcttaaaaagacatgcttaccgctcagggagaggatgatcttcagcggaaaaggatcttggccgcacctatccctggagcccattggagagcttgccccggtccctattgtgggggccgagacaatcgacctgctgaacactggagaaaagttgttcatattcagaaatccgaaggagcccgagatctctctccacgttccacctcgaaagaagaaaaatttcctcaacgctaagaaggcaatgagggcactgggcatggactag

SEQ ID NO: 64474 - DNA, 3687 bp, Artificial Sequence
  derived and/or modified sequence
atgatttggcctaaggtcgagtgctgtcacttcaaaaccgctgtagaggctcctttgggtatgaagctggacaagaaaatggaggtgttcattcctctctctacttcagccgcatcttctggcccatgggcccactctttgtttgcatttataccaagttggcccaagaaaaacttgtttaagagggagtctcctataacccaccgcctatacggagacattagtcgcgaagtgcaaggcacatctgaaaatggtgtaatcttccagaaatgcgcactcgtgagtgggagcagtgaagctcagacagctaggatctggctgctagtcaacaacacaaagaccacgtcctctgctaacctgtccgagctccttttgctggactccatcgccggactcacaatatgggattcggtagggaacagaacctccgaggggttccaagcattctctaagaagttcctgcaggtgggggacgctttcgccgtgtcttatgcggctactctgcaggcgggtgatttagggaatggcgaatctctgaaattgcctgcgcaactgacgtttcagagctcttccagaaacagaacccaattaaaggtcttatttagcatcaccgcagaggaaaacgttaccgtccttcctcaccacggcctgcatgccgctggtttttttattgccttcttactgagtctggtgctgacctgggctgctctgttcctaatggttcgctaccagtgcctgaaaggcaatatgctgacccgccatcgcgtatggcagtatgagtctaagcttgaaccactgccgttcaccagcgccgacggagtgaatgaggacctgtcccttaacgaccagatgatcgacattctgagtagcgaggaccctggctccatgctccaagctttagaagaactggaaatcgctactctcaatcgggcagatgcagacctcgaggcgtgccggacgcagattagcaaagacatcatagcgttgctgctaaaaaatctgaccagcagtggccatttaagccctcaagtagagcgcaagatgtccgctgtcttcaagaaacagtttctgttactggaaaacgaaatccaagaagaatacgacagaaagatggtggcgcttacagccgagtgtgacttagagacccggaagaagatggaaaatcagtaccaacgtgaaatgatggccatggaggaagccgaagagctcctcaagagggccggagaacgctcagcagttgaatgttctaacctcttgcggactctgcacgggcttgagcaggaacaccttaggaaaagtttggcccttcagcaggaggaggacttcgccaaggcccacagacaactggcagtcttccagcgcaatgaattgcatagtatcttttttacacagatcaaatctgcaatctttaagggcgagctgaaaccggaagccgcaaagatgctactgcaaaactactcgaagatacaggagaacgtcgaggagctgatggacttcttccaggcaagcaaaaggtatcatctttcgaaaagattcggccaccgcgagtacttggttcagaatctgcagagctccgaaacaagggtccaggggctgctctccactgcagctgcccagcttacgcacctgatccagaagcacgagcgggctggctatctcgacgaggatcagatggagatgctgctcgaacgtgcgcagacagaagtcttcagtatcaagcagaagctggacaatgacttaaaacaggagaaaaaaaagctgcaccagaaactcattaccaagaggcgtcgcgagctgctccagaaacaccgtgagcagcggagagaacaggcttcagtcggagaggcctttcgcactgtagaggatgcaggtcaatacctacaccagaagcgctctcttatggaagagcacggggcaaccctggaagaactacaagagaggctcgaccaagctgcattagatgacctgcggacgctcacccttagtttgttcgagaaggcaacagacgaactcaggcgactccagaactctgctatgacacaagaactcctgaagcgaggagtgccctggttgttcctacagcaaatcctcgaggaacatggcaaagagatggctgccagagctgagcagttagagggcgaagaacgcgaccgcgatcaggagggagtgcaaagcgttcgtcagcgcctcaaagacgatgcaccagaggctgtcacagaagaacaggcagaacttagacgctgggagcacctgattttcatgaagttgtgtagctcagtgttcagcttgtccgaggaggagctcctgcggatgaggcaggaggtgcacggctgtttcgctcagatggataggagccttgccctgccaaagattagggccagagtgctgctgcaacagttccagacagcatggagagaggcagaatttgtgaagctggaccaggctgtggctgcacctgagctacagcagcaatcaaaagtacgcaagtctaggtccaagagcaagtctaagggggaactgctgaagaaatgtattgaagataaaatccacctttgtgaagaacaagcctcagaagacctggtcgagaaagtgaggggagaattgcttcgggaaagggtccagcggatggaggcccaggagggcggatttgctcagagcttggttgccctacagttccagaaggcctcaagggtcaccgaaacgctttctgcgtataccgcgctcttgtccatccaggatctgctgcttgaggagctgtccgcctcagaaatgctgacaaagtcggcttgcactcagatcctggagtcacactctcgtgagttgcaggagctggaaagaaagctcgaggaccagctggtccagcaggaagcagcccagcaacagcaggcactagcgagctggcagcagtgggttgccgatggccctggaatcctcaatgagccgggtgaggtggatagcgagagacaggtcagtacggttttgcaccaggccctctctaaatcacagaccctcctggagcaacaccagcagtgcttgcgggaggagcaacagaactccgtggtgctggaggacctcctggagaatatggaagctgatacattcgcaacattgtgcagccaagaactaaggctggccagttacctggcacggatggccatggtgcctggcgctacgttaaggcgcctgctgtccgtggtcctgccaacagcctcccagccccaactgttggcgctcctagacagcgcaaccgagagacacgtagaccacgcagctgagagcgatggaggagccgagcaggccgacgtgggcaggagacgcaagcaccagagttggtggcaagcgttggacgggaagctcagaggagacctgatctccagaggactggagaagatgctgtgggcacggaagagaaaacaaagcatcctgaaaaaaacatgtctgccattaagagagagaatgatctttagcgggaagggatcatggccccaccttagtctggagcccattggagagctcgcgccagtgccgatcgtaggggctgaaacaattgaccttctaaatacgggggagaaattgttcatattcaggaaccccaaggaacccgagattagcctgcatgtgcctcccaggaagaaaaagaacttcctgaacgctaagaaggccatgagggctctcggaatggattag

SEQ ID NO: 64475 - DNA, 3687 bp, Artificial Sequence
  derived and/or modified sequence
atgatctggcccaaggtggagtgctgccacttcaagaccgccgtggaggcccccctgggcatgaagctggacaagaagatggaggtgttcatccccctgagcaccagcgccgccagcagcggcccctgggcccacagcctgttcgccttcatccccagctggcccaagaagaacctgttcaagagagagagccccatcacccacagactgtacggcgacatcagcagagaggtgcagggcaccagcgagaacggcgtgatcttccagaagtgcgccctggtgagcggcagcagcgaggcccagaccgccagaatctggctgctggtgaacaacaccaagaccaccagcagcgccaacctgagcgagctgctgctgctggacagcatcgccggcctgaccatctgggacagcgtgggcaacagaaccagcgagggcttccaggccttcagcaagaagttcctgcaggtgggcgacgccttcgccgtgagctacgccgccaccctgcaggccggcgacctgggcaacggcgagagcctgaagctgcccgcccagctgaccttccagagcagcagcagaaacagaacccagctgaaggtgctgttcagcatcaccgccgaggagaacgtgaccgtgctgccccaccacggcctgcacgccgccggcttcttcatcgccttcctgctgagcctggtgctgacctgggccgccctgttcctgatggtgagataccagtgcctgaagggcaacatgctgaccagacacagagtgtggcagtacgagagcaagctggagcccctgcccttcaccagcgccgacggcgtgaacgaggacctgagcctgaacgaccagatgatcgacatcctgagcagcgaggaccccggcagcatgctgcaggccctggaggagctggagatcgccaccctgaacagagccgacgccgacctggaggcctgcagaacccagatcagcaaggacatcatcgccctgctgctgaagaacctgaccagcagcggccacctgagcccccaggtggagagaaagatgagcgccgtgttcaagaagcagttcctgctgctggagaacgagatccaggaggagtacgacagaaagatggtggccctgaccgccgagtgcgacctggagaccagaaagaagatggagaaccagtaccagagagagatgatggccatggaggaggccgaggagctgctgaagagagccggcgagagaagcgccgtggagtgcagcaacctgctgagaaccctgcacggcctggagcaggagcacctgagaaagagcctggccctgcagcaggaggaggacttcgccaaggcccacagacagctggccgtgttccagagaaacgagctgcacagcatcttcttcacccagatcaagagcgccatcttcaagggcgagctgaagcccgaggccgccaagatgctgctgcagaactacagcaagatccaggagaacgtggaggagctgatggacttcttccaggccagcaagagataccacctgagcaagagattcggccacagagagtacctggtgcagaacctgcagagcagcgagaccagagtgcagggcctgctgagcaccgccgccgcccagctgacccacctgatccagaagcacgagagagccggctacctggacgaggaccagatggagatgctgctggagagagcccagaccgaggtgttcagcatcaagcagaagctggacaacgacctgaagcaggagaagaagaagctgcaccagaagctgatcaccaagagaagaagagagctgctgcagaagcacagagagcagagaagagagcaggccagcgtgggcgaggccttcagaaccgtggaggacgccggccagtacctgcaccagaagagaagcctgatggaggagcacggcgccaccctggaggagctgcaggagagactggaccaggccgccctggacgacctgagaaccctgaccctgagcctgttcgagaaggccaccgacgagctgagaagactgcagaacagcgccatgacccaggagctgctgaagagaggcgtgccctggctgttcctgcagcagatcctggaggagcacggcaaggagatggccgccagagccgagcagctggagggcgaggagagagacagagaccaggagggcgtgcagagcgtgagacagagactgaaggacgacgcccccgaggccgtgaccgaggagcaggccgagctgagaagatgggagcacctgatcttcatgaagctgtgcagcagcgtgttcagcctgagcgaggaggagctgctgagaatgagacaggaggtgcacggctgcttcgcccagatggacagaagcctggccctgcccaagatcagagccagagtgctgctgcagcagttccagaccgcctggagagaggccgagttcgtgaagctggaccaggccgtggccgcccccgagctgcagcagcagagcaaggtgagaaagagcagaagcaagagcaagagcaagggcgagctgctgaagaagtgcatcgaggacaagatccacctgtgcgaggagcaggccagcgaggacctggtggagaaggtgagaggcgagctgctgagagagagagtgcagagaatggaggcccaggagggcggcttcgcccagagcctggtggccctgcagttccagaaggccagcagagtgaccgagaccctgagcgcctacaccgccctgctgagcatccaggacctgctgctggaggagctgagcgccagcgagatgctgaccaagagcgcctgcacccagatcctggagagccacagcagagagctgcaggagctggagagaaagctggaggaccagctggtgcagcaggaggccgcccagcagcagcaggccctggccagctggcagcagtgggtggccgacggccccggcatcctgaacgagcccggcgaggtggacagcgagagacaggtgagcaccgtgctgcaccaggccctgagcaagagccagaccctgctggagcagcaccagcagtgcctgagagaggagcagcagaacagcgtggtgctggaggacctgctggagaacatggaggccgacaccttcgccaccctgtgcagccaggagctgagactggccagctacctggccagaatggccatggtgcccggcgccaccctgagaagactgctgagcgtggtgctgcccaccgccagccagccccagctgctggccctgctggacagcgccaccgagagacacgtggaccacgccgccgagagcgacggcggcgccgagcaggccgacgtgggcagaagaagaaagcaccagagctggtggcaggccctggacggcaagctgagaggcgacctgatcagcagaggcctggagaagatgctgtgggccagaaagagaaagcagagcatcctgaagaagacctgcctgcccctgagagagagaatgatcttcagcggcaagggcagctggccccacctgagcctggagcccatcggcgagctggcccccgtgcccatcgtgggcgccgagaccatcgacctgctgaacaccggcgagaagctgttcatcttcagaaaccccaaggagcccgagatcagcctgcacgtgccccccagaaagaagaagaacttcctgaacgccaagaaggccatgagagccctgggcatggactag

SEQ ID NO: 64476 - protein, 274 aa, Artificial Sequence
  derived and/or modified sequence
MAASWRLGCDPRLLRYLVGFPGRRSVGLVKGALGWSVSRGANWRWFHSTQWLRGDPIKILMPSLSPTMEEGNIVKWLKKEGEAVSAGDALCEIETDKAVVTLDASDDGILAKIVQMPDVNVSWDGEGPKQLPFIDISVAVATDKGLLTPIIKDAAAKGIQEIADSVKALSKKARDGKLLPEEYQGGSFSISNLGMFGIDEFTAVINPPQACILAVGRFRPVLKLTEDEEGNAKLQQRQLITVTMSSDSRVVDDELATRFLKSFKANLENPIRLA

SEQ ID NO: 64477 - DNA, 825 bp, Artificial Sequence
  derived and/or modified sequence
atggccgccagctggagactgggctgcgaccccagactgctgagatacctggtgggcttccccggcagaagaagcgtgggcctggtgaagggcgccctgggctggagcgtgagcagaggcgccaactggagatggttccacagcacccagtggctgagaggcgaccccatcaagatcctgatgcccagcctgagccccaccatggaggagggcaacatcgtgaagtggctgaagaaggagggcgaggccgtgagcgccggcgacgccctgtgcgagatcgagaccgacaaggccgtggtgaccctggacgccagcgacgacggcatcctggccaagatcgtgcagatgcccgacgtgaacgtgagctgggacggcgagggccccaagcagctgcccttcatcgacatcagcgtggccgtggccaccgacaagggcctgctgacccccatcatcaaggacgccgccgccaagggcatccaggagatcgccgacagcgtgaaggccctgagcaagaaggccagagacggcaagctgctgcccgaggagtaccagggcggcagcttcagcatcagcaacctgggcatgttcggcatcgacgagttcaccgccgtgatcaaccccccccaggcctgcatcctggccgtgggcagattcagacccgtgctgaagctgaccgaggacgaggagggcaacgccaagctgcagcagagacagctgatcaccgtgaccatgagcagcgacagcagagtggtggacgacgagctggccaccagattcctgaagagcttcaaggccaacctggagaaccccatcagactggcctag

SEQ ID NO: 64478 - DNA, 825 bp, Artificial Sequence
  derived and/or modified sequence
atggcagcaagctggaggttggggtgcgatccgaggctgcttcggtacctggtagggtttccaggccgacggagtgtaggcctagttaaaggcgccctaggatggtctgtgtcacgaggcgccaactggaggtggttccattccacccagtggctccggggcgatcctattaagatcctaatgccgtctttgagcccaactatggaagagggcaatattgttaagtggcttaagaaagagggagaggcggtctctgcgggggacgccttgtgtgagattgagacagacaaagccgtggttactttggatgcctcggacgatggcatcctggccaagattgtacagatgccagacgtcaacgttagttgggatggagaggggcctaagcagttgccatttatagacatttctgtggcagtggctacagacaaagggttgctaacgcctatcatcaaggatgctgcagcgaaaggcattcaagagatcgccgattctgtcaaggctctttcaaagaaagcaagagacggtaaactgctgccggaggaatatcagggagggtccttttctatttctaatctcggtatgttcggtatcgacgaatttacagcagtcataaatccccctcaggcgtgtatcctcgctgtcggtagatttaggccggtgttgaaactcacagaagatgaggaaggcaatgctaagctccagcagaggcagctgatcacggtgacaatgagcagtgatagccgggtcgtggacgacgaactggccactcgattcctgaaaagctttaaggccaacctggagaatcctatccgacttgcatag

SEQ ID NO: 64479 - DNA, 825 bp, Artificial Sequence
  derived and/or modified sequence
atggccgcctcctggaggctgggctgtgacccccggctgctgcgctacctggtgggcttccctggaagaagatctgtgggcctggtgaagggggccctgggctggagcgtgtccagaggagccaactggcgctggttccacagcacccagtggctgcggggggaccccatcaagatcctgatgcccagcctgagccccaccatggaggagggcaacatcgtgaagtggctgaagaaggagggggaggccgtgtctgctggagatgccctgtgtgaaattgaaacagacaaggctgtggtgaccctggatgccagtgatgatggcatcctggccaagatcgtgcagatgccagatgtgaatgtgtcctgggatggagagggccccaagcagctgcccttcatcgacatctctgtggccgtggccacagacaagggcctgctgacccccatcatcaaggatgctgctgccaagggcatccaggagattgctgacagcgtgaaggccctgagcaagaaggccagagatggcaagctgctgcctgaggagtaccagggcggcagcttcagcatcagcaacctgggcatgtttggaattgatgagttcaccgctgtgatcaaccccccccaggcctgcatcctggccgtgggccgcttccggcctgtgctgaagctgacagaagatgaggagggcaatgccaagctgcagcagaggcagctgatcaccgtgaccatgagcagtgacagccgggtggtggatgatgagctggccacccgcttcctgaagagcttcaaggccaacctggagaaccccatccggctggcctag

SEQ ID NO: 64480 - DNA, 825 bp, Artificial Sequence
  derived and/or modified sequence
atggccgccagctggcggctgggctgcgacccccggctgctgcggtaccttgtcgggttcccagggagacgctcggttggcctcgtgaagggcgccctaggatggtccgtcagtaggggggccaactggcggtggttccatagcacccagtggttgcgcggggacccaattaagatcttgatgccatccctaagcccaaccatggaggaaggcaatatcgtcaagtggttgaagaaggaaggcgaagcggtgtccgccggcgacgccctatgcgagattgaaactgacaaggcggtggtgactctggatgcttccgatgacggtatcctggctaagatagtgcagatgcctgacgttaatgtatcttgggatggtgagggccccaagcagctgcctttcatagatattagtgtggcagtggctactgacaaaggtctgttaacacctattatcaaggacgcggctgctaagggaatccaggagattgctgacagcgtgaaggcgctgagcaagaaggcacgggacgggaagctgctgcccgaggagtaccaaggtgggtcctttagcatcagcaatttaggcatgttcggaattgatgagtttaccgcagttattaacccaccccaggcttgtatcttggcagtcggaaggtttagacctgtcttgaagctgacggaagacgaagaagggaatgctaaacttcagcagcgccagctgattacagttacgatgtcctccgattccagagtggtcgatgacgagctggccacacgcttcctaaagtcgttcaaggccaacttagaaaatcctattcgactggcatag

SEQ ID NO: 64481 - DNA, 825 bp, Artificial Sequence
  derived and/or modified sequence
atggcggcttcctggcgcttagggtgtgacccacgcctactgcggtatctagttggtttcccgggacgacgtagtgtgggcctagtgaagggtgccttgggctggagcgtgtcaaggggcgctaactggagatggttccatagtacacagtggctgagaggagatccgattaagatcttaatgccgagcctgtctcctacgatggaggagggcaacatcgtgaagtggctgaagaaagagggggaagcggtctcagccggagatgccttatgcgagattgagacggacaaggccgttgttactttagatgcctccgacgatggtatacttgcgaagatcgttcagatgccagatgttaacgtctcttgggatggggagggtcccaagcagcttccttttatagacatatcagttgcagtcgccaccgataaggggctcctgacccctatcatcaaggacgctgcagcgaaaggaatccaggagatagccgatagcgtgaaggccttgtctaaaaaagccagggatgggaagctcctgcctgaggagtatcagggagggagtttcagcatttctaatttagggatgttcggcatagatgagttcaccgcagtgattaatcctccccaggcctgcattctggccgtgggacgattcaggcccgttctgaagctcaccgaagacgaagagggaaatgcgaaacttcaacaaaggcagttgattactgtgacaatgagctccgactctcgtgttgtggacgacgagctggcaacacggttcctgaagtctttcaaagccaacctcgagaaccccatcagattggcctag

SEQ ID NO: 64482 - DNA, 952 bp, Artificial Sequence
  derived and/or modified sequence
gcagccagtgagaaggccgtcaagatggcggcctcctggaggctgggctgtgatccgcggctgctgcgttatcttgtgggcttccccggccgccgaagcgtagggctggtgaagggggctcttgggtggtctgtaagccgcggagctaattggagatggtttcacagcacgcagtggcttcggggtgatcccattaagatactaatgccatcactgtctcctacaatggaagaaggaaacattgtgaaatggctgaaaaaggaaggtgaagcggtgagtgctggagatgcattatgtgaaattgagactgacaaagctgtggttaccttagatgcaagtgatgatggaatcttggccaaaatcgtgcaaatgccagatgttaatgtaagctgggatggagagggcccaaagcaactgccatttattgacatttcagtggctgtggcaacagataaaggcttacttactccaatcataaaagatgctgctgctaaaggtatccaggaaattgctgactctgtaaaggctctatcaaagaaagcaagagatggaaaattgttgcctgaagaataccaaggaggatcttttagtatttccaacttggggatgtttggcatcgacgaatttactgcagtgattaaccctcctcaggcctgcattttggcggttgggaggttccgacctgtgctgaagctcactgaggatgaagagggaaatgccaaactgcagcagcgccagctcataacagtcacaatgtcaagtgacagtcgagtggttgatgacgaactggcaaccaggtttcttaaaagttttaaagcaaacctagagaatcctatccgacttgcctagtcctcaaagataagaagttggtgttcagcttagttgattcagtagttgttaccaagaaacatatgttataggaaaacaacttggtatttaagtatgaagtgga

SEQ ID NO: 64483 - protein, 457 aa, Artificial Sequence
  derived and/or modified sequence
MAALRALCGFRGVAAQVLRPGAGVRLPIQPSRGVRQWQPDVEWAQQFGGAVMYPSKETAHWKPPPWNDVDPPKDTIVKNITLNFGPQHPAAHGVLRLVMELSGEMVRKCDPHIGLLHRGTEKLIEYKTYLQALPYFDRLDYVSMMCNEQAYSLAVEKLLNIRPPPRAQWIRVLFGEITRLLNHIMAVTTHALDLGAMTPFFWLFEEREKMFEFYERVSGARMHAAYIRPGGVHQDLPLGLMDDIYQFSKNFSLRLDELEELLTNNRIWRNRTIDIGVVTAEEALNYGFSGVMLRGSGIQWDLRKTQPYDVYDQVEFDVPVGSRGDCYDRYLCRVEEMRQSLRIIAQCLNKMPPGEIKVDDAKVSPPKRAEMKTSMESLIHHFKLYTEGYQVPPGATYTAIEAPKGEFGVYLVSDGSSRPYRCKIKAPGFAHLAGLDKMSKGHMLADVVAIIGTRPIV

SEQ ID NO: 64484 - protein, 53 aa, Artificial Sequence
  derived and/or modified sequence
MFEFYERVSGARMHAAYIRPGGVHQDLPLGLMDDIYQFSKNFSLRLDELEEVS

SEQ ID NO: 64485 - DNA, 1374 bp, Artificial Sequence
  derived and/or modified sequence
atggctgcactgcgcgccctgtgtgggtttaggggtgtcgctgcacaagtgctcagacctggggccggcgtgcgactgcctatacagccttctcgcggtgtccgccagtggcagccggatgtagaatgggctcagcaattcggtggggcggtgatgtatccatccaaagaaacagcacactggaaaccaccaccctggaacgacgtagaccctccaaaagatacaattgttaagaacatcactctaaattttggtccacaacacccggccgcccatggcgtgctccgtctggtcatggagctctctggcgaaatggtgcgcaagtgcgatccacatatcggcttgctgcatagggggacggagaagctgattgagtataaaacatacctgcaggctctcccttatttcgaccgattggattacgtgtctatgatgtgcaacgagcaagcctactcattggccgtcgaaaaactcctgaatatacggcctcccccacgcgctcagtggatcagagtgctatttggggagatcacccgccttttaaatcacatcatggcggttaccacccacgcgctcgatttaggagcaatgacgccgttcttctggctgttcgaggagagggagaaaatgtttgagttttatgaaagggtcagcggagcccggatgcacgctgcctacatccggccaggcggcgtgcatcaggatctccccctcgggctcatggacgacatataccagttttcaaaaaacttttctctgcggctggacgaactcgaggagcttctgacaaataaccggatttggcggaaccgtactattgacattggagtggttacggctgaagaggctctaaattacggtttttcgggcgttatgttgagagggtctggcatccagtgggatctcagaaaaacccaaccatatgacgtgtatgatcaggtggagtttgacgtccctgtcggcagccggggagattgctatgacaggtatctttgtcgcgtcgaagagatgagacagagcctgcgcatcatcgcacaatgcctgaataaaatgcctccaggcgaaattaaggtcgacgacgccaaggttagtcccccgaaaagggccgagatgaagacaagtatggaatcgctcatccaccacttcaaactgtacaccgagggctatcaggtgccccccggtgccacttacacagcgatcgaagcgccaaagggcgagtttggagtttatctcgtctcagacggatcgtccagaccctatcgttgtaagatcaaagcacccgggttcgcccatctggccggcctggacaagatgtccaaagggcatatgctcgcagatgtggtcgctatcatcgggactagacccattgtttag

SEQ ID NO: 64486 - DNA, 1374 bp, Artificial Sequence
  derived and/or modified sequence
atggccgccctgcgggccctgtgtggcttccggggcgtggccgcccaggtgctgcggcctggggccggcgtgcggctgcccatccagcccagcagaggagtgcggcagtggcagccagatgtggagtgggcccagcagtttggaggagctgtgatgtaccccagcaaggagacagcccactggaagcccccaccctggaatgatgtggacccccccaaggacaccatcgtgaagaacatcaccctgaactttggcccccagcaccctgctgcccacggcgtgctgcggctggtgatggagctgagcggggagatggtgaggaaatgtgacccccacatcggcctgctgcaccggggcacagagaagctgattgagtacaagacctacctgcaggccctgccctactttgaccggctggactatgtgtccatgatgtgcaatgagcaggcctacagcctggccgtggagaagctgctgaacatccggcccccaccccgggcccagtggatccgggtgctgtttggagagatcacccggctgctgaaccacatcatggctgtgaccacccacgccctggacctgggcgccatgacccccttcttctggctgtttgaggagcgggagaagatgtttgagttctatgaaagagtgtctggggccaggatgcacgccgcctacatccggcctggaggagtgcaccaggacctgcccctgggcctgatggatgacatctaccagttcagcaagaacttcagcctgcggctggatgagctggaggagctgctgaccaacaaccgcatctggaggaacagaaccattgatattggagtggtgacagctgaggaggccctgaactacggcttctctggagtgatgctgcggggcagcggcatccagtgggacctgaggaagacccagccctatgatgtgtatgaccaggtggagtttgatgtgcctgtgggcagcagaggagactgctatgaccgctacctgtgccgggtggaggagatgaggcagagcctgcgcatcatcgcccagtgcctgaacaagatgcctcctggagagatcaaggtggatgatgccaaggtgtccccacccaagagagctgagatgaagacctccatggagagcctcatccaccacttcaagctgtacacagagggctaccaggtgcccccaggggccacctacacagccatcgaggcccccaagggggagtttggagtgtacctggtgtctgatggcagcagccggccctaccgctgcaagatcaaggcccctggctttgcccacctggccggcctggacaagatgagcaagggccacatgctggctgatgtggtggccatcatcggcacccggcccatcgtgtag

SEQ ID NO: 64487 - DNA, 2064 bp, Artificial Sequence
  derived and/or modified sequence
aaaagccagccaggagctgtgggaggaaacgccctcagtaaagatgaccgcggtcactgttatctaaacgcaagtgaagccgagtcacaggacccggatgttgtcagttcgacggtaaacgaccctgccagcttccaagagggcggcttcactgtgcgaataggtgagaagccaagaaggaggcgcgctggagttacttccgcccggttctccttcccgcagtctgcagccggagtaagatggcggcgctgagggctttgtgcggcttccggggcgtcgcggcccaggtgctgcggcctggggctggagtccgattgccgattcagcccagcagaggtgttcggcagtggcagccagatgtggaatgggcacagcagtttgggggagctgttatgtacccaagcaaagaaacagcccactggaagcctccaccttggaatgatgtggaccctccaaaggacacaattgtgaagaacattaccctgaactttgggccccaacacccagcagcgcatggtgtcctgcgactagtgatggaattgagtggggagatggtgcggaagtgtgatcctcacatcgggctcctgcaccgaggcactgagaagctcattgaatacaagacctatcttcaggcccttccatactttgaccggctagactatgtgtccatgatgtgtaacgaacaggcctattctctagctgtggagaagttgctaaacatccggcctcctcctcgggcacagtggatccgagtgctgtttggagaaatcacacgtttgttgaaccacatcatggctgtgaccacacatgccctggaccttggggccatgacccctttcttctggctgtttgaagaaagggagaagatgtttgagttctacgagcgagtgtctggagcccgaatgcatgctgcttatatccggccaggaggagtgcaccaggacctaccccttgggcttatggatgacatttatcagttttctaagaacttctctcttcggcttgatgagttggaggagttgctgaccaacaataggatctggcgaaatcggacaattgacattggggttgtaacagcagaagaagcacttaactatggttttagtggagtgatgcttcggggctcaggcatccagtgggacctgcggaagacccagccctatgatgtttacgaccaggttgagtttgatgttcctgttggttctcgaggggactgctatgataggtacctgtgccgggtggaggagatgcgccagtccctgagaattatcgcacagtgtctaaacaagatgcctcctggggagatcaaggttgatgatgccaaagtgtctccacctaagcgagcagagatgaagacttccatggagtcactgattcatcactttaagttgtatactgagggctaccaagttcctccaggagccacatatactgccattgaggctcccaagggagagtttggggtgtacctggtgtctgatggcagcagccgcccttatcgatgcaagatcaaggctcctggttttgcccatctggctggtttggacaagatgtctaagggacacatgttggcagatgtcgttgccatcataggtacgaggcctattgtgtagtagaggtatcctagacaaaggagttcgggacgcccactggggacagaaggagaacacttcctgttcaccataggccatggcatggactcgggtcctcaatcttttgagcacagtaatgggttctggatcttgggtaacaccactttttttgtttgttttgcctcacaacaggaagataagtaacatcacttttttcctccatcctctcacctaggtacccaagatattgtatttggagaagtagatcggtgagcaggggagcagcgtttgatcccccctgcctatcagcttcttctgtggagcctgttcctcactggaaattggcctctgtgtgtgtgtgtgtgtgtgtgtgtgtgtgtatgttcatgtacacttggctgtcaggctttctgtgcatgtactaaaaaaggagaaattataataaattagccgtcttgcggcccctaggcct

SEQ ID NO: 64488 - DNA, 1232 bp, Artificial Sequence
  derived and/or modified sequence
gcagccggagtaagatggcggcgctgagggctttgtgcggcttccggggcgtcgcggcccaggtgctgcggcctggggctggagtccgattgccgattcagcccagcagatgtggaccctccaaaggacacaattgtgaagaacattaccctgaactttgggccccaacacccagcagcgcatggtgtcctgcgactagtgatggaattgagtggggagatggtgcggaagtgtgatcctcacatcgggctcctgcaccgaggcactgagaagctcattgaatacaagacctatcttcaggcccttccatactttgaccggctagactatgtgtccatgatgtgtaacgaacaggcctattctctagctgtggagaagttgctaaacatccggcctcctcctcgggcacagtggatccgagtgctgtttggagaaatcacacgtttgttgaaccacatcatggctgtgaccacacatgccctggaccttggggccatgacccctttcttctggctgtttgaagaaagggagaagatgtttgagttctacgagcgagtgtctggagcccgaatgcatgctgcttatatccggccaggaggagtgcaccaggacctaccccttgggcttatggatgacatttatcagttttctaagaacttctctcttcggcttgatgagttggaggagttgctgaccaacaataggatctggcgaaatcggacaattgacattggggttgtaacagcagaagaagcacttaactatggttttagtggagtgatgcttcggggctcaggcatccagtgggacctgcggaagacccagccctatgatgtttacgaccaggttgagtttgatgttcctgttggttctcgaggggactgctatgataggtaaggccccaatcctttcttggctgatattccagctagtttcccctgcctcactcttctctttgccacttccttctttaccctacttctcagtgtctgtgggagctcttgtgtgtgttagacgaggttgctctcaaaacactttcacatatatggaatcttacttatttttttcttttttgagacggagttttgctcttgttgcccaggttggaatgcaatggtgcaatctcggctcactgcaacctccgcctcctgggttcaagtgattctcctgcctcagcctcctgagtagctgggattacaggcatgagccaccacgctcagctaatttatgta

SEQ ID NO: 64489 - DNA, 1374 bp, Artificial Sequence
  derived and/or modified sequence
atggccgccctgcgggccctgtgcggcttccggggcgtggccgcccaggtcttaagacctggcgccggagttcgcctccccatccagcccagccggggagtccgccagtggcaacccgatgtcgagtgggctcagcagtttggtggggccgttatgtatccaagtaaagagactgctcactggaaaccaccaccttggaacgacgtcgatccccctaaagacactatcgttaagaatattaccctaaattttggccctcaacatcccgctgcccatggcgtcctccggttagttatggagctgtccggggagatggtgcgaaaatgtgatccccacatcggcctccttcataggggcactgagaagctgatcgagtacaaaacttacctgcaggccctgccatactttgacagactggattacgtgtctatgatgtgcaacgagcaggcgtattcattggccgtagagaagctgctcaacatccgacccccgccaagagcccaatggatcagggtgctctttggggagataacccggctgcttaatcacatcatggcagtgacaacacacgccttggatctgggtgcaatgactcctttcttctggctcttcgaggaacgcgagaaaatgttcgagttctacgagagggtgtccggtgcacgcatgcacgctgcttacatccgaccaggcggcgtccatcaggacctgcctcttggcctgatggatgatatttaccagttcagcaagaacttctccctgagactggacgagctcgaagaactgcttacaaacaacagaatctggcgaaaccgcactattgacattggggttgtcaccgccgaagaagctcttaattacggtttttccggcgtgatgctgagaggcagcgggattcaatgggatctaagaaagacacagccgtacgatgtctacgatcaggtcgagtttgacgtgccagtaggtagccggggagattgctatgataggtacctttgcagggtagaagaaatgcgccagtccttaagaatcattgcccagtgtctgaataagatgccgccgggtgagataaaggtcgacgacgcgaaggtgtccccgccaaagagagccgaaatgaagacctcaatggagagtctcatacaccacttcaagctatataccgaaggttatcaggtaccaccaggtgccacgtacacagcgatcgaggccccgaagggtgagttcggagtgtatttggtatctgacggctcgagccgcccataccggtgcaagattaaagcccctggctttgcccatctcgctgggctcgataagatgagcaagggtcacatgttggccgacgtggtggcaataatcggtaccagacccatagtttag

SEQ ID NO: 64490 - DNA, 1374 bp, Artificial Sequence
  derived and/or modified sequence
atggctgcacttagggcattgtgtgggttccgaggcgtggccgcacaggtgctgcgcccaggcgcaggcgtgcgcttaccaatccagcccagcaggggcgtgcgccaatggcaacccgatgtggagtgggctcagcagttcggtggagcggtgatgtatccaagcaaggagaccgctcattggaaaccaccaccttggaatgatgtagatcctcccaaggatacgatcgtcaagaatattacactgaatttcggcccacagcaccctgccgcacacggggtgctcaggctagtgatggaactttccggtgaaatggtccggaaatgtgacccccatatcggcctcctgcacagaggaacagaaaagctgatagaatacaaaacatacctccaagctctcccctactttgacaggctggattatgttagcatgatgtgtaacgagcaggcatactcactggctgtggagaagctcttgaacatccggccacctcctcgagcacaatggatacgcgttctctttggcgaaatcactaggctgctgaatcatattatggcagtcactactcatgcccttgacttaggcgctatgacacctttcttctggctgttcgaagaacgtgaaaagatgtttgaattttacgaaagggtgtccggcgcaagaatgcacgccgcatatatccggccaggtggcgtgcaccaggacctgccattaggcctgatggatgacatctatcagttcagcaagaattttagcctgcgcctagacgaactggaagagttgctgacaaataatagaatttggcggaaccggactatcgacattggagtagtcaccgctgaggaggccctaaattacgggttctccggggtgatgttaagaggttctggcatccagtgggacttgcgtaagacacagccctacgatgtgtatgatcaagtggagttcgacgttccagtcggctcgagaggtgactgttatgaccgctacctatgtagggtcgaggagatgcgccagtctctacggattatcgctcagtgcctgaataaaatgccgccaggcgagataaaagtcgatgacgcaaaagtgtcacccccaaagagagctgagatgaaaacttctatggagagtctgattcaccactttaagctgtacacagaagggtatcaagtgccccctggcgctacttacacagccatcgaggcacctaaaggcgaatttggcgtctacctcgtgagcgacggaagctcccgaccatacagatgcaaaatcaaggcccctggcttcgcccacttagccggtctggacaaaatgagtaaagggcacatgctggccgacgttgtcgcgatcattggaaccagacccatcgtgtag

SEQ ID NO: 64491 - DNA, 1374 bp, Artificial Sequence
  derived and/or modified sequence
atggccgccctgagagccctgtgcggcttcagaggcgtggccgcccaggtgctgagacccggcgccggcgtgagactgcccatccagcccagcagaggcgtgagacagtggcagcccgacgtggagtgggcccagcagttcggcggcgccgtgatgtaccccagcaaggagaccgcccactggaagccccccccctggaacgacgtggacccccccaaggacaccatcgtgaagaacatcaccctgaacttcggcccccagcaccccgccgcccacggcgtgctgagactggtgatggagctgagcggcgagatggtgagaaagtgcgacccccacatcggcctgctgcacagaggcaccgagaagctgatcgagtacaagacctacctgcaggccctgccctacttcgacagactggactacgtgagcatgatgtgcaacgagcaggcctacagcctggccgtggagaagctgctgaacatcagacccccccccagagcccagtggatcagagtgctgttcggcgagatcaccagactgctgaaccacatcatggccgtgaccacccacgccctggacctgggcgccatgacccccttcttctggctgttcgaggagagagagaagatgttcgagttctacgagagagtgagcggcgccagaatgcacgccgcctacatcagacccggcggcgtgcaccaggacctgcccctgggcctgatggacgacatctaccagttcagcaagaacttcagcctgagactggacgagctggaggagctgctgaccaacaacagaatctggagaaacagaaccatcgacatcggcgtggtgaccgccgaggaggccctgaactacggcttcagcggcgtgatgctgagaggcagcggcatccagtgggacctgagaaagacccagccctacgacgtgtacgaccaggtggagttcgacgtgcccgtgggcagcagaggcgactgctacgacagatacctgtgcagagtggaggagatgagacagagcctgagaatcatcgcccagtgcctgaacaagatgccccccggcgagatcaaggtggacgacgccaaggtgagcccccccaagagagccgagatgaagaccagcatggagagcctgatccaccacttcaagctgtacaccgagggctaccaggtgccccccggcgccacctacaccgccatcgaggcccccaagggcgagttcggcgtgtacctggtgagcgacggcagcagcagaccctacagatgcaagatcaaggcccccggcttcgcccacctggccggcctggacaagatgagcaagggccacatgctggccgacgtggtggccatcatcggcaccagacccatcgtgtag

SEQ ID NO: 64492 - protein, 1374 aa, Artificial Sequence
  derived and/or modified sequence
MLKTESSGERTTLRSASPHRNAYRTEFQALKSTFDKPKSDGEQKTKEGEGSQQSRGRKYGSNVNRIKNLFMQMGMEPNENAAVIAKTRGKGGHSSPQRRMKPKEFLEKTDGSVVKLESSVSERISRFDTMYDGPSYSKFTETRKMFERSVHESGQNNRYSPKKEKAGGSEPQDEWGGSKSNRGSTDSLDSLSSRTEAVSPTVSQLSAVFENTDSPSAIISEKAENNEYSVTGHYPLNLPSVTVTNLDTFGHLKDSNSWPPSNKRGVDTEDAHKSNATPVPEVASKSTSLASIPGEEIQQSKEPEDSTSNQQTPDSIDKDGPEEPCAESKAMPKSEIPSPQSQLLEDAEANLVGREAAKQQRKELAGGDFTSPDASASSCGKEVPEDSNNFDGSHVYMHSDYNVYRVRSRYNSDWGETGTEQDEEEDSDENSYYQPDMEYSEIVGLPEEEEIPANRKIKFSSAPIKVFNTYSNEDYDRRNDEVDPVAASAEYELEKRVEKLELFPVELEKDEDGLGISIIGMGVGADAGLEKLGIFVKTVTEGGAAQRDGRIQVNDQIVEVDGISLVGVTQNFAATVLRNTKGNVRFVIGREKPGQVSEVAQLISQTLEQERRQRELLEQHYAQYDADDDENTVAELQGMSGNCNNNNNYFLKTGEYATDEEEDEVGPVLPGSDMAIEVFELPENEDMFSPSELDTSKLSHKFKELQIKHAVTEAEIQKLKTKLQAAENEKVRWELEKTQLQQNIEENKERMLKLESYWIEAQTLCHTVNEHLKETQSQYQALEKKYNKAKKLIKDFQQKELDFIKRQEAERKKIEDLEKAHLVEVQGLQVRIRDLEAEVFRLLKQNGTQVNNNNNIFERRTSLGEVSKGDTMENLDGKQTSCQDGLSQDLNEAVPETERLDSKALKTRAQLSVKNRRQRPSRTRLYDSVSSTDGEDSLERKPSNSFYNHMHITKLLPPKGLRTSSPESDSGVPPLTPVDSNVPFSSDHIAEFQEEPLDPEMGPLSSMWGDTSLFSTSKSDHDVEESPCHHQTTNKKILREKDDAKDPKSLRASSSLAVQGGKIKRKFVDLGAPLRRNSSKGKKWKEKEKEASRFSAGSRIFRGRLENWTPKPCSTAQTSTRSPCMPFSWFNDSRKGSYSFRNLPAPTSSLQPSPETLISDKKGSKVENTWITKANKRNPNPSSSSIFGRHSQLMSVVWIQETNNFTFNDDFSPSSTSSADLSGLGAEPKTPGLSQSLALSSDEILDDGQSPKHSQCQNRAVQEWSVQQVSHWLMSLNLEQYVSEFSAQNITGEQLLQLDGNKLKALGMTASQDRAVVKKKLKEMKMSLEKARKAQEKMEKQREKLRRKEQEQMQRKSKKTEKMTSTTAEGAGEQ

SEQ ID NO: 64493 - DNA, 4125 bp, Artificial Sequence
  derived and/or modified sequence
atgctaaaaaccgaatcttctggagagaggacaaccctgcggtccgcctcccctcatcgtaatgcttatcggactgagtttcaagccctcaaatccactttcgacaagcccaagtcggacggcgagcagaagaccaaggaaggtgaaggatcacaacagtcccgcgggagaaaatacggaagcaacgtaaatcgaataaaaaatctttttatgcagatgggcatggagcccaacgaaaacgctgcagtgattgccaagacgaggggaaagggcggccattcttcaccccaacgtcggatgaagcccaaagagtttctcgagaaaacggacggcagcgttgtgaaattggagtcttcagtgtcagagcgcatcagtcggttcgacaccatgtatgatggcccgagctactccaaatttaccgagactaggaagatgtttgagcgcagcgtgcacgaatcaggacagaataatcggtatagtcctaagaaagaaaaagccggcggctccgagccccaggatgaatggggcgggagcaagtcaaatcgcggctcaactgattccctcgatagtctgtcctccagaacagaagctgttagtcccaccgtgtcacagcttagcgccgtattcgagaatactgactccccatccgctatcatctccgagaaagctgagaataatgaatacagcgttacaggccattaccctctgaatcttccgtcagtcactgtcacgaacctggatactttcgggcacctgaaggactctaactcttggcctccctccaacaagcgaggagtcgataccgaagatgcccataagtctaacgcaacacccgtaccggaggtggcttcgaagtccacctccctggcatctatcccaggggaagagatccagcagtctaaagagccggaggactcaacttcaaaccaacagacacctgactccatcgataaagacggtcctgaggaaccctgcgctgagagcaaggccatgcctaagtccgaaatcccgagtccacagtctcagctccttgaagatgccgaggccaatctcgtcggccgcgaagcggccaagcagcagcgtaaggagttagcagggggcgacttcacatcgcctgacgcctcagcctcctcctgcgggaaagaggtgcctgaagattccaataactttgatgggagccacgtttatatgcattcggactacaatgtataccgggtgagaagtcgctacaatagtgattggggcgaaaccggcaccgagcaagatgaggaggaggattctgatgaaaatagttattaccaacccgacatggagtactccgagattgtgggactgcccgaagaagaggagatccccgcaaatcgcaaaatcaagttttcctctgctccgattaaagttttcaacacctactctaacgaagattacgaccggaggaatgacgaggtggacccagttgcagccagcgccgaatatgagcttgagaaacgcgtggagaagctcgagttattcccagtcgaattggaaaaagatgaggacgggctcggcattagcatcataggcatgggagtcggagccgacgccgggctggagaagctggggattttcgtgaagacagtgacagaaggtggagctgcacaacgggatgggcggatacaggtaaatgaccagatagtggaggtcgacgggatctcccttgtcggcgtgacacagaactttgcggcaactgtgcttcggaacactaagggtaacgtccggttcgtcattggcagagagaagcccgggcaagtgtcagaggtggcccagctaatcagccagacattggagcaagagcggaggcaacgtgagttgttggaacagcattatgcacagtacgacgctgatgatgacgaaaataccgttgccgagcttcagggaatgagcggcaactgcaataacaacaataattactttttgaaaactggcgagtacgccaccgacgaggaggaagatgaagtagggcccgtgcttccaggaagcgacatggctatagaggtgtttgaactccctgaaaatgaggatatgtttagcccgagcgaactagatacgagcaagctaagccataaattcaaggaactccagattaagcacgcagtgactgaagctgagattcaaaagttaaagacaaagttacaagcagccgagaatgagaaggtaaggtgggaactagagaaaacccagctgcagcaaaacattgaggaaaataaagaacgcatgcttaagctagaaagctactggatcgaggcccagaccctctgccacacggttaacgagcaccttaaggaaacccagtcccagtaccaggccctggagaaaaagtataacaaggcgaagaagttaataaaagattttcaacagaaggaactggatttcatcaagaggcaggaagccgaaaggaagaagatcgaagacctcgaaaaggctcatcttgtagaagtgcagggcctgcaggtgcgaatccgcgatttggaggctgaagtgttcaggctcctgaagcagaatggaacccaggtgaataacaataataatatttttgaacgtaggacctcactgggcgaagtgtccaaaggcgacacaatggagaacctagatggcaagcaaacgagctgccaagatggactcagccaagacctgaacgaggcggtgccagagaccgagcgtcttgactctaaagctctcaaaaccagagcccaactcagcgtcaagaatagaaggcagcgacccagccgcactcgactgtatgacagtgtaagctccaccgatggggaagattcattggagcgcaagccctccaattccttctataatcatatgcacattacaaaactcctgcctccaaagggactgagaacctccagccccgagagtgactctggcgtgcctccactgactcccgtagatagcaatgtgcccttttcttcagatcacatcgctgagttccaggaggagccactcgatcctgagatgggcccactgtcaagcatgtggggtgacacatctctgttctcgacatctaagtccgaccatgatgtcgaagagtctccttgtcaccatcagacaacgaacaagaaaatcctgagagagaaagatgacgcaaaggatccgaagagcttgagggcaagctcatccctcgcggtgcaagggggaaaaatcaagaggaagtttgtggacctcggtgcgcctttgaggcggaacagtagtaaaggcaagaaatggaaggaaaaagagaaggaggcatctcgcttcagtgctggttctaggatcttccgcgggaggctggagaactggacccctaagccttgcagcactgcacagacctccacgcgatcaccgtgtatgccctttagttggttcaacgatagccgtaaagggtcctattccttccgtaacctaccggcacccacttcttcactgcagcccagtccagaaaccttgatctcagacaaaaaaggaagcaaagtggagaacacctggatcacaaaagctaataagcgtaatccaaatccatcatcttcaagtatcttcggaaggcattctcagctcatgtccgtagtatggatccaggagacgaacaactttacttttaacgacgacttctccccttcatctacctcttccgctgacctaagcggtcttggggctgaacccaagactccagggctgtcgcagtccctggctttgagcagcgacgagattttggacgacggtcagtctccgaagcactcacaatgccagaatcgagcagtgcaagagtggagcgtgcagcaggtcagccattggttaatgagtctgaacctggagcaatatgtctccgaattctccgcccagaacattacaggcgagcagctgctgcaactcgacggcaataagcttaaagcactgggtatgaccgcctctcaggatcgcgccgtggtcaaaaaaaagctgaaagagatgaaaatgtccctagaaaaggcccgaaaggctcaggaaaaaatggaaaaacaacgcgaaaagctgcgaaggaaggagcaggagcaaatgcagcgtaagtctaagaaaactgagaaaatgacatcaacaaccgccgagggagctggagagcagtag

SEQ ID NO: 64494 - DNA, 4125 bp, Artificial Sequence
  derived and/or modified sequence
atgctgaagacagagagcagtggagagaggaccaccctgcggagcgccagcccccacagaaatgcctacagaacagagttccaggccctgaagagcacctttgacaagcccaagagtgatggagagcagaagaccaaggagggggagggcagccagcagagccggggcaggaaatatggcagcaatgtgaaccgcatcaagaacctcttcatgcagatgggcatggagcccaatgaaaatgctgctgtgattgccaagacccggggcaagggcggccacagcagcccccagaggaggatgaagcccaaggagttcctggagaagacagatggctctgtggtgaagctggagagctctgtgtctgagcgcatcagcagatttgacaccatgtatgatggccccagctacagcaagttcacagagaccaggaagatgtttgagaggtctgtgcatgaaagtggccagaacaaccgctacagccccaagaaggagaaggccggcggcagcgagccccaggatgagtggggcggcagcaagagcaacagaggcagcacagacagcctggacagcctgagcagcaggacagaagctgtgagccccaccgtgtcccagctgtctgctgtgtttgagaacacagacagccccagcgccatcatcagcgagaaggccgagaacaatgagtacagcgtgacaggccactaccccctgaacctgcccagcgtgacagtgaccaacctggacaccttcggccacctgaaggacagcaacagctggccacccagcaacaagaggggcgtggacacagaagatgcccacaagagcaatgccacccctgtgcctgaggtggccagcaagagcaccagcctggccagcatccctggagaggagatccagcagagcaaggagcctgaggacagcaccagcaaccagcagaccccagacagcattgacaaggatggccctgaggagccctgtgccgagagcaaggccatgcccaagtctgagatccccagcccccagagccagctgctggaggatgctgaggccaacctggtgggccgggaggccgccaagcagcagaggaaggagctggccggcggggacttcaccagcccagatgccagcgccagcagctgtgggaaggaggtgcctgaggacagcaacaactttgatggcagccacgtgtacatgcacagcgactacaacgtgtacagagtgcgcagccgctacaacagcgactggggcgagactggaacagagcaggatgaggaggaggacagtgatgaaaattcctactaccagcctgacatggagtacagcgagatcgtgggcctgcctgaggaggaggagatcccagccaacaggaagatcaagttcagcagcgcccccatcaaggtgttcaacacctacagcaatgaagattatgacagaagaaatgatgaggtggaccctgtggccgccagcgcagaatatgagctggagaagagggtggagaagctggagctgtttcctgtggagctggagaaggatgaagatggcctgggcatcagcatcatcggcatgggcgtgggcgcagatgctggcctggagaagctgggcatctttgtgaagacagtgacagagggcggggccgcccagagagatggccgcatccaggtgaatgaccagatcgtggaggtggatggcatcagcctggtgggcgtgacccagaactttgctgccaccgtgctgaggaacaccaagggaaatgtgcgcttcgtcatcggccgggagaagccaggccaggtgtctgaggtggcccagctgatcagccagaccctggagcaggagcggcggcagcgggagctgctggagcagcactacgcccagtatgatgctgatgatgatgagaacacagtggccgagctgcagggcatgagcggcaactgcaacaacaacaacaactacttcctgaagacaggagaatatgccacagatgaggaggaggatgaggtgggccctgtgctgcccggcagtgacatggccatcgaggtgtttgagctgcctgaaaatgaagacatgttcagccccagcgagctggacaccagcaagctgagccacaagttcaaggagctgcagatcaagcatgctgtgacagaggccgagatccagaagctgaagaccaagctgcaggccgcagaaaatgagaaggtgcgctgggagctggagaagacccagctgcagcagaacatcgaggagaacaaggagaggatgctgaagctggagagctactggattgaggcccagaccctgtgccacacagtgaatgagcacctgaaggagacccagagccagtaccaggccctggagaagaagtacaacaaggccaagaagctgatcaaggacttccagcagaaggagctggacttcatcaagaggcaggaggccgagaggaagaagattgaggacctggagaaggcccacctggtggaggtgcagggcctgcaggtgcgcatccgggacctggaggccgaggtgttccggctgctgaagcagaatggcacccaggtgaacaacaacaacaacatctttgaaagaaggaccagcctgggggaggtgtccaagggggacaccatggagaacctggatggcaagcagaccagctgccaggacggcctgagccaggacctgaatgaagctgtgcctgagacagagcggctggacagcaaggccctgaagacccgggcccagctgtctgtgaagaacagacggcagaggcccagcaggacccggctgtatgacagcgtgagcagcacagatggagaggacagcctggagaggaagcccagcaacagcttctacaaccacatgcacatcaccaagctgctgccccccaagggcctgcggaccagcagccctgagagtgacagcggcgtgccccccctgacccctgtggacagcaatgtgcccttcagcagtgaccacatcgccgagttccaggaggagcccctggaccctgagatgggccccctgagctccatgtggggagacaccagcctcttcagcaccagcaagagtgaccatgatgtggaggagagcccctgccaccaccagaccaccaacaagaagatcctgcgggagaaggatgatgccaaggaccccaagagcctgcgggccagcagcagcctggccgtgcagggcggcaagatcaagaggaagtttgtggacctgggcgcccccctgcggaggaacagcagcaagggcaagaagtggaaggagaaggagaaggaggccagccgcttctctgctggcagccgcatcttccggggccgcctggagaactggacccccaagccctgcagcacagcccagaccagcaccaggagcccctgcatgcccttctcctggttcaatgacagcaggaagggcagctacagcttcaggaacctgcctgcccccaccagcagcctgcagcccagccctgagaccctcatcagtgacaagaagggcagcaaggtggagaacacctggatcaccaaggccaacaagaggaaccccaaccccagcagcagcagcatcttcggccgccacagccagctgatgtctgtggtgtggatccaggagaccaacaacttcaccttcaatgatgacttcagccccagcagcaccagcagcgctgacctgagcggcctgggcgctgagcccaagaccccaggcctgagccagagcctggccctgagcagtgatgagatcctggatgatggccagagccccaagcacagccagtgccagaacagagctgtgcaggagtggagcgtgcagcaggtgagccactggctgatgagcctgaacctggagcagtatgtgtctgagttcagcgcccagaacatcactggagagcagctgctgcagctggatggcaacaagctgaaggccctgggcatgacagccagccaggacagagctgtggtgaagaagaagctgaaggagatgaagatgagcctggagaaggccaggaaggcccaggagaagatggagaagcagcgggagaagctgcggaggaaggagcaggagcagatgcagaggaagagcaagaagacagagaagatgaccagcaccacagctgagggcgctggggagcagtag

SEQ ID NO: 64495 - DNA, 4125 bp, Artificial Sequence
  derived and/or modified sequence
atgctgaagaccgagagcagcggcgagcggaccaccctgcggagcgcctcgccgcataggaatgcctacagaaccgagttccaggcattaaaatcaacattcgacaagcccaagagcgacggagaacagaaaaccaaagaaggggagggctctcaacagagccgcggtagaaagtacgggagtaacgttaacaggatcaagaatctattcatgcagatggggatggagccaaacgagaatgcagccgtgattgccaaaacaaggggaaagggcgggcacagctcgccacaacgccgaatgaagcccaaggagttcttggagaaaaccgacgggtctgtggtgaagttagaatccagcgtttccgagcgcatcagccggttcgatacaatgtatgacggaccttcctacagtaaatttaccgaaactcgtaaaatgtttgagagaagtgtgcatgagtcgggacagaataatagatattcccccaagaaagagaaggctgggggaagcgaaccccaggacgagtggggtggctccaagagcaaccgagggtcaaccgacagcctagattccctgagtagtaggaccgaagctgtttcccccaccgtatcacagctgtccgctgtcttcgagaacacggattcccctagtgccatcatctcggagaaagcagaaaacaatgaatattccgtcaccggacattatcctttgaacttgcccagtgtgaccgtgactaacttggatactttcggacacctgaaagacagcaacagttggcctccaagcaacaagagaggcgtggataccgaggacgcccataagagtaatgccaccccggtgcccgaagtcgcaagcaaaagcacatccctcgccagcatacccggggaggaaattcagcagagtaaagagccagaggatagcacgtcaaatcaacagacccccgactcgatcgacaaagatgggcctgaagaaccatgtgccgagtcgaaagccatgcccaaaagtgagatcccttccccacagagtcagctcctggaggacgcggaagctaacttggtgggacgcgaagcagccaaacagcaacgcaaagagctggctgggggcgatttcactagtcctgacgcttccgcgtcatcatgtggcaaggaggtccccgaagactcaaacaactttgacggctcacacgtgtatatgcacagcgactataatgtgtaccgtgtcagatcccgctataacagtgactggggggagactgggacagaacaggacgaggaagaggactctgatgagaactcatattatcagcccgacatggagtatagcgagatcgtaggcttacctgaggaagaagaaattcctgccaatcggaagattaaattcagttccgcacctatcaaggtttttaatacctatagcaacgaggattacgaccgaagaaatgacgaggtcgatccagtggctgcaagcgcggagtacgagttggagaaacgagtcgaaaaactcgagctcttccctgtcgaactcgaaaaagacgaagatggcttaggaatctccattataggcatgggtgtcggagccgacgctggactcgagaagctgggtatctttgtcaagactgttaccgaagggggtgcagcacagagggacggcaggatccaggtgaatgatcagattgtggaggttgatggaataagtctggtgggggtgacacagaacttcgctgccacagtgctccggaacacaaaagggaatgtgcgctttgtcataggcagggaaaagcccggtcaagtgtcagaggtagctcaactaatctctcagacgctggagcaggaacgtagacagagagaactgcttgagcagcactatgcccaatacgacgctgatgacgacgaaaataccgtggctgagctgcaggggatgtccggcaattgcaataacaataataactacttcctgaagactggcgagtatgccacagatgaggaggaagatgaggttggacccgtcctgcccggcagcgacatggccattgaggtatttgagctgcccgagaatgaggatatgttcagcccatcggagctggatacaagcaaactatctcataagtttaaggagctccagattaaacacgccgtcaccgaggccgagatacaaaaactgaagactaaattgcaggcagccgagaacgagaaagtgcgatgggaactggaaaaaactcagctccaacaaaacattgaagagaacaaagagcggatgcttaagctggagtcctattggatcgaggcccaaactctgtgtcatacagttaacgaacatctaaaggaaacccagtctcagtaccaagcgctagagaaaaaatataacaaggcaaaaaaactgattaaagatttccaacagaaagagctcgatttcataaagcgtcaggaggctgagaggaaaaagatagaagatctcgaaaaagcccatctcgtggaggtccagggccttcaggttcgcatccgtgacctcgaagccgaagtctttcgactactgaagcaaaatggcacgcaggtaaataacaacaacaacattttcgaaaggcgcacatcactgggggaagtctcaaaaggtgatactatggagaatctcgacggaaagcagacctcttgccaagatggcctgtcccaggatctgaacgaggcggttcccgagactgaacgactggattcgaaggccctgaagactagggcacagctgagtgtgaaaaatcggcgccagcgtcctagccgcacaagactgtatgactctgtcagctcaacagatggggaggatagcctagaaaggaaaccgagcaatagcttttataatcatatgcacatcacaaaattactgccccccaaggggcttaggacctcctccccggaaagcgactccggagttccaccactcacccccgtggactccaatgtgccattttcatccgatcatattgctgaatttcaggaggagccattggacccagaaatgggaccactgagctctatgtggggcgatacatctctcttctcaaccagtaaaagtgatcatgatgtggaggaatcgccctgtcaccaccagaccactaacaagaaaatccttcgagaaaaagacgacgcaaaagatccaaaaagtttgagagctagctcctctcttgccgtccagggaggtaaaataaaaagaaagtttgtggatctgggcgctcctttgcgcagaaactcctctaaggggaaaaaatggaaagaaaaagaaaaagaagcctcacggttctctgccggatctagaatctttcggggcaggttggaaaactggacccccaaaccgtgctccacggcccagacttcaacaaggagtccatgtatgcctttttcctggtttaatgactcccgcaagggctcttatagttttaggaacctcccagctcccaccagcagtctgcagccaagtcctgaaactctgatctctgataagaaggggagtaaggtagagaacacctggatcacgaaagccaacaagaggaacccgaaccccagttcatcttccatattcggccgacacagtcaactcatgagcgtcgtgtggattcaggagacaaacaatttcactttcaacgacgatttctccccaagttccacgagcagcgcggacctctccggcctcggagccgagcctaagacaccagggctcagccagtcactcgcactttcttccgacgaaatcctcgacgatggtcaaagcccgaagcacagtcagtgccagaatagagccgtacaagagtggtcagtgcagcaggttagccactggctaatgtcactcaatctggaacagtatgtttccgagttttcggcccagaacatcaccggagagcagcttctccagttggatggaaacaagttaaaagcactgggaatgactgcctcccaggacagagcggtcgtaaaaaagaaactgaaggaaatgaagatgtccctagagaaagctcgcaaagcccaagagaaaatggagaagcagcgggagaagcttaggcggaaggaacaggagcagatgcagcggaagtctaaaaaaactgaaaagatgactagtactacagccgaaggagccggggaacaatag

SEQ ID NO: 64496 - DNA, 4125 bp, Artificial Sequence
  derived and/or modified sequence
atgttgaagacagaatcctccggggagaggacgactcttagaagtgccagtcctcaccggaacgcgtacagaacagagttccaagcactgaagagcacatttgataagccgaaaagcgacggggagcaaaaaacaaaggagggagagggcagccagcagagtcgcggacgcaaatatgggagtaacgtgaatcgcattaagaacctgttcatgcagatgggcatggaacctaatgaaaatgccgctgtgattgccaaaacgcgaggcaaaggaggtcattcatccccccagagacggatgaagcctaaagagttcctcgagaagactgacggttcagtggttaaacttgaaagctctgtctccgagcggatcagtcggttcgacacaatgtatgacggtccatcctactcaaagttcactgaaactaggaagatgtttgaaagatctgtccacgagagcgggcagaataacagatacagccctaagaaggagaaggccggagggagtgagccgcaggacgagtggggcggttctaaatccaatagagggtccactgactctttggattccctcagctccaggaccgaagcggtgtctcccactgtttctcagctgagtgcagtgttcgagaatacagatagcccatcagccatcatttcggaaaaggccgaaaataacgaatactcagttactggccactatcccctgaatcttccctccgtaacagtgacaaacctcgacacctttgggcacctaaaagactccaactcctggccaccaagcaacaaacgcggagtggacacagaagacgcccataaatcaaatgcgacgccggtaccggaggtggcgagcaaatctacgagtcttgcctcaatccccggagaggagattcaacagtcgaaggaaccggaagactctaccagtaaccagcaaacgcccgacagtattgataaagatggcccagaggaaccttgcgctgagtcaaaagccatgcccaaaagcgagattccatctccccagtcccagttgttagaagatgcagaagcaaatctggtggggagggaggccgcaaaacaacagcggaaagaactggccggtggcgattttacttcccccgacgcgtcagcctcctcgtgtgggaaggaggtaccggaagactcaaacaattttgacggctctcatgtgtacatgcactccgattataacgtgtacagagtgaggtctaggtacaatagcgactggggcgagaccggcactgagcaggacgaagaagaagattccgacgaaaacagctattatcagcccgacatggaatactccgagatcgttggcctgcccgaagaagaggagattcccgctaatcggaaaataaaattttccagtgcccctatcaaggtgtttaacacttactccaatgaagactacgacagacggaatgatgaggtggatccagtcgcagccagtgccgagtacgaacttgagaaacgcgtggaaaaactggaactgtttcccgtcgagctggagaaagacgaggacgggttgggaatatctattattgggatgggagtgggagctgatgcaggactggagaaactgggcatcttcgttaaaactgtcacagaagggggtgctgcccagcgcgatggccgaattcaggtgaatgatcagatcgttgaggtggacggcatatccctggtcggggtgacccagaacttcgcagccactgtccttcgtaacaccaagggtaacgtcagattcgtgattggcagagaaaagccaggccaggtctccgaggtggcacagctaattagccagacgttagagcaggaaaggcgccagagagaactcctcgaacagcactatgcacaatatgatgcggatgatgatgaaaacactgttgctgagttgcagggaatgtctggtaattgcaacaacaataataattactttctgaaaactggcgaatatgcgaccgacgaggaagaggacgaggtcggaccagtcctcccagggtctgatatggcgatcgaggtgtttgagctgccggaaaatgaggacatgttctcaccaagcgaattggacacctcaaaactgtcacataagttcaaggaacttcagatcaagcatgctgtcaccgaggccgaaatccagaagttgaagacaaagctgcaggctgctgaaaacgagaaggtccggtgggagctggagaagacccagttacaacagaatatagaggagaacaaggaacgtatgctgaaattggagagctactggatcgaagcacagactctttgccacaccgtgaatgagcacctaaaggagacccagagccagtatcaggccctggaaaaaaaatataataaagccaaaaaattaattaaagatttccagcagaaggagttagatttcattaagcgtcaggaggcggaaaggaaaaagatcgaagatctggagaaagcacacctggtggaggtccagggtctgcaggtgcgtatacgagacctcgaggccgaagtgtttaggctcctgaaacaaaatggaacacaagtgaacaataacaacaacatctttgagcgacgtacaagcttgggtgaagtttcaaagggagatacgatggagaatctcgacgggaaacaaacatcatgccaggatgggctctcacaggatctgaacgaagcagttccggaaactgaaagattggattctaaggcactgaaaacacgggcacagctctcagtgaagaacaggcgacagagaccgtcaagaacccgcctctatgactcggtgtcttccacggacggagaagacagcttggagcgtaagccttccaacagcttttataaccatatgcacatcaccaagttattaccccctaagggcttgcgtacaagcagccccgaaagcgattcaggcgtccctcctctgacccccgtggatagcaatgtgcctttctcctccgaccacatagcagagttccaggaagaacctctcgaccctgagatgggccctttgtcctctatgtggggagatacctcgctcttctctactagcaaaagtgaccatgacgtcgaagaatcaccctgtcaccaccagacaaccaacaagaaaattctcagagaaaaggacgacgccaaagaccccaagagtcttagagcttctagctctttggccgtgcaaggtggtaagattaagcgaaaatttgtggatttgggcgctcccctgcgtaggaacagctctaaaggcaagaagtggaaagagaaagagaaagaggctagccggtttagcgccggatcaaggatattccggggacggctagaaaactggaccccaaagccttgcagcacagcacagacctccactcgctccccctgcatgcccttcagctggtttaacgacagccgtaaggggtcctacagtttcaggaacctacccgctccaacctccagcctgcaaccatctcctgagacacttatctccgataaaaaaggcagtaaggtggaaaacacatggattaccaaagccaacaagcggaatcccaatccctcatcaagcagcatcttcgggagacattcacagctaatgtcagtggtttggatccaggaaacaaacaacttcacatttaacgatgacttttctccatcatctacctccagcgcagacttatcagggcttggcgcagagcctaagacacccggtctatcccagagccttgctctttcaagcgacgagattctggacgatggacaatcccccaagcatagtcaatgccagaaccgagccgttcaggagtggtccgtccagcaggtatcacattggcttatgtccttaaacctggaacagtatgtttccgaattcagcgcccagaacatcactggggagcagctcctgcaattagatgggaacaaactgaaagcactcggaatgaccgctagtcaggaccgcgcagtggtgaagaagaagttaaaagaaatgaagatgagcctggaaaaagccaggaaggcccaggagaagatggagaagcagcgggagaagttgagacgaaaggagcaggaacagatgcaaagaaagagcaagaagaccgagaagatgactagtactacagccgagggggcaggagagcaatag

SEQ ID NO: 64497 - DNA, 5369 bp, Artificial Sequence
  derived and/or modified sequence
ctctcccgggattttgctgccgggctccctctctctgcggccctagagttaatcccatcagccgagatgaacctctagtcttgctttgaaaaaatcattctgtgtaactcttgactgtgactaagttcctaatacacctgttgggacgatcactgacaccgtataccatttgagaggtacttttcttgacccaatactggtgattagagaagagaggtatcttggtttttggtttttttctttgatcattatgaacattggcttttcacccctgaagtgaaaatgttgaaaactgagtcttcaggtgaacgaaccactctcagaagtgcctctcctcacaggaatgcatatcgaactgagtttcaggcactgaaaagtacctttgacaaacccaagtcagatggggaacaaaaaacaaaagaaggtgagggctcccagcagagcagggggaggaaatatggctccaatgtcaacagaattaaaaacctatttatgcagatgggtatggaacccaacgagaatgctgcagtcattgccaaaacaagggggaaaggtggacattcatctcctcagagaagaatgaagcccaaagaatttctggaaaaaacagatggctcagttgttaagttggagtcttctgtttctgaacgaattagtagatttgacactatgtacgatggcccttcatattccaagttcactgagactcgaaagatgtttgagagaagtgtgcatgaatcaggacagaacaaccgctattccccaaagaaagagaaagctggagggagtgaacctcaggatgaatggggaggttccaagtccaacagaggcagtactgattccttggacagccttagctcccgaactgaggctgtctccccaactgtgagtcaactgagtgcagtatttgagaacactgattctcccagtgccatcatttctgagaaggctgaaaacaatgaatactcagtgactgggcattatcccttgaatttaccatctgttactgttacaaatcttgacacatttggtcacctgaaggattctaattcctggcctccttcaaacaagcgaggtgttgatacagaggatgctcacaagagtaatgcaactccagtaccagaagtggcttctaaaagtacctctctagcttcgatacctggtgaagagatccagcagagcaaggaacccgaggactccacatctaatcaacagactcccgacagcattgacaaagatggtcctgaagaaccttgtgctgaaagtaaggcaatgccaaagtccgaaatcccttcaccacaaagccaactgttagaagatgctgaagctaatttggttggaagggaggcagcaaagcaacagaggaaagaacttgcaggtggtgatttcacctctcctgatgcttctgcatccagttgtggaaaagaagtacctgaagattcaaataattttgatggttcccatgtgtacatgcacagtgactataatgtgtatagggtgagatccaggtataattcagactggggagagacaggcactgagcaggatgaggaggaagatagtgatgagaacagttactatcagcctgatatggagtactcggaaattgttggattgccagaagaagaagaaatcccagcaaataggaaaattaagtttagtagtgctcctattaaggttttcaacacatactccaatgaagactatgacaggagaaatgacgaagttgaccctgtggctgcttcagctgagtatgaacttgaaaaacgtgtagaaaagctggaacttttcccagtggagctagagaaagatgaggatggtcttggtataagtattattggaatgggtgttggagcagatgctggacttgaaaagctgggaatattcgtcaagacagtaacagaaggtggtgctgctcaacgggatggcagaatacaagtcaatgaccagattgtggaagtggatggaatcagcttggtgggtgtgacacagaattttgcagcaacagttctcagaaacaccaagggcaacgtcagatttgttattgggcgggaaaaaccaggacaagtgagcgaggttgcccagttgataagccagacactggaacaggagaggcgccagagagagctgctggaacagcactatgcccagtatgatgccgacgatgacgagaacactgtggctgaattgcaaggaatgtctggcaactgcaataacaataacaactattttcttaagacaggagaatatgccacagatgaagaagaagatgaggtaggacctgtccttcctggcagcgacatggccattgaagtctttgagctgcctgagaatgaggacatgttttccccatcagaactggacacaagcaagctcagtcacaagttcaaagagttgcaaatcaaacatgcagttacagaagcagagattcaaaaattgaagaccaagctgcaggcagcagaaaatgagaaagtgaggtgggaactagaaaaaacccaactccaacaaaacatagaagagaataaggaaagaatgttgaagttggaaagctactggattgaggcccaaacattatgccacacagtgaatgagcatctcaaagagactcaaagccagtatcaggccttggaaaagaaatacaacaaggcaaagaagttgatcaaggattttcaacaaaaagagcttgatttcatcaaaagacaggaagcagaaagaaagaaaatagaagatttggaaaaagctcatcttgtggaagtgcaaggcctccaagtgcggattagagatttggaagctgaggtattcaggctactgaagcaaaatgggactcaagttaacaataataacaacatctttgagagaagaacatctcttggtgaagtctctaaaggggataccatggagaacttggatggcaagcagacatcttgccaagatggcctaagtcaagacttgaatgaagcagtcccagagacagagcgcctggattcaaaagcactgaaaactcgagcccagctctctgtgaagaacagacgccagagaccctctaggacaagactgtatgatagtgttagttccacagatggggaggacagtctagagagaaagccatcaaacagtttctataaccacatgcatattaccaaattacttccacctaagggtttgagaacgtcttctccagaatcagattctggtgttccacccctcaccccggtggatagcaatgtgcccttctcgtctgaccacatagctgaatttcaagaagaaccactggacccagaaatggggcctctctcctctatgtggggagacacttcactgttttctacttcaaagtctgatcatgatgtggaagaatctccttgccatcaccaaaccaccaacaagaaaatattacgagaaaaagatgatgccaaagatcccaaatcactaagggcatccagttcattggcggtgcaaggaggaaaaattaagcggaagtttgtggatctgggggcgcctttgcgaaggaattccagcaagggaaagaagtggaaagaaaaagaaaaagaagccagtaggttttctgcaggtagcaggatcttcagaggcagactggaaaactggacacccaagccatgttcaacagctcagacctccactcgttccccttgcatgcctttctcatggtttaatgacagccggaaaggatcctattccttcaggaacctgcctgcgcctacaagttcccttcagccttctcctgagactctaatttcagataaaaaggggtccaaggtagaaaacacatggattacaaaagcaaacaagagaaacccaaatccctcctcttcttcaatctttggaaggcattctcaacttatgtctgtagtctggatccaagaaaccaataattttaccttcaatgatgacttcagtcccagcagtaccagttcagcagacctcagcggcttaggagcagaacctaaaacaccagggctctctcagtccttagcactgtcatcagatgagatccttgatgatggacagtctcccaaacacagtcagtgtcagaatcgggccgttcaggaatggagtgtgcagcaggtttctcactggttaatgagcctaaatctggagcagtatgtatctgaattcagtgcccaaaacatcactggagaacagctcctgcagttggatggaaataaacttaaggctcttggaatgacagcatcccaggaccgagcagtggtcaaaaagaaactcaaggaaatgaagatgtctctagagaaggctcggaaggcccaagagaaaatggaaaaacaaagagaaaagctaaggagaaaggagcaagagcaaatgcagaggaagtccaaaaagacagaaaagatgacgtcaactacagccgagggtgctggtgagcagtaacacataccctcttacagatgatggagatgctccaagagaagtccccacctcttcctgccctgctctcctccagaggatgaaaaagaaactaaatgataagggtaatgcggctctaggccggctgaggaactgtgtgttgaataactgcattttctgcaatagaatgcactcttaattttaactactaaaataatcccaagccacctttggttcattaacaaaccagagatttcatttaagtagctgtgttttgctcttctctaacttaccaacatcttgtgttgtgttgggtgtgttttgtcacttggagaactagtgtgaccccacccaagagcatgacacaccctggtgttgttaatggagcgccgtgaattttcagtgtgggatcctgaaatggcaattgcacatgtctgcatggcagagagcaccctgccatgagatctgagaccagtacttaacttctaggactgcaacacctactccaatgtgtgggaaagatttgctcttaattctcagtctggacagtgagaccaccccgctgtggaaacatgggtgctctgctctgtagttacctactaagggaaaaggcaagcaagtcattctgcttgctaggcatcaaaaagaaagaaaataaattatagctatttgttaaccactgaaaaaagcaaaagccttaagaatgtggatgtgggtattaccttggggttctgagggtaatatttatcctctagatacggctgaacaagaaagaaaaaaatcagacattaatgcagccatgggatattgggatctgttgaccttgctactgctgtgtgttcagcatttcagcaacactggcaaacacaacacagttcctcttccccctacctaacccaagaaattgaacaggaaattgatttttaaggaaaccaccattttcaggtttcctctcctggggaacattctggctggtcttcagcctg

SEQ ID NO: 64498 - DNA, 4125 bp, Artificial Sequence
  derived and/or modified sequence
atgctgaagaccgagagcagcggcgagagaaccaccctgagaagcgccagcccccacagaaacgcctacagaaccgagttccaggccctgaagagcaccttcgacaagcccaagagcgacggcgagcagaagaccaaggagggcgagggcagccagcagagcagaggcagaaagtacggcagcaacgtgaacagaatcaagaacctgttcatgcagatgggcatggagcccaacgagaacgccgccgtgatcgccaagaccagaggcaagggcggccacagcagcccccagagaagaatgaagcccaaggagttcctggagaagaccgacggcagcgtggtgaagctggagagcagcgtgagcgagagaatcagcagattcgacaccatgtacgacggccccagctacagcaagttcaccgagaccagaaagatgttcgagagaagcgtgcacgagagcggccagaacaacagatacagccccaagaaggagaaggccggcggcagcgagccccaggacgagtggggcggcagcaagagcaacagaggcagcaccgacagcctggacagcctgagcagcagaaccgaggccgtgagccccaccgtgagccagctgagcgccgtgttcgagaacaccgacagccccagcgccatcatcagcgagaaggccgagaacaacgagtacagcgtgaccggccactaccccctgaacctgcccagcgtgaccgtgaccaacctggacaccttcggccacctgaaggacagcaacagctggccccccagcaacaagagaggcgtggacaccgaggacgcccacaagagcaacgccacccccgtgcccgaggtggccagcaagagcaccagcctggccagcatccccggcgaggagatccagcagagcaaggagcccgaggacagcaccagcaaccagcagacccccgacagcatcgacaaggacggccccgaggagccctgcgccgagagcaaggccatgcccaagagcgagatccccagcccccagagccagctgctggaggacgccgaggccaacctggtgggcagagaggccgccaagcagcagagaaaggagctggccggcggcgacttcaccagccccgacgccagcgccagcagctgcggcaaggaggtgcccgaggacagcaacaacttcgacggcagccacgtgtacatgcacagcgactacaacgtgtacagagtgagaagcagatacaacagcgactggggcgagaccggcaccgagcaggacgaggaggaggacagcgacgagaacagctactaccagcccgacatggagtacagcgagatcgtgggcctgcccgaggaggaggagatccccgccaacagaaagatcaagttcagcagcgcccccatcaaggtgttcaacacctacagcaacgaggactacgacagaagaaacgacgaggtggaccccgtggccgccagcgccgagtacgagctggagaagagagtggagaagctggagctgttccccgtggagctggagaaggacgaggacggcctgggcatcagcatcatcggcatgggcgtgggcgccgacgccggcctggagaagctgggcatcttcgtgaagaccgtgaccgagggcggcgccgcccagagagacggcagaatccaggtgaacgaccagatcgtggaggtggacggcatcagcctggtgggcgtgacccagaacttcgccgccaccgtgctgagaaacaccaagggcaacgtgagattcgtgatcggcagagagaagcccggccaggtgagcgaggtggcccagctgatcagccagaccctggagcaggagagaagacagagagagctgctggagcagcactacgcccagtacgacgccgacgacgacgagaacaccgtggccgagctgcagggcatgagcggcaactgcaacaacaacaacaactacttcctgaagaccggcgagtacgccaccgacgaggaggaggacgaggtgggccccgtgctgcccggcagcgacatggccatcgaggtgttcgagctgcccgagaacgaggacatgttcagccccagcgagctggacaccagcaagctgagccacaagttcaaggagctgcagatcaagcacgccgtgaccgaggccgagatccagaagctgaagaccaagctgcaggccgccgagaacgagaaggtgagatgggagctggagaagacccagctgcagcagaacatcgaggagaacaaggagagaatgctgaagctggagagctactggatcgaggcccagaccctgtgccacaccgtgaacgagcacctgaaggagacccagagccagtaccaggccctggagaagaagtacaacaaggccaagaagctgatcaaggacttccagcagaaggagctggacttcatcaagagacaggaggccgagagaaagaagatcgaggacctggagaaggcccacctggtggaggtgcagggcctgcaggtgagaatcagagacctggaggccgaggtgttcagactgctgaagcagaacggcacccaggtgaacaacaacaacaacatcttcgagagaagaaccagcctgggcgaggtgagcaagggcgacaccatggagaacctggacggcaagcagaccagctgccaggacggcctgagccaggacctgaacgaggccgtgcccgagaccgagagactggacagcaaggccctgaagaccagagcccagctgagcgtgaagaacagaagacagagacccagcagaaccagactgtacgacagcgtgagcagcaccgacggcgaggacagcctggagagaaagcccagcaacagcttctacaaccacatgcacatcaccaagctgctgccccccaagggcctgagaaccagcagccccgagagcgacagcggcgtgccccccctgacccccgtggacagcaacgtgcccttcagcagcgaccacatcgccgagttccaggaggagcccctggaccccgagatgggccccctgagcagcatgtggggcgacaccagcctgttcagcaccagcaagagcgaccacgacgtggaggagagcccctgccaccaccagaccaccaacaagaagatcctgagagagaaggacgacgccaaggaccccaagagcctgagagccagcagcagcctggccgtgcagggcggcaagatcaagagaaagttcgtggacctgggcgcccccctgagaagaaacagcagcaagggcaagaagtggaaggagaaggagaaggaggccagcagattcagcgccggcagcagaatcttcagaggcagactggagaactggacccccaagccctgcagcaccgcccagaccagcaccagaagcccctgcatgcccttcagctggttcaacgacagcagaaagggcagctacagcttcagaaacctgcccgcccccaccagcagcctgcagcccagccccgagaccctgatcagcgacaagaagggcagcaaggtggagaacacctggatcaccaaggccaacaagagaaaccccaaccccagcagcagcagcatcttcggcagacacagccagctgatgagcgtggtgtggatccaggagaccaacaacttcaccttcaacgacgacttcagccccagcagcaccagcagcgccgacctgagcggcctgggcgccgagcccaagacccccggcctgagccagagcctggccctgagcagcgacgagatcctggacgacggccagagccccaagcacagccagtgccagaacagagccgtgcaggagtggagcgtgcagcaggtgagccactggctgatgagcctgaacctggagcagtacgtgagcgagttcagcgcccagaacatcaccggcgagcagctgctgcagctggacggcaacaagctgaaggccctgggcatgaccgccagccaggacagagccgtggtgaagaagaagctgaaggagatgaagatgagcctggagaaggccagaaaggcccaggagaagatggagaagcagagagagaagctgagaagaaaggagcaggagcagatgcagagaaagagcaagaagaccgagaagatgaccagcaccaccgccgagggcgccggcgagcagtag

SEQ ID NO: 64499 - protein, 1296 aa, Artificial Sequence
  derived and/or modified sequence
MLKTESSGERTTLRSASPHRNAYRTEFQALKSTFDKPKSDGEQKTKEGEGSQQSRGRKYGSNVNRIKNLFMQMGMEPNENAAVIAKTRGKGGHSSPQRRMKPKEFLEKTDGSVVKLESSVSERISRFDTMYDGPSYSKFTETRKMFERSVHESGQNNRYSPKKEKAGGSEPQDEWGGSKSNRGSTDSLDSLSSRTEAVSPTVSQLSAVFENTDSPSAIISEKAENNEYSVTGHYPLNLPSVTVTNLDTFGHLKDSNSWPPSNKRGVDTEDAHKSNATPVPEVASKSTSLASIPGEEIQQSKEPEDSTSNQQTPDSIDKDGPEEPCAESKAMPKSEIPSPQSQLLEDAEANLVGREAAKQQRKELAGGDFTSPDASASSCGKEVPEDSNNFDGSHVYMHSDYNVYRVRSRYNSDWGETGTEQDEEEDSDENSYYQPDMEYSEIVGLPEEEEIPANRKIKFSSAPIKVFNTYSNEDYDRRNDEVDPVAASAEYELEKRVEKLELFPVELEKDEDGLGISIIGMGVGADAGLEKLGIFVKTVTEGGAAQRDGRIQVNDQIVEVDGISLVGVTQNFAATVLRNTKGNVRFVIGREKPGQVSEVAQLISQTLEQERRQRELLEQHYAQYDADDDETGEYATDEEEDEVGPVLPGSDMAIEVFELPENEDMFSPSELDTSKLSHKFKELQIKHAVTEAEIQKLKTKLQAAENEKVRWELEKTQLQQNIEENKERMLKLESYWIEAQTLCHTVNEHLKETQSQYQALEKKYNKAKKLIKDFQQKELDFIKRQEAERKKIEDLEKAHLVEVQGLQVRIRDLEAEVFRLLKQNGTQVNNNNNIFERRTSLGEVSKGDTMENLDGKQTSCQDGLSQDLNEAVPETERLDSKALKTRAQLSVKNRRQRPSRTRLYDSVSSTDGEDSLERKGLRTSSPESDSGVPPLTPVDSNVPFSSDHIAEFQEEPLDPEMGPLSSMWGDTSLFSTSKSDHDVEESPCHHQTTNKKILREKDDAKDPKSLRASSSLAVQGGKIKRKFVDLGAPLRRNSSKGKKWKEKEKEASRFSAGSRIFRGRLENWTPKPCSTAQTSTRSPCMPFSWFNDSRKGSYSFRNLPAPTSSLQPSPETLISDKKGSKNFTFNDDFSPSSTSSADLSGLGAEPKTPGLSQSLALSSDEILDDGQSPKHSQCQNRAVQEWSVQQVSHWLMSLNLEQYVSEFSAQNITGEQLLQLDGNKLKALGMTASQDRAVVKKKLKEMKMSLEKARKAQEKMEKQREKLRRKEQEQMQRKSKKTEKMTSTTAEGAGEQ

SEQ ID NO: 64500 - DNA, 3891 bp, Artificial Sequence
  derived and/or modified sequence
atgctgaaaactgagtcgagcggggagcgaaccacattgcgatccgcctccccacaccggaatgcgtaccgcactgaatttcaggctctgaaatcaacctttgacaaacctaaaagcgatggcgagcagaaaacaaaggaaggagaaggatctcaacagtctcgggggaggaagtatgggtctaatgtgaaccgcataaagaacctgtttatgcagatgggcatggaacctaacgagaacgctgcagtgattgcgaaaacccgggggaagggtggccacagttctccccagaggcggatgaagccaaaggagttcctggagaagaccgacggatcagttgttaagcttgagagcagcgtttctgaacgaatctccagattcgataccatgtatgacggacccagttattctaagtttactgagacgcgcaaaatgttcgagcgctctgtgcatgaaagcggccagaacaacaggtattcacctaaaaaagaaaaagccggcggaagcgagccgcaagatgaatggggcggctcaaagtcaaatcggggctctactgattctcttgatagcctgtccagtcgcactgaggctgtatcgcctaccgtgagtcagctcagcgctgtctttgagaacactgatagccccagcgctattatatccgagaaggccgaaaacaacgagtactcagttacaggacattatcctctcaacttgcctagcgttacagttaccaacctggacaccttcggtcacttaaaggattccaattcttggccaccatcaaacaaaagaggggttgacactgaagatgctcataagtcaaacgctaccccggtgcccgaagtggcgagtaagtccaccagtctagctagtatccccggggaggaaattcagcaatcaaaggagccagaggactccacctcaaaccaacagactccggactccattgacaaggatggccccgaggaaccatgtgctgaatctaaagcgatgccaaaatccgaaataccctcacctcagtctcaactgctcgaggacgccgaggccaacctcgtgggaagggaggccgctaagcaacagcgtaaggaactagctggaggagactttactagccccgatgcttctgcctcaagctgtggcaaagaggtgcctgaagattccaataacttcgacggttctcatgtttacatgcactccgattataacgtatatagggtacgctccaggtataatagcgactggggtgagacaggcactgagcaagacgaggaggaggacagcgacgagaacagctattaccagccagacatggaatactcagaaattgtagggctgcctgaagaagaagagatacccgccaacagaaagatcaagttttcaagcgcgcctattaaggtgtttaatacctattccaatgaggactatgataggcgaaacgatgaagtcgatcccgtggctgcttcggccgagtacgagttggagaaaagagtggaaaagctcgagctttttcctgtagagctcgagaaggacgaggatggtctgggcataagcattatcggaatgggagtcggagcagacgcaggtctggagaagttaggcatcttcgtgaaaaccgtcacagaggggggcgctgcacaacgggacggccggattcaggtgaatgaccagatcgtcgaagtagatggtataagtttagtgggggtgacccagaattttgccgcaaccgttcttcggaatacaaaaggaaacgtgcgctttgtcatcggacgagagaagcccggacaggttagcgaggtagcccagttaatctcccaaacactggaacaggagaggcgacaacgggagctgctggaacaacactacgctcaatacgacgcagacgatgacgagaccggtgagtacgccactgacgaagaggaggacgaggtgggccccgtactgcccggaagtgacatggcaatcgaagtgttcgaactccccgagaatgaggacatgttctcaccttcagagctggatacctctaagctgagccataagttcaaagaactgcagataaaacacgctgtgaccgaagcagagatccagaaattgaagaccaaactccaggccgcagagaacgagaaggtacgatgggagctggaaaagactcagcttcagcagaacatcgaagagaataaggaaaggatgttgaaacttgaatcttactggatagaggctcagacgctgtgccataccgtcaacgagcatctgaaggaaacgcaaagtcagtatcaagcccttgagaagaaatacaataaagcaaagaaactcataaaggacttccagcagaaagagctggactttatcaagcgccaggaagccgagcggaaaaagattgaagatctagaaaaggctcatttagtggaagtgcaaggcctacaggttcggatccgagatctggaggcagaggtcttccgattactgaaacagaatggtactcaagttaataacaataataacattttcgaacgacggactagtttgggggaagtgagcaaaggagatacaatggaaaacctcgatggaaaacaaacctcatgccaggatggcctcagccaggacctgaatgaggccgtgccagagaccgaaagactcgattcgaaagcactgaagacacgcgcgcagctgagcgttaaaaataggaggcagcggccctcacggacccggctatacgattcagtgtcttccacggatggagaagatagcctcgaacgaaaaggactacgtacaagcagtcccgagtcagatagtggagtgccccctctaacaccagtcgactccaacgttcctttttcttccgaccacattgccgaattccaagaggagcctctcgaccccgagatgggccctctgagctctatgtggggcgacacctctctgttttcaacctccaagagcgatcatgatgtggaggagagcccatgtcatcaccagacaacgaacaaaaaaattctacgtgagaaggatgatgccaaagatcctaagtcccttcgagcctcgtcatccctagcggtccagggtggcaagatcaaacggaagtttgtggacctgggcgcaccattgaggagaaatagctctaaagggaaaaagtggaaggagaaggaaaaggaggcaagccggttctcagcaggctctcggatcttcagggggagactggagaattggactccaaaaccttgtagcaccgcccagaccagtacgcgcagcccgtgcatgcccttttcctggttcaacgacagtagaaagggcagctactcttttagaaatctgccagcacctacgtcttctctccagccctcgccagaaaccctgataagcgacaaaaagggtagcaagaattttacatttaatgacgacttctctccttcctctactagttccgccgacctgtccgggttgggcgctgagcctaagacgcccggcctgtcacagagtctggccctgtcatctgatgagatcctagacgacggccaatcccctaagcacagccagtgtcagaatcgggcggtgcaggagtggtcagtgcagcaggtgtcccactggctgatgtctctgaacctagagcagtacgtatccgagttttccgcacagaacataacaggggagcagctcctccagctggacggcaataagttaaaggccctaggtatgacagccagccaggaccgtgcagtcgtgaagaaaaaactgaaagaaatgaagatgtctctggagaaagcccggaaagctcaggagaagatggagaagcaaagagagaaactgcggcgtaaagaacaggaacagatgcagcggaagagtaagaagactgaaaaaatgacctccaccaccgccgagggagctggagaacaatag

SEQ ID NO: 64501 - DNA, 3891 bp, Artificial Sequence
  derived and/or modified sequence
atgctgaagacagagagcagtggagagaggaccaccctgcggagcgccagcccccacagaaatgcctacagaacagagttccaggccctgaagagcacctttgacaagcccaagagtgatggagagcagaagaccaaggagggggagggcagccagcagagccggggcaggaaatatggcagcaatgtgaaccgcatcaagaacctcttcatgcagatgggcatggagcccaatgaaaatgctgctgtgattgccaagacccggggcaagggcggccacagcagcccccagaggaggatgaagcccaaggagttcctggagaagacagatggctctgtggtgaagctggagagctctgtgtctgagcgcatcagcagatttgacaccatgtatgatggccccagctacagcaagttcacagagaccaggaagatgtttgagaggtctgtgcatgaaagtggccagaacaaccgctacagccccaagaaggagaaggccggcggcagcgagccccaggatgagtggggcggcagcaagagcaacagaggcagcacagacagcctggacagcctgagcagcaggacagaagctgtgagccccaccgtgtcccagctgtctgctgtgtttgagaacacagacagccccagcgccatcatcagcgagaaggccgagaacaatgagtacagcgtgacaggccactaccccctgaacctgcccagcgtgacagtgaccaacctggacaccttcggccacctgaaggacagcaacagctggccacccagcaacaagaggggcgtggacacagaagatgcccacaagagcaatgccacccctgtgcctgaggtggccagcaagagcaccagcctggccagcatccctggagaggagatccagcagagcaaggagcctgaggacagcaccagcaaccagcagaccccagacagcattgacaaggatggccctgaggagccctgtgccgagagcaaggccatgcccaagtctgagatccccagcccccagagccagctgctggaggatgctgaggccaacctggtgggccgggaggccgccaagcagcagaggaaggagctggccggcggggacttcaccagcccagatgccagcgccagcagctgtgggaaggaggtgcctgaggacagcaacaactttgatggcagccacgtgtacatgcacagcgactacaacgtgtacagagtgcgcagccgctacaacagcgactggggcgagactggaacagagcaggatgaggaggaggacagtgatgaaaattcctactaccagcctgacatggagtacagcgagatcgtgggcctgcctgaggaggaggagatcccagccaacaggaagatcaagttcagcagcgcccccatcaaggtgttcaacacctacagcaatgaagattatgacagaagaaatgatgaggtggaccctgtggccgccagcgcagaatatgagctggagaagagggtggagaagctggagctgtttcctgtggagctggagaaggatgaagatggcctgggcatcagcatcatcggcatgggcgtgggcgcagatgctggcctggagaagctgggcatctttgtgaagacagtgacagagggcggggccgcccagagagatggccgcatccaggtgaatgaccagatcgtggaggtggatggcatcagcctggtgggcgtgacccagaactttgctgccaccgtgctgaggaacaccaagggaaatgtgcgcttcgtcatcggccgggagaagccaggccaggtgtctgaggtggcccagctgatcagccagaccctggagcaggagcggcggcagcgggagctgctggagcagcactacgcccagtatgatgctgatgatgatgaaacaggagaatatgccacagatgaggaggaggatgaggtgggccctgtgctgcccggcagtgacatggccatcgaggtgtttgagctgcctgaaaatgaagacatgttcagccccagcgagctggacaccagcaagctgagccacaagttcaaggagctgcagatcaagcatgctgtgacagaggccgagatccagaagctgaagaccaagctgcaggccgcagaaaatgagaaggtgcgctgggagctggagaagacccagctgcagcagaacatcgaggagaacaaggagaggatgctgaagctggagagctactggattgaggcccagaccctgtgccacacagtgaatgagcacctgaaggagacccagagccagtaccaggccctggagaagaagtacaacaaggccaagaagctgatcaaggacttccagcagaaggagctggacttcatcaagaggcaggaggccgagaggaagaagattgaggacctggagaaggcccacctggtggaggtgcagggcctgcaggtgcgcatccgggacctggaggccgaggtgttccggctgctgaagcagaatggcacccaggtgaacaacaacaacaacatctttgaaagaaggaccagcctgggggaggtgtccaagggggacaccatggagaacctggatggcaagcagaccagctgccaggacggcctgagccaggacctgaatgaagctgtgcctgagacagagcggctggacagcaaggccctgaagacccgggcccagctgtctgtgaagaacagacggcagaggcccagcaggacccggctgtatgacagcgtgagcagcacagatggagaggacagcctggagaggaagggcctgcggaccagcagccctgagagtgacagcggcgtgccccccctgacccctgtggacagcaatgtgcccttcagcagtgaccacatcgccgagttccaggaggagcccctggaccctgagatgggccccctgagctccatgtggggagacaccagcctcttcagcaccagcaagagtgaccatgatgtggaggagagcccctgccaccaccagaccaccaacaagaagatcctgcgggagaaggatgatgccaaggaccccaagagcctgcgggccagcagcagcctggccgtgcagggcggcaagatcaagaggaagtttgtggacctgggcgcccccctgcggaggaacagcagcaagggcaagaagtggaaggagaaggagaaggaggccagccgcttctctgctggcagccgcatcttccggggccgcctggagaactggacccccaagccctgcagcacagcccagaccagcaccaggagcccctgcatgcccttctcctggttcaatgacagcaggaagggcagctacagcttcaggaacctgcctgcccccaccagcagcctgcagcccagccctgagaccctcatcagtgacaagaagggcagcaagaacttcaccttcaatgatgacttcagccccagcagcaccagcagcgctgacctgagcggcctgggcgctgagcccaagaccccaggcctgagccagagcctggccctgagcagtgatgagatcctggatgatggccagagccccaagcacagccagtgccagaacagagctgtgcaggagtggagcgtgcagcaggtgagccactggctgatgagcctgaacctggagcagtatgtgtctgagttcagcgcccagaacatcactggagagcagctgctgcagctggatggcaacaagctgaaggccctgggcatgacagccagccaggacagagctgtggtgaagaagaagctgaaggagatgaagatgagcctggagaaggccaggaaggcccaggagaagatggagaagcagcgggagaagctgcggaggaaggagcaggagcagatgcagaggaagagcaagaagacagagaagatgaccagcaccacagctgagggcgctggggagcagtag

SEQ ID NO: 64502 - DNA, 3891 bp, Artificial Sequence
  derived and/or modified sequence
atgctgaagaccgagagcagcggcgagcggaccaccctgcggagcgcctccccccaccggaacgcttatcgaactgagtttcaggcgctgaagagtacttttgataaacctaaaagtgacggagaacagaagactaaggaaggtgagggatctcaacaaagtcggggcaggaaatatgggtccaatgtgaaccgcattaagaacttattcatgcagatggggatggaaccgaacgaaaatgccgctgttattgctaagacccggggtaaaggagggcacagctcacctcagagaaggatgaagccaaaggaattcctggaaaagactgatggaagcgtggttaagctggagagctccgtctccgagcgtatctctaggtttgacaccatgtatgatggaccaagttatagcaagtttacagaaaccaggaagatgtttgagcggtccgttcacgaaagtgggcagaacaatcggtactcccccaagaaggagaaggcaggcgggagcgaacctcaggacgaatggggcggcagcaagagcaaccgtggctcaaccgattctctggacagcctctccagtcgcacagaagctgtgtctcccaccgtgagccagctcagcgccgtcttcgagaacactgacagcccttcagccatcattagcgaaaaagctgaaaacaatgaatattctgtgactggccactatcccctgaatctacccagtgttaccgttaccaacctggacacttttgggcatctgaaggactctaattcctggccccccagcaataaacgcggggtcgatacggaagatgcccacaagtccaacgcaacccctgtgcccgaggtcgcatccaaatccactagtttggcctccatacccggagaagagatccagcagagcaaagaaccagaggatagtacgtctaaccaacaaactcccgacagcatcgataaggatggccccgaggagccctgtgctgagtcaaaggccatgccaaagtccgaaattcctagcccacagtcccaacttctcgaagatgccgaagcgaacctggtcggcagagaggctgcaaaacagcagcggaaggagctcgcgggcggcgacttcacaagtccagatgcatcggccagttcgtgtggaaaggaagtgccagaagactctaataactttgacgggtctcacgtgtatatgcactcagattacaacgtctatcgagttcgtagccggtataatagcgactggggcgaaacaggcactgagcaggacgaggaagaggacagcgatgaaaactcctactatcagccagacatggagtatagcgaaatagttggtttgcctgaggaagaagagatccccgccaacagaaagattaagtttagctcagcccccattaaagtttttaacacatacagtaatgaggactacgatcggcggaatgatgaagtcgatccagtggccgcatctgccgagtacgaactcgaaaagagggttgagaaactggaactttttcctgtcgagctggaaaaggacgaagatggactgggcatcagcattatcggtatgggagtgggtgccgacgcgggactcgagaagctgggcatttttgtcaaaacagtaaccgaaggaggcgcagcacagagggatggccgtattcaggtgaatgatcagatcgttgaagtggacgggatatctctggtcggggtaactcagaatttcgcggccaccgtgctgcgcaatactaagggtaatgtgaggttcgtgatcggccgcgagaagcctggccaagtgtccgaggttgcccagctgatttcccagactctcgaacaggaacggagacagcgcgagttgctggagcagcactacgcacagtatgatgctgatgacgatgagaccggtgagtacgcaactgatgaggaggaggacgaagtcggccctgttctgccggggagcgacatggcaatagaagttttcgaactgcctgagaacgaagatatgttcagcccttcagaactggacacttcaaagctttcacataaattcaaagagctgcagatcaaacatgccgttacggaggctgagatccagaagttgaagacaaaactgcaggcagctgagaatgagaaagttaggtgggagctggagaagacccagttacagcaaaacatcgaggagaacaaggaacgtatgctgaaactggaaagctactggattgaagcacagacgctctgccatacagttaacgagcacctgaaggagacccagtcccagtaccaagccctcgagaaaaaatacaataaagccaaaaagctgatcaaggatttccagcagaaagaactcgatttcatcaaacggcaggaagccgaaagaaaaaagatcgaggacctggagaaagcacacctcgtcgaggttcagggtctgcaggtacgcatccgtgacctggaagctgaagtttttcgtctcctgaaacaaaatggcacccaggtgaataataacaataacatctttgagcggaggacatctctcggcgaggtgtctaaaggcgacacaatggagaatctagatggtaagcaaaccagttgtcaggacggcctgtctcaggacctcaatgaggctgtgccggagacagagcggctcgactctaaagctctgaagacaagagctcagttgtccgtcaagaataggagacagcgtccctctcggactcgcctctacgacagcgtcagcagcaccgacggtgaagactccctggagcgcaagggcctcaggacctcctccccggaaagcgatagtggcgtgcctccgctgaccccagtcgatagtaatgtgcctttctctagcgatcacattgcagagttccaggaagagcccctggaccccgaaatggggccgctctcctctatgtggggagacacctccctgttctctacaagcaagtcggaccacgatgttgaggagagtccatgccatcatcagacgaccaacaaaaagattttaagggaaaaggacgatgcgaaagatcccaaaagcctcagggcctctagctccctggctgtacaggggggaaagatcaagcgaaaatttgtagatctgggcgccccgctgcgacggaattcatctaaggggaaaaagtggaaagagaaagagaaagaagctagtcgattttctgcaggatcacgcatatttaggggacggttagagaattggacaccaaagccttgcagcaccgcccagactagcacacgcagcccatgtatgcctttcagctggtttaacgacagcaggaaagggtcctacagctttagaaacctccctgccccgaccagcagccttcagccatctcctgagactttgatttccgacaaaaagggctcgaagaacttcacgtttaacgacgatttcagcccctcctccacaagtagtgcagaccttagtggattgggcgccgaacccaaaacccccgggctcagtcagtctctcgctttaagttccgacgagattcttgacgatggacagtcccctaagcattcccagtgtcagaacagagccgtgcaggaatggtcggtgcaacaggtctctcattggttaatgagcctgaacttagagcaatatgtgtccgagttttctgctcagaatatcaccggcgagcagctgctacaactggacggtaataagctcaaggctctggggatgacggcttcccaagacagagcggtggtcaaaaagaaactgaaggaaatgaagatgtctcttgagaaggcccgtaaggctcaggagaaaatggagaaacagagagaaaaacttcgtcgaaaagaacaagagcaaatgcagaggaagtccaaaaagaccgagaaaatgaccagcactactgcggagggggcaggagagcagtag

SEQ ID NO: 64503 - DNA, 3891 bp, Artificial Sequence
  derived and/or modified sequence
atgctcaaaacagagtctagcggcgagcggactactttgagatctgcttcccctcatagaaatgcataccgaacagagtttcaggctcttaaaagcactttcgataaaccaaagtcagatggcgagcaaaagactaaagaaggggagggctctcaacagtctcgtggcaggaagtacgggagcaatgtgaacaggataaaaaacctgtttatgcagatgggcatggaacctaatgagaatgcggcagtcattgcaaagacacgcggaaagggaggtcactcatcccctcagagaaggatgaagccgaaggaatttttagaaaagactgacggatccgtggttaagctcgaaagtagcgtaagtgagcggatctcgcgctttgatactatgtacgacggtccttcgtactcaaaatttacagagacaagaaaaatgtttgaaagatctgtccacgagtctgggcagaacaatcggtactcacccaagaaggagaaggctggtggaagcgagccccaagatgaatggggcggaagtaaatcaaacagggggtccactgactcactcgactccctgtcttccaggacagaggccgtgtccccaacagtaagccagctgagtgcagtcttcgagaatacagatagcccgtcggccatcataagtgagaaggcagaaaacaacgagtactccgttacggggcactatcccctgaatctccccagcgtgaccgtgaccaacttagacacgttcggccacctcaaggactctaattcctggccgccttccaataaacgcggtgttgatacagaggatgcacacaaatccaacgcgacaccagtgcccgaagtcgcatctaagagcaccagcctggccagcattcctggtgaagagatccagcagagtaaagagcctgaagatagcacttccaaccagcagacccctgatagcatcgacaaggacggcccagaagagccttgcgccgaatccaaggcaatgcctaagtctgaaatccctagcccccagtctcagctgctagaggacgctgaggcaaacctagtgggcagagaggccgctaaacagcaacggaaggagttagcaggcggagatttcacatctccggacgccagtgctagcagctgtggcaaggaggttcctgaagatagtaataactttgacggttctcacgtgtacatgcatagcgattataatgtgtacagggttcggagccgttacaatagtgattggggagaaacaggaaccgagcaggatgaggaggaggattccgatgagaatagctattaccagccagacatggaatattccgagattgtggggctacctgaagaagaggagattcctgcaaatcggaagatcaagttttcctcagccccaatcaaagtgttcaatacttatagtaatgaggattacgacagacgtaacgacgaagttgacccggtggctgcttctgcggagtatgagttggaaaagagggtggaaaaactggagttattccctgtggagttagaaaaggatgaggacgggctgggaatctctatcatcggaatgggtgtcggtgccgacgccggactggaaaagctggggatcttcgtcaagactgtgacggaaggtggcgcagctcagagggatggacggattcaagtcaacgaccagatcgtcgaggtggacggcatatcgctggtaggtgtgacccaaaacttcgcagccactgtcctgaggaacaccaaaggtaatgtgaggtttgttatcggacgggaaaagcccggacaggtctctgaagtcgcacaactgatttcacagacattggagcaagagcgaagacagagggagctgttggagcagcattatgcgcaatatgatgccgacgacgatgaaaccggtgaatatgccaccgatgaagaagaagatgaagtgggacccgtacttccagggagcgatatggcaatcgaggtgttcgagttgccagaaaacgaggatatgttcagtccgtccgagctcgacacctcgaaactgtcacacaaattcaaggaacttcagataaaacacgccgttacggaagctgaaatccagaagctgaagactaagcttcaagccgcagaaaatgaaaaggttcgctgggagttagagaaaacccaactgcagcagaacatcgaggagaataaggaaaggatgctaaagcttgaatcctactggatcgaggctcaaacgttgtgccacaccgtgaatgaacaccttaaagagacacagtcacagtaccaggcattagagaagaaatataacaaagcgaagaagctcattaaagacttccaacagaaggagcttgatttcattaagagacaggaggctgagcgcaaaaaaattgaggatctcgagaaagcccatctggtggaggtgcaaggcctgcaagttcgcatcagggatcttgaggctgaggtcttcaggctcttgaagcagaatgggacccaggttaataataacaacaatatatttgaaagaaggacgtcactcggggaagtgtccaagggcgatactatggaaaatttggacggaaagcagacctcatgtcaagatggactcagccaagaccttaacgaagccgtcccggaaactgagagactggactcgaaagctcttaaaacaagggcccaactgagtgttaaaaataggaggcaaagaccaagtcgcaccagactctacgactcagtgtcatctactgacggagaagatagtctggagagaaaaggattgagaacttcctcacccgaatctgattcaggcgttcctcctctgactcccgtcgatagtaatgtgccattctccagcgatcacattgcagagttccaagaggagcctttagatccagagatgggcccactgtcctctatgtggggagacacttcactgttttccacctccaagtctgatcacgacgtagaagaatctccatgccaccaccagactacaaacaaaaaaatcctaagagagaaggacgatgccaaagatccgaaaagcctcagagcttcctcttccctcgcagtccagggtggtaagattaagcggaaattcgtggaccttggagctcccttgagacgaaattctagcaagggcaaaaaatggaaggagaaggaaaaggaagcatccaggttctctgccggttcacgcatttttagagggaggctggagaactggaccccaaaaccttgctccactgctcagaccagcactagatcgccttgcatgccattctcctggttcaacgatagtcgtaagggttcctattcattccgcaatcttcctgcccctaccagttctttgcagccttctcctgagaccttgatcagcgataagaaaggttctaagaatttcaccttcaacgacgattttagccctagctctaccagctccgctgacctctccggacttggcgcagagcccaaaactcccggactgtcccagagcctggcactgagctctgacgaaatcttggatgatggccaaagtcctaagcactctcaatgtcagaatcgcgcagtacaagagtggagtgtgcagcaggtgtctcattggcttatgagcctcaatctcgaacagtacgtgtcagaattttcagcccagaacattacgggcgaacaattgctgcagctggatgggaataagctgaaagctttgggaatgaccgccagccaagaccgtgccgtggtcaagaaaaagctgaaggagatgaagatgtctctggagaaggccagaaaggctcaggagaagatggaaaaacagcgtgagaaactgagaagaaaagaacaagagcaaatgcagcgcaagagtaagaagaccgaaaaaatgacttccactactgccgagggcgcaggcgagcagtag

SEQ ID NO: 64504 - DNA, 10219 bp, Artificial Sequence
  derived and/or modified sequence
atgaacctctagtcttgctttgaaaaaatcattctgtgtaactcttgactgtgactaagttcctaatacacctgttgggacgatcactgacaccgtataccatttgagaggtacttttcttgacccaatactggtgattagagaagagaggtatcttggtttttggtttttttctttgatcattatgaacattggcttttcacccctgaagtgaaaatgttgaaaactgagtcttcaggtgaacgaaccactctcagaagtgcctctcctcacaggaatgcatatcgaactgagtttcaggcactgaaaagtacctttgacaaacccaagtcagatggggaacaaaaaacaaaagaaggtgagggctcccagcagagcagggggaggaaatatggctccaatgtcaacagaattaaaaacctatttatgcagatgggtatggaacccaacgagaatgctgcagtcattgccaaaacaagggggaaaggtggacattcatctcctcagagaagaatgaagcccaaagaatttctggaaaaaacagatggctcagttgttaagttggagtcttctgtttctgaacgaattagtagatttgacactatgtacgatggcccttcatattccaagttcactgagactcgaaagatgtttgagagaagtgtgcatgaatcaggacagaacaaccgctattccccaaagaaagagaaagctggagggagtgaacctcaggatgaatggggaggttccaagtccaacagaggcagtactgattccttggacagccttagctcccgaactgaggctgtctccccaactgtgagtcaactgagtgcagtatttgagaacactgattctcccagtgccatcatttctgagaaggctgaaaacaatgaatactcagtgactgggcattatcccttgaatttaccatctgttactgttacaaatcttgacacatttggtcacctgaaggattctaattcctggcctccttcaaacaagcgaggtgttgatacagaggatgctcacaagagtaatgcaactccagtaccagaagtggcttctaaaagtacctctctagcttcgatacctggtgaagagatccagcagagcaaggaacccgaggactccacatctaatcaacagactcccgacagcattgacaaagatggtcctgaagaaccttgtgctgaaagtaaggcaatgccaaagtccgaaatcccttcaccacaaagccaactgttagaagatgctgaagctaatttggttggaagggaggcagcaaagcaacagaggaaagaacttgcaggtggtgatttcacctctcctgatgcttctgcatccagttgtggaaaagaagtacctgaagattcaaataattttgatggttcccatgtgtacatgcacagtgactataatgtgtatagggtgagatccaggtataattcagactggggagagacaggcactgagcaggatgaggaggaagatagtgatgagaacagttactatcagcctgatatggagtactcggaaattgttggattgccagaagaagaagaaatcccagcaaataggaaaattaagtttagtagtgctcctattaaggttttcaacacatactccaatgaagactatgacaggagaaatgacgaagttgaccctgtggctgcttcagctgagtatgaacttgaaaaacgtgtagaaaagctggaacttttcccagtggagctagagaaagatgaggatggtcttggtataagtattattggaatgggtgttggagcagatgctggacttgaaaagctgggaatattcgtcaagacagtaacagaaggtggtgctgctcaacgggatggcagaatacaagtcaatgaccagattgtggaagtggatggaatcagcttggtgggtgtgacacagaattttgcagcaacagttctcagaaacaccaagggcaacgtcagatttgttattgggcgggaaaaaccaggacaagtgagcgaggttgcccagttgataagccagacactggaacaggagaggcgccagagagagctgctggaacagcactatgcccagtatgatgccgacgatgacgagacaggagaatatgccacagatgaagaagaagatgaggtaggacctgtccttcctggcagcgacatggccattgaagtctttgagctgcctgagaatgaggacatgttttccccatcagaactggacacaagcaagctcagtcacaagttcaaagagttgcaaatcaaacatgcagttacagaagcagagattcaaaaattgaagaccaagctgcaggcagcagaaaatgagaaagtgaggtgggaactagaaaaaacccaactccaacaaaacatagaagagaataaggaaagaatgttgaagttggaaagctactggattgaggcccaaacattatgccacacagtgaatgagcatctcaaagagactcaaagccagtatcaggccttggaaaagaaatacaacaaggcaaagaagttgatcaaggattttcaacaaaaagagcttgatttcatcaaaagacaggaagcagaaagaaagaaaatagaagatttggaaaaagctcatcttgtggaagtgcaaggcctccaagtgcggattagagatttggaagctgaggtattcaggctactgaagcaaaatgggactcaagttaacaataataacaacatctttgagagaagaacatctcttggtgaagtctctaaaggggataccatggagaacttggatggcaagcagacatcttgccaagatggcctaagtcaagacttgaatgaagcagtcccagagacagagcgcctggattcaaaagcactgaaaactcgagcccagctctctgtgaagaacagacgccagagaccctctaggacaagactgtatgatagtgttagttccacagatggggaggacagtctagagagaaagggtttgagaacgtcttctccagaatcagattctggtgttccacccctcaccccggtggatagcaatgtgcccttctcgtctgaccacatagctgaatttcaagaagaaccactggacccagaaatggggcctctctcctctatgtggggagacacttcactgttttctacttcaaagtctgatcatgatgtggaagaatctccttgccatcaccaaaccaccaacaagaaaatattacgagaaaaagatgatgccaaagatcccaaatcactaagggcatccagttcattggcggtgcaaggaggaaaaattaagcggaagtttgtggatctgggggcgcctttgcgaaggaattccagcaagggaaagaagtggaaagaaaaagaaaaagaagccagtaggttttctgcaggtagcaggatcttcagaggcagactggaaaactggacacccaagccatgttcaacagctcagacctccactcgttccccttgcatgcctttctcatggtttaatgacagccggaaaggatcctattccttcaggaacctgcctgcgcctacaagttcccttcagccttctcctgagactctaatttcagataaaaaggggtccaagaattttaccttcaatgatgacttcagtcccagcagtaccagttcagcagacctcagcggcttaggagcagaacctaaaacaccagggctctctcagtccttagcactgtcatcagatgagatccttgatgatggacagtctcccaaacacagtcagtgtcagaatcgggccgttcaggaatggagtgtgcagcaggtttctcactggttaatgagcctaaatctggagcagtatgtatctgaattcagtgcccaaaacatcactggagaacagctcctgcagttggatggaaataaacttaaggctcttggaatgacagcatcccaggaccgagcagtggtcaaaaagaaactcaaggaaatgaagatgtctctagagaaggctcggaaggcccaagagaaaatggaaaaacaaagagaaaagctaaggagaaaggagcaagagcaaatgcagaggaagtccaaaaagacagaaaagatgacgtcaactacagccgagggtgctggtgagcagtaacacataccctcttacagatgatggagatgctccaagagaagtccccacctcttcctgccctgctctcctccagaggatgaaaaagaaactaaatgataagggtaatgcggctctaggccggctgaggaactgtgtgttgaataactgcattttctgcaatagaatgcactcttaattttaactactaaaataatcccaagccacctttggttcattaacaaaccagagatttcatttaagtagctgtgttttgctcttctctaacttaccaacatcttgtgttgtgttgggtgtgttttgtcacttggagaactagtgtgaccccacccaagagcatgacacaccctggtgttgttaatggagcgccgtgaattttcagtgtgggatcctgaaatggcaattgcacatgtctgcatggcagagagcaccctgccatgagatctgagaccagtacttaacttctaggactgcaacacctactccaatgtgtgggaaagatttgctcttaattctcagtctggacagtgagaccaccccgctgtggaaacatgggtgctctgctctgtagttacctactaagggaaaaggcaagcaagtcattctgcttgctaggcatcaaaaagaaagaaaataaattatagctatttgttaaccactgaaaaaagcaaaagccttaagaatgtggatgtgggtattaccttggggttctgagggtaatatttatcctctagatacggctgaacaagaaagaaaaaaatcagacattaatgcagccatgggatattgggatctgttgaccttgctactgctgtgtgttcagcatttcagcaacactggcaaacacaacacagttcctcttccccctacctaacccaagaaattgaacaggaaattgatttttaaggaaaccaccattttcaggtttcctctcctggggaacattctggctggtcttcagcctgcctatgtcacaatcaggaactcatcacatattttctactcaagatttcccaggtgggctcagttagtattttaacaaatgtacttttaagaaaaatagaaataccagttagaggaaactgtcagttaacattttagagagattttgaatggtttttccgaaccattcctttccatacttcaaagattctcaattttacagaaaaagtttgtttaaggcagtgcataggtatactttagtagtggaggaacttatactaattttaagccagcattaaggatttccatgtttcaccaaactaagtcaagtgcaggagactggggcagaagaaggagaaaataaactcgttttgagaaatttcatgtgatgagggttttttgttttttatgctcatgtatctggttctctttgctgcgttgactctaaaaatgaggttatccactttccaaaggacaagtttcagaataagacttgaggccacatgaattcttggacagtattttacttcttttactttatgggaatctctgctctgttcccagcatctcgtatcttccactagaagtattccatatttagagcctcggcaaggcttttgagtgtaacagattaagggaactcccttgtagccccatcttgtattttaataacagtgtgatttttttttatctgaaaatctgaattcagaaattatctaaactggacatttttaattctgttttacccccaaggcctgttttcttttcattgccagagtattgtcggttatgcgtcagctcttttgtcattaggtacagacccttcattcaatcctcagaaacgttgacatgaagtaacattgtgttttacagttatcaaagtcaccattatgtttttctgtctgtcttcattaggggtatgataatgaaactgccgtattggatactctattaatgtcttgagatgtctggtgctttgttattttttcacatcatgagaaataagaagccactattaatgagtgatacaatttggcaaaacttttcaaatactaaaacactaaattagtaaaaatctggtaatattagtgcttgctattgtaaatttttgccatttttgcttatctttgggaaaaaagtgacctggatcacactggaagtttcactgtattcaagagtagaaatagaaggatgattatcttaagttatgtttacactttggtaatatttgaaaatggatgtatatactggaaatgtctgtaagtgtcttgtttttgcacctaatttatgatctattatattgcattttcttaaatatcttagaagtatttttctttataactttgtatattgaatgtttagataaatgtccaactgacaatgttataaatcaaattcttattcctaaaatcatttagtattataagtattttgattttttaagttaaattatagtaattttaggccgaagtgagttattttaacattaccacttaaaacggatgaaattgtaaaagtcatttggtttgattgccccacaaagcataagatgtaaactgattaagggtatgaaagcaaagtgaaagacctcagatcttgtgcacattttgttttcctattatttcttttattgactgtagtgcatgatacctaatcaaggctccaatgtcttgcacaattcctactttaatgctagtggttttcagtgtccttacaatttaacacagaattgttatttcatcaaccttaaaaactgcagtttttattatcagaaaatgaacaaaaagggaatatctggttgctatgaactgattccctaaaggagagctcagtatgattctaacaatagccaaaagtgttttggggtataggttatgctttgttgggagggaatgtgtggtgaggaggccaagctgcagacagaaagcattgtatgagctgtatctgggtcagggtttcccattaaaggatgttagttttataacagattactttgtttaagaccatctcccttcaagtaactcacagtttatgtaatactaatctcattctttttttacctgaatcaggaattttctgcagaatgttaagttagggaagaaacctcatttcatccattctaacactcctgatgaagtccccctttagtttcatgacaataaagctgttctgtggctatcatcctttagctgggattgacaattgatttcacaccctcaacatcacaagctttttttaacccacagcagttcatgattgcagtatgataggtactaaagccaaactcagctttcaactggcacaaaatgggactgtcaccttttgctccattgttgttggaaacaaagtggcaagagggaaaatgaggaaccagatttacctttgccactatctgtgaccctgtaatcatcactagcctgaaatcttaaaatatcccagtcccaagctacaaaaatggtcacaggtggtttgatctagcacctcggccgttagagtttgtgctgaagacaaatttgtctgggttcattgtgcaccagaattagcatgtgcttgaaaattgcattttataaaagggaaatgaaaatttgcatttatatagatactctgattcatgtttaagtgttaaaggttatgcagactaaacttcaagaggagatccagtgtttaacaatagtgttctagaggattctaaaggaagctgccccagcagccctgagagaaccatctatactttggatatgttgtagccccatcattacactgagatatttccatttgagtaactaaaggtactcctgacagagctggagatgaggggcattttggtgggcagtggtcactagggttcacgtcacctacttaatgcaaagaccttagtggtctcagaatgaaaaggtaaaatggaagagaaaagcacagtcctttcctgtcttttcaaatttactttttattaaggatgtacctgtgcactattctaaagctaagcatttaaggataaagtccagaaataaaatgtccatattttcttttcttttctttttttttttttttttctgtcatctgtcacccagactggactgcagtggtgccatcatgtcttactgcagcctcaaactcctgggctcaagtggtcctcctgcttcagcttcccaagtagctgggactacaggcatgtgccaccacccccagccaaaacatccatattttctattagaatggtttacattatgatgggggatggggagctgggggagggctgtacattcccaaaagaaagtagtgttataggaaatccaaatgcgcttcagtgattcactcctgaaaagcagcctgggtatgttggcagattttgtttgcatttgtcttgcgtatttaaagtctcaggaaatctagtcttggtccaaaacactggagaaaaaaataacaccagacaaaacacatttgagtaacttgaagtagcagcatagaataggcccaactaagaagttggaggggcaaagagaaagccgacagaatcagcttctcctggaaagtgaaagcatcaagttctatttatggtagacagagggtccttatttgcttgtccgtggtgtctatgtgggcctattgagggaatggtagttacttgaaggttcacatatgtaagcgtgtggacccagcacagtctgtgacctgattccagatcctcaagagtggagaaggaaagaaatatgatgatttcctatgcttgaccctaacccaaccccaaaactgctagggattcaacagtgagtaagatgtatgcaataagagaacagataacttctcaacaatgtgcatgccgtttgtgtagatgttcagaactacatatgtgtgaatatcactcccaccttacacacgcacacacactgcaatcacatggcattaaaaaatatattgtgtatggaacttggcgaggtcagtcaggacctggagctgtaatcatagccttattgccacttcttgcgttgtgtatacattgaatggctcatagattttaagagatttttttattgtaagtatttctactaaatgcacttatccttctatatgtttatatattttggtaaaattgatttatcagatacttggtattttagtaagaaaatttcctcaaatatttggctaatgctttgatgtcaagattgcatattgctgagttggagctcagaagaaatgtatgcagctaaaaattgcactgtgtgttcttgtgaatttgctcacaattctaaaatgacataattggtggctgtgatgcttacagtcactgcctactggctctcttatgatgaatgttgccatcatatgatcatttatttactttttgtgcaagcaatggcattttggttgttgccaaaaacaacacaagtggttgggagtgtatgttgttggaaggtgtacacttctgtttctttcagctgtattatttatacacccaggttttctgttaaggatgtaatcattcattcaagaaagaacaattggcaagaaataattaaattaccttaaaaagaattaagaggcactccagccagataacacctcccaacaacatgaaatttagttagtgcttagtgaaattccttaaatatatatgtatatgttttcttcaacattatttaatataactactgcttttatattttttaatggtgttgcaaccacttgtacacctgctacaccttactgacaaaactgggcagctgaaaataaaagagaataaattctattccactgtaagaagttgatttcttttcagctttctttgtatatcagtaaagaacacgaattgtttgaaaataattttaagtctgataagtatggatagcatgttacctaagcttttaatttgtacattttgatgtctgatcatttgcatggaagagacaatagtgccacgtctgaattgttctcttgtgcttggttaatatgtacttctctagattgttcaaaaagtttcaaatgacattccttactctttggttttcagaggcattcaagcaaaatatcacagtggtcttttgttttctgaccaatctaacaatacctgtgattaaatttaatttgttagtgtaaataaatttcttgccaatgagtattattgttgttagacaacgaatgcaataaaaagaaatactgaggtctgttgaagcaa

SEQ ID NO: 64505 - DNA, 3891 bp, Artificial Sequence
  derived and/or modified sequence
atgctgaagaccgagagcagcggcgagagaaccaccctgagaagcgccagcccccacagaaacgcctacagaaccgagttccaggccctgaagagcaccttcgacaagcccaagagcgacggcgagcagaagaccaaggagggcgagggcagccagcagagcagaggcagaaagtacggcagcaacgtgaacagaatcaagaacctgttcatgcagatgggcatggagcccaacgagaacgccgccgtgatcgccaagaccagaggcaagggcggccacagcagcccccagagaagaatgaagcccaaggagttcctggagaagaccgacggcagcgtggtgaagctggagagcagcgtgagcgagagaatcagcagattcgacaccatgtacgacggccccagctacagcaagttcaccgagaccagaaagatgttcgagagaagcgtgcacgagagcggccagaacaacagatacagccccaagaaggagaaggccggcggcagcgagccccaggacgagtggggcggcagcaagagcaacagaggcagcaccgacagcctggacagcctgagcagcagaaccgaggccgtgagccccaccgtgagccagctgagcgccgtgttcgagaacaccgacagccccagcgccatcatcagcgagaaggccgagaacaacgagtacagcgtgaccggccactaccccctgaacctgcccagcgtgaccgtgaccaacctggacaccttcggccacctgaaggacagcaacagctggccccccagcaacaagagaggcgtggacaccgaggacgcccacaagagcaacgccacccccgtgcccgaggtggccagcaagagcaccagcctggccagcatccccggcgaggagatccagcagagcaaggagcccgaggacagcaccagcaaccagcagacccccgacagcatcgacaaggacggccccgaggagccctgcgccgagagcaaggccatgcccaagagcgagatccccagcccccagagccagctgctggaggacgccgaggccaacctggtgggcagagaggccgccaagcagcagagaaaggagctggccggcggcgacttcaccagccccgacgccagcgccagcagctgcggcaaggaggtgcccgaggacagcaacaacttcgacggcagccacgtgtacatgcacagcgactacaacgtgtacagagtgagaagcagatacaacagcgactggggcgagaccggcaccgagcaggacgaggaggaggacagcgacgagaacagctactaccagcccgacatggagtacagcgagatcgtgggcctgcccgaggaggaggagatccccgccaacagaaagatcaagttcagcagcgcccccatcaaggtgttcaacacctacagcaacgaggactacgacagaagaaacgacgaggtggaccccgtggccgccagcgccgagtacgagctggagaagagagtggagaagctggagctgttccccgtggagctggagaaggacgaggacggcctgggcatcagcatcatcggcatgggcgtgggcgccgacgccggcctggagaagctgggcatcttcgtgaagaccgtgaccgagggcggcgccgcccagagagacggcagaatccaggtgaacgaccagatcgtggaggtggacggcatcagcctggtgggcgtgacccagaacttcgccgccaccgtgctgagaaacaccaagggcaacgtgagattcgtgatcggcagagagaagcccggccaggtgagcgaggtggcccagctgatcagccagaccctggagcaggagagaagacagagagagctgctggagcagcactacgcccagtacgacgccgacgacgacgagaccggcgagtacgccaccgacgaggaggaggacgaggtgggccccgtgctgcccggcagcgacatggccatcgaggtgttcgagctgcccgagaacgaggacatgttcagccccagcgagctggacaccagcaagctgagccacaagttcaaggagctgcagatcaagcacgccgtgaccgaggccgagatccagaagctgaagaccaagctgcaggccgccgagaacgagaaggtgagatgggagctggagaagacccagctgcagcagaacatcgaggagaacaaggagagaatgctgaagctggagagctactggatcgaggcccagaccctgtgccacaccgtgaacgagcacctgaaggagacccagagccagtaccaggccctggagaagaagtacaacaaggccaagaagctgatcaaggacttccagcagaaggagctggacttcatcaagagacaggaggccgagagaaagaagatcgaggacctggagaaggcccacctggtggaggtgcagggcctgcaggtgagaatcagagacctggaggccgaggtgttcagactgctgaagcagaacggcacccaggtgaacaacaacaacaacatcttcgagagaagaaccagcctgggcgaggtgagcaagggcgacaccatggagaacctggacggcaagcagaccagctgccaggacggcctgagccaggacctgaacgaggccgtgcccgagaccgagagactggacagcaaggccctgaagaccagagcccagctgagcgtgaagaacagaagacagagacccagcagaaccagactgtacgacagcgtgagcagcaccgacggcgaggacagcctggagagaaagggcctgagaaccagcagccccgagagcgacagcggcgtgccccccctgacccccgtggacagcaacgtgcccttcagcagcgaccacatcgccgagttccaggaggagcccctggaccccgagatgggccccctgagcagcatgtggggcgacaccagcctgttcagcaccagcaagagcgaccacgacgtggaggagagcccctgccaccaccagaccaccaacaagaagatcctgagagagaaggacgacgccaaggaccccaagagcctgagagccagcagcagcctggccgtgcagggcggcaagatcaagagaaagttcgtggacctgggcgcccccctgagaagaaacagcagcaagggcaagaagtggaaggagaaggagaaggaggccagcagattcagcgccggcagcagaatcttcagaggcagactggagaactggacccccaagccctgcagcaccgcccagaccagcaccagaagcccctgcatgcccttcagctggttcaacgacagcagaaagggcagctacagcttcagaaacctgcccgcccccaccagcagcctgcagcccagccccgagaccctgatcagcgacaagaagggcagcaagaacttcaccttcaacgacgacttcagccccagcagcaccagcagcgccgacctgagcggcctgggcgccgagcccaagacccccggcctgagccagagcctggccctgagcagcgacgagatcctggacgacggccagagccccaagcacagccagtgccagaacagagccgtgcaggagtggagcgtgcagcaggtgagccactggctgatgagcctgaacctggagcagtacgtgagcgagttcagcgcccagaacatcaccggcgagcagctgctgcagctggacggcaacaagctgaaggccctgggcatgaccgccagccaggacagagccgtggtgaagaagaagctgaaggagatgaagatgagcctggagaaggccagaaaggcccaggagaagatggagaagcagagagagaagctgagaagaaaggagcaggagcagatgcagagaaagagcaagaagaccgagaagatgaccagcaccaccgccgagggcgccggcgagcagtag

SEQ ID NO: 64506 - protein, 1253 aa, Artificial Sequence
  derived and/or modified sequence
MLKTESSGERTTLRSASPHRNAYRTEFQALKSTFDKPKSDGEQKTKEGEGSQQSRGRKYGSNVNRIKNLFMQMGMEPNENAAVIAKTRGKGGHSSPQRRMKPKEFLEKTDGSVVKLESSVSERISRFDTMYDGPSYSKFTETRKMFERSVHESGQNNRYSPKKEKAGGSEPQDEWGGSKSNRGSTDSLDSLSSRTEAVSPTVSQLSAVFENTDSPSAIISEKAENNEYSVTGHYPLNLPSVTVTNLDTFGHLKDSNSWPPSNKRGVDTEDAHKSNATPVPEVASKSTSLASIPGEEIQQSKEPEDSTSNQQTPDSIDKDGPEEPCAESKAMPKSEIPSPQSQLLEDAEANLVGREAAKQQRKELAGGDFTSPDASASSCGKEVPEDSNNFDGSHVYMHSDYNVYRVRSRYNSDWGETGTEQDEEEDSDENSYYQPDMEYSEIVGLPEEEEIPANRKIKFSSAPIKVFNTYSNEDYDRRNDEVDPVAASAEYELEKRVEKLELFPVELEKDEDGLGISIIGMGVGADAGLEKLGIFVKTVTEGGAAQRDGRIQVNDQIVEVDGISLVGVTQNFAATVLRNTKGNVRFVIGREKPGQVSEVAQLISQTLEQERRQRELLEQHYAQYDADDDETGEYATDEEEDEVGPVLPGSDMAIEVFELPENEDMFSPSELDTSKLSHKFKELQIKHAVTEAEIQKLKTKLQAAENEKVRWELEKTQLQQNIEENKERMLKLESYWIEAQTLCHTVNEHLKETQSQYQALEKKYNKAKKLIKDFQQKELDFIKRQEAERKKIEDLEKAHLVEVQGLQVRIRDLEAEVFRLLKQNGTQVNNNNNIFERRTSLGEVSKGDTMENLDGKQTSCQDGLSQDLNEAVPETERLDSKALKTRAQLSVKNRRQRPSRTRLYDSVSSTDGEDSLERKPSNSFYNHMHITKLLPPKGLRTSSPESDSGVPPLTPVDSNVPFSSDHIAEFQEEPLDPEMGPLSSMWGDTSLFSTSKSDHDVEESPCHHQTTNKKILREKDDAKDPKSLRASSSLAVQGGKIKRKFVDLGAPLRRNSSKGKKWKEKEKEASRFSAGSRIFRGRLENWTPKPCSTAQTSTRSPCMPFSWFNDSRKGSYSFRNLPAPTSSLQPSPETLISDKKGSKNFTFNDDFSPSSTSSADLSGLGAEPKTPGLSQSLALSSDEALGMTASQDRAVVKKKLKEMKMSLEKARKAQEKMEKQREKLRRKEQEQMQRKSKKTEKMTSTTAEGAGEQ

SEQ ID NO: 64507 - DNA, 3762 bp, Artificial Sequence
  derived and/or modified sequence
atgctcaagactgagtcttctggggagcggacaactttacggtcagcctcgccacacagaaacgcgtaccgaaccgagttccaggcactgaaaagcaccttcgacaagccaaaatctgacggagagcagaaaactaaggaaggcgaggggtcgcagcaaagcagaggccggaagtacggttcaaacgtgaatcgaataaagaatctgttcatgcagatgggcatggagcccaatgaaaacgccgcggtgattgccaagaccagaggcaagggtggccatagttcccctcaacgccggatgaagcctaaagaatttctcgaaaaaaccgacggaagcgtcgtgaagctggagagctcagtgagtgagaggatctctagattcgacacaatgtatgatggcccttcatattccaaatttacggagacacggaaaatgtttgaacgaagtgtgcacgagagcggtcagaataataggtacagccctaagaaagaaaaagccggcgggtctgaaccacaggatgaatggggagggtcgaaatctaatagaggcagcacggatagcctggactcgctcagttctagaacggaggccgtctctcctactgtgtcccaactgagtgcagtcttcgaaaatacggacagccccagtgccataatatcagagaaggcagagaataacgaatatagtgtgacgggccattacccacttaatctaccgagtgtgacagtaacaaacctggatactttcggccatctaaaagatagcaattcttggcccccttcaaacaagagaggcgtggacactgaagatgcccataaaagtaacgccacacccgtcccagaagtggcgagtaagtccacctcactggcttcaattcccggggaagagatacaacagtccaaggagcctgaggattctacatccaaccagcagactcccgattccatcgataaggacggccctgaagaaccctgcgcagaatccaaagcaatgcctaaaagtgaaattcctagccctcagagtcagctcctggaggatgccgaggcaaacttggtgggacgtgaggcagccaagcagcagagaaaggagctggctggcggggactttacctcccccgacgcatcagctagtagctgtgggaaagaggtccctgaagactccaacaactttgatgggtctcacgtgtacatgcatagcgattataacgtttacagagtgcgttctcgctataactctgattggggcgagactgggaccgagcaggacgaggaagaggacagcgatgaaaactcctattaccaacctgacatggagtattctgagatcgtgggattgccagaggaagaagagatcccagcgaaccgtaaaatcaagttctcctcagcgccaattaaggtctttaacacttactcaaatgaagattatgaccgaagaaatgatgaagtagatcctgtcgccgctagtgccgaatacgagctcgagaagcgcgtcgaaaaacttgagctttttcccgtggagctggaaaaagacgaggatgggctgggtattagcatcattggtatgggcgtgggagccgatgcaggcctcgagaagctcggtatttttgtcaaaacggtgaccgaaggcggagctgcccagagggacggcaggattcaggtcaatgatcaaatcgtagaggtggatggcatctctttggttggagtcacacagaactttgcagcaactgtgctgcggaatacgaaagggaatgtgagatttgttattggccgtgaaaagcccgggcaggtttcggaagtggcccagctgattagccaaactctggagcaggaacgacgccaaagagaactgttggagcaacactacgcacagtacgacgcagatgatgacgaaacaggagagtacgcgaccgatgaagaagaggatgaagtgggcccggtgctgcccgggtccgacatggctatcgaggtcttcgagctgcctgagaacgaggatatgttcagcccatcggagctggataccagtaagctttcacacaaatttaaagagctccagataaagcacgcagttactgaagctgaaatacagaaactcaagactaaactccaggccgccgaaaatgagaaggttaggtgggaactagaaaaaacgcagctccagcagaacatcgaggagaataaagaaaggatgttgaagctggaaagctactggattgaagctcagactctgtgccacacagtaaacgaacacctcaaagaaactcagtctcagtaccaagctcttgaaaagaagtacaacaaagcaaaaaaactcatcaaggacttccaacaaaaggaactcgactttatcaagcgtcaggaggccgagcggaaaaaaatcgaggaccttgaaaaggctcacttggtggaggtgcagggacttcaggtgcggattcgggatctggaggccgaagtgtttcggttgctgaagcagaatgggacacaagtgaacaataacaacaacatcttcgaaagacgcaccagtcttggcgaggtttctaaaggcgataccatggagaacctggacggcaagcaaacgtcttgtcaggacggccttagccaggacctgaatgaggcggtccctgagactgagcgactcgattccaaagccttaaaaactagagcacaacttagtgttaagaacaggcgacagcgaccctctcggactcgtttgtatgatagtgtgagttccactgatggcgaagatagcttagaacgcaagccaagtaactctttctacaatcacatgcacattacaaaattgctgccacctaagggcctgcggacgagttcacctgagtccgatagtggagtaccacctttaacacccgtggactcaaacgttcctttttcgtctgatcatatcgctgagtttcaggaagaacccctcgaccctgaaatgggcccattaagctccatgtggggggatacctcactgtttagcactagtaagagcgatcatgacgtcgaggaatccccctgtcatcaccaaactaccaataaaaagatcttaagggagaaggacgatgccaaagaccccaaatcactccgtgcgtcgtccagcctggctgtacagggtggaaagatcaagcggaagtttgtcgatctcggggcacccctcagaagaaatagttccaaaggtaaaaagtggaaggagaaggagaaggaggcaagtagattttcagctgggtcacgcattttccggggacgcctcgaaaattggaccccgaaaccatgcagcactgcccaaacgagcacacggtccccttgtatgccattcagctggttcaacgactcccggaagggaagctactccttccgcaatcttcctgctcccacgagctcccttcagcctagcccagaaaccttgattagtgataaaaagggttcaaagaactttactttcaatgatgatttttctccatctagtacaagctctgcagatttgtccgggctcggggccgagcctaagactcccggcctgtcccagagcttggcactgtcctccgacgaagccctgggcatgaccgcttcacaggaccgggccgtggtcaagaagaaattaaaggaaatgaaaatgtccctcgagaaagctcggaaggcccaggaaaagatggaaaagcagagagaaaagctgcgtaggaaggagcaggagcaaatgcagcgaaagtcgaaaaaaacagagaaaatgacatcaaccacggctgaaggagcaggtgagcagtag

SEQ ID NO: 64508 - DNA, 3762 bp, Artificial Sequence
  derived and/or modified sequence
atgctgaagacagagagcagtggagagaggaccaccctgcggagcgccagcccccacagaaatgcctacagaacagagttccaggccctgaagagcacctttgacaagcccaagagtgatggagagcagaagaccaaggagggggagggcagccagcagagccggggcaggaaatatggcagcaatgtgaaccgcatcaagaacctcttcatgcagatgggcatggagcccaatgaaaatgctgctgtgattgccaagacccggggcaagggcggccacagcagcccccagaggaggatgaagcccaaggagttcctggagaagacagatggctctgtggtgaagctggagagctctgtgtctgagcgcatcagcagatttgacaccatgtatgatggccccagctacagcaagttcacagagaccaggaagatgtttgagaggtctgtgcatgaaagtggccagaacaaccgctacagccccaagaaggagaaggccggcggcagcgagccccaggatgagtggggcggcagcaagagcaacagaggcagcacagacagcctggacagcctgagcagcaggacagaagctgtgagccccaccgtgtcccagctgtctgctgtgtttgagaacacagacagccccagcgccatcatcagcgagaaggccgagaacaatgagtacagcgtgacaggccactaccccctgaacctgcccagcgtgacagtgaccaacctggacaccttcggccacctgaaggacagcaacagctggccacccagcaacaagaggggcgtggacacagaagatgcccacaagagcaatgccacccctgtgcctgaggtggccagcaagagcaccagcctggccagcatccctggagaggagatccagcagagcaaggagcctgaggacagcaccagcaaccagcagaccccagacagcattgacaaggatggccctgaggagccctgtgccgagagcaaggccatgcccaagtctgagatccccagcccccagagccagctgctggaggatgctgaggccaacctggtgggccgggaggccgccaagcagcagaggaaggagctggccggcggggacttcaccagcccagatgccagcgccagcagctgtgggaaggaggtgcctgaggacagcaacaactttgatggcagccacgtgtacatgcacagcgactacaacgtgtacagagtgcgcagccgctacaacagcgactggggcgagactggaacagagcaggatgaggaggaggacagtgatgaaaattcctactaccagcctgacatggagtacagcgagatcgtgggcctgcctgaggaggaggagatcccagccaacaggaagatcaagttcagcagcgcccccatcaaggtgttcaacacctacagcaatgaagattatgacagaagaaatgatgaggtggaccctgtggccgccagcgcagaatatgagctggagaagagggtggagaagctggagctgtttcctgtggagctggagaaggatgaagatggcctgggcatcagcatcatcggcatgggcgtgggcgcagatgctggcctggagaagctgggcatctttgtgaagacagtgacagagggcggggccgcccagagagatggccgcatccaggtgaatgaccagatcgtggaggtggatggcatcagcctggtgggcgtgacccagaactttgctgccaccgtgctgaggaacaccaagggaaatgtgcgcttcgtcatcggccgggagaagccaggccaggtgtctgaggtggcccagctgatcagccagaccctggagcaggagcggcggcagcgggagctgctggagcagcactacgcccagtatgatgctgatgatgatgaaacaggagaatatgccacagatgaggaggaggatgaggtgggccctgtgctgcccggcagtgacatggccatcgaggtgtttgagctgcctgaaaatgaagacatgttcagccccagcgagctggacaccagcaagctgagccacaagttcaaggagctgcagatcaagcatgctgtgacagaggccgagatccagaagctgaagaccaagctgcaggccgcagaaaatgagaaggtgcgctgggagctggagaagacccagctgcagcagaacatcgaggagaacaaggagaggatgctgaagctggagagctactggattgaggcccagaccctgtgccacacagtgaatgagcacctgaaggagacccagagccagtaccaggccctggagaagaagtacaacaaggccaagaagctgatcaaggacttccagcagaaggagctggacttcatcaagaggcaggaggccgagaggaagaagattgaggacctggagaaggcccacctggtggaggtgcagggcctgcaggtgcgcatccgggacctggaggccgaggtgttccggctgctgaagcagaatggcacccaggtgaacaacaacaacaacatctttgaaagaaggaccagcctgggggaggtgtccaagggggacaccatggagaacctggatggcaagcagaccagctgccaggacggcctgagccaggacctgaatgaagctgtgcctgagacagagcggctggacagcaaggccctgaagacccgggcccagctgtctgtgaagaacagacggcagaggcccagcaggacccggctgtatgacagcgtgagcagcacagatggagaggacagcctggagaggaagcccagcaacagcttctacaaccacatgcacatcaccaagctgctgccccccaagggcctgcggaccagcagccctgagagtgacagcggcgtgccccccctgacccctgtggacagcaatgtgcccttcagcagtgaccacatcgccgagttccaggaggagcccctggaccctgagatgggccccctgagctccatgtggggagacaccagcctcttcagcaccagcaagagtgaccatgatgtggaggagagcccctgccaccaccagaccaccaacaagaagatcctgcgggagaaggatgatgccaaggaccccaagagcctgcgggccagcagcagcctggccgtgcagggcggcaagatcaagaggaagtttgtggacctgggcgcccccctgcggaggaacagcagcaagggcaagaagtggaaggagaaggagaaggaggccagccgcttctctgctggcagccgcatcttccggggccgcctggagaactggacccccaagccctgcagcacagcccagaccagcaccaggagcccctgcatgcccttctcctggttcaatgacagcaggaagggcagctacagcttcaggaacctgcctgcccccaccagcagcctgcagcccagccctgagaccctcatcagtgacaagaagggcagcaagaacttcaccttcaatgatgacttcagccccagcagcaccagcagcgctgacctgagcggcctgggcgctgagcccaagaccccaggcctgagccagagcctggccctgagcagtgatgaggccctgggcatgacagccagccaggacagagctgtggtgaagaagaagctgaaggagatgaagatgagcctggagaaggccaggaaggcccaggagaagatggagaagcagcgggagaagctgcggaggaaggagcaggagcagatgcagaggaagagcaagaagacagagaagatgaccagcaccacagctgagggcgctggggagcagtag

SEQ ID NO: 64509 - DNA, 3762 bp, Artificial Sequence
  derived and/or modified sequence
atgctgaagaccgagagcagcggcgagcggaccaccctgcggagcgcgtcaccacatcgcaacgcgtatagaaccgagtttcaagcgctgaagtccacgtttgataagcctaagagcgatggtgaacagaaaaccaaagaaggcgaagggagccagcagagtagaggccggaagtatggctcaaacgtaaaccgcattaagaatttgtttatgcagatggggatggaacctaacgagaatgccgcggtgatagcgaaaacaaggggaaaaggaggccactctagcccacagcgccgcatgaagcctaaagaatttttggaaaaaaccgacgggtcagtggtgaaattggagtccagcgtgagcgaaaggatttcacgctttgacacgatgtatgacggccctagctattctaaatttactgagaccagaaaaatgtttgaaaggagtgtacacgagagtgggcagaataaccgatatagtcccaaaaaggaaaaggccggaggcagcgagccacaagatgaatggggtgggtctaaatccaatcgagggtccacggattctcttgactctctttccagcaggaccgaagccgtgtctccaaccgtgagccagctgtctgcggtgtttgagaacacagattcaccctctgcgataatctccgagaaggccgagaacaatgagtacagcgtcactggtcattatcccctcaacctccctagtgttacagtgaccaacttagacactttcgggcacctgaaagactcaaactcctggcccccctccaataagaggggggttgataccgaggatgcccacaaaagtaatgctacgcccgtgccggaagtagccagtaagtctacctccctcgcaagcatccccggagaagagatacagcaaagtaaggaaccagaagacagcacaagcaatcagcagacccctgattccattgacaaggatgggcctgaggagccatgtgcagagagcaaggccatgcctaaaagcgaaataccctcacctcaatcacaattgttggaggacgccgaggcaaatttggtgggcagggaagcggcaaagcaacagcgaaaggagttggccggaggtgatttcacctcaccggatgcctcagcatcatcatgtggaaaggaagtacccgaagatagcaacaatttcgatgggagccacgtatatatgcacagcgactacaatgtgtacagagtcagatcccgttataactcagattggggggagacagggaccgaacaggacgaagaagaggacagcgatgaaaattcatactaccaaccggacatggagtatagcgagattgtgggcttacccgaggaggaggaaattccggcgaacagaaaaattaaattcagcagcgcgcccataaaggtgttcaatacttattcgaatgaagactatgaccgaaggaatgatgaggtagatccagtggcggcttcagcagaatatgaactggaaaaaagggtcgaaaagttggaactgttccctgtggaacttgagaaagacgaagatgggttgggcatctccatcatcggaatgggggttggagctgacgctggcctggagaagctggggatcttcgttaagactgtgacggaaggcggagccgcccagcgcgacggacgtatccaggtaaatgatcagattgtagaggtggacggtataagcctcgtcggggtgactcaaaacttcgcagcgaccgtgctccggaatacaaagggtaatgtgcgctttgtgatcggccgggaaaaacccggccaggtgtctgaagtggctcagctgatatctcagaccttggaacaggaacgcaggcagcgcgagttacttgagcagcactatgcccagtatgacgccgacgacgatgagaccggcgagtatgccaccgatgaagaagaagacgaggttggtcctgtgctcccaggctccgatatggccatcgaggtgtttgagctgccagaaaatgaagatatgttcagtccctcggagttagatacgtctaaattatctcataagttcaaggaactgcagattaagcacgccgtcacagaggctgaaattcagaagttaaaaactaagttgcaggccgctgaaaacgagaaggttcgctgggaactcgaaaagacacagctccagcagaacatcgaggagaacaaagaaagaatgctgaagttggaatcatactggattgaggcccagaccctttgccataccgtaaatgagcatctgaaagaaacacagtcgcaatatcaagcacttgagaagaagtacaacaaggcgaaaaaactgattaaagatttccagcagaaagaactggacttcattaaacggcaagaggccgagagaaagaaaatcgaagacctcgagaaagctcatctggtggaagtgcaaggcctgcaggtacgcattcgggatctggaggccgaagtgtttaggctacttaagcagaatggaacacaggtaaataacaataacaatatctttgaacgccgcacatccttaggtgaggtgagtaagggcgacacaatggagaacctcgacggtaagcagactagctgtcaagatggactgtcgcaggatctgaacgaggccgtccccgagacagagcgactggattccaaggccctgaagacacgagcacagctatcagtgaaaaatcggaggcaacgaccttcaagaacccggctgtacgatagcgtttccagcacagatggcgaggattctctagagcgtaaaccatcaaacagtttctataaccacatgcacatcaccaaactgctgcctcccaaagggctgcgaacttcctctccggagagtgattctggcgtgcctcccttgacgcctgtggacagcaacgtgccattcagttccgatcatatcgcggaatttcaagaggagcccttagatcctgagatgggccccttgtcttccatgtggggggatacctcattgttttccactagcaagtctgatcacgacgtggaagaaagcccctgtcatcatcagactaccaataaaaagatccttcgcgagaaagacgatgctaaagatccgaaatctctgagggccagctcttctttggcagtacaggggggcaaaatcaaacgcaaatttgttgatttaggagcgcctctacgcaggaactcttctaaaggcaagaagtggaaagagaaggagaaggaggcctccaggttctccgcggggagcaggatcttccggggtcgccttgagaactggacccccaagccatgctccacagctcagacttcaacacggtctccatgcatgcccttctcttggttcaatgacagtagaaagggttcttattcatttagaaatctgcccgcacctaccagctctctgcagccctcccctgagactttaatttccgacaagaagggctctaagaattttactttcaatgatgatttttcacctagcagcacgtcctccgcagacctgtctggcctgggagccgagcccaaaacacctgggctcagtcagagtctcgctctgagcagtgatgaagcactcgggatgacggccagccaagatcgggccgtggtcaagaagaagctgaaagaaatgaagatgtcccttgaaaaggctcgcaaggctcaagaaaagatggagaagcaaagggagaagttgcggaggaaagagcaagaacagatgcaaagaaaatctaagaagaccgagaaaatgacctccacaaccgcagagggagcgggcgagcagtag

SEQ ID NO: 64510 - DNA, 3762 bp, Artificial Sequence
  derived and/or modified sequence
atgctgaaaacggaatcttcgggcgagagaaccactctcaggtcagctagcccccataggaatgcatatcgtacggaattccaggcccttaagtcgacattcgataaacctaagtctgatggagagcagaaaactaaggagggggagggtagccaacagagcagaggaaggaaatatgggtccaacgtaaacaggatcaagaacctgttcatgcagatgggcatggagccaaacgaaaatgcagcagtcatcgccaagacacggggaaaggggggtcatagctctccacagagaaggatgaaacctaaggaatttttggaaaagacagacggatctgtcgtgaaactcgagagcagcgtgtcggagaggatctcacgttttgacaccatgtatgacggcccttcatactctaagttcaccgaaaccagaaaaatgttcgaaaggagcgtccatgaaagcggacaaaataaccggtactcccccaaaaaggagaaggccggtggtagtgaaccccaggatgaatgggggggatcaaaatctaacagagggtccaccgacagcttagattcactatcctcccgcactgaggcagtttctcctactgtatcccagttaagcgctgtgtttgagaacactgattccccttctgcaatcatctcagagaaagctgagaataacgagtacagcgttacaggtcactacccattaaacctccccagtgtcactgtgacaaacctcgacaccttcggccatctgaaagacagcaatagttggcccccttccaataagaggggagtggacacagaggacgcccacaagtctaatgctacgcctgtccccgaggtggcctcaaagtccacctctctagcctctatacccggagaggagattcagcagtctaaagagcccgaggattcaacctcgaatcagcagaccccggatagcatagataaagacggacctgaggaaccttgcgctgaaagcaaggccatgcctaaatctgagatcccaagtccacagagccagttgttagaagacgccgaggcaaatcttgtcggcagagaagctgcaaagcagcagcggaaagagctagccggtggcgacttcacatccccggacgctagcgctagctcttgtggcaaggaggtgcctgaagacagtaataacttcgatggaagccacgtctacatgcattccgactacaacgtctacagagtcaggtccaggtataattcagactggggagagacaggaactgaacaggatgaggaagaagacagtgacgagaattcttactatcagccagatatggagtatagcgaaatcgtgggcctcccagaggaggaagagattcccgctaacagaaagattaagtttagctctgcacccatcaaggtatttaatacttactcaaatgaagactatgaccggaggaacgatgaggtggatccagtggctgcctccgcagagtacgagctcgagaagagggttgaaaagcttgaactttttcctgtggagctcgaaaaagacgaagatggccttggcattagtataatcgggatgggcgtgggcgcagacgccggattagaaaagctggggattttcgttaaaaccgtaacagaaggtggtgcagcacagcgagacgggagaatacaggtgaacgaccaaatcgtggaggtcgatggaatctcactcgtgggagttacgcaaaattttgcggcaacagtgctgcggaacactaaagggaatgttaggttcgttatcgggcgagagaaaccaggccaggtcagcgaagttgcacagttgatcagtcagacattggagcaggaacgacgtcagagagagcttctggaacaacactatgcccagtatgatgccgatgatgatgagaccggagagtatgctaccgacgaagaagaggatgaagtggggcctgtcctgccagggagcgatatggccatagaagtcttcgagttacccgaaaatgaggacatgttttcgccctccgaactggatacaagcaaactatctcataaattcaaagaactgcagataaagcacgccgtaacagaagccgaaattcagaaactcaagacaaagttgcaggccgctgagaacgaaaaggtgagatgggagcttgagaagactcagcttcagcagaatattgaagagaacaaggagcgtatgctgaagctcgagtcttactggatagaggcgcagactctttgccacaccgtgaatgaacacctgaaggaaacacagtctcagtatcaggcactggaaaaaaaatacaacaaagcaaagaagctgattaaagatttccagcaaaaagaactcgacttcatcaaacggcaagaggcagaacgcaagaaaatagaagatctggagaaagcccatctggtggaggtccagggcctgcaagtgcgcatacgagatttagaggcagaggtcttccgcctgcttaagcaaaacggtacacaggttaataataataataatattttcgagagaagaaccagcttaggcgaagtgtccaagggcgatacaatggaaaacttggacgggaaacaaacctcctgccaggacggactcagccaggatctcaacgaagctgtgccagagaccgagaggttggatagcaaagctctaaagacccgtgcccaattatctgtaaagaatcggagacagaggccttcacggacacgcctgtacgatagcgtgtcttccaccgatggggaggattccctcgagaggaagccctctaactccttttacaaccatatgcacattacaaaactgctccccccaaaaggtcttcgaaccagtagcccggagtcagattcgggggtgccacccctcacccccgtcgactccaatgtgccatttagttctgatcatatcgccgagtttcaggaagagccactcgatccagagatgggtccgttaagtagcatgtggggggatacatccttattttctacctccaagtcagaccatgatgtggaagagtccccatgccaccatcagactaccaataagaagatcctgagggaaaaggacgacgctaaggacccgaagagcttacgagccagctctagtttagccgtgcagggtggaaagatcaaaaggaaattcgtcgatctgggtgccccactgagacgcaactctagtaaggggaagaaatggaaggaaaaggaaaaggaagcctctcgatttagcgccggaagcaggatcttccgagggcgactcgagaactggactccgaaaccttgtagcactgcccagacatccacacgctcaccttgcatgccattttcatggtttaatgattctagaaaggggagctactcttttcgtaatcttccagctcccacctcaagtctacaacctagtccggaaactcttattagtgataagaaggggtccaaaaatttcacatttaacgatgacttctctcctagcagcactagctcagcagatctcagtggacttggcgctgaaccaaagaccccaggattaagccagtctcttgctctgtccagtgacgaagcactgggaatgacagcgtcacaggatcgcgctgtcgtgaaaaagaagctaaaggagatgaagatgagtctggaaaaggcgagaaaagctcaagaaaaaatggaaaagcaacgcgaaaaactccgccgaaaagaacaggagcagatgcagagaaagagtaagaaaactgagaagatgacctccacgacagccgaaggggctggcgagcaatag

SEQ ID NO: 64511 - DNA, 10090 bp, Artificial Sequence
  derived and/or modified sequence
atgaacctctagtcttgctttgaaaaaatcattctgtgtaactcttgactgtgactaagttcctaatacacctgttgggacgatcactgacaccgtataccatttgagaggtacttttcttgacccaatactggtgattagagaagagaggtatcttggtttttggtttttttctttgatcattatgaacattggcttttcacccctgaagtgaaaatgttgaaaactgagtcttcaggtgaacgaaccactctcagaagtgcctctcctcacaggaatgcatatcgaactgagtttcaggcactgaaaagtacctttgacaaacccaagtcagatggggaacaaaaaacaaaagaaggtgagggctcccagcagagcagggggaggaaatatggctccaatgtcaacagaattaaaaacctatttatgcagatgggtatggaacccaacgagaatgctgcagtcattgccaaaacaagggggaaaggtggacattcatctcctcagagaagaatgaagcccaaagaatttctggaaaaaacagatggctcagttgttaagttggagtcttctgtttctgaacgaattagtagatttgacactatgtacgatggcccttcatattccaagttcactgagactcgaaagatgtttgagagaagtgtgcatgaatcaggacagaacaaccgctattccccaaagaaagagaaagctggagggagtgaacctcaggatgaatggggaggttccaagtccaacagaggcagtactgattccttggacagccttagctcccgaactgaggctgtctccccaactgtgagtcaactgagtgcagtatttgagaacactgattctcccagtgccatcatttctgagaaggctgaaaacaatgaatactcagtgactgggcattatcccttgaatttaccatctgttactgttacaaatcttgacacatttggtcacctgaaggattctaattcctggcctccttcaaacaagcgaggtgttgatacagaggatgctcacaagagtaatgcaactccagtaccagaagtggcttctaaaagtacctctctagcttcgatacctggtgaagagatccagcagagcaaggaacccgaggactccacatctaatcaacagactcccgacagcattgacaaagatggtcctgaagaaccttgtgctgaaagtaaggcaatgccaaagtccgaaatcccttcaccacaaagccaactgttagaagatgctgaagctaatttggttggaagggaggcagcaaagcaacagaggaaagaacttgcaggtggtgatttcacctctcctgatgcttctgcatccagttgtggaaaagaagtacctgaagattcaaataattttgatggttcccatgtgtacatgcacagtgactataatgtgtatagggtgagatccaggtataattcagactggggagagacaggcactgagcaggatgaggaggaagatagtgatgagaacagttactatcagcctgatatggagtactcggaaattgttggattgccagaagaagaagaaatcccagcaaataggaaaattaagtttagtagtgctcctattaaggttttcaacacatactccaatgaagactatgacaggagaaatgacgaagttgaccctgtggctgcttcagctgagtatgaacttgaaaaacgtgtagaaaagctggaacttttcccagtggagctagagaaagatgaggatggtcttggtataagtattattggaatgggtgttggagcagatgctggacttgaaaagctgggaatattcgtcaagacagtaacagaaggtggtgctgctcaacgggatggcagaatacaagtcaatgaccagattgtggaagtggatggaatcagcttggtgggtgtgacacagaattttgcagcaacagttctcagaaacaccaagggcaacgtcagatttgttattgggcgggaaaaaccaggacaagtgagcgaggttgcccagttgataagccagacactggaacaggagaggcgccagagagagctgctggaacagcactatgcccagtatgatgccgacgatgacgagacaggagaatatgccacagatgaagaagaagatgaggtaggacctgtccttcctggcagcgacatggccattgaagtctttgagctgcctgagaatgaggacatgttttccccatcagaactggacacaagcaagctcagtcacaagttcaaagagttgcaaatcaaacatgcagttacagaagcagagattcaaaaattgaagaccaagctgcaggcagcagaaaatgagaaagtgaggtgggaactagaaaaaacccaactccaacaaaacatagaagagaataaggaaagaatgttgaagttggaaagctactggattgaggcccaaacattatgccacacagtgaatgagcatctcaaagagactcaaagccagtatcaggccttggaaaagaaatacaacaaggcaaagaagttgatcaaggattttcaacaaaaagagcttgatttcatcaaaagacaggaagcagaaagaaagaaaatagaagatttggaaaaagctcatcttgtggaagtgcaaggcctccaagtgcggattagagatttggaagctgaggtattcaggctactgaagcaaaatgggactcaagttaacaataataacaacatctttgagagaagaacatctcttggtgaagtctctaaaggggataccatggagaacttggatggcaagcagacatcttgccaagatggcctaagtcaagacttgaatgaagcagtcccagagacagagcgcctggattcaaaagcactgaaaactcgagcccagctctctgtgaagaacagacgccagagaccctctaggacaagactgtatgatagtgttagttccacagatggggaggacagtctagagagaaagccatcaaacagtttctataaccacatgcatattaccaaattacttccacctaagggtttgagaacgtcttctccagaatcagattctggtgttccacccctcaccccggtggatagcaatgtgcccttctcgtctgaccacatagctgaatttcaagaagaaccactggacccagaaatggggcctctctcctctatgtggggagacacttcactgttttctacttcaaagtctgatcatgatgtggaagaatctccttgccatcaccaaaccaccaacaagaaaatattacgagaaaaagatgatgccaaagatcccaaatcactaagggcatccagttcattggcggtgcaaggaggaaaaattaagcggaagtttgtggatctgggggcgcctttgcgaaggaattccagcaagggaaagaagtggaaagaaaaagaaaaagaagccagtaggttttctgcaggtagcaggatcttcagaggcagactggaaaactggacacccaagccatgttcaacagctcagacctccactcgttccccttgcatgcctttctcatggtttaatgacagccggaaaggatcctattccttcaggaacctgcctgcgcctacaagttcccttcagccttctcctgagactctaatttcagataaaaaggggtccaagaattttaccttcaatgatgacttcagtcccagcagtaccagttcagcagacctcagcggcttaggagcagaacctaaaacaccagggctctctcagtccttagcactgtcatcagatgaggctcttggaatgacagcatcccaggaccgagcagtggtcaaaaagaaactcaaggaaatgaagatgtctctagagaaggctcggaaggcccaagagaaaatggaaaaacaaagagaaaagctaaggagaaaggagcaagagcaaatgcagaggaagtccaaaaagacagaaaagatgacgtcaactacagccgagggtgctggtgagcagtaacacataccctcttacagatgatggagatgctccaagagaagtccccacctcttcctgccctgctctcctccagaggatgaaaaagaaactaaatgataagggtaatgcggctctaggccggctgaggaactgtgtgttgaataactgcattttctgcaatagaatgcactcttaattttaactactaaaataatcccaagccacctttggttcattaacaaaccagagatttcatttaagtagctgtgttttgctcttctctaacttaccaacatcttgtgttgtgttgggtgtgttttgtcacttggagaactagtgtgaccccacccaagagcatgacacaccctggtgttgttaatggagcgccgtgaattttcagtgtgggatcctgaaatggcaattgcacatgtctgcatggcagagagcaccctgccatgagatctgagaccagtacttaacttctaggactgcaacacctactccaatgtgtgggaaagatttgctcttaattctcagtctggacagtgagaccaccccgctgtggaaacatgggtgctctgctctgtagttacctactaagggaaaaggcaagcaagtcattctgcttgctaggcatcaaaaagaaagaaaataaattatagctatttgttaaccactgaaaaaagcaaaagccttaagaatgtggatgtgggtattaccttggggttctgagggtaatatttatcctctagatacggctgaacaagaaagaaaaaaatcagacattaatgcagccatgggatattgggatctgttgaccttgctactgctgtgtgttcagcatttcagcaacactggcaaacacaacacagttcctcttccccctacctaacccaagaaattgaacaggaaattgatttttaaggaaaccaccattttcaggtttcctctcctggggaacattctggctggtcttcagcctgcctatgtcacaatcaggaactcatcacatattttctactcaagatttcccaggtgggctcagttagtattttaacaaatgtacttttaagaaaaatagaaataccagttagaggaaactgtcagttaacattttagagagattttgaatggtttttccgaaccattcctttccatacttcaaagattctcaattttacagaaaaagtttgtttaaggcagtgcataggtatactttagtagtggaggaacttatactaattttaagccagcattaaggatttccatgtttcaccaaactaagtcaagtgcaggagactggggcagaagaaggagaaaataaactcgttttgagaaatttcatgtgatgagggttttttgttttttatgctcatgtatctggttctctttgctgcgttgactctaaaaatgaggttatccactttccaaaggacaagtttcagaataagacttgaggccacatgaattcttggacagtattttacttcttttactttatgggaatctctgctctgttcccagcatctcgtatcttccactagaagtattccatatttagagcctcggcaaggcttttgagtgtaacagattaagggaactcccttgtagccccatcttgtattttaataacagtgtgatttttttttatctgaaaatctgaattcagaaattatctaaactggacatttttaattctgttttacccccaaggcctgttttcttttcattgccagagtattgtcggttatgcgtcagctcttttgtcattaggtacagacccttcattcaatcctcagaaacgttgacatgaagtaacattgtgttttacagttatcaaagtcaccattatgtttttctgtctgtcttcattaggggtatgataatgaaactgccgtattggatactctattaatgtcttgagatgtctggtgctttgttattttttcacatcatgagaaataagaagccactattaatgagtgatacaatttggcaaaacttttcaaatactaaaacactaaattagtaaaaatctggtaatattagtgcttgctattgtaaatttttgccatttttgcttatctttgggaaaaaagtgacctggatcacactggaagtttcactgtattcaagagtagaaatagaaggatgattatcttaagttatgtttacactttggtaatatttgaaaatggatgtatatactggaaatgtctgtaagtgtcttgtttttgcacctaatttatgatctattatattgcattttcttaaatatcttagaagtatttttctttataactttgtatattgaatgtttagataaatgtccaactgacaatgttataaatcaaattcttattcctaaaatcatttagtattataagtattttgattttttaagttaaattatagtaattttaggccgaagtgagttattttaacattaccacttaaaacggatgaaattgtaaaagtcatttggtttgattgccccacaaagcataagatgtaaactgattaagggtatgaaagcaaagtgaaagacctcagatcttgtgcacattttgttttcctattatttcttttattgactgtagtgcatgatacctaatcaaggctccaatgtcttgcacaattcctactttaatgctagtggttttcagtgtccttacaatttaacacagaattgttatttcatcaaccttaaaaactgcagtttttattatcagaaaatgaacaaaaagggaatatctggttgctatgaactgattccctaaaggagagctcagtatgattctaacaatagccaaaagtgttttggggtataggttatgctttgttgggagggaatgtgtggtgaggaggccaagctgcagacagaaagcattgtatgagctgtatctgggtcagggtttcccattaaaggatgttagttttataacagattactttgtttaagaccatctcccttcaagtaactcacagtttatgtaatactaatctcattctttttttacctgaatcaggaattttctgcagaatgttaagttagggaagaaacctcatttcatccattctaacactcctgatgaagtccccctttagtttcatgacaataaagctgttctgtggctatcatcctttagctgggattgacaattgatttcacaccctcaacatcacaagctttttttaacccacagcagttcatgattgcagtatgataggtactaaagccaaactcagctttcaactggcacaaaatgggactgtcaccttttgctccattgttgttggaaacaaagtggcaagagggaaaatgaggaaccagatttacctttgccactatctgtgaccctgtaatcatcactagcctgaaatcttaaaatatcccagtcccaagctacaaaaatggtcacaggtggtttgatctagcacctcggccgttagagtttgtgctgaagacaaatttgtctgggttcattgtgcaccagaattagcatgtgcttgaaaattgcattttataaaagggaaatgaaaatttgcatttatatagatactctgattcatgtttaagtgttaaaggttatgcagactaaacttcaagaggagatccagtgtttaacaatagtgttctagaggattctaaaggaagctgccccagcagccctgagagaaccatctatactttggatatgttgtagccccatcattacactgagatatttccatttgagtaactaaaggtactcctgacagagctggagatgaggggcattttggtgggcagtggtcactagggttcacgtcacctacttaatgcaaagaccttagtggtctcagaatgaaaaggtaaaatggaagagaaaagcacagtcctttcctgtcttttcaaatttactttttattaaggatgtacctgtgcactattctaaagctaagcatttaaggataaagtccagaaataaaatgtccatattttcttttcttttctttttttttttttttttctgtcatctgtcacccagactggactgcagtggtgccatcatgtcttactgcagcctcaaactcctgggctcaagtggtcctcctgcttcagcttcccaagtagctgggactacaggcatgtgccaccacccccagccaaaacatccatattttctattagaatggtttacattatgatgggggatggggagctgggggagggctgtacattcccaaaagaaagtagtgttataggaaatccaaatgcgcttcagtgattcactcctgaaaagcagcctgggtatgttggcagattttgtttgcatttgtcttgcgtatttaaagtctcaggaaatctagtcttggtccaaaacactggagaaaaaaataacaccagacaaaacacatttgagtaacttgaagtagcagcatagaataggcccaactaagaagttggaggggcaaagagaaagccgacagaatcagcttctcctggaaagtgaaagcatcaagttctatttatggtagacagagggtccttatttgcttgtccgtggtgtctatgtgggcctattgagggaatggtagttacttgaaggttcacatatgtaagcgtgtggacccagcacagtctgtgacctgattccagatcctcaagagtggagaaggaaagaaatatgatgatttcctatgcttgaccctaacccaaccccaaaactgctagggattcaacagtgagtaagatgtatgcaataagagaacagataacttctcaacaatgtgcatgccgtttgtgtagatgttcagaactacatatgtgtgaatatcactcccaccttacacacgcacacacactgcaatcacatggcattaaaaaatatattgtgtatggaacttggcgaggtcagtcaggacctggagctgtaatcatagccttattgccacttcttgcgttgtgtatacattgaatggctcatagattttaagagatttttttattgtaagtatttctactaaatgcacttatccttctatatgtttatatattttggtaaaattgatttatcagatacttggtattttagtaagaaaatttcctcaaatatttggctaatgctttgatgtcaagattgcatattgctgagttggagctcagaagaaatgtatgcagctaaaaattgcactgtgtgttcttgtgaatttgctcacaattctaaaatgacataattggtggctgtgatgcttacagtcactgcctactggctctcttatgatgaatgttgccatcatatgatcatttatttactttttgtgcaagcaatggcattttggttgttgccaaaaacaacacaagtggttgggagtgtatgttgttggaaggtgtacacttctgtttctttcagctgtattatttatacacccaggttttctgttaaggatgtaatcattcattcaagaaagaacaattggcaagaaataattaaattaccttaaaaagaattaagaggcactccagccagataacacctcccaacaacatgaaatttagttagtgcttagtgaaattccttaaatatatatgtatatgttttcttcaacattatttaatataactactgcttttatattttttaatggtgttgcaaccacttgtacacctgctacaccttactgacaaaactgggcagctgaaaataaaagagaataaattctattccactgtaagaagttgatttcttttcagctttctttgtatatcagtaaagaacacgaattgtttgaaaataattttaagtctgataagtatggatagcatgttacctaagcttttaatttgtacattttgatgtctgatcatttgcatggaagagacaatagtgccacgtctgaattgttctcttgtgcttggttaatatgtacttctctagattgttcaaaaagtttcaaatgacattccttactctttggttttcagaggcattcaagcaaaatatcacagtggtcttttgttttctgaccaatctaacaatacctgtgattaaatttaatttgttagtgtaaataaatttcttgccaatgagtattattgttgttagacaacgaatgcaataaaaagaaatactgaggtctgttgaagcaa

SEQ ID NO: 64512 - DNA, 3762 bp, Artificial Sequence
  derived and/or modified sequence
atgctgaagaccgagagcagcggcgagagaaccaccctgagaagcgccagcccccacagaaacgcctacagaaccgagttccaggccctgaagagcaccttcgacaagcccaagagcgacggcgagcagaagaccaaggagggcgagggcagccagcagagcagaggcagaaagtacggcagcaacgtgaacagaatcaagaacctgttcatgcagatgggcatggagcccaacgagaacgccgccgtgatcgccaagaccagaggcaagggcggccacagcagcccccagagaagaatgaagcccaaggagttcctggagaagaccgacggcagcgtggtgaagctggagagcagcgtgagcgagagaatcagcagattcgacaccatgtacgacggccccagctacagcaagttcaccgagaccagaaagatgttcgagagaagcgtgcacgagagcggccagaacaacagatacagccccaagaaggagaaggccggcggcagcgagccccaggacgagtggggcggcagcaagagcaacagaggcagcaccgacagcctggacagcctgagcagcagaaccgaggccgtgagccccaccgtgagccagctgagcgccgtgttcgagaacaccgacagccccagcgccatcatcagcgagaaggccgagaacaacgagtacagcgtgaccggccactaccccctgaacctgcccagcgtgaccgtgaccaacctggacaccttcggccacctgaaggacagcaacagctggccccccagcaacaagagaggcgtggacaccgaggacgcccacaagagcaacgccacccccgtgcccgaggtggccagcaagagcaccagcctggccagcatccccggcgaggagatccagcagagcaaggagcccgaggacagcaccagcaaccagcagacccccgacagcatcgacaaggacggccccgaggagccctgcgccgagagcaaggccatgcccaagagcgagatccccagcccccagagccagctgctggaggacgccgaggccaacctggtgggcagagaggccgccaagcagcagagaaaggagctggccggcggcgacttcaccagccccgacgccagcgccagcagctgcggcaaggaggtgcccgaggacagcaacaacttcgacggcagccacgtgtacatgcacagcgactacaacgtgtacagagtgagaagcagatacaacagcgactggggcgagaccggcaccgagcaggacgaggaggaggacagcgacgagaacagctactaccagcccgacatggagtacagcgagatcgtgggcctgcccgaggaggaggagatccccgccaacagaaagatcaagttcagcagcgcccccatcaaggtgttcaacacctacagcaacgaggactacgacagaagaaacgacgaggtggaccccgtggccgccagcgccgagtacgagctggagaagagagtggagaagctggagctgttccccgtggagctggagaaggacgaggacggcctgggcatcagcatcatcggcatgggcgtgggcgccgacgccggcctggagaagctgggcatcttcgtgaagaccgtgaccgagggcggcgccgcccagagagacggcagaatccaggtgaacgaccagatcgtggaggtggacggcatcagcctggtgggcgtgacccagaacttcgccgccaccgtgctgagaaacaccaagggcaacgtgagattcgtgatcggcagagagaagcccggccaggtgagcgaggtggcccagctgatcagccagaccctggagcaggagagaagacagagagagctgctggagcagcactacgcccagtacgacgccgacgacgacgagaccggcgagtacgccaccgacgaggaggaggacgaggtgggccccgtgctgcccggcagcgacatggccatcgaggtgttcgagctgcccgagaacgaggacatgttcagccccagcgagctggacaccagcaagctgagccacaagttcaaggagctgcagatcaagcacgccgtgaccgaggccgagatccagaagctgaagaccaagctgcaggccgccgagaacgagaaggtgagatgggagctggagaagacccagctgcagcagaacatcgaggagaacaaggagagaatgctgaagctggagagctactggatcgaggcccagaccctgtgccacaccgtgaacgagcacctgaaggagacccagagccagtaccaggccctggagaagaagtacaacaaggccaagaagctgatcaaggacttccagcagaaggagctggacttcatcaagagacaggaggccgagagaaagaagatcgaggacctggagaaggcccacctggtggaggtgcagggcctgcaggtgagaatcagagacctggaggccgaggtgttcagactgctgaagcagaacggcacccaggtgaacaacaacaacaacatcttcgagagaagaaccagcctgggcgaggtgagcaagggcgacaccatggagaacctggacggcaagcagaccagctgccaggacggcctgagccaggacctgaacgaggccgtgcccgagaccgagagactggacagcaaggccctgaagaccagagcccagctgagcgtgaagaacagaagacagagacccagcagaaccagactgtacgacagcgtgagcagcaccgacggcgaggacagcctggagagaaagcccagcaacagcttctacaaccacatgcacatcaccaagctgctgccccccaagggcctgagaaccagcagccccgagagcgacagcggcgtgccccccctgacccccgtggacagcaacgtgcccttcagcagcgaccacatcgccgagttccaggaggagcccctggaccccgagatgggccccctgagcagcatgtggggcgacaccagcctgttcagcaccagcaagagcgaccacgacgtggaggagagcccctgccaccaccagaccaccaacaagaagatcctgagagagaaggacgacgccaaggaccccaagagcctgagagccagcagcagcctggccgtgcagggcggcaagatcaagagaaagttcgtggacctgggcgcccccctgagaagaaacagcagcaagggcaagaagtggaaggagaaggagaaggaggccagcagattcagcgccggcagcagaatcttcagaggcagactggagaactggacccccaagccctgcagcaccgcccagaccagcaccagaagcccctgcatgcccttcagctggttcaacgacagcagaaagggcagctacagcttcagaaacctgcccgcccccaccagcagcctgcagcccagccccgagaccctgatcagcgacaagaagggcagcaagaacttcaccttcaacgacgacttcagccccagcagcaccagcagcgccgacctgagcggcctgggcgccgagcccaagacccccggcctgagccagagcctggccctgagcagcgacgaggccctgggcatgaccgccagccaggacagagccgtggtgaagaagaagctgaaggagatgaagatgagcctggagaaggccagaaaggcccaggagaagatggagaagcagagagagaagctgagaagaaaggagcaggagcagatgcagagaaagagcaagaagaccgagaagatgaccagcaccaccgccgagggcgccggcgagcagtag

SEQ ID NO: 64513 - protein, 73 aa, Artificial Sequence
  derived and/or modified sequence
MLKTESSGERTTLRSASPHRNAYRTEFQALKSTFDKPKSDGEQKTKEGEGSQQSRGRKYGSNVNRIKNLFMQM

SEQ ID NO: 64514 - DNA, 555 bp, Artificial Sequence
  derived and/or modified sequence
actgagcctttagaaaagggcggggttcgggggggagtgagctgaaaaactctccctagacaggaaaggtagaagacctcctcatccctttctctttggcagtgagatcttaaggtcaagatgaacctctagtcttgctttgaaaaaatcattctgtgtaactcttgactgtgactaagttcctaatacacctgttgggacgatcactgacaccgtataccatttgagaggtacttttcttgacccaatactggtgattagagaagagaggtatcttggtttttggtttttttctttgatcattatgaacattggcttttcacccctgaagtgaaaatgttgaaaactgagtcttcaggtgaacgaaccactctcagaagtgcctctcctcacaggaatgcatatcgaactgagtttcaggcactgaaaagtacctttgacaaacccaagtcagatggggaacaaaaaacaaaagaaggtgagggctcccagcagagcagggggaggaaatatggctccaatgtcaacagaattaaaaacctatttatgcagatg

SEQ ID NO: 64515 - DNA, 512 bp, Artificial Sequence
  derived and/or modified sequence
gcggccgccgcagccgccctacgcgctgcgccgtgaggagcgggttgcggtgtacccagcgggccggcgccgagccgagccgccgcgtccaccgtggggcggggggcgcctgcgaggagggggtgggagccgcggcggcccgaccctccccgcccgcggcgctcccgctcggatgaacctctagtcttgctttgaaaaaatcattctgtgtaactcttgactgtgactaagttcctaatacacctgttgggacgatcactgacaccgtataccatttgagaggtacttttcttgacccaatactggtgattagagaagagaggtatcttggtttttggtttttttctttgatcattatgaacattggcttttcacccctgaagtgaaaatgttgaaaactgagtcttcaggtgaacgaaccactctcagaagtgcctctcctcacaggaatgcatatcgaactgagtttcaggcactgaaaagtacctttgacaaacccaagtcagatgggg

SEQ ID NO: 64516 - protein, 245 aa, Artificial Sequence
  derived and/or modified sequence
MAGQPGHMPHGGSSNNLCHTLGPVHPPDPQQLNHPNIIKYLDSFIEDNELNIVLELADAGDLSQMIKYFKKQKRLIPERTVWKYFVQLCSAVEHMHSRRVMHRDIKPANVFITATGVVKLGDLGLGRFFSSETTAAHSLVGTPYYMSPERIHENGYNFKSDIWSLGCLLYEMAALQSPFYGDKMNLFSLCQKIEQCDYPPLPGEHYSEKLRELVSMCICPDPHQRPDIGYVHQVAKQMHIWMSST

SEQ ID NO: 64517 - protein, 331 aa, Artificial Sequence
  derived and/or modified sequence
MGRRRPAPFRALVRLACRMAGQPGHMPHGGSSNNLCHTLGPVHPPDPQRHPNTLSFRCSLADFQIEKKIGRGQFSEVYKATCLLDRKTVALKKVQIFEMMDAKARQDCVKEIGLLKQLNHPNIIKYLDSFIEDNELNIVLELADAGDLSQMIKYFKKQKRLIPERTVWKYFVQLCSAVEHMHSRRVMHRDIKPANVFITATGVVKLGDLGLGRFFSSETTAAHSLVGTPYYMSPERIHENGYNFKSDIWSLGCLLYEMAALQSPFYGDKMNLFSLCQKIEQCDYPPLPGEHYSEKLRELVSMCICPDPHQRPDIGYVHQVAKQMHIWMSST

SEQ ID NO: 64518 - DNA, 996 bp, Artificial Sequence
  derived and/or modified sequence
atgggccggagacggccggcaccttttcgggcactagtgcggctagcatgcagaatggcagggcagccggggcatatgcctcatggcggatctagtaacaacctgtgccataccttagggcccgtacatccccctgacccgcagagacacccaaatactctgtctttccgatgcagccttgcggactttcagatcgaaaagaaaatcggcagagggcagtttagcgaagtttacaaggccacctgccttcttgaccggaaaacagtggcactcaaaaaagttcaaattttcgagatgatggacgctaaagctcgtcaagattgcgtgaaagaaatcggtctgctcaagcagttgaatcatcccaacattatcaaatatctggattctttcattgaagataacgaactcaacattgtactggagttggcagacgcgggtgacttgtcccagatgattaaatactttaagaagcaaaagaggcttattcctgaaagaaccgtatggaaatactttgtccagctctgcagtgctgttgaacatatgcactctcgacgggtgatgcaccgagacatcaagcctgcgaacgtgtttattactgcgacaggagtggtgaagctgggagatttgggtcttggccggtttttttcctctgagaccacagcggcccatagtctggtgggcacaccctattatatgtcgcccgagaggatccatgagaatggatataattttaaatcagacatttggtcgctaggatgtctgctgtacgagatggcggctctccaatctcccttctatggggataaaatgaatcttttttccctgtgtcagaagatcgagcagtgcgactatccacccctcccaggggagcattattctgagaagctgcgcgagctcgtgagcatgtgcatctgtcccgatccacaccagaggcctgacattggatatgtgcaccaggtggccaaacagatgcacatttggatgagtagcacctag

SEQ ID NO: 64519 - DNA, 996 bp, Artificial Sequence
  derived and/or modified sequence
atgggcagaagaagacctgcccccttccgggccctggtgcggctggcctgcaggatggccggccagcccggccacatgccccacggcggcagcagcaacaacctgtgccacaccctgggccctgtgcaccccccagacccccagaggcaccccaacaccctgtccttccgctgcagcctggccgacttccagatcgagaagaagattggccggggccagttcagcgaggtgtacaaggccacctgcctgctggacaggaagacagtggccctgaagaaggtgcagatctttgagatgatggatgccaaggcccggcaggactgtgtgaaggagatcggcctgctgaagcagctgaaccaccccaacatcatcaagtacctggacagcttcatcgaggacaatgagctgaacatcgtgctggagctggctgatgctggggacctgagccagatgatcaagtacttcaagaagcagaagaggctcatccctgagaggacagtgtggaagtactttgtgcagctgtgcagcgctgtggagcacatgcacagccggcgggtgatgcaccgggacatcaagccagccaacgtgttcatcacagccactggagtggtgaagctgggggacctgggcctgggccgcttcttcagcagcgagaccacagctgcccacagcctggtgggcaccccctactacatgagccctgagcgcatccatgaaaatggctacaacttcaagagtgacatctggagcctgggctgcctgctgtatgagatggccgccctgcagagccccttctacggggacaagatgaacctcttcagcctgtgccagaagattgagcagtgtgactacccacccctgcccggggagcactacagcgagaagctgcgggagctggtgtccatgtgcatctgcccagacccccaccagaggccagacatcggctacgtgcaccaggtggccaagcagatgcacatctggatgagcagcacctag

SEQ ID NO: 64520 - DNA, 996 bp, Artificial Sequence
  derived and/or modified sequence
atgggccggcggcggcccgcccccttccgggccctggtgcggctggcttgtcgaatggcaggtcagccaggtcacatgccgcatggcgggtcttccaacaacttgtgtcacacgctcgggcccgtccatccccccgacccacagcggcatcccaacactctgtcattccgttgttctctggcagactttcagatcgaaaaaaagatcgggcgcggtcagttcagcgaggtctataaagccacctgcctgttagatcggaaaactgtggcactgaagaaggtgcaaatattcgagatgatggacgccaaggctcggcaggattgcgtaaaagagataggcctactgaagcagttaaatcatccaaatataattaagtatttggactcctttattgaggataacgagctgaacattgtactcgaacttgcagacgccggcgatctgagtcagatgataaaatactttaaaaaacagaagcgcctcattcctgaacggactgtatggaagtattttgtgcagttgtgttccgctgtggaacacatgcactccagaagagtgatgcatagggacattaagccagctaacgtcttcattaccgcaactggcgtggtaaagctgggggacctgggattaggaagatttttctccagcgagacaactgctgcacatagcctcgtcggcacgccatactatatgagtccggaaagaatccatgagaatggatacaatttcaagtcagacatctggtctctgggctgtctgctttatgagatggctgccctacagtcgcccttctacggggataagatgaacctgttttcactttgtcagaagatagagcaatgtgattatccaccactgccgggagagcattattctgaaaagctacgggaattggtttccatgtgcatctgtccggaccctcatcagcgccctgatattggttatgtgcaccaggtcgccaagcagatgcacatatggatgagtagtacctag

SEQ ID NO: 64521 - DNA, 758 bp, Artificial Sequence
  derived and/or modified sequence
gatgaggctgggacactgttcgcaggaagagtccggtgttctggccccctgatgtcaccttcacgggcctgactcacagtcctaaatatctgacagcgagatcgcttttcgtgccctcgtgaggctggcatgcaggatggcaggacagcccggccacatgccccatggagggagttccaacaacctctgccacaccctggggcctgtgcatcctcctgacccacagaggcatcccaacacgctgtcttttcgctgctcgctggcggacttccagatcgaaaagaagataggccgaggacagttcagcgaggtgtacaaggccacctgcctgctggacaggaagacagtggctctgaagaaggtgcagatctttgagatgatggacgccaaggcgaggcaggactgtgtcaaggagatcggcctcttgaagcaactgaaccacccaaatatcatcaagtatttggactcgtttatcgaagacaacgagctgaacattgtgctggagttggctgacgcaggggacctctcgcagatgatcaagtactttaagaagcagaagcggctcatcccggagaggacagtatggaagtactttgtgcagctgtgcagcgccgtggagcacatgcattcacgccgggtgatgcaccgagacatcaagcctgccaacgtgttcatcacagccacgggcgtcgtgaagctcggtgaccttggtctgggccgcttcttcagctctgagaccaccgcagcccactccctag

SEQ ID NO: 64522 - DNA, 3447 bp, Artificial Sequence
  derived and/or modified sequence
gcaatgctaggcgatggggaatccgaagacgcacaggagtccaagggttggctgactgcagaccctcatcataagtctagagccggagaagatggggagacgccggcctgcgccctttcgtgccctcgtgaggctggcatgcaggatggcaggacagcccggccacatgccccatggagggagttccaacaacctctgccacaccctggggcctgtgcatcctcctgacccacagaggcatcccaacacgctgtcttttcgctgctcgctggcggacttccagatcgaaaagaagataggccgaggacagttcagcgaggtgtacaaggccacctgcctgctggacaggaagacagtggctctgaagaaggtgcagatctttgagatgatggacgccaaggcgaggcaggactgtgtcaaggagatcggcctcttgaagcaactgaaccacccaaatatcatcaagtatttggactcgtttatcgaagacaacgagctgaacattgtgctggagttggctgacgcaggggacctctcgcagatgatcaagtactttaagaagcagaagcggctcatcccggagaggacagtatggaagtactttgtgcagctgtgcagcgccgtggagcacatgcattcacgccgggtgatgcaccgagacatcaagcctgccaacgtgttcatcacagccacgggcgtcgtgaagctcggtgaccttggtctgggccgcttcttcagctctgagaccaccgcagcccactccctagtggggacgccctactacatgtcaccggagaggatccatgagaacggctacaacttcaagtccgacatctggtccctgggctgtctgctgtacgagatggcagccctccagagccccttctatggagataagatgaatctcttctccctgtgccagaagatcgagcagtgtgactaccccccactccccggggagcactactccgagaagttacgagaactggtcagcatgtgcatctgccctgacccccaccagagacctgacatcggatacgtgcaccaggtggccaagcagatgcacatctggatgtccagcacctgagcgtggatgcaccgtgccttatcaaagccagcaccactttgccttacttgagtcgtcttctcttcgagtggccacctggtagcctagaacagctaagaccacagggttcagcaggttccccaaaaggctgcccagccttacagcagatgctgaaggcagagcagctgagggaggggcgctggccacatgtcactgatggtcagattccaaagtcctttctttatactgttgtggacaatctcagctgggtcaataagggcaggtggttcagcgagccacggcagccccctgtatctggattgtaatgtgaatctttagggtaattcctccagtgacctgtcaaggcttatgctaacaggagacttgcaggagaccgtgtgatttgtgtagtgagcctttgaaaatggttagtaccgggttcagtttagttcttagtatcttttcaatcaagctgtgtgcttaatttactctgttgtaaagggataaagtggaaatcatttttttccgtggagtggtgattctgctaacatttttatctacgttttataacttggtgagtgacgatgagagccctgcacctggccagagtgtcacaggcaaaaggcatcgggaagcaggagcatcttcttggcagccaggctgggccatcttctcctggacacctgctgtgtaccaggaacttcgtcacctccttgaatgctggcggttcatttcatgatcagtgttaagcattttcctccatgggaaggaagcatgggatatagaaaagcgaagggctgtcctttacaaattctggttctgcaacttcctagcgtgactttgggcttgggcaagtttcttagccgttctgagccttcatttcctcatctgtacaatgagattaatagtacctatcatctaccttcaggattgctgacagacagaatttgaaataaaatatgcaagttagctaatacaaaaagtagatgatccaaaaatggtagccactcacccttcacaaactgaagtccatggaccacggaagtcgagaattaatgtacacctgtatcatgtgtaggaaaccagaaatgtgttccttatttcttgttcccaaacaggattaactgtgaagactaatttataaatgtgaacctaagaaaactccacctctgaaggaaatcatttgaattttgtttttgtacgtaaagttaaccttccaattgtctgagctgtcgtcactgacttcatgacagtctggccctccagacaagagcagcgctggcatcgggcaggtgattcctgacacctgctgcctgcaggcattcactgaccaggcctttcctggaggaaacacccagggccgggcggctgctgtttccacacgtggactcggatctgctgtgacaccgtcagcccgacagtctctccatatgcagcctttcctctgtacttttctccatggttgaaataaaacagggtgactgggagttacttagaattcatgaagattttaaaatggctttggagattttgcttttaaaccagtagattcaaaacttaaacagcgtctgcagcacaatttcttgaggaaccttgaaaaacacaacttcccaggccccattcagtaatcccaggatttctttaagctccccaaataattttgaaactcatcatcagccgagtttctgccctcatgaggtaattccatcgttctccccagcctgcccctggcagctgtaacacaggagctggcctgagagcagattcaccctggaatgttctctccacagaacaatcaagtccctgtcgcctgcctagtgcttaccactgaagatttttctgattccagaccaactttttgccaacattctgcttccagctctctgagcccctgccgtgtctccccaacactgccagccccagcacgcaatcaacctactttgtgcatgccacccgctttccacactgtgagaacaatctgcccaactggaccctctggaggcgcacgatctcagccactcaccaggcctgagtgtttgtgaaatgatcatgtcctacttattacaaaaccgtaaccccaaaacattccttttatttctgtgaaaccggccaaagtgaggtccacccaccttcacacagctctggcggtgcacctgctcaccttctcttggttctcagaactgagctgggcttgagaacacagctttggctttgccatttttttcctacttggctgctgaggtggagggtgtgctgcacttatcaccccatttcaaaaccaaaccaaacctgaggccaccccaaacaaattcagccagcaaaaagggtaggtatcgatggtcacctgaagcctcaagggagtccactctgacttctgacag

SEQ ID NO: 64523 - DNA, 2578 bp, Artificial Sequence
  derived and/or modified sequence
gcaatgctaggcgatggggaatccgaagacgcacaggagtccaagggttggctgactgcagaccctcatcataagtctagagccggagaagatggggagacgccggcctgcgccctttcgtgccctcgtgaggctggcatgcaggatggcaggacagcccggccacatgccccatggagggagttccaacaacctctgccacaccctggggcctgtgcatcctcctgacccacagaggcatcccaacacgctgtcttttcgctgctcgctggcggacttccagatcgaaaagaagataggccgaggacagttcagcgaggtgtacaaggccacctgcctgctggacaggaagacagtggctctgaagaaggtgcagatctttgagatgatggacgccaaggcgaggcaggactgtgtcaaggagatcggcctcttgaagcaactgaaccacccaaatatcatcaagtatttggactcgtttatcgaagacaacgagctgaacattgtgctggagttggctgacgcaggggacctctcgcagatgatcaagtactttaagaagcagaagcggctcatcccggagaggacagtatggaagtactttgtgcagctgtgcagcgccgtggagcacatgcattcacgccgggtgatgcaccgagacatcaagcctgccaacgtgttcatcacagccacgggcgtcgtgaagctcggtgaccttggtctgggccgcttcttcagctctgagaccaccgcagcccactccctagtggggacgccctactacatgtcaccggagaggatccatgagaacggctacaacttcaagtccgacatctggtccctgggctgtctgctgtacgagatggcagccctccagagccccttctatggagataagatgaatctcttctccctgtgccagaagatcgagcagtgtgactaccccccactccccggggagcactactccgagaagttacgagaactggtcagcatgtgcatctgccctgacccccaccagagacctgacatcggatacgtgcaccaggtggccaagcagatgcacatctggatgtccagcacctgagcgtggatgcaccgtgccttatcaaagccagcaccactttgccttacttgagtcgtcttctcttcgagtggccacctggtagcctagaacagctaagaccacagggttcagcaggttccccaaaaggctgcccagccttacagcagatgctgaaggcagagcagctgagggaggggcgctggccacatgtcactgatggtcagattccaaagtcctttctttatactgttgtggacaatctcagctgggtcaataagggcaggtggttcagcgagccacggcagccccctgtatctggattgtaatgtgaatctttagggtaattcctccagtgacctgtcaaggcttatgctaacaggagacttgcaggagaccgtgtgatttgtgtagtgagcctttgaaaatggttagtaccgggttcagtttagttcttagtatcttttcaatcaagctgtgtgcttaatttactctgttgtaaagggataaagtggaaatcatttttttccgtggagtggtgattctgctaacatttttatctacgttttataacttggtgagtgacgatgagagccctgcacctggccagagtgtcacaggcaaaaggcatcgggaagcaggagcatcttcttggcagccaggctgggccatcttctcctggacacctgctgtgtaccaggaacttcgtcacctccttgaatgctggcggttcatttcatgatcagtgttaagcattttcctccatgggaaggaagcatgggatatagaaaagcgaagggctgtcctttacaaattctggttctgcaacttcctagcgtgactttgggcttgggcaagtttcttagccgttctgagccttcatttcctcatctgtacaatgagattaatagtacctatcatctaccttcaggattgctgacagacagaatttgaaataaaatatgcaagttagctaatacaaaaagtagatgatccaaaaatggtagccactcacccttcacaaactgaagtccatggaccacggaagtcgagaattaatgtacacctgtatcatgtgtaggaaaccagaaatgtgttccttatttcttgttcccaaacaggattaactgtgaagactaatttataaatgtgaacctaagaaaactccacctctgaaggaaatcatttgaattttgtttttgtacgtaaagttaaccttccaattgtctgagctgtcgtcactgacttcatgacagtctggccctccagacaagagcagcgctggcatcgggcaggtgattcctgacacctgctgcctgcaggcattcactgaccaggcctttcctggaggaaacacccagggccgggcggctgctgtttccacacgtggactcggatctgctgtgacaccgtcagcccgacagtctctccatatgcagcctttcctctgtacttttctccatggttgaaataaaacagggtgactgggagttacttagaattcatgaagatttt

SEQ ID NO: 64524 - DNA, 996 bp, Artificial Sequence
  derived and/or modified sequence
atgggaagacggaggccagctccattcagagccttggtccggctggcctgtcgcatggcagggcaaccaggtcacatgccccacgggggaagttctaataacctctgtcatacccttggtcctgtgcaccctcccgacccccagcgacacccaaatacactgagctttaggtgctccctcgcagacttccagatcgagaaaaagattggccgtggacagttttcagaggtttacaaagctacatgcctgctcgaccgaaaaacagtcgcccttaagaaggtccagatttttgagatgatggacgcaaaggccagacaggattgtgttaaagaaattgggctgttaaagcagctaaaccacccaaatattattaagtacctcgactcatttattgaggacaacgagttgaatattgtgctcgaattggccgatgctggcgacctcagccagatgatcaagtattttaaaaagcagaagaggctcatacctgagcgtacagtatggaaatactttgtacagctgtgttccgctgtggaacatatgcactccagaagggtgatgcaccgggacattaagcctgcaaacgtatttatcacggccacaggagtggtgaagctgggcgatctaggcctgggacgttttttttcaagcgaaacgactgcagcccatagcctcgtggggactccttactacatgtctccggagcgaatccatgagaatggatacaactttaaaagcgacatttggagcctgggctgcctgctgtacgaaatggctgcgctacaatcgccattttacggcgataagatgaacctattcagcctgtgccagaagattgagcagtgcgattacccacctctccctggcgagcactattcagagaaactgcgggagcttgtttcaatgtgtatatgccctgaccctcaccagaggcctgatattggctacgtgcatcaggtcgccaaacagatgcacatttggatgtcatccacctag

SEQ ID NO: 64525 - DNA, 996 bp, Artificial Sequence
  derived and/or modified sequence
atgggcagaagaagacccgcccccttcagagccctggtgagactggcctgcagaatggccggccagcccggccacatgccccacggcggcagcagcaacaacctgtgccacaccctgggccccgtgcacccccccgacccccagagacaccccaacaccctgagcttcagatgcagcctggccgacttccagatcgagaagaagatcggcagaggccagttcagcgaggtgtacaaggccacctgcctgctggacagaaagaccgtggccctgaagaaggtgcagatcttcgagatgatggacgccaaggccagacaggactgcgtgaaggagatcggcctgctgaagcagctgaaccaccccaacatcatcaagtacctggacagcttcatcgaggacaacgagctgaacatcgtgctggagctggccgacgccggcgacctgagccagatgatcaagtacttcaagaagcagaagagactgatccccgagagaaccgtgtggaagtacttcgtgcagctgtgcagcgccgtggagcacatgcacagcagaagagtgatgcacagagacatcaagcccgccaacgtgttcatcaccgccaccggcgtggtgaagctgggcgacctgggcctgggcagattcttcagcagcgagaccaccgccgcccacagcctggtgggcaccccctactacatgagccccgagagaatccacgagaacggctacaacttcaagagcgacatctggagcctgggctgcctgctgtacgagatggccgccctgcagagccccttctacggcgacaagatgaacctgttcagcctgtgccagaagatcgagcagtgcgactacccccccctgcccggcgagcactacagcgagaagctgagagagctggtgagcatgtgcatctgccccgacccccaccagagacccgacatcggctacgtgcaccaggtggccaagcagatgcacatctggatgagcagcacctag

SEQ ID NO: 64526 - protein, 313 aa, Artificial Sequence
  derived and/or modified sequence
MAGQPGHMPHGGSSNNLCHTLGPVHPPDPQRHPNTLSFRCSLADFQIEKKIGRGQFSEVYKATCLLDRKTVALKKVQIFEMMDAKARQDCVKEIGLLKQLNHPNIIKYLDSFIEDNELNIVLELADAGDLSQMIKYFKKQKRLIPERTVWKYFVQLCSAVEHMHSRRVMHRDIKPANVFITATGVVKLGDLGLGRFFSSETTAAHSLVGTPYYMSPERIHENGYNFKSDIWSLGCLLYEMAALQSPFYGDKMNLFSLCQKIEQCDYPPLPGEHYSEKLRELVSMCICPDPHQRPDIGYVHQVAKQMHIWMSST

SEQ ID NO: 64527 - protein, 207 aa, Artificial Sequence
  derived and/or modified sequence
MAGQPGHMPHGGSSNNLCHTLGPVHPPDPQRHPNTLSFRCSLADFQIEKKIGRGQFSEVYKATCLLDRKTVALKKVQIFEMMDAKARQDCVKEIGLLKQLNHPNIIKYLDSFIEDNELNIVLELADAGDLSQMIKYFKKQKRLIPERTVWKYFVQLCSAVEHMHSRRVMHRDIKPANVFITATGVVKLGDLGLGRFFSSETTAAHSL

SEQ ID NO: 64528 - protein, 220 aa, Artificial Sequence
  derived and/or modified sequence
MAGQPGHMPHGGSSNNLCHTLGPVHPPDPQRHPNTLSFRCSLADFQIEKKIGRGQFSEVYKATCLLDRKTVALKKVQIFEMMDAKARQDCVKEIGLLKQLNHPNIIKYLDSFIEDNELNIVLELADAGDLSQMIKYFKKQKRLIPERTVWKYFVQLCSAVEHMHSRRVMHRDIKPANVFITATGVVKLGDLGLGRFFSSETTAAHSLVGTPYYMSPERIH

SEQ ID NO: 64529 - protein, 222 aa, Artificial Sequence
  derived and/or modified sequence
MAGQPGHMPHGGSSNNLCHTLGPVHPPDPQRHPNTLSFRCSLADFQIEKKIGRGQFSEVYKATCLLDRKTVALKKVQIFEMMDAKARQDCVKEIGLLKQLNHPNIIKYLDSFIEDNELNIVLELADAGDLSQMIKYFKKQKRLIPERTVWKYFVQLCSAVEHMHSRRVMHRDIKPANVFITATGVVKLGDLGLGRFFSSETTAAHSLVGTPYYMSPERIHEN

SEQ ID NO: 64530 - protein, 219 aa, Artificial Sequence
  derived and/or modified sequence
MAGQPGHMPHGGSSNNLCHTLGPVHPPDPQRHPNTLSFRCSLADFQIEKKIGRGQFSEVYKATCLLDRKTVALKKVQIFEMMDAKARQDCVKEIGLLKQLNHPNIIKYLDSFIEDNELNIVLELADAGDLSQMIKYFKKQKRLIPERTVWKYFVQLCSAVEHMHSRRVMHRDIKPANVFITATGVVKLGDLGLGRFFSSETTAAHSLVGTPYYMSPERI

SEQ ID NO: 64531 - protein, 338 aa, Artificial Sequence
  derived and/or modified sequence
MEATGWDSRCSPGTQVRALVRLACRMAGQPGHMPHGGSSNNLCHTLGPVHPPDPQRHPNTLSFRCSLADFQIEKKIGRGQFSEVYKATCLLDRKTVALKKVQIFEMMDAKARQDCVKEIGLLKQLNHPNIIKYLDSFIEDNELNIVLELADAGDLSQMIKYFKKQKRLIPERTVWKYFVQLCSAVEHMHSRRVMHRDIKPANVFITATGVVKLGDLGLGRFFSSETTAAHSLVGTPYYMSPERIHENGYNFKSDIWSLGCLLYEMAALQSPFYGDKMNLFSLCQKIEQCDYPPLPGEHYSEKLRELVSMCICPDPHQRPDIGYVHQVAKQMHIWMSST

SEQ ID NO: 64532 - DNA, 1017 bp, Artificial Sequence
  derived and/or modified sequence
atggaagccaccggatgggactcacggtgcagccccggcacgcaggtgcgcgcactggttcgattagcctgtagaatggccggccaacccgggcacatgccacacggaggtagctccaacaacctgtgccatacgctaggtcctgtgcaccctccagaccctcagaggcacccaaacacactgagctttcgatgcagcttggctgattttcagattgaaaagaaaatagggaggggtcagttttctgaagtgtacaaagcaacctgtcttctagatagaaagactgtcgctttgaagaaagttcagatttttgaaatgatggatgctaaggctagacaggattgcgtgaaggaaattggtctgctgaagcagctgaatcatcctaacattatcaagtatctggactcttttatagaggacaatgagcttaatatagtgttggagttggccgatgcgggggatttgagccaaatgattaaatacttcaagaagcagaaaagacttatcccagagcgcactgtttggaagtactttgtccagctctgtagcgcggtggagcatatgcacagccgccgagtgatgcaccgtgacatcaaacccgccaatgtttttataaccgctaccggcgtggttaaactgggcgatcttggcctcggtaggttctttagctctgagaccacggcagctcattctcttgtaggtaccccttattatatgtccccagaacggattcacgagaacggctacaactttaagtcagacatttggagcttaggttgtttactgtatgagatggccgctttacagtcaccattttatggcgacaagatgaatctctttagtttgtgccagaagatagagcagtgcgattacccgccccttcccggcgagcactattcagagaagctgcgggagttggtcagtatgtgcatctgccccgatccccatcagcgaccagacattggttacgtgcatcaggtggctaaacagatgcacatttggatgtcttccacttag

SEQ ID NO: 64533 - DNA, 1017 bp, Artificial Sequence
  derived and/or modified sequence
atggaggccaccggctgggacagccgctgcagccctggcacccaggtgcgggccctggtgcggctggcctgcaggatggccggccagcccggccacatgcctcatggaggcagcagcaacaacctgtgccacaccctgggccctgtgcaccccccagacccccagaggcaccccaacaccctgtccttccgctgcagcctggccgacttccagatcgagaagaagattggccggggccagttcagcgaggtgtacaaggccacctgcctgctggacaggaagacagtggccctgaagaaggtgcagatctttgagatgatggatgccaaggcccggcaggactgtgtgaaggagatcggcctgctgaagcagctgaaccaccccaacatcatcaagtacctggacagcttcattgaagataatgagctgaacatcgtgctggagctggctgatgctggggacctgagccagatgatcaagtacttcaagaagcagaagaggctcatccctgagaggacagtgtggaagtactttgtgcagctgtgcagcgctgtggagcacatgcacagcagaagagtgatgcaccgggacatcaagccagccaacgtgttcatcacagccaccggggtggtgaagctgggggacctgggcctgggccgcttcttcagcagcgagaccacagctgcccacagcctggtgggcaccccctactacatgagccctgagcgcatccatgaaaatggctacaacttcaagagtgacatctggagcctgggctgcctgctgtatgagatggccgccctgcagagccccttctatggagacaagatgaacctcttcagcctgtgccagaagattgagcagtgtgactacccacccctgcctggagagcactacagcgagaagctgcgggagctggtgtccatgtgcatctgcccagacccccaccagaggccagacatcggctacgtgcaccaggtggccaagcagatgcacatctggatgagcagcacctag

SEQ ID NO: 64534 - DNA, 1017 bp, Artificial Sequence
  derived and/or modified sequence
atggaggccaccggctgggacagccggtgcagccccggcacccaggtgagagctcttgttcggcttgcttgccgcatggccggccagccaggacatatgcctcacgggggatcttcaaataacctgtgccatacacttggacctgtccaccccccggatccccagcgccatccaaacacgctgagcttccggtgcagtctggctgacttccagatcgaaaagaaaatcgggagaggtcagttttctgaggtgtataaggccacttgtttactggatagaaagacagtggcactgaaaaaagtgcaaatcttcgagatgatggacgctaaagcgaggcaggattgtgtgaaggagatcggcctcctgaaacagctgaatcatccaaatatcattaagtatttggatagctttattgaggacaatgaactgaacatagttctggaactggccgacgcaggagatttaagtcagatgatcaaatacttcaagaaacagaagaggctgattccggagcgcacagtgtggaaatacttcgtgcagctgtgtagtgccgttgaacacatgcattcacgccgagtaatgcatcgtgacatcaagcctgccaacgtgttcatcacagcaactggggtcgtcaaattgggagacttgggactcggtagattcttctcatctgagactacggccgcacatagcctggtcggtactccctactatatgagccctgaaagaatacacgagaatggctacaatttcaagtctgacatatggtcccttggctgtctgctgtatgagatggcggccctgcagtcaccattttatggcgacaagatgaacttgtttagcctatgccagaaaatagagcagtgcgactaccctccactgcctggagagcattactccgagaagctgcgagagctagtaagcatgtgcatatgcccggaccctcaccagcggcctgatatcggatatgttcaccaagtagctaagcagatgcacatctggatgagttctacctag

SEQ ID NO: 64535 - DNA, 799 bp, Artificial Sequence
  derived and/or modified sequence
ccagcccagagaggcgacccagctccctggaggcccaggcacctcatgtctgccctcaacccagagtggagcagaccttccctggagcttctcaggagccacttcaaaagttcgtgccctcgtgaggctggcatgcaggatggcaggacagcccggccacatgccccatggagggagttccaacaacctctgccacaccctggggcctgtgcatcctcctgacccacagaggcatcccaacacgctgtcttttcgctgctcgctggcggacttccagatcgaaaagaagataggccgaggacagttcagcgaggtgtacaaggccacctgcctgctggacaggaagacagtggctctgaagaaggtgcagatctttgagatgatggacgccaaggcgaggcaggactgtgtcaaggagatcggcctcttgaagcaactgaaccacccaaatatcatcaagtatttggactcgtttatcgaagacaacgagctgaacattgtgctggagttggctgacgcaggggacctctcgcagatgatcaagtactttaagaagcagaagcggctcatcccggagaggacagtatggaagtactttgtgcagctgtgcagcgccgtggagcacatgcattcacgccgggtgatgcaccgagacatcaagcctgccaacgtgttcatcacagccacgggcgtcgtgaagctcggtgaccttggtctgggccgcttcttcagctctgagaccaccgcagcccactccctagtggggacgccctactacatgtcaccggagaggatccat

SEQ ID NO: 64536 - DNA, 806 bp, Artificial Sequence
  derived and/or modified sequence
gatgaggctgggacactgttcgcaggaagagtccggtgttctggccccctgatgtcaccttcacgggcctgactcacagtcctaaatatctgacagcgagatcgcttgtagttcgtgccctcgtgaggctggcatgcaggatggcaggacagcccggccacatgccccatggagggagttccaacaacctctgccacaccctggggcctgtgcatcctcctgacccacagaggcatcccaacacgctgtcttttcgctgctcgctggcggacttccagatcgaaaagaagataggccgaggacagttcagcgaggtgtacaaggccacctgcctgctggacaggaagacagtggctctgaagaaggtgcagatctttgagatgatggacgccaaggcgaggcaggactgtgtcaaggagatcggcctcttgaagcaactgaaccacccaaatatcatcaagtatttggactcgtttatcgaagacaacgagctgaacattgtgctggagttggctgacgcaggggacctctcgcagatgatcaagtactttaagaagcagaagcggctcatcccggagaggacagtatggaagtactttgtgcagctgtgcagcgccgtggagcacatgcattcacgccgggtgatgcaccgagacatcaagcctgccaacgtgttcatcacagccacgggcgtcgtgaagctcggtgaccttggtctgggccgcttcttcagctctgagaccaccgcagcccactccctagtggggacgccctactacatgtcaccggagaggatccatgagaac

SEQ ID NO: 64537 - DNA, 790 bp, Artificial Sequence
  derived and/or modified sequence
ggcggccgggcgggcgggggcggcgtgtccgcgtgtcccggggtgtgcgcgtccccggcgggtgtgcgtgtgcaccccggagcgtctggtggcgttgttgggttcgtgccctcgtgaggctggcatgcaggatggcaggacagcccggccacatgccccatggagggagttccaacaacctctgccacaccctggggcctgtgcatcctcctgacccacagaggcatcccaacacgctgtcttttcgctgctcgctggcggacttccagatcgaaaagaagataggccgaggacagttcagcgaggtgtacaaggccacctgcctgctggacaggaagacagtggctctgaagaaggtgcagatctttgagatgatggacgccaaggcgaggcaggactgtgtcaaggagatcggcctcttgaagcaactgaaccacccaaatatcatcaagtatttggactcgtttatcgaagacaacgagctgaacattgtgctggagttggctgacgcaggggacctctcgcagatgatcaagtactttaagaagcagaagcggctcatcccggagaggacagtatggaagtactttgtgcagctgtgcagcgccgtggagcacatgcattcacgccgggtgatgcaccgagacatcaagcctgccaacgtgttcatcacagccacgggcgtcgtgaagctcggtgaccttggtctgggccgcttcttcagctctgagaccaccgcagcccactccctagtggggacgccctactacatgtcaccggagaggatcca

SEQ ID NO: 64538 - DNA, 716 bp, Artificial Sequence
  derived and/or modified sequence
tattttgagagagcaggtttaccccagaacagtctgtggaaggtgtggggcagggaggagagctgggccgccctgaggacacagagggagaagggtgctgggagccagcctgcaagttctggggagcctcagggtgcctttgagggcacaacttgggaggccaagctcagcggttcgtgccctcgtgaggctggcatgcaggatggcaggacagcccggccacatgccccatggagggagttccaacaacctctgccacaccctggggcctgtgcatcctcctgacccacagaggcatcccaacacgctgtcttttcgctgctcgctggcggacttccagatcgaaaagaagataggccgaggacagttcagcgaggtgtacaaggccacctgcctgctggacaggaagacagtggctctgaagaaggtgcagatctttgagatgatggacgccaaggcgaggcaggactgtgtcaaggagatcggcctcttgaagcaactgaaccacccaaatatcatcaagtatttggactcgtttatcgaagacaacgagctgaacattgtgctggagttggctgacgcaggggacctctcgcagatgatcaagtactttaagaagcagaagcggctcatcccggagaggacagtatggaagtactttgtgcagctgtgcagcgccgtggagcacatgcattcacgccgggtgatgcaccgag

SEQ ID NO: 64539 - DNA, 2582 bp, Artificial Sequence
  derived and/or modified sequence
ttttgtctgccccttcctgcctgtgggaaggagagaaaattaggggaggccacgggcttgaaagctttccctgcatggaggccactggatgggattctagatgctcgcctgggacccaggttcgtgccctcgtgaggctggcatgcaggatggcaggacagcccggccacatgccccatggagggagttccaacaacctctgccacaccctggggcctgtgcatcctcctgacccacagaggcatcccaacacgctgtcttttcgctgctcgctggcggacttccagatcgaaaagaagataggccgaggacagttcagcgaggtgtacaaggccacctgcctgctggacaggaagacagtggctctgaagaaggtgcagatctttgagatgatggacgccaaggcgaggcaggactgtgtcaaggagatcggcctcttgaagcaactgaaccacccaaatatcatcaagtatttggactcgtttatcgaagacaacgagctgaacattgtgctggagttggctgacgcaggggacctctcgcagatgatcaagtactttaagaagcagaagcggctcatcccggagaggacagtatggaagtactttgtgcagctgtgcagcgccgtggagcacatgcattcacgccgggtgatgcaccgagacatcaagcctgccaacgtgttcatcacagccacgggcgtcgtgaagctcggtgaccttggtctgggccgcttcttcagctctgagaccaccgcagcccactccctagtggggacgccctactacatgtcaccggagaggatccatgagaacggctacaacttcaagtccgacatctggtccctgggctgtctgctgtacgagatggcagccctccagagccccttctatggagataagatgaatctcttctccctgtgccagaagatcgagcagtgtgactaccccccactccccggggagcactactccgagaagttacgagaactggtcagcatgtgcatctgccctgacccccaccagagacctgacatcggatacgtgcaccaggtggccaagcagatgcacatctggatgtccagcacctgagcgtggatgcaccgtgccttatcaaagccagcaccactttgccttacttgagtcgtcttctcttcgagtggccacctggtagcctagaacagctaagaccacagggttcagcaggttccccaaaaggctgcccagccttacagcagatgctgaaggcagagcagctgagggaggggcgctggccacatgtcactgatggtcagattccaaagtcctttctttatactgttgtggacaatctcagctgggtcaataagggcaggtggttcagcgagccacggcagccccctgtatctggattgtaatgtgaatctttagggtaattcctccagtgacctgtcaaggcttatgctaacaggagacttgcaggagaccgtgtgatttgtgtagtgagcctttgaaaatggttagtaccgggttcagtttagttcttagtatcttttcaatcaagctgtgtgcttaatttactctgttgtaaagggataaagtggaaatcatttttttccgtggagtggtgattctgctaacatttttatctacgttttataacttggtgagtgacgatgagagccctgcacctggccagagtgtcacaggcaaaaggcatcgggaagcaggagcatcttcttggcagccaggctgggccatcttctcctggacacctgctgtgtaccaggaacttcgtcacctccttgaatgctggcggttcatttcatgatcagtgttaagcattttcctccatgggaaggaagcatgggatatagaaaagcgaagggctgtcctttacaaattctggttctgcaacttcctagcgtgactttgggcttgggcaagtttcttagccgttctgagccttcatttcctcatctgtacaatgagattaatagtacctatcatctaccttcaggattgctgacagacagaatttgaaataaaatatgcaagttagctaatacaaaaagtagatgatccaaaaatggtagccactcacccttcacaaactgaagtccatggaccacggaagtcgagaattaatgtacacctgtatcatgtgtaggaaaccagaaatgtgttccttatttcttgttcccaaacaggattaactgtgaagactaatttataaatgtgaacctaagaaaactccacctctgaaggaaatcatttgaattttgtttttgtacgtaaagttaaccttccaattgtctgagctgtcgtcactgacttcatgacagtctggccctccagacaagagcagcgctggcatcgggcaggtgattcctgacacctgctgcctgcaggcattcactgaccaggcctttcctggaggaaacacccagggccgggcggctgctgtttccacacgtggactcggatctgctgtgacaccgtcagcccgacagtctctccatatgcagcctttcctctgtacttttctccatggttgaaataaaacagggtgactgggagttacttagaattcatgaagatttt

SEQ ID NO: 64540 - DNA, 2573 bp, Artificial Sequence
  derived and/or modified sequence
gagcgtgtcggcggccgggcgggcgggggcggcgtgtccgcgtgtcccggggtgtgcgcgtccccggcgggtgtgcgtgtgcaccccggagcgtctggtggcgttgttgggttcgtgccctcgtgaggctggcatgcaggatggcaggacagcccggccacatgccccatggagggagttccaacaacctctgccacaccctggggcctgtgcatcctcctgacccacagaggcatcccaacacgctgtcttttcgctgctcgctggcggacttccagatcgaaaagaagataggccgaggacagttcagcgaggtgtacaaggccacctgcctgctggacaggaagacagtggctctgaagaaggtgcagatctttgagatgatggacgccaaggcgaggcaggactgtgtcaaggagatcggcctcttgaagcaactgaaccacccaaatatcatcaagtatttggactcgtttatcgaagacaacgagctgaacattgtgctggagttggctgacgcaggggacctctcgcagatgatcaagtactttaagaagcagaagcggctcatcccggagaggacagtatggaagtactttgtgcagctgtgcagcgccgtggagcacatgcattcacgccgggtgatgcaccgagacatcaagcctgccaacgtgttcatcacagccacgggcgtcgtgaagctcggtgaccttggtctgggccgcttcttcagctctgagaccaccgcagcccactccctagtggggacgccctactacatgtcaccggagaggatccatgagaacggctacaacttcaagtccgacatctggtccctgggctgtctgctgtacgagatggcagccctccagagccccttctatggagataagatgaatctcttctccctgtgccagaagatcgagcagtgtgactaccccccactccccggggagcactactccgagaagttacgagaactggtcagcatgtgcatctgccctgacccccaccagagacctgacatcggatacgtgcaccaggtggccaagcagatgcacatctggatgtccagcacctgagcgtggatgcaccgtgccttatcaaagccagcaccactttgccttacttgagtcgtcttctcttcgagtggccacctggtagcctagaacagctaagaccacagggttcagcaggttccccaaaaggctgcccagccttacagcagatgctgaaggcagagcagctgagggaggggcgctggccacatgtcactgatggtcagattccaaagtcctttctttatactgttgtggacaatctcagctgggtcaataagggcaggtggttcagcgagccacggcagccccctgtatctggattgtaatgtgaatctttagggtaattcctccagtgacctgtcaaggcttatgctaacaggagacttgcaggagaccgtgtgatttgtgtagtgagcctttgaaaatggttagtaccgggttcagtttagttcttagtatcttttcaatcaagctgtgtgcttaatttactctgttgtaaagggataaagtggaaatcatttttttccgtggagtggtgattctgctaacatttttatctacgttttataacttggtgagtgacgatgagagccctgcacctggccagagtgtcacaggcaaaaggcatcgggaagcaggagcatcttcttggcagccaggctgggccatcttctcctggacacctgctgtgtaccaggaacttcgtcacctccttgaatgctggcggttcatttcatgatcagtgttaagcattttcctccatgggaaggaagcatgggatatagaaaagcgaagggctgtcctttacaaattctggttctgcaacttcctagcgtgactttgggcttgggcaagtttcttagccgttctgagccttcatttcctcatctgtacaatgagattaatagtacctatcatctaccttcaggattgctgacagacagaatttgaaataaaatatgcaagttagctaatacaaaaagtagatgatccaaaaatggtagccactcacccttcacaaactgaagtccatggaccacggaagtcgagaattaatgtacacctgtatcatgtgtaggaaaccagaaatgtgttccttatttcttgttcccaaacaggattaactgtgaagactaatttataaatgtgaacctaagaaaactccacctctgaaggaaatcatttgaattttgtttttgtacgtaaagttaaccttccaattgtctgagctgtcgtcactgacttcatgacagtctggccctccagacaagagcagcgctggcatcgggcaggtgattcctgacacctgctgcctgcaggcattcactgaccaggcctttcctggaggaaacacccagggccgggcggctgctgtttccacacgtggactcggatctgctgtgacaccgtcagcccgacagtctctccatatgcagcctttcctctgtacttttctccatggttgaaataaaacagggtgactgggagttacttagaattcatgaagatttt

SEQ ID NO: 64541 - DNA, 2580 bp, Artificial Sequence
  derived and/or modified sequence
cacccaccccagcccagagaggcgacccagctccctggaggcccaggcacctcatgtctgccctcaacccagagtggagcagaccttccctggagcttctcaggagccacttcaaaagttcgtgccctcgtgaggctggcatgcaggatggcaggacagcccggccacatgccccatggagggagttccaacaacctctgccacaccctggggcctgtgcatcctcctgacccacagaggcatcccaacacgctgtcttttcgctgctcgctggcggacttccagatcgaaaagaagataggccgaggacagttcagcgaggtgtacaaggccacctgcctgctggacaggaagacagtggctctgaagaaggtgcagatctttgagatgatggacgccaaggcgaggcaggactgtgtcaaggagatcggcctcttgaagcaactgaaccacccaaatatcatcaagtatttggactcgtttatcgaagacaacgagctgaacattgtgctggagttggctgacgcaggggacctctcgcagatgatcaagtactttaagaagcagaagcggctcatcccggagaggacagtatggaagtactttgtgcagctgtgcagcgccgtggagcacatgcattcacgccgggtgatgcaccgagacatcaagcctgccaacgtgttcatcacagccacgggcgtcgtgaagctcggtgaccttggtctgggccgcttcttcagctctgagaccaccgcagcccactccctagtggggacgccctactacatgtcaccggagaggatccatgagaacggctacaacttcaagtccgacatctggtccctgggctgtctgctgtacgagatggcagccctccagagccccttctatggagataagatgaatctcttctccctgtgccagaagatcgagcagtgtgactaccccccactccccggggagcactactccgagaagttacgagaactggtcagcatgtgcatctgccctgacccccaccagagacctgacatcggatacgtgcaccaggtggccaagcagatgcacatctggatgtccagcacctgagcgtggatgcaccgtgccttatcaaagccagcaccactttgccttacttgagtcgtcttctcttcgagtggccacctggtagcctagaacagctaagaccacagggttcagcaggttccccaaaaggctgcccagccttacagcagatgctgaaggcagagcagctgagggaggggcgctggccacatgtcactgatggtcagattccaaagtcctttctttatactgttgtggacaatctcagctgggtcaataagggcaggtggttcagcgagccacggcagccccctgtatctggattgtaatgtgaatctttagggtaattcctccagtgacctgtcaaggcttatgctaacaggagacttgcaggagaccgtgtgatttgtgtagtgagcctttgaaaatggttagtaccgggttcagtttagttcttagtatcttttcaatcaagctgtgtgcttaatttactctgttgtaaagggataaagtggaaatcatttttttccgtggagtggtgattctgctaacatttttatctacgttttataacttggtgagtgacgatgagagccctgcacctggccagagtgtcacaggcaaaaggcatcgggaagcaggagcatcttcttggcagccaggctgggccatcttctcctggacacctgctgtgtaccaggaacttcgtcacctccttgaatgctggcggttcatttcatgatcagtgttaagcattttcctccatgggaaggaagcatgggatatagaaaagcgaagggctgtcctttacaaattctggttctgcaacttcctagcgtgactttgggcttgggcaagtttcttagccgttctgagccttcatttcctcatctgtacaatgagattaatagtacctatcatctaccttcaggattgctgacagacagaatttgaaataaaatatgcaagttagctaatacaaaaagtagatgatccaaaaatggtagccactcacccttcacaaactgaagtccatggaccacggaagtcgagaattaatgtacacctgtatcatgtgtaggaaaccagaaatgtgttccttatttcttgttcccaaacaggattaactgtgaagactaatttataaatgtgaacctaagaaaactccacctctgaaggaaatcatttgaattttgtttttgtacgtaaagttaaccttccaattgtctgagctgtcgtcactgacttcatgacagtctggccctccagacaagagcagcgctggcatcgggcaggtgattcctgacacctgctgcctgcaggcattcactgaccaggcctttcctggaggaaacacccagggccgggcggctgctgtttccacacgtggactcggatctgctgtgacaccgtcagcccgacagtctctccatatgcagcctttcctctgtacttttctccatggttgaaataaaacagggtgactgggagttacttagaattcatgaagatttt

SEQ ID NO: 64542 - DNA, 1017 bp, Artificial Sequence
  derived and/or modified sequence
atggaggctaccgggtgggacagcagatgttcccccggtacccaagtccgcgctctggtgaggttagcatgcagaatggccggtcagcccggacacatgccccacggcggtagctcaaacaacctgtgccataccctgggcccagtacaccccccagacccacagcgtcacccaaataccctgtccttcaggtgctctctggccgattttcagatcgaaaagaagattggcaggggtcagttttctgaagtttataaagcaacctgcctgctcgatagaaaaactgtagccctaaaaaaggtccagattttcgaaatgatggatgccaaagcgaggcaggactgtgtcaaagagatcggcttgctcaaacagctgaaccaccccaacataataaaatacctggattcctttatcgaggacaacgaactgaacatagtgctagagctggcggatgccggagatttatcccaaatgatcaagtactttaagaagcagaaacggcttatcccggaaagaaccgtttggaagtacttcgtgcaattatgctctgccgtggaacatatgcacagcagacgagttatgcaccgagatatcaagccagccaatgtcttcattaccgccaccggcgtcgttaaactgggcgatttgggcctcggcagatttttcagttccgagacaacagccgctcactcattggttgggaccccgtactatatgtcccctgaacggatccacgagaacggctataacttcaagtcagacatttggtccttgggttgcctgctgtatgaaatggctgctctacagtctcccttctacggggataaaatgaatctttttagcctctgccagaagatcgagcagtgtgactaccctccactgccaggcgaacattacagtgaaaagctcagggagctggtaagtatgtgcatctgcccggacccccaccagcggcctgatattgggtacgtgcatcaggtcgccaaacagatgcacatttggatgtctagtacctag

SEQ ID NO: 64543 - DNA, 1017 bp, Artificial Sequence
  derived and/or modified sequence
atggaggccaccggctgggacagcagatgcagccccggcacccaggtgagagccctggtgagactggcctgcagaatggccggccagcccggccacatgccccacggcggcagcagcaacaacctgtgccacaccctgggccccgtgcacccccccgacccccagagacaccccaacaccctgagcttcagatgcagcctggccgacttccagatcgagaagaagatcggcagaggccagttcagcgaggtgtacaaggccacctgcctgctggacagaaagaccgtggccctgaagaaggtgcagatcttcgagatgatggacgccaaggccagacaggactgcgtgaaggagatcggcctgctgaagcagctgaaccaccccaacatcatcaagtacctggacagcttcatcgaggacaacgagctgaacatcgtgctggagctggccgacgccggcgacctgagccagatgatcaagtacttcaagaagcagaagagactgatccccgagagaaccgtgtggaagtacttcgtgcagctgtgcagcgccgtggagcacatgcacagcagaagagtgatgcacagagacatcaagcccgccaacgtgttcatcaccgccaccggcgtggtgaagctgggcgacctgggcctgggcagattcttcagcagcgagaccaccgccgcccacagcctggtgggcaccccctactacatgagccccgagagaatccacgagaacggctacaacttcaagagcgacatctggagcctgggctgcctgctgtacgagatggccgccctgcagagccccttctacggcgacaagatgaacctgttcagcctgtgccagaagatcgagcagtgcgactacccccccctgcccggcgagcactacagcgagaagctgagagagctggtgagcatgtgcatctgccccgacccccaccagagacccgacatcggctacgtgcaccaggtggccaagcagatgcacatctggatgagcagcacctag

SEQ ID NO: 64544 - DNA, 339 bp, Artificial Sequence
  derived and/or modified sequence
atgtttcctagccctgccctgacacccacacccttcagtgttaaggacatattgaacctggaacagcagcagcgctccttagcagcagcgggcgaactgtctgcgcgattagaggcaaccctggccccatcctcctgcatgctggcagcgtttaaacccgaggcttatgcgggacctgaggccgctgcccccggcctcccagagcttagggctgaacttggtcgcgcccccagcccagctaaatgtgcttcagccttccccgctgcaccagcattttatccaagagcctactccgatcccgaccctgccaaggatccacgcgccgagaagaaggcctag

SEQ ID NO: 64545 - DNA, 339 bp, Artificial Sequence
  derived and/or modified sequence
atgttccccagccctgccctgacccccacccccttctctgtgaaggacatcctgaacctggagcagcagcagaggagcctggccgccgccggggagctgagcgcccggctggaggccaccctggcccccagcagctgcatgctggccgccttcaagccagaggcctatgccggccctgaggccgccgcccctggcctgcctgagctgcgggcagagctgggccgggcccccagccctgccaagtgtgccagcgccttccctgctgccccagccttctacccccgggcctacagcgaccctgaccctgccaaggaccccagggctgagaagaaggcctag

SEQ ID NO: 64546 - DNA, 339 bp, Artificial Sequence
  derived and/or modified sequence
atgttccccagccccgccctgacccccacccccttcagcgtgaaggatattctcaatctggaacaacagcagcgaagccttgcggccgccggcgagctgtctgcgcgtctggaggccacattggctccatcgagttgcatgctcgcagctttcaaaccagaggcctacgctggccctgaagcagcggcccccggacttccagaactccgtgccgaactcgggagagccccctctcccgcaaagtgcgcttccgctttccccgcggcacccgccttctacccccgtgcttattctgatccggaccctgccaaagaccccagggccgaaaagaaggcctag

SEQ ID NO: 64547 - DNA, 339 bp, Artificial Sequence
  derived and/or modified sequence
atgtttccgagtcccgcactcacacctacacccttttcagtcaaggacatcctgaatctagagcagcagcagaggtccctggcagccgctggagagctcagcgccaggttagaggccaccctcgcacccagcagttgcatgctggctgcctttaagcctgaggcctacgccggacccgaggctgccgctcccggactgcctgaactgcgcgcagaactcggcagagccccaagcccagcaaagtgtgcctccgcctttcccgctgcgcctgcattctacccacgcgcttacagcgatcccgatccagcgaaagatccccgagcagaaaaaaaggcttag

SEQ ID NO: 64548 - DNA, 339 bp, Artificial Sequence
  derived and/or modified sequence
atgttccccagccccgccctgacccccacccccttcagcgtgaaggacatcctgaacctggagcagcagcagagaagcctggccgccgccggcgagctgagcgccagactggaggccaccctggcccccagcagctgcatgctggccgccttcaagcccgaggcctacgccggccccgaggccgccgcccccggcctgcccgagctgagagccgagctgggcagagcccccagccccgccaagtgcgccagcgccttccccgccgcccccgccttctaccccagagcctacagcgaccccgaccccgccaaggaccccagagccgagaagaaggcctag

SEQ ID NO: 64549 - protein, 151 aa, Artificial Sequence
  derived and/or modified sequence
MFPSPALTPTPFSVKDILNLEQQQRSLAAAGELSARLEATLAPSSCMLAAFKPEAYAGPEAAAPGLPELRAELGRAPSPAKCASAFPAAPAFYPRAYSDPDPAKDPRAEKKGCELPRGQRPPVLFSSALSQPDFLQMLSETCRWLPVHLAE

SEQ ID NO: 64550 - DNA, 456 bp, Artificial Sequence
  derived and/or modified sequence
atgtttccctcccccgctctcacacctaccccatttagtgtgaaagatatactcaaccttgagcaacagcagaggagtctagctgcagcgggggagctgtccgctagactcgaggcgacactcgcccctagcagttgcatgctcgctgcttttaaacccgaggcatacgcaggtccagaggctgctgctcctggcctgccggaactgagggcggagcttgggagagccccatcccctgcaaagtgtgcttccgcctttcccgcagcccctgccttctacccacgcgcctatagcgatccagatccagcaaaggatccaagggccgagaagaaaggctgcgagctgccacgcggccagaggccaccagttcttttttcttccgcactttcccaaccagactttcttcagatgctgtcggaaacttgccgttggttgcccgtgcacctggcggaatag

SEQ ID NO: 64551 - DNA, 456 bp, Artificial Sequence
  derived and/or modified sequence
atgttccccagccctgccctgacccccacccccttctctgtgaaggacatcctgaacctggagcagcagcagaggagcctggccgccgccggggagctgagcgcccggctggaggccaccctggcccccagcagctgcatgctggccgccttcaagccagaggcctatgccggccctgaggccgccgcccctggcctgcctgagctgcgggcagagctgggccgggcccccagccctgccaagtgtgccagcgccttccctgctgccccagccttctacccccgggcctacagcgaccctgaccctgccaaggaccccagggctgagaagaagggctgtgagctgccccggggccagaggcctcctgtgctcttcagcagcgccctgagccagcctgacttcctgcagatgctgtctgagacctgccgctggctgcctgtgcacctggccgagtag

SEQ ID NO: 64552 - DNA, 456 bp, Artificial Sequence
  derived and/or modified sequence
atgttccccagccccgccctgacccccacccccttcagcgtgaaggacattttaaatcttgagcagcagcagcggtctctggcagcagccggtgagttgtccgccaggctcgaggcaactctggctccttcttcctgcatgttggccgctttcaagcctgaggcctatgctggccccgaagcagccgctccaggcctaccagagctgagggccgaattgggaagggccccttctcctgctaaatgtgcctccgctttccctgccgcacctgccttctatcccagagcctactcagatccggatcccgccaaagatcccagggcagaaaaaaaaggctgtgagttgccgagaggccagcgacctccagttttgtttagctctgccctttcacagcccgatttccttcaaatgctgagcgagacgtgtcggtggttacctgtccatctggctgaatag

SEQ ID NO: 64553 - DNA, 1027 bp, Artificial Sequence
  derived and/or modified sequence
acatccagagctggccgacgggtgcgcgggcgggcggcggcaccatgcagggaagctgccaggggccgtgggcagcgccgctttctgccgcccacctggcgctgtgagactggcgctgccaccatgttccccagccctgctctcacgcccacgcccttctcagtcaaagacatcctaaacctggaacagcagcagcgcagcctggctgccgccggagagctctctgcccgcctggaggcgaccctggcgccctcctcctgcatgctggccgccttcaagccagaggcctacgctgggcccgaggcggctgcgccgggcctcccagagctgcgcgcagagctgggccgcgcgccttcaccggccaagtgtgcgtctgcctttcccgccgcccccgccttctatccacgtgcctacagcgaccccgacccagccaaggaccctagagccgaaaagaaagggtgtgaactgccccgagggcagagacctcccgttttgttctccagcgccttgagccagcctgactttctacaaatgctgagtgagacgtgtcggtggctcccagtgcacttggcagagtgagccgcagccagctgggcgctccaggcaggacacagtggcctccacgaggatcccttaccattactgtgcggccgcgctccgtaggtcaagccgctcttaccaagcgtctctctgcctctctgttccccctcagagctgtgcgcgctgcagaaggcggtggagctggagaagacagaggcggacaacgcggagcggccccgggcgcgacggcggaggaagccgcgcgtgctcttctcgcaggcgcaggtctatgagctggagcggcgcttcaagcagcagcggtacctgtcggcccccgaacgcgaccagctggccagcgtgctgaaactcacgtccacgcaggtcaagatctggttccagaaccggcgctacaagtgcaagcggcagcggcaggaccagactctggagctggtggggctgcccccgccgccgccgccgcctgcccgca

SEQ ID NO: 64554 - DNA, 456 bp, Artificial Sequence
  derived and/or modified sequence
atgtttccgtcgcctgctcttaccccaacccccttcagcgtaaaggacatcctaaatctggagcagcagcagaggagcctggccgctgcaggagagctgtcggcaagattggaagcgactctcgcaccctcctcctgtatgttggccgctttcaaaccggaggcatacgccggtccagaggcagcagccccaggacttcctgagctccgtgcggagctcggcagagcacctagtcccgcaaagtgcgcctccgccttccctgcggctcccgctttttatcctcgggcatattccgacccagatcccgctaaggacccacgtgctgagaagaagggatgtgagctaccaaggggtcaacgacctcccgtcctttttagctccgctctctctcagccggatttccttcagatgctttcagagacatgcagatggctccctgtccacctggcagaatag

SEQ ID NO: 64555 - DNA, 456 bp, Artificial Sequence
  derived and/or modified sequence
atgttccccagccccgccctgacccccacccccttcagcgtgaaggacatcctgaacctggagcagcagcagagaagcctggccgccgccggcgagctgagcgccagactggaggccaccctggcccccagcagctgcatgctggccgccttcaagcccgaggcctacgccggccccgaggccgccgcccccggcctgcccgagctgagagccgagctgggcagagcccccagccccgccaagtgcgccagcgccttccccgccgcccccgccttctaccccagagcctacagcgaccccgaccccgccaaggaccccagagccgagaagaagggctgcgagctgcccagaggccagagaccccccgtgctgttcagcagcgccctgagccagcccgacttcctgcagatgctgagcgagacctgcagatggctgcccgtgcacctggccgagtag

SEQ ID NO: 64556 - protein, 929 aa, Artificial Sequence
  derived and/or modified sequence
MLGPHLPPPPLAPSEGRPTPCAFQIPDGSYRCLALEAEESSGEEGLQGEVGPTDLEEDEGVSRSGDDSACRVTQGTPQLPKALGIQPPSCSREEQGASQHDDRASQDWDVVKAGQMMTASPSPGPGPRVAQKPALGRSTSLTEKDLKEAKARSQQIAAQLTTPPSSNSRGVQLFNRRRQRVNEFTLESHGQRGQKPSQESLRVLPSSLPGHAPGLSLSSTSLPEPGPPRHPSPQSPDRGVPGHSMEGYSEEASLLRHLEKVASEEEEVPLVVYLKENAALLTANGLHLSQNREAQQSSPAPPPAEVHSPAADVNQNLASPSATLTTPTSNSSHNPPATDVNQNPPATVVPQSLPLSSIQQNSSEAQLPSNGTGPASKPSTLCADGQPQAPAEEVRCSTLLIDKVSTPATTTSTFSREATLIPSSRPPASDFMSSSLLIDIQPNTLVVSADQEMSGRAAATTPTKVYSEVHFTLAKPPSVVNRTARPFGIQAPGGTSQMERSPMLERRHFGEKAPAPQPPSLPDRSPRPQRHIMSRSPMVERRMMGQRSPASERRPLGNFTAPPTYTETLSTAPLASWVRSPPSYSVLYPSSDPKSSHLKGQAVPASKTGILEESMARRGSRKSMFTFVEKPKVTPNPDLLDLVQTADEKRRQRDQGEVGVEEEPFALGAEASNFQQEPAPRDRASPAAAEEVVPEWASCLKSPRIQAKPKPKPNQNLSEASGKGAELYARRQSRMEKYVIESSSHTPELARCPSPTMSLPSSWKYPTNAPGAFRVASRSPARTPPASLYHGYLPENGVLRPEPTKQPPYQLRPSLFVLSPIKEPAKVSPRAASPAKPSSLDLVPNLPKGALPPSPALPRPSRSSPGLYTSPGQDSLQPTAVSPPYGGDISPVSPSRAWSPRAKQAPRPSFSTRNAGIEAQVWKPSFCFK

SEQ ID NO: 64557 - DNA, 2790 bp, Artificial Sequence
  derived and/or modified sequence
atgctgggcccccacctgccccccccccccctggcccccagcgagggcagacccaccccctgcgccttccagatccccgacggcagctacagatgcctggccctggaggccgaggagagcagcggcgaggagggcctgcagggcgaggtgggccccaccgacctggaggaggacgagggcgtgagcagaagcggcgacgacagcgcctgcagagtgacccagggcaccccccagctgcccaaggccctgggcatccagccccccagctgcagcagagaggagcagggcgccagccagcacgacgacagagccagccaggactgggacgtggtgaaggccggccagatgatgaccgccagccccagccccggccccggccccagagtggcccagaagcccgccctgggcagaagcaccagcctgaccgagaaggacctgaaggaggccaaggccagaagccagcagatcgccgcccagctgaccaccccccccagcagcaacagcagaggcgtgcagctgttcaacagaagaagacagagagtgaacgagttcaccctggagagccacggccagagaggccagaagcccagccaggagagcctgagagtgctgcccagcagcctgcccggccacgcccccggcctgagcctgagcagcaccagcctgcccgagcccggcccccccagacaccccagcccccagagccccgacagaggcgtgcccggccacagcatggagggctacagcgaggaggccagcctgctgagacacctggagaaggtggccagcgaggaggaggaggtgcccctggtggtgtacctgaaggagaacgccgccctgctgaccgccaacggcctgcacctgagccagaacagagaggcccagcagagcagccccgcccccccccccgccgaggtgcacagccccgccgccgacgtgaaccagaacctggccagccccagcgccaccctgaccacccccaccagcaacagcagccacaacccccccgccaccgacgtgaaccagaacccccccgccaccgtggtgccccagagcctgcccctgagcagcatccagcagaacagcagcgaggcccagctgcccagcaacggcaccggccccgccagcaagcccagcaccctgtgcgccgacggccagccccaggcccccgccgaggaggtgagatgcagcaccctgctgatcgacaaggtgagcacccccgccaccaccaccagcaccttcagcagagaggccaccctgatccccagcagcagaccccccgccagcgacttcatgagcagcagcctgctgatcgacatccagcccaacaccctggtggtgagcgccgaccaggagatgagcggcagagccgccgccaccacccccaccaaggtgtacagcgaggtgcacttcaccctggccaagccccccagcgtggtgaacagaaccgccagacccttcggcatccaggcccccggcggcaccagccagatggagagaagccccatgctggagagaagacacttcggcgagaaggcccccgccccccagccccccagcctgcccgacagaagccccagaccccagagacacatcatgagcagaagccccatggtggagagaagaatgatgggccagagaagccccgccagcgagagaagacccctgggcaacttcaccgccccccccacctacaccgagaccctgagcaccgcccccctggccagctgggtgagaagcccccccagctacagcgtgctgtaccccagcagcgaccccaagagcagccacctgaagggccaggccgtgcccgccagcaagaccggcatcctggaggagagcatggccagaagaggcagcagaaagagcatgttcaccttcgtggagaagcccaaggtgacccccaaccccgacctgctggacctggtgcagaccgccgacgagaagagaagacagagagaccagggcgaggtgggcgtggaggaggagcccttcgccctgggcgccgaggccagcaacttccagcaggagcccgcccccagagacagagccagccccgccgccgccgaggaggtggtgcccgagtgggccagctgcctgaagagccccagaatccaggccaagcccaagcccaagcccaaccagaacctgagcgaggccagcggcaagggcgccgagctgtacgccagaagacagagcagaatggagaagtacgtgatcgagagcagcagccacacccccgagctggccagatgccccagccccaccatgagcctgcccagcagctggaagtaccccaccaacgcccccggcgccttcagagtggccagcagaagccccgccagaaccccccccgccagcctgtaccacggctacctgcccgagaacggcgtgctgagacccgagcccaccaagcagcccccctaccagctgagacccagcctgttcgtgctgagccccatcaaggagcccgccaaggtgagccccagagccgccagccccgccaagcccagcagcctggacctggtgcccaacctgcccaagggcgccctgccccccagccccgccctgcccagacccagcagaagcagccccggcctgtacaccagccccggccaggacagcctgcagcccaccgccgtgagccccccctacggcggcgacatcagccccgtgagccccagcagagcctggagccccagagccaagcaggcccccagacccagcttcagcaccagaaacgccggcatcgaggcccaggtgtggaagcccagcttctgcttcaagtag

SEQ ID NO: 64558 - DNA, 2058 bp, Artificial Sequence
  derived and/or modified sequence
atggagggctacagcgaggaggccagcctgctgagacacctggagaaggtggccagcgaggaggaggaggtgcccctggtggtgtacctgaaggagaacgccgccctgctgaccgccaacggcctgcacctgagccagaacagagaggcccagcagagcagccccgcccccccccccgccgaggtgcacagccccgccgccgacgtgaaccagaacctggccagccccagcgccaccctgaccacccccaccagcaacagcagccacaacccccccgccaccgacgtgaaccagaacccccccgccaccgtggtgccccagagcctgcccctgagcagcatccagcagaacagcagcgaggcccagctgcccagcaacggcaccggccccgccagcaagcccagcaccctgtgcgccgacggccagccccaggcccccgccgaggaggtgagatgcagcaccctgctgatcgacaaggtgagcacccccgccaccaccaccagcaccttcagcagagaggccaccctgatccccagcagcagaccccccgccagcgacttcatgagcagcagcctgctgatcgacatccagcccaacaccctggtggtgagcgccgaccaggagatgagcggcagagccgccgccaccacccccaccaaggtgtacagcgaggtgcacttcaccctggccaagccccccagcgtggtgaacagaaccgccagacccttcggcatccaggcccccggcggcaccagccagatggagagaagccccatgctggagagaagacacttcggcgagaaggcccccgccccccagccccccagcctgcccgacagaagccccagaccccagagacacatcatgagcagaagccccatggtggagagaagaatgatgggccagagaagccccgccagcgagagaagacccctgggcaacttcaccgccccccccacctacaccgagaccctgagcaccgcccccctggccagctgggtgagaagcccccccagctacagcgtgctgtaccccagcagcgaccccaagagcagccacctgaagggccaggccgtgcccgccagcaagaccggcatcctggaggagagcatggccagaagaggcagcagaaagagcatgttcaccttcgtggagaagcccaaggtgacccccaaccccgacctgctggacctggtgcagaccgccgacgagaagagaagacagagagaccagggcgaggtgggcgtggaggaggagcccttcgccctgggcgccgaggccagcaacttccagcaggagcccgcccccagagacagagccagccccgccgccgccgaggaggtggtgcccgagtgggccagctgcctgaagagccccagaatccaggccaagcccaagcccaagcccaaccagaacctgagcgaggccagcggcaagggcgccgagctgtacgccagaagacagagcagaatggagaagtacgtgatcgagagcagcagccacacccccgagctggccagatgccccagccccaccatgagcctgcccagcagctggaagtaccccaccaacgcccccggcgccttcagagtggccagcagaagccccgccagaaccccccccgccagcctgtaccacggctacctgcccgagaacggcgtgctgagacccgagcccaccaagcagcccccctaccagctgagacccagcctgttcgtgctgagccccatcaaggagcccgccaaggtgagccccagagccgccagccccgccaagcccagcagcctggacctggtgcccaacctgcccaagggcgccctgccccccagccccgccctgcccagacccagcagaagcagccccggcctgtacaccagccccggccaggacagcctgcagcccaccgccgtgagccccccctacggcggcgacatcagccccgtgagccccagcagagcctggagccccagagccaagcaggcccccagacccagcttcagcaccagaaacgccggcatcgaggcccaggtgtggaagcccagcttctgcttcaagtag

SEQ ID NO: 64559 - DNA, 2790 bp, Artificial Sequence
  derived and/or modified sequence
atgttgggcccacatttacctcccccccccctggcaccttccgaaggtcggcctacaccatgtgctttccagatccctgatggttcctacaggtgtctagctcttgaggccgaggagtcatctggagaggaaggcctgcagggagaagttggcccgaccgacctggaggaagatgagggcgtgtcacgaagcggagacgacagcgcctgtagagtaactcagggaacgccacagcttcctaaagcgttgggcatccagccacctagctgttcacgggaggagcagggcgcatcacaacacgatgaccgcgcaagtcaggactgggacgtggtgaaagccgggcagatgatgacggctagcccaagtcctggtcctggacccagagtcgctcagaaacctgcgctggggcggtctaccagcctcaccgaaaaagacctgaaggaggccaaggccagatcccagcagatcgctgctcagctgactacccctccctcatcaaattctcgcggtgttcagcttttcaaccgtagaagacaaagggtgaacgaattcacactggaaagccacgggcagagaggacagaaacctagccaggagtcactgcgagtgctgccctcaagtctgccggggcacgcccccgggttaagtctatcttccactagcctgcctgagccaggacccccacgccatccaagtcctcagtcccctgataggggcgtgcccgggcacagtatggagggttacagcgaggaggccagtctgttgcgacatctggaaaaggtggctagcgaggaagaagaagttcctcttgtggtctacctgaaggaaaacgctgcgctcctgaccgccaatggtctacatctgtctcagaacagagaagctcagcagtcctctcctgctccgccacctgcggaagtacatagccccgccgctgatgtaaaccagaacctcgctagtcctagcgcaaccctcacaactcctacttccaactcttctcataaccctcccgcgaccgatgtcaaccagaatcctccggcgaccgtcgttccacagagtcttccactgtcatccatccagcagaattcaagcgaagcccaactaccaagcaacgggaccgggccagccagtaaaccgagtaccttatgtgctgatgggcaacctcaggccccagctgaagaagtaaggtgctccacattactgatagacaaggtctcaacgccagccactacaactagcaccttctcaagggaggctactctcataccctcctcccgacctccagctagcgatttcatgagcagttccctgctgatcgatattcagccaaacactttggtcgttagcgctgatcaggagatgtcaggacgtgcagccgctactacgccaacgaaggtatatagcgaagtgcacttcactctggctaagcccccgtccgtcgtaaacagaaccgctagacccttcggcatacaggcgcccggaggaacatcgcaaatggaacggtccccaatgctggaacggcggcacttcggcgaaaaggctccagccccccagcctccctctctaccagatagaagcccaagacctcaaagacatattatgagtcgatcacctatggttgagagaagaatgatggggcaaagatctcctgcatctgagagacggcctcttggcaactttacggcccctcccacctacactgagactctgtcgacagcaccactggcctcttgggtacgtagccctccttcttatagcgtattgtaccccagcagtgatccgaagagctcccaccttaaaggtcaagcggttcctgccagcaagacaggcattctcgaggaatcaatggcccgacgtggcagccgcaagtcaatgtttacattcgtagagaaacccaaagttacacctaatccagacctgcttgaccttgttcaaacagccgacgagaaacgacgacagcgggatcagggggaagtgggggttgaggaggaaccctttgccttgggggccgaggcatccaattttcaacaggagcctgctccgcgggatcgggcttccccggccgccgctgaggaggtggtgcctgagtgggcgtcttgcctgaagtccccgcgaattcaagccaaacctaaaccaaagccaaaccagaatctcagtgaggctagtggtaagggcgcagagctttatgccaggagacagagtcggatggagaaatatgtcatcgagagctcctcccatactcccgaactagcccgctgtcctagcccaactatgtcgctgccaagttcctggaaatacccgaccaatgctccaggagcatttcgggttgcctcaaggtcccctgcaagaactcccccagcgtctctctaccacggctatctaccggagaacggggtgcttcgacccgagcctacaaaacagccaccataccagcttagaccatctctcttcgtcctgtccccaatcaaggaaccagccaaggtcagtcccagagccgcaagtcccgcaaagccttctagtctggacctggtccccaacttacctaagggagcgctgcccccttcaccagcactcccaagaccaagcaggagcagccccggcctctatacttccccaggccaggacagtctccagcctacggccgtctcccccccttacggcggtgatatatcccccgtttctccaagtagagcttggagtccccgggccaagcaagccccaagaccatccttctcaacacgaaacgccggaattgaagctcaggtctggaaaccatctttttgtttcaagtag

SEQ ID NO: 64560 - DNA, 2058 bp, Artificial Sequence
  derived and/or modified sequence
atggagggttattctgaggaggcgagcctgctcagacacctggagaaagttgccagtgaagaggaggaggtgcccctggtggtttacttgaaagagaacgcagcactgttaactgctaacggtctgcatctgtcacagaaccgcgaggcacagcagagtagcccggccccacctccagcagaggtgcacagtcccgccgctgatgtgaatcagaacctagcgagcccttctgcaactctaacaaccccaactagcaattcatcgcacaaccctcctgcaacggacgtcaaccagaaccccccagccacagtagtccctcagagcctgcctttgtcctctattcagcagaattcttccgaggcccagctgccgagtaacgggaccggaccagcctccaagccttccaccctatgcgccgacggccagccacaagcccccgctgaagaagtgagatgcagcacactgctgatcgataaggtgtcgacccctgccaccacaacttctactttcagtcgtgaggcaacattgattccgagttccaggccaccagctagcgattttatgtcttccagtttacttattgacatccaaccaaatacactagtcgtctccgccgaccaggagatgtcaggccgggccgctgctactacccccactaaagtctacagtgaggttcatttcacacttgccaaacctccatcagtcgtgaaccgaaccgcaaggccctttggcatccaggcccccggcgggaccagccagatggaacgtagtcccatgctagaacgaagacattttggcgaaaaggccccggcaccacagccacctagcctgcctgaccggtctccgcgaccccagagacacattatgtcacgctcgccgatggtggagcggcgaatgatggggcagcggtctcctgcttctgagcgccgacccctggggaatttcaccgccccgcccacatacacagagaccctgagcactgcaccactcgctagttgggtaaggagtccccctagttactctgtcctatacccatcctcagaccctaagtcttctcacttaaagggacaagctgtgcccgcctccaaaactggtattctcgaagagtctatggcacgccgcgggtcacgtaagtctatgttcacattcgtggaaaagccaaaggtgaccccaaatccagaccttctggatcttgtccaaaccgccgatgaaaagaggagacaaagggatcagggcgaggtgggcgtcgaggaggaaccctttgcccttggtgccgaggctagtaattttcagcaggagcccgccccccgagacagagccagccccgctgctgccgaggaagtggtgccagaatgggcatcgtgcctgaaatccccacggattcaggccaaaccaaagccaaagccaaaccagaacctatctgaagcctcaggcaaaggggccgaactgtatgcccgccgccaaagtcgcatggagaagtatgttatcgagagtagctcacacacccctgaattagccagatgtccatccccaacaatgagtctgccatcatcttggaagtacccaaccaatgcccctggagcttttcgggtcgcttcccgaagccctgcacgtacgcccccagccagcctgtaccatgggtacctcccagagaacggtgtactacgtccagaaccaactaaacagcccccttatcagctgaggccctccctttttgtgctatccccaatcaaggagcccgccaaagtgtcccctcgagccgccagccctgcaaaacccagtagcctggacctggtgcccaatctgcctaaaggggcgttacctccaagccctgctttaccaagaccatccagaagtagtccaggactgtatacctcacctgggcaggatagcctccagcccacagcagtctccccaccttatggtggcgatatctcacccgtttcgccctcccgggcctggagcccgagagctaaacaagctcccaggccctccttttcgacccgcaacgccgggattgaggcccaggtgtggaagccctccttctgctttaaatag

SEQ ID NO: 64561 - DNA, 2790 bp, Artificial Sequence
  derived and/or modified sequence
atgttgggcccccatttgcccccaccaccgctggcgccctctgaggggaggccgaccccttgcgctttccaaatcccagatgggtcttaccggtgtctggcattagaagctgaagaaagctcgggcgaagaagggctgcagggtgaggtcggccctaccgatctcgaagaggatgagggagtgtctcgttcaggcgacgattccgcctgccgagtgacccaaggcactccacagctcccaaaggcactgggcatccagcctccatcctgttccagggaagagcagggggcatcacagcatgatgatagggcctctcaagactgggacgtggtcaaggccggacagatgatgaccgcctccccgtcgcccggaccaggaccaagggtggcacaaaaacctgccctcggacgatcaacaagtctgacagaaaaagatcttaaggaggccaaggcccgtagccaacagattgccgcccagttgaccacaccgccaagttctaatagccgcggagtacagctctttaaccgccgacgccagagagtaaacgaatttactctcgagagccatggccagagaggtcagaagcccagccaggaatccctcagagtactacccagtagcctgcctggccacgcccctggactatccttaagttccacctctttgcccgaacccggaccccctcgccacccttctccacagagccccgaccgaggcgtgcccggccatagcatggagggatactccgaggaggcgagtctcttgcggcatcttgagaaggtcgcaagcgaagaagaagaagtgcccctggttgtgtatctcaaggaaaacgccgctctcctgacagcgaacgggctgcacctgagccagaatcgggaggcacagcagagttctcccgcccctcctcccgccgaggtacactctccggccgcggacgtcaaccaaaatctggcatcaccatccgcgaccttgacaactcctacctccaattctagtcataatcctccagctacggacgtgaatcagaaccctcctgcaactgttgtgcctcaatcactccccctcagttccatccaacagaattcgtccgaagcccaactgccttctaatggcacaggaccagcatcaaaaccttctactctttgcgcagatgggcagccacaggcccccgccgaggaagtccggtgctcaacgctgcttatcgataaggtgagtacccccgccactacaacatcgactttttcacgcgaagccactttgatcccctcgagcaggcccccagcaagcgactttatgagcagttccctgctcatcgatatccaacctaataccctcgtcgtgtccgcagatcaggaaatgtcaggcagggctgccgccacaacaccgaccaaggtatatagtgaggtgcacttcactctggccaaacccccttcagttgtcaatcgtactgcaagaccatttggtatccaagcaccaggcggaacctctcagatggagcggtccccaatgctcgaacgacgccatttcggcgagaaagcacctgcgccacagcccccctcgctcccagaccgatcacctcgccctcagcgacacatcatgtccagatccccaatggtcgagcgccgcatgatggggcagcgttctcctgcatcagagaggaggcctctaggcaatttcacggcaccccccacctacacagagaccctctccacagcacccctggcaagctgggtacggtcaccgccctcttattctgtcctctacccttcttccgacccaaagagctctcatctcaaggggcaagctgttcctgcgagcaagacaggcatcctggaggaatccatggccaggaggggaagccgcaaatcgatgtttacttttgtggagaagcctaaagttactccaaacccagatctgctggatctagtacaaacagctgatgagaaaaggagacagcgcgatcagggggaggtgggggtggaggaagaaccattcgccctgggcgccgaggcctcgaactttcagcaggaacccgcgcctagggaccgggcgagcccggctgctgccgaagaggtggtgccagaatgggcttcatgcctgaaatcaccacgcattcaagcaaaaccaaagccgaagcctaaccaaaacttgagcgaagccagcggcaagggagccgagctttacgccagaaggcagagtaggatggagaaatatgtgatcgagtcatcaagtcacacccctgagttggctagatgcccaagtcctacaatgtccctgccaagttcctggaaatatcccactaacgcgccgggggcttttcgggtggcaagcagaagtcccgctcgaactccgcccgcctctctatatcatggatacctccccgaaaacggtgtgctgaggccagaaccaaccaaacaacccccctaccaactaagaccctccttgttcgtcctgtcacccataaaagagcctgcgaaagtttcccccagagccgcgtcaccagccaagccaagttcattagatttggtgcccaacctgcccaagggggccctgcccccctctcccgcactgcccaggcctagtaggagctccccgggattatacacaagccccggacaggactcgctgcaacctactgcagtctcccctccttacggcggtgatatatcccccgtgagcccgtcacgcgcgtggagtccaagggccaagcaggcaccccggccttccttctccacccggaacgcaggcatagaggctcaggtttggaagccctctttttgtttcaaatag

SEQ ID NO: 64562 - DNA, 2790 bp, Artificial Sequence
  derived and/or modified sequence
atgctgggcccccacctgcccccaccacccctggcccccagcgagggccggcccaccccctgtgccttccagatcccagatggcagctaccgctgcctggccctggaggccgaggagagcagtggagaggagggcctgcagggcgaggtgggccccacagacctggaggaggatgagggcgtgagccgctctggagatgacagcgcctgccgggtgacccagggcaccccccagctgcccaaggccctgggcatccagccccccagctgcagccgggaggagcagggcgccagccagcatgatgaccgggccagccaggactgggatgtggtgaaggccggccagatgatgacagccagccccagccctggccctggcccccgggtggcccagaagccagccctgggccgcagcaccagcctgacagagaaggacctgaaggaggccaaggcccggagccagcagattgctgcccagctgaccaccccacccagcagcaacagccggggcgtgcagctgttcaacagaagacggcagagggtgaatgagttcaccctggagagccacggccagaggggccagaagcccagccaggagagcctgcgggtgctgcccagcagcctgcccggccacgcccctggcctgagcctgagcagcaccagcctgcctgagcccggccccccaagacaccccagcccccagagcccagacagaggagtgcccggccacagcatggagggctacagcgaggaggccagcctgctgcggcacctggagaaggtggccagcgaggaggaggaggtgcccctggtggtgtacctgaaggaaaatgctgccctgctgacagccaacggcctgcacctgagccagaaccgggaggcccagcagagcagccctgcccctcctcctgctgaggtgcacagccctgctgctgatgtgaaccagaacctggccagccccagcgccaccctgaccacccccaccagcaacagcagccacaaccccccagccacagatgtgaaccagaaccccccagccaccgtggtgccccagagcctgcccctgagcagcatccagcagaacagcagcgaggcccagctgcccagcaatggcaccggccctgccagcaagcccagcaccctgtgtgctgatggccagccccaggccccagctgaggaggtgcgctgcagcaccctgctgattgacaaggtgtccaccccagccaccaccaccagcaccttcagccgggaggccaccctcatccccagcagccggcccccagccagtgacttcatgagcagcagcctgctgattgacatccagcccaacaccctggtggtgtctgctgaccaggagatgagcggccgggccgccgccaccacccccaccaaggtgtacagcgaggtgcacttcaccctggccaagccacccagcgtggtgaacagaacagcccggcccttcggcatccaggcccctgggggcaccagccagatggagaggagccccatgctggagcggcggcactttggagagaaggccccagccccccagccccccagcctgcctgacaggagcccccggccccagaggcacatcatgagccgcagccccatggtggagaggaggatgatgggccagaggagccctgccagcgagcggcggcccctgggcaacttcaccgccccacccacctacacagagaccctgagcacagcccccctggcctcctgggtgcgcagccccccatcctacagcgtgctgtaccccagcagtgaccccaagagcagccacctgaagggccaggccgtgcctgccagcaagacaggcatcctggaggagagcatggcccggcggggcagcaggaagtccatgttcacctttgtggagaagcccaaggtgacccccaacccagacctgctggacctggtgcagacagcagatgagaagaggcggcagagggaccagggcgaggtgggcgtggaggaggagccctttgccctgggcgctgaggccagcaacttccagcaggagcccgccccccgggaccgggccagccctgctgctgctgaggaggtggtgcctgagtgggccagctgcctgaagagcccccgcatccaggccaagcccaagcccaagcccaaccagaacctgtctgaggccagcgggaaaggagctgagctgtatgcccggcggcagagcaggatggagaagtatgtgattgagagcagcagccacaccccagagctggcccgctgccccagccccaccatgagcctgcccagctcctggaagtaccccaccaatgcccctggggccttccgggtggccagccgcagccctgcccggaccccaccagccagcctgtaccacggctacctgcctgaaaatggagtgctgcggcctgagcccaccaagcagcccccctaccagctgcggcccagcctgtttgtgctgagccccatcaaggagcccgccaaggtgagccccagggctgccagccctgccaagcccagcagcctggacctggtgcccaacctgcccaagggggccctgccccccagccctgccctgccccggcccagccgcagcagccctggcctgtacaccagccctggccaggacagcctgcagcccacagctgtgtccccaccctatggaggagacatcagccctgtgagccccagccgggcctggagcccccgggccaagcaggccccccggcccagcttcagcaccagaaatgccggcatcgaggcccaggtgtggaagcccagcttctgcttcaagtag

SEQ ID NO: 64563 - DNA, 2058 bp, Artificial Sequence
  derived and/or modified sequence
atggagggctacagcgaggaggccagcctgctgcggcacctggagaaggtggccagcgaggaggaggaggtgcccctggtggtgtacctgaaggaaaatgctgccctgctgacagccaacggcctgcacctgagccagaaccgggaggcccagcagagcagccctgcccctcctcctgctgaggtgcacagccctgctgctgatgtgaaccagaacctggccagccccagcgccaccctgaccacccccaccagcaacagcagccacaaccccccagccacagatgtgaaccagaaccccccagccaccgtggtgccccagagcctgcccctgagcagcatccagcagaacagcagcgaggcccagctgcccagcaatggcaccggccctgccagcaagcccagcaccctgtgtgctgatggccagccccaggccccagctgaggaggtgcgctgcagcaccctgctgattgacaaggtgtccaccccagccaccaccaccagcaccttcagccgggaggccaccctcatccccagcagccggcccccagccagtgacttcatgagcagcagcctgctgattgacatccagcccaacaccctggtggtgtctgctgaccaggagatgagcggccgggccgccgccaccacccccaccaaggtgtacagcgaggtgcacttcaccctggccaagccacccagcgtggtgaacagaacagcccggcccttcggcatccaggcccctgggggcaccagccagatggagaggagccccatgctggagcggcggcactttggagagaaggccccagccccccagccccccagcctgcctgacaggagcccccggccccagaggcacatcatgagccgcagccccatggtggagaggaggatgatgggccagaggagccctgccagcgagcggcggcccctgggcaacttcaccgccccacccacctacacagagaccctgagcacagcccccctggcctcctgggtgcgcagccccccatcctacagcgtgctgtaccccagcagtgaccccaagagcagccacctgaagggccaggccgtgcctgccagcaagacaggcatcctggaggagagcatggcccggcggggcagcaggaagtccatgttcacctttgtggagaagcccaaggtgacccccaacccagacctgctggacctggtgcagacagcagatgagaagaggcggcagagggaccagggcgaggtgggcgtggaggaggagccctttgccctgggcgctgaggccagcaacttccagcaggagcccgccccccgggaccgggccagccctgctgctgctgaggaggtggtgcctgagtgggccagctgcctgaagagcccccgcatccaggccaagcccaagcccaagcccaaccagaacctgtctgaggccagcgggaaaggagctgagctgtatgcccggcggcagagcaggatggagaagtatgtgattgagagcagcagccacaccccagagctggcccgctgccccagccccaccatgagcctgcccagctcctggaagtaccccaccaatgcccctggggccttccgggtggccagccgcagccctgcccggaccccaccagccagcctgtaccacggctacctgcctgaaaatggagtgctgcggcctgagcccaccaagcagcccccctaccagctgcggcccagcctgtttgtgctgagccccatcaaggagcccgccaaggtgagccccagggctgccagccctgccaagcccagcagcctggacctggtgcccaacctgcccaagggggccctgccccccagccctgccctgccccggcccagccgcagcagccctggcctgtacaccagccctggccaggacagcctgcagcccacagctgtgtccccaccctatggaggagacatcagccctgtgagccccagccgggcctggagcccccgggccaagcaggccccccggcccagcttcagcaccagaaatgccggcatcgaggcccaggtgtggaagcccagcttctgcttcaagtag

SEQ ID NO: 64564 - DNA, 2790 bp, Artificial Sequence
  derived and/or modified sequence
atgctgggcccccacctgccccccccccccctggcccccagcgagggtcgccccaccccgtgtgcctttcagataccggatggctcctatcgttgtttggctcttgaggctgaagaatctagcggagaggagggcctgcagggtgaggtgggcccgacggatctggaggaggatgagggtgttagtagatcaggagacgattctgcctgcagggtgacccaaggcacgcctcagctgcctaaggcactcggcattcaaccccccagttgttcccgggaggaacagggcgcatcacagcatgacgaccgggcatcacaggactgggatgtggtcaaagcgggccaaatgatgacagcttctcctagcccaggaccagggcccagggtggcccagaaacccgccctcggccggagcacaagcctgaccgaaaaggacctgaaagaggccaaagccaggtcacagcaaattgccgcccagctcacaacaccaccatcgtcaaattccagaggggtgcagctgtttaaccgcagacggcagagagtgaacgagtttaccctcgagtcccatgggcagcgtggccagaaaccaagccaggagagcctgcgggtgctaccttctagcctgcctgggcacgcgcccggcctgtccctgtcaagcaccagcctgccagaaccgggcccaccccgacatccatcaccacaaagtccggacaggggtgtcccaggccactcgatggagggatactccgaggaagctagtttactccgccatttagaaaaagttgcaagcgaagaggaggaggtcccactggtagtctacctgaaagagaacgccgccctgcttactgccaacggcttgcacttaagccaaaacagagaagcacagcagagcagtccagcccctcccccagctgaggttcacagtcctgctgcggacgtgaatcagaacctggcctcgccgtccgcaacactgacaacccccacctctaattcttctcacaatccacccgctactgacgttaatcagaacccgcctgctactgtggtgccacaatcgctcccgctttcttccatccaacagaattcttccgaggcccagttaccgtccaatggcactggaccagccagcaagcccagtaccttatgcgccgacggccagccccaagcccctgccgaggaagtcagatgttccacgctgttaattgataaagtcagcactccagcgacaaccacatcaacattcagtagggaggccacattgatcccctcttccaggccaccggcttccgattttatgtcctcttcgctgctgattgatatccagccgaataccctggttgtgtcagctgatcaggagatgtcgggccgggccgccgcaactacaccaactaaggtgtactccgaggtccacttcaccctggccaaacccccctctgtggtgaatcggaccgcccgcccctttggcatacaagcacctgggggaacgtctcaaatggagaggtcaccaatgctggagcgcaggcactttggtgagaaggctcccgccccgcaaccacccagtctgcctgaccgcagcccacggcctcagcggcatatcatgtcacgaagtccaatggttgaaaggaggatgatgggccagaggagtccagcgtccgagcgcagaccactgggaaacttcaccgctccaccaacctacaccgagacactgtccactgccccccttgcctcatgggttcgaagcccaccctcttactccgtgctctacccctcctcggaccccaagagttcccacctgaaagggcaagctgtgcccgccagtaaaaccggcatcctggaggaaagcatggctaggagaggcagtcgaaagtcaatgttcacattcgtcgagaagcccaaagtgacccccaatcccgacctactggacctggtccagacagccgacgagaaacggcgacagcgggatcagggggaggtaggtgtggaagaggagccattcgccttaggcgctgaagcttctaatttccagcaagaacctgcacctcgagacagggcttcccccgccgctgcagaggaggtggtcccagagtgggcatcatgcctgaagagtcccaggattcaagcgaagcctaagcctaaacccaatcagaatctgtctgaagcaagtggtaaaggagcggaattgtacgcacgaaggcaaagccgcatggaaaagtatgttatagagtctagtagccacacccctgagctggctcggtgtccctcccccaccatgtccttgccgagtagctggaagtatcctacaaacgcccccggggcatttcgtgtggcaagccgttcaccagcccgcactccacctgcctccctgtatcacggatatttgcccgagaacggggtactgagacccgaacccacaaagcagccaccataccagctgcggccttccctgtttgtgttgtctcctatcaaagaaccggctaaggtgtctccaagagctgcctccccagcaaaacccagcagcctggacctggtgcctaatctgccaaaaggcgccctgcccccgagccccgctctgcccagaccttcccggtcctcccccggtctctacacatctcccggacaggattccctccagccaaccgcggtatccccgccttacggcggcgacatatcccccgtttccccctcccgagcctggtcaccacgcgcaaagcaggctcccagacccagcttctcaacaaggaacgcagggatcgaagctcaggtctggaagccatccttttgtttcaagtag

SEQ ID NO: 64565 - DNA, 2058 bp, Artificial Sequence
  derived and/or modified sequence
atggagggctacagcgaggaggccagcctgctgcggcacctggagaaagtggcttcagaggaggaggaggtgcctctggtagtctatctaaaagaaaacgctgccctcctgaccgccaatggcttgcatctttcgcaaaatcgtgaggcccagcaatcatccccagcacccccacccgccgaagtccatagccctgccgccgacgtgaaccagaacctcgctagccctagcgctactttgaccactcctaccagtaatagctctcacaatccaccagctacagatgtgaaccagaatcctccagctacagtcgtcccacagtcacttcctcttagttcgatccaacaaaattcttctgaagcacaactgccgtctaacggtaccgggcctgcttccaaaccctccacgttatgcgcagacgggcaaccccaggcccccgctgaagaggtacgctgtagtacgttgttgattgataaagtcagtaccccggctactaccactagcacgttcagccgtgaagcaacactgataccatcaagtaggccccccgcaagtgactttatgtccagttcactgctcattgacatccagcctaatacgctggtcgtcagcgcagatcaggagatgagtggaagagccgcagccaccacaccgacaaaagtgtattccgaggtccacttcaccctggccaaacccccaagcgtggtgaaccgcaccgcgaggccatttggaattcaggctcccggggggaccagccagatggagcgcagcccgatgctggagagacgacacttcggcgaaaaagccccggcaccacagcctcccagcttgcccgataggtctccaaggccgcaaagacacataatgtcgaggagccccatggtcgagaggcgtatgatgggtcagagaagccccgcctctgagcggcgcccccttggaaattttacggcgccaccgacctataccgaaaccctcagcaccgcgcccctggcttcctgggtcagaagtcccccctcgtactctgtattatatccttcatcagatccaaagtcatcacacttaaagggtcaggccgtccctgcaagtaaaaccggcattctggaggaaagtatggcacggaggggcagccggaagagtatgtttacctttgtagagaaacccaaggtgaccccgaaccccgacctgttggacctggtgcagacggctgacgaaaagcggaggcagagagaccagggcgaggtcggcgtggaagaagaaccatttgccctcggcgccgaggctagcaatttccagcaggaacccgccccccgcgacagagcttctccggccgccgccgaagaagttgtgccagagtgggccagctgcctcaagagcccccgcattcaggctaaacccaagcccaaaccaaatcaaaacctgagcgaggcctccggcaagggggctgaactctatgcccgtaggcagtcacggatggagaaatatgtgatagaatcgagctcccacacaccggagcttgcccgctgcccttctcctaccatgtcactcccttcttcgtggaaatacccaacaaacgcccccggtgcatttcgggtcgcttcgcgatcccccgctcggactcccccggccagtctctaccatgggtatctcccggagaacggcgtccttaggccggagccgaccaagcaacccccctaccaactgagaccttctcttttcgtactttctcctattaaagaaccggctaaggtctctccacgggcggcttcgccggccaaaccttcatcgctggatctggtccctaatctccctaagggggcgcttcctcccagccccgccttgcctcggcccagcaggagtagtccaggtttgtacacctctcctgggcaagattctctgcagcccacagccgtgtctcccccttacggcggagatatttctcccgtttctccctctagagcctggagccctcgcgccaagcaagctccaaggccttccttctcaacaaggaatgccggcatagaggcacaggtctggaaaccttccttttgttttaagtag

SEQ ID NO: 64566 - DNA, 2790 bp, Artificial Sequence
  derived and/or modified sequence
atgctgggcccccacctgccccccccccccctggcccccagcgagggaagaccaacgccttgtgcattccagatcccagacggcagctacaggtgcttggccctggaggccgaagaatcgtccggggaggagggtctgcagggcgaagtcggccctaccgacctggaagaggatgagggcgtttctcggtcaggcgatgactccgcatgtcgtgttactcagggaaccccccagctgcccaaggctctcgggattcagcccccttcttgctcaagagaagagcaaggtgcttctcagcacgatgaccgggcctcccaggactgggatgttgtgaaggcaggtcagatgatgaccgcttctccctcaccagggcccgggcctagggtcgcacagaagcccgcgctgggccgctccacatccctgactgaaaaggatcttaaagaagcgaaggcaaggtcccagcaaattgccgctcagttgacaactccaccgagctcgaattctagaggcgtccagttatttaatcgtcgacggcagcgggtcaacgagtttaccctcgaatcccacggtcagcgtggacagaaaccttctcaggagagcctgcgcgtgctgccaagctcccttcctggccacgctcccggtctgagcctctcaagcaccagcctaccagagccagggccaccccgccacccatccccacaatccccagacaggggcgttccaggccacagcatggagggctattctgaggaagccagtctcctgagacacctcgaaaaggtggcttctgaagaggaggaagtgccactggttgtgtacttgaaggagaatgctgcccttctgacagccaacggactgcacctttcccagaatagggaggcacagcagtcctctccagcccctccaccagcagaagtgcattcccctgcagcagacgtgaatcagaatttggcatctccatccgcgacattgactactcctacttcaaattcttcccacaatccccctgccaccgatgtaaatcaaaacccacccgctacagttgtcccccagtccctgcctctcagtagtatccagcagaactcatcagaggcccagctccccagcaacgggacagggcccgccagcaagccctcaacgctttgcgccgatgggcaaccacaggccccggccgaagaggtgaggtgttcgacacttttgatcgacaaagtgtccacccccgccacaaccacttccaccttcagccgagaggctaccctcatcccatcatctagaccgccagcgagcgacttcatgtcctcctcactgttgatcgacattcagcccaacactctggtcgtatcagccgaccaagaaatgagtggacgagccgccgccaccacacctacaaaggtgtacagcgaagttcattttacgctggctaagcccccgagtgtcgtcaaccgaacggccagaccttttgggatccaggcccccggggggacatcacagatggaacgcagtcccatgctggagagaagacactttggggagaaggcgcctgctcctcagccaccatcgctgccggaccgctctccacgcccacagcgacacattatgtcgagaagtccaatggttgaacgccgcatgatggggcagagatcccccgcgagtgagcgacgacctcttggcaattttaccgccccgccgacgtatacggaaacactgagcacagccccgctcgccagctgggtccgatcccccccttcatactcagtgttgtatccgtcctctgatccgaaatcaagccacctgaaggggcaggccgttcccgcttccaagacaggaatcctcgaagagtccatggcgaggaggggctcacgcaagtcaatgtttacatttgtagagaagcccaaggtgacccctaaccctgatctccttgatctcgtacagacagcagatgaaaagagacgccaacgggaccaaggggaggttggagtagaggaagaaccatttgcactcggggccgaggcatcaaactttcagcaggagcctgccccaagggatagagccagtcctgcagccgcagaagaggtggtgcccgaatgggcctcgtgcctcaaaagtccgaggatacaggccaagcctaaacctaagcccaaccagaatctgtccgaagcaagcggcaaaggcgccgaattgtacgcccggcggcaatccaggatggaaaagtatgtgatcgaatcttcctcacatacccccgagctcgcccgatgcccatccccaacgatgtcgctcccctcgtcgtggaaatacccaaccaatgcccctggcgcctttcgagtcgcctcccgtagccctgcccggactcctccggcgtcactctaccacggctatctcccagagaatggtgtactcagaccagaacccactaagcaacctccctaccagcttcgaccctctctgtttgtgttgtcaccaattaaggagcctgcaaaggtgagcccccgcgccgcatcacccgcaaagccttctagtctagacttggtgcctaatctacctaagggtgcccttcctcccagccctgcactaccacggccctcccggtcatcccccgggctgtatacttctcccggacaggattcactacagcctaccgccgtctcaccaccttacggcggagacatctcccctgtgtcaccctcccgcgcttggtctcctcgtgccaagcaagcgccccggccctccttctccacccgtaacgcgggaattgaggctcaagtgtggaaacctagcttctgcttcaagtag

SEQ ID NO: 64567 - DNA, 2790 bp, Artificial Sequence
  derived and/or modified sequence
atgctgggaccacacctccctccaccgcctctcgcaccttctgaaggcagacccaccccctgcgcttttcagatccctgacggaagctatcggtgcttagccctggaggccgaagagagttccggagaggagggactgcaaggagaagttggaccaacggacctggaggaagacgagggcgtctctaggagtggcgacgattctgcttgtcgtgtgacacagggcacccctcagctgcccaaggccctggggatacagcccccaagctgttcccgagaggaacaaggcgctagccaacatgatgaccgagcgagccaggactgggatgttgtgaaggccggacagatgatgacagctagcccctcccccggaccagggccaagggtggctcagaaacccgcactgggacgatccacttctctcaccgagaaggacctgaaggaggctaaggcaagatcacagcagattgcagcacaactcaccactcctccctcctccaacagccgaggtgtgcagcttttcaaccgcaggagacagagagttaacgagttcacccttgaaagccacggtcaacgcggacagaagcccagccaggagagtctgcgggtcctcccttcaagcttgccaggacatgcccctgggctgagtctctcctccacaagtctgccggagccaggcccacctaggcatccatcgccccaatccccagatcgcggagtgcctggccactcaatggagggttatagtgaagaggccagtctgcttaggcacctggagaaggtcgcatcggaggaggaggaggtccccttggttgtatacttgaaagaaaatgcagccttgttgacggcgaatggacttcacctgagtcaaaatcgggaagcgcagcagtcgagcccggcaccgccaccagcagaagtgcattctcccgctgccgacgtgaatcaaaacttggccagcccgagcgccaccctgacaaccccaacgtctaactcttcccataaccctccagctaccgatgttaatcagaatccaccggctaccgtcgtgccgcagagtctacctttgtcctctatccaacagaactcctccgaggcacaactgccatcaaatggcaccgggccagcgtccaagccctcaaccctctgcgcagacggtcaaccacaggcccctgcggaagaggtacgttgttccacactcttaatcgataaagtctccactccagctacaaccaccagcaccttttcacgcgaggccacactaataccatcttcccgacctccagcctccgacttcatgtccagctctctacttattgacatccagcctaatactctggtcgtcagcgccgatcaggaaatgagcggcagggcagctgccacaacaccaaccaaggtgtattctgaagtgcactttacacttgccaaacccccatctgtggtaaaccggactgctcggccatttggcatccaggcaccaggaggaactagccagatggagaggtcacctatgctggagcgaagacactttggtgagaaggctcctgctccgcagcctccttcgcttccagacaggagccccaggccgcagagacatatcatgtctagatcacctatggttgaacgtcggatgatgggtcagcggagcccagcaagtgagcgacgcccactgggcaactttactgccccacccacttacactgagactttgtcaactgcccctctggcaagttgggtgaggagccctccctcctactctgtgctctatccgtcctccgatcctaagagctcacatctgaagggccaggctgtccctgcatctaagacgggaatcctggaagaaagcatggccagacgtggctcccgcaagtcaatgttcacttttgtggagaaacccaaggtaacacctaaccccgacctgctcgacctggtgcagaccgctgatgagaaacggagacagcgagaccagggagaagtgggagtcgaggaggaaccatttgctctcggtgctgaggctagtaacttccagcaggagcccgcaccgagggatagggccagtccagcagcagccgaagaggtggtgcccgagtgggccagctgcctgaagtctccacgaatccaggcgaagccaaagcccaagccgaatcaaaacttgtcagaagctagtgggaagggggctgagctgtatgccaggaggcagtcacggatggaaaagtatgtgatagagagctctagccataccccagaactagctcgatgcccttcacctacaatgagcttgccaagttcatggaagtacccaacaaatgcgccaggcgcattccgcgtggcatccagaagccccgcacgaaccccacctgcgagcttatatcacggctatctgcctgaaaatggggtccttagaccagagcctactaaacagcccccatatcagctgcgcccttccctgttcgtgctatctccaataaaagagccagccaaagtgtctccccgagctgcctcaccagcaaagccttcctcattagaccttgtgccaaatctcccaaagggagcactccctccaagtcctgcgctgcctcgaccgagcaggtcgtcgcctggtctctacacgtccccagggcaggactcccttcagcccacagccgtgagcccaccttatggaggcgacatctctcccgtgtccccctcacgggcatggtctcccagggccaagcaggcaccaagaccaagctttagcactagaaatgccggtattgaggcccaagtgtggaagccatcattctgctttaagtag

SEQ ID NO: 64568 - DNA, 2058 bp, Artificial Sequence
  derived and/or modified sequence
atggaagggtacagcgaggaggcatccctcctgagacatctggaaaaagtcgcctctgaggaggaggaggtgccactcgttgtttatctcaaggagaacgccgcactcttgaccgcaaacggattgcatctgagccaaaaccgcgaagcccagcagagttccccagctcctccaccagctgaggtgcactctcctgccgctgatgtgaatcagaatttagcctctccttccgctactctgactaccccaacaagcaactcctctcacaaccctccagctacagacgtaaaccagaatcctcccgcaacagtcgtcccccaaagcctgcctctcagctcaatccagcagaattccagtgaggcccagctgccctccaacggaaccggaccggcttctaagccctccactttatgtgccgatggccagccacaggcacccgcagaggaagtgcgctgttccaccctgctgatagacaaggtgagcacaccagctacgactacttcaactttcagtcgggaagctaccctaatcccatctagccgtcccccagcatctgactttatgtcttcaagtttgctaattgatatccagcccaatacgcttgtcgtgtccgctgaccaagaaatgtctggacgcgcagcagcaacaacaccgaccaaagtatacagcgaagtgcacttcactctggccaagcccccatctgtcgtgaaccggacagcccgtccctttggaatccaggcacctggaggcaccagccaaatggagaggtctcctatgctggaacggagacattttggtgaaaaagctcctgctccacaaccaccatcgctgccagaccgtagccctcggcctcagcgccatataatgtctcgatccccgatggttgaaaggcgcatgatgggccagcgaagccccgcaagcgagcgcaggcctctcgggaatttcacagcccctcccacctatactgaaacccttagcacggctcccttggcttcgtgggtgagaagccctccttcctactccgtattgtaccctagcagtgaccctaagtcaagtcatctgaaagggcaggcggtccccgcatctaaaacagggatcctggaggagagtatggctagacggggtagccgcaaatcaatgttcaccttcgtggagaagcccaaggtaactcccaatcccgacctcctagacctggtgcagacagccgatgagaaacgaagacagagagatcagggcgaggtcggtgtggaggaagagccattcgctctgggcgctgaggcatccaactttcagcaggagcctgctcctagagatcgagcctcacctgcagctgctgaggaggtggtgcctgaatgggcgagctgcttgaaaagtcccagaatccaagcaaaaccaaagcctaagccaaaccagaatttaagtgaggccagcgggaagggcgctgagctctatgcaagacgccagtccagaatggagaaatatgtgatagaaagcagcagccacacgccagagttggccagatgtccttcaccgacgatgtcccttccttcaagctggaaataccctactaatgctcccggagccttccgagtcgccagtagatctcccgcaaggacccccccagcctctctttatcacggatacctgcctgagaacggggtgctaaggccagagccgaccaaacagcctccttatcaacttcgaccttccctttttgtcctctctccaatcaaggaaccagctaaggttagtccacgcgcagcgtcacctgccaagccaagcagtctcgaccttgtccctaaccttccgaaaggcgctctccccccatcaccagccctgccgcgaccaagtaggagctcccctgggctttacacctccccgggacaagattctctccagcctaccgcagtgtcaccaccgtacgggggagacatcagtccagtatcacccagtcgggcttggagccctcgcgcaaaacaggctcccagaccatcattttcgactaggaatgcaggcatagaagcccaagtgtggaaaccttccttctgcttcaagtag

SEQ ID NO: 64569 - DNA, 2790 bp, Artificial Sequence
  derived and/or modified sequence
atgcttgggcctcacctccctcccccacctttggcaccaagcgaggggaggccaacaccatgtgcattccagattcccgatgggtcatacaggtgcctcgctctcgaggccgaggaatcatcaggcgaagagggtctccagggagaagtcgggcctaccgacttggaggaggatgaaggcgtctccagatcgggggacgacagcgcttgtcgggtcacgcagggcacgccccagttacctaaggcgctggggatacaacccccaagctgttcaagggaggagcagggagcgagccagcacgatgacagggcttcccaggactgggacgttgtgaaggccggacagatgatgaccgctagcccgtcaccgggacctggacctagggtggcccagaaacctgctttgggcagatccacctccctaacggagaaggacttaaaagaggccaaggcacggtcacaacaaattgctgcacagctaactactccaccaagtagcaatagcagaggggtccagctttttaaccggaggaggcagagggtgaacgagttcaccctcgagtctcacggacagcggggacagaagccctctcaggagtcattaagagtgcttccatcatctctgccgggacatgcaccaggcttgagcctatcctccacctcccttcccgagcccggtccaccgagacaccctagcccacagtccccagatagaggcgtccccggtcatagcatggagggatactcggaagaagccagcctattgcgccacctagagaaggtggcttccgaagaagaggaagtccctctcgtagtgtatctgaaggaaaacgccgcactcctcaccgcgaacggactgcatcttagccagaatagagaggcacagcagagcagcccagctccccctccggcagaggtgcattcaccggcagcagatgtgaatcagaacctggcctccccctctgccactcttacaactcctaccagcaattccagtcacaacccccctgcgactgacgtgaaccagaatccgccagctacagtcgttccacagagcttgccactgtcttccatccagcagaactcaagcgaggcccagctgccatccaacgggacaggccctgcctctaagccatccacgctctgtgcggacggtcaaccacaggcaccagcagaggaagtgcggtgttccactttgctgatagacaaagtaagcacccctgctactacaaccagcacatttagccgcgaagctacactgattccaagtagtagaccacctgccagtgatttcatgagctcatccctgctgatagacatccagccaaacactcttgtggtgtctgcagatcaggagatgtcgggacgggcagccgcaactactcccacgaaggtgtactccgaagttcacttcactctggccaagccgccttctgtggttaatagaactgcacgacccttcggaatccaagctccgggaggcacaagtcaaatggagcggtcccctatgttggaacgcaggcacttcggggaaaaagcacccgctcctcagccacccagtctgcccgatcggtcccccagaccccaaagacacattatgagcaggtcgcctatggtcgagcggaggatgatggggcagcgttcaccagctagcgaacgtagacccctgggaaattttacggcccctcctacatacaccgagaccctgtctaccgcaccactagcgtcatgggtgaggtctcccccatcttactccgtgctctacccttcctcagaccccaagagttcgcaccttaaaggccaggctgtgccagcctccaaaaccggcatactcgaggaaagcatggccagacggggatcccggaaaagtatgttcacttttgtagaaaagcccaaggtaaccccaaacccggacctcctcgatctggtccagacagccgatgaaaagagaaggcagagagaccaaggcgaagtcggagtggaggaggaacctttcgcgcttggagctgaggcttccaacttccagcaggaacccgcacccagggaccgagctagtccggctgcagcagaagaggtggtgcccgagtgggccagttgtcttaagagtcccagaatccaagcaaagccgaaaccaaaaccaaatcagaatctttctgaggcttcgggcaagggagccgagctgtatgccaggaggcagagtcggatggaaaagtatgtcatagagtcctcaagccatactccagaattggcaagatgtccttcccctactatgtcgctgccttctagttggaaatatcccaccaatgcccctggtgcgtttagagtggcaagccgaagccccgcaagaacgccgcctgcatcgctctaccacgggtacctgccagagaacggggtgctgagaccagaacctacgaaacagcccccatatcagctgaggccctccctgttcgtgctttctcccataaaggagcccgctaaagtgagtccgagagccgcatcaccagccaagccctcatctctggacttagttcccaacttaccgaagggggcactgcctccctcgcctgcgttgccacgtccaagtcggagctccccaggcctttacacgtcccctggacaagattcgctacaacccactgctgtctctcctccgtatggaggggacatctctccagtgtccccaagtcgcgcatggagccctagagcaaagcaggcaccacggccaagcttctcaacacggaatgcgggaattgaggcccaagtttggaaaccctctttttgctttaagtag

SEQ ID NO: 64570 - DNA, 7063 bp, Artificial Sequence
  derived and/or modified sequence
agagcgcgagtgaggagcaggcgggcaggcggcgggcagccgggcagccgtggacagaggcccgggcacagccagttgctgtgccagagggtgtggtgtccggctacagattgccccaaagcggcctcacaccagagacgggttaagaagagggattggaggtccaccactccactagcccaggaaggacttatctttcgtctcagccagacctcaccccaattctgtgaatcagcggaggaaggcaaaagtgcagagagtcagaggaggctgtgtaaggagcagagaccagggctcacacagctggccccagcccaggccctggcccaggcccaggagcctgcttccctgcatcgctgaggaagaacagcaccatgctgggtcctcacctcccacctccgccccttgcacccagcgaagggaggcctaccccctgcgccttccagatccctgatggaagctacaggtgtctggctctggaagccgaggagagcagcggtgaggagggcctgcagggagaggtggggcctaccgacctggaagaggatgagggggtcagcaggagtggggacgactctgcctgcagagtcacccaggggacaccgcagctgcccaaagccctgggcatccaaccacccagctgctccagagaggaacaaggggcgtcccagcacgacgacagggccagccaggactgggatgtagtgaaggccgggcagatgatgacagccagccccagccctggccctgggcccagagtggcccagaaaccagcgttgggccggagcactagcctcacggagaaggatctgaaagaagccaaggcgcggagccagcagattgcagcccagctgaccacccctcccagctccaattcccgtggcgtccagctcttcaacaggcgccggcagagggtgaacgagttcaccttggagagccacggccagaggggacagaagcccagccaggagtccctcagagtgctcccttcaagcctcccaggccatgcaccggggctcagcctgagttccacctcgctgccggagccaggccctccacggcaccccagtccccagagccccgacagaggggtccctggccacagcatggaggggtactcagaggaggctagcttgctgcggcacctggagaaggtggccagtgaggaggaagaggtaccactggtggtttatctaaaggagaatgcagcactgctgacagccaatgggctgcacctgtcccaaaaccgagaggcccagcagtcctcaccggccccacctccagctgaggtccacagcccagctgcagatgtcaaccaaaaccttgcctcgcccagtgccacgctcaccacaccaacttctaacagcagccacaatccgccagccaccgatgtcaatcagaacccaccggcaactgttgtcccacagagcctgccactttctagcatccaacagaattcctcagaggcccaactcccatctaatggcacagggcctgcttccaaacccagcaccctgtgtgctgatgggcaaccccaggcaccggctgaggaggtgagatgcagcacactcctaattgacaaggtatcaactccagctaccaccaccagcaccttctccagagaagctacgctcatccccagctccaggcccccagcctcagatttcatgtccagctccctgctcattgacatccagcccaacaccctagtggtgtcagcagatcaagagatgtctgggcgagcagctgccaccacgcccaccaaggtctacagtgaggtccacttcacactggccaagcccccatcagtggtcaacaggacggccaggccttttgggatccaggcgccagggggcaccagccagatggagaggagccccatgctagagagacgacattttggggagaaggccccggctccccagccccccagtttgccagacaggagcccccggccacagagacacataatgtcccgcagccccatggtggaaaggaggatgatggggcagcgaagcccggcctcagagagacgccccttggggaacttcactgcaccccccacctacactgagaccttgtccacagcccctctggcttcctgggtgaggtctcctccctcatattctgtcctgtatcccagctccgaccccaagtcttctcatctgaagggccaggcggttcctgccagcaagacgggcattctggaggagtcgatggcccgccggggcagccgcaaatccatgtttactttcgtggagaagcccaaggtgaccccgaatccagacttgctggatctggtacagacagcggatgagaagcggcggcagagggaccagggggaggtaggcgtggaggaggagcccttcgcactgggggccgaggcctccaacttccagcaggagccagcacctcgtgacagggccagccccgcggcggcggaggaggtggtaccagagtgggcctcctgcctcaagtcaccccgcatccaggccaagccgaagcccaaacccaaccagaacctctccgaggcctctgggaagggagctgagctctacgcccgccgccagtcacggatggagaaatatgtcatcgagtcttcaagccacacgccagagctggcccgctgcccatcacctaccatgtccctgccttcctcctggaaataccccactaacgcccccggggccttccgagtggcatcccgaagcccagcccggaccccgcctgcctccctctaccatggctacctgcctgagaacggggtcctgcgcccagagcccaccaagcagccgccataccagctgcgcccctcgctctttgtcctctcacctatcaaggagcctgccaaggtctcaccaagagctgcctcgcccgccaagcccagctccttggacctggtgcccaacctgcccaagggggctctccctccatctcctgccctgcctcggccctcgcgctcctcaccgggcctctacacctcccccggccaggacagcctgcagcccactgccgtgagccctccttacggcggtgacatctcccccgtgtctccctccagggcgtggtctccccgagccaagcaggcccccaggccctccttctctacccggaacgccgggatcgaggctcaggtgtggaagccttccttctgcttcaagtaacgaaccccacgggggtcccactgccggtcaagttcccctccttgagggccagatggagagcagatgtggcaggaaatggcacagagctgagtgaggagaatggggagtccatggttcaaggtcagatgcggccaccagctggctttgtgaccttgggcgagtcgcctcccctctctgagctgaagccgcccctcccctactacaacaggggtcggactccatgtctgagcggggaggagggtcatggagagagaactgtctggcagccctgatgcggtagaggggcatcctctggcctttgtgagctgtagggatgcagagtctgatgccagcgtcttgctgggggagtggcctagaaggggatcctaacagggacttctggagcagacagagcctgccagtgcctgtggagtcagccagccgagggtctgcctcctcagctgccccaggggggcctccctcctgaggctcaagctcctggcgtctttcttcctgttgctggattctcacctccatgggcctgtctcttctgcctctgccttctggacaccgtttcctctccgctgcttcagagagctttgcctcgcctccgcctgcgctcccctccagggtccttctgctggctgcggactcggcccaccactgctgtctgacgcttttcttcctgccccctctgaggcctggctctgttttagggagatcactgggcccaggcctcagccccagttctacctggcttgctgtcaccgctctaggggtgggggacgtcccaggggatccccaggagaaggagagccctgtagggggctgtgcagatgtgggtgtgccacagggagggtggcccctagccatgtatccattggctgttttggcttcagattcaaccaagatctgcctgactaaaagaagccacctcagcgcagtggaacggggcccagggggaggcaggagaggagggttccggtcccatgtcaccttctcatttgctgtgtgactttggcccactcacattctctttgggcctcagttttatcatttatacaaggagggcttttctagctgtaacaatctgtgaggattgagaggataggctggtgctttgaagaaaggccttgtaagtgacaagacagtcccctgggaagaaagagaaaggaaatgggctattgccaaaggacaggtggcgttagatggctgtgagggtgacctggtgagggaagggttggaatgagctgctgcaggaggccaagggatgcctgggctgggctgggctgggctggcttaggctcaggattgcctggggacagtaggagcatggcaggagctggggcaggtgcatagcagtgcagtgggaagggacagaggagatcttagaattttgaggaaaatctgggacttgagacctggattctaacagaccaactgcatgtgtgtctgtaggtctcagtttccacattcatacagtgagggtgttaagtcaggtagctggagacttcccatcgcctctgacacttttggaggtgatatgatacagcccccgaccaaaccaggctttgtggggggtgagagaatacagacacaagtggcaggattcagatggaagcttcgcaaggctgggggccgaggaccacccacttctctttcccagccctagttctgggttccccagtggggcaaggggtggtggaggcagtgcccatgctgggctgagcctgcagtttttgtgagctctgggcttgtctccatgggaacaggggtgccttcttagtgagctcatttcacacagatcgagggggtatgcgtgggggagttgtgagtgagctcagctccttcaggcctggcctctcccagaacagagtgaagcccctgccctggacccctgctcccttctacccttgagggccaccaatggaagagcccgcccttcattctgcagctcctgcggccaggctgagctctgcccccaactttgttttctctcatgttctcaatacactctgcctcaaatccgtcttgcttctttctttcttccgtgctgctaggggtcagggttcccttcctcctgcctgattctagcctgggaagtggagtgggcctgctcaattactgtgtgtgaaagtgtggctgtgtcctgcgtgctgcctgcacctgccgtgtgtctggttctgcactggtacagacgtgtgctgggttggaaatgagggcttcctctctacagcactcagggagccagaaccctgtgcaaatcgcaaccttttgttctttccttccctcagagtttggccaaaaatactttagaggatttttggggaaaatgcactacctcttctcgttgaggtttgtttgggttctttacaagtggaatagaaattcctctagccagcattcgctctccagttccctcaggtcccctccctgctccccattatctaaatttggccatttcccacatttgccattgttttcactgtctggatcctaaaagcatggagtttctgcccctggtggggaggaaagaactgccatcaagggtcaggagagctgggttctagccccaggtctgcatctgattcgtgtgtgacctcagacaacctcttccaatctctgggcctcagtttccccttctgtgcagtgaaaggattacagaaggaggtcagagaccatttggtctccgacagtccaggtttgactgtgttctacttatgtattcaccccacacatgtgccctgctttgggtctggggttgggttgagtggatgctactttttgaattttcacccaccgcattcccaaggagctctggtgtgcacggtgcattgagctctctgtcagaaagtgaacagttctgatttcctgcagccttttcgtactgtgcacacccccgactcaaaaacatacacacagagtcagtgcccaggcatggctgttagggtgaggtcaggctctggcccatctccagatgatggggatctgcttaccactgccctcaacattcaatcccgtttgagcccttctgttttgtagtcttggctgaattgttatttcttccacttgttggcctcagcattccccttgtggccaccaaaggcagaaacaatgctttagagatttttaggtagttatcatagctctcctgtgcagcctactctcctggctgaagaccccaggttccgctgccttgggtggttattgactggcttgggtcatgaactctaggccctacctccctgctcagggtggcactgtggtcaggtgttgggtcatgccagagcccaccctgatttggcatttggccctagccctcctcttctagccctggagctgggaccttcctcccagctcctctccctaaactgtggggtctgccttctgcggccagcctgactgggatgttccactggcacagagaagctcccagtgtctctggctcatgtatacacaattctgaccctgggaagaaaacagtgggatcccaggctgagccttaactttcagcttgatgactgggagcttggatgtccctagggagtctctaagggtcactccagcattagtatcccatgaaaaatgtcctgctcaggctgttgtataacattcttctttaggttaaagggctccagtttggagtctgggctcatctagcagctgctacattctgtttggataaaacatacaattggtgtctatttcctttggattgggaggaattagaagactctcagttggatgagaggatgactggcttggttatggctgatcactgattggatgaaagaataaatctttggatggttctagattttgatcgggtaggaagcatggaatggactggctagctctgaactctggtggatgactgctagtgaatttggattggattaaatggcaaggtggactggtta

SEQ ID NO: 64571 - DNA, 4571 bp, Artificial Sequence
  derived and/or modified sequence
gtcatctgtggaggagaaaagtcacatccagctccttcatgttgctgccgatgtgggattttcctggcttcgtcagccaagcaattggctgcctttgccggaggctttgagaaccaaggcttgaaggccggcaggagcatccagggggaagcttggcttcagggaggacctagcagacgttgggccggagcactagcctcacggagaaggatctgaaagaagccaaggcgcggagccagcagattgcagcccagctgaccacccctcccagctccaattcccgtggcgtccagctcttcaacaggcgccggcagagggtgaacgagttcaccttggagagccacggccagaggggacagaagcccagccaggagtccctcagagtgctcccttcaagcctcccaggccatgcaccggggctcagcctgagttccacctcgctgccggagccaggccctccacggcaccccagtccccagagccccgacagaggggtccctggccacagcatggaggggtactcagaggaggctagcttgctgcggcacctggagaaggtggccagtgaggaggaagaggtaccactggtggtttatctaaaggagaatgcagcactgctgacagccaatgggctgcacctgtcccaaaaccgagaggcccagcagtcctcaccggccccacctccagctgaggtccacagcccagctgcagatgtcaaccaaaaccttgcctcgcccagtgccacgctcaccacaccaacttctaacagcagccacaatccgccagccaccgatgtcaatcagaacccaccggcaactgttgtcccacagagcctgccactttctagcatccaacagaattcctcagaggcccaactcccatctaatggcacagggcctgcttccaaacccagcaccctgtgtgctgatgggcaaccccaggcaccggctgaggaggtgagatgcagcacactcctaattgacaaggtatcaactccagctaccaccaccagcaccttctccagagaagctacgctcatccccagctccaggcccccagcctcagatttcatgtccagctccctgctcattgacatccagcccaacaccctagtggtgtcagcagatcaagagatgtctgggcgagcagctgccaccacgcccaccaaggtctacagtgaggtccacttcacactggccaagcccccatcagtggtcaacaggacggccaggccttttgggatccaggcgccagggggcaccagccagatggagaggagccccatgctagagagacgacattttggggagaaggccccggctccccagccccccagtttgccagacaggagcccccggccacagagacacataatgtcccgcagccccatggtggaaaggaggatgatggggcagcgaagcccggcctcagagagacgccccttggggaacttcactgcaccccccacctacactgagaccttgtccacagcccctctggcttcctgggtgaggtctcctccctcatattctgtcctgtatcccagctccgaccccaagtcttctcatctgaagggccaggcggttcctgccagcaagacgggcattctggaggagtcgatggcccgccggggcagccgcaaatccatgtttactttcgtggagaagcccaaggtgaccccgaatccagacttgctggatctggtacagacagcggatgagaagcggcggcagagggaccagggggaggtaggcgtggaggaggagcccttcgcactgggggccgaggcctccaacttccagcaggagccagcacctcgtgacagggccagccccgcggcggcggaggaggtggtaccagagtgggcctcctgcctcaagtcaccccgcatccaggccaagccgaagcccaaacccaaccagaacctctccgaggcctctgggaagggagctgagctctacgcccgccgccagtcacggatggagaaatatgtcatcgagtcttcaagccacacgccagagctggcccgctgcccatcacctaccatgtccctgccttcctcctggaaataccccactaacgcccccggggccttccgagtggcatcccgaagcccagcccggaccccgcctgcctccctctaccatggctacctgcctgagaacggggtcctgcgcccagagcccaccaagcagccgccataccagctgcgcccctcgctctttgtcctctcacctatcaaggagcctgccaaggtctcaccaagagctgcctcgcccgccaagcccagctccttggacctggtgcccaacctgcccaagggggctctccctccatctcctgccctgcctcggccctcgcgctcctcaccgggcctctacacctcccccggccaggacagcctgcagcccactgccgtgagccctccttacggcggtgacatctcccccgtgtctccctccagggcgtggtctccccgagccaagcaggcccccaggccctccttctctacccggaacgccgggatcgaggctcaggtgtggaagccttccttctgcttcaagtaacgaaccccacgggggtcccactgccggtcaagttcccctccttgagggccagatggagagcagatgtggcaggaaatggcacagagctgagtgaggagaatggggagtccatggttcaaggtcagatgcggccaccagctggctttgtgaccttgggcgagtcgcctcccctctctgagctgaagccgcccctcccctactacaacaggggtcggactccatgtctgagcggggaggagggtcatggagagagaactgtctggcagccctgatgcggtagaggggcatcctctggcctttgtgagctgtagggatgcagagtctgatgccagcgtcttgctgggggagtggcctagaaggggatcctaacagggacttctggagcagacagagcctgccagtgcctgtggagtcagccagccgagggtctgcctcctcagctgccccaggggggcctccctcctgaggctcaagctcctggcgtctttcttcctgttgctggattctcacctccatgggcctgtctcttctgcctctgccttctggacaccgtttcctctccgctgcttcagagagctttgcctcgcctccgcctgcgctcccctccagggtccttctgctggctgcggactcggcccaccactgctgtctgacgcttttcttcctgccccctctgaggcctggctctgttttagggagatcactgggcccaggcctcagccccagttctacctggcttgctgtcaccgctctaggggtgggggacgtcccaggggatccccaggagaaggagagccctgtagggggctgtgcagatgtgggtgtgccacagggagggtggcccctagccatgtatccattggctgttttggcttcagattcaaccaagatctgcctgactaaaagaagccacctcagcgcagtggaacggggcccagggggaggcaggagaggagggttccggtcccatgtcaccttctcatttgctgtgtgactttggcccactcacattctctttgggcctcagttttatcatttatacaaggagggcttttctagctgtaacaatctgtgaggattgagaggataggctggtgctttgaagaaaggccttgtaagtgacaagacagtcccctgggaagaaagagaaaggaaatgggctattgccaaaggacaggtggcgttagatggctgtgagggtgacctggtgagggaagggttggaatgagctgctgcaggaggccaagggatgcctgggctgggctgggctgggctggcttaggctcaggattgcctggggacagtaggagcatggcaggagctggggcaggtgcatagcagtgcagtgggaagggacagaggagatcttagaattttgaggaaaatctgggacttgagacctggattctaacagaccaactgcatgtgtgtctgtaggtctcagtttccacattcatacagtgagggtgttaagtcaggtagctggagacttcccatcgcctctgacacttttggaggtgatatgatacagcccccgaccaaaccaggctttgtggggggtgagagaatacagacacaagtggcaggattcagatggaagcttcgcaaggctgggggccgaggaccacccacttctctttcccagccctagttctgggttccccagtggggcaaggggtggtggaggcagtgcccatgctgggctgagcctgcagtttttgtgagctctgggcttgtctccatgggaacaggggtgccttcttagtgagctcatttcacacagatcgagggggtatgcgtgggggagttgtgagtgagctcagctccttcaggcctggcctctcccagaacagagtgaagcccctgccctggacccctgctcccttctacccttgagggccaccaatggaagagcccgcccttcattctgcagctcctgcggccaggctgagctctgcccccaactttgttttctctcatgttctcaatacactctgcctcaaa

SEQ ID NO: 64572 - DNA, 5098 bp, Artificial Sequence
  derived and/or modified sequence
agtttgcatcttaggtcacaccactcctgtgattcctgtggtattgccccaaagcggcctcacaccagagacgggttaagaagagggattggaggtccaccactccactagcccaggaaggacttatctttcgtctcagccagacctcaccccaattctgtgaatcagcggaggaaggcaaaagtgcagagagtcagaggaggctgtgtaaggagcagagaccagggctcacacagctggccccagcccaggccctggcccaggcccaggagcctgcttccctgcatcgctgaggaagaacagcaccatgctgggtcctcacctcccacctccgccccttgcacccagcgaagggaggcctaccccctgcgccttccagatccctgatggaagctacaggtgtctggctctggaagccgaggagagcagcggtgaggagggcctgcagggagaggtggggcctaccgacctggaagaggatgagggggtcagcaggagtggggacgactctgcctgcagagtcacccaggggacaccgcagctgcccaaagccctgggcatccaaccacccagctgctccagagaggaacaaggggcgtcccagcacgacgacagggccagccaggactgggatgtagtgaaggccgggcagatgatgacagccagccccagccctggccctgggcccagagtggcccagaaaccagcgttgggccggagcactagcctcacggagaaggatctgaaagaagccaaggcgcggagccagcagattgcagcccagctgaccacccctcccagctccaattcccgtggcgtccagctcttcaacaggcgccggcagagggtgaacgagttcaccttggagagccacggccagaggggacagaagcccagccaggagtccctcagagtgctcccttcaagcctcccaggccatgcaccggggctcagcctgagttccacctcgctgccggagccaggccctccacggcaccccagtccccagagccccgacagaggggtccctggccacagcatggaggggtactcagaggaggctagcttgctgcggcacctggagaaggtggccagtgaggaggaagaggtaccactggtggtttatctaaaggagaatgcagcactgctgacagccaatgggctgcacctgtcccaaaaccgagaggcccagcagtcctcaccggccccacctccagctgaggtccacagcccagctgcagatgtcaaccaaaaccttgcctcgcccagtgccacgctcaccacaccaacttctaacagcagccacaatccgccagccaccgatgtcaatcagaacccaccggcaactgttgtcccacagagcctgccactttctagcatccaacagaattcctcagaggcccaactcccatctaatggcacagggcctgcttccaaacccagcaccctgtgtgctgatgggcaaccccaggcaccggctgaggaggtgagatgcagcacactcctaattgacaaggtatcaactccagctaccaccaccagcaccttctccagagaagctacgctcatccccagctccaggcccccagcctcagatttcatgtccagctccctgctcattgacatccagcccaacaccctagtggtgtcagcagatcaagagatgtctgggcgagcagctgccaccacgcccaccaaggtctacagtgaggtccacttcacactggccaagcccccatcagtggtcaacaggacggccaggccttttgggatccaggcgccagggggcaccagccagatggagaggagccccatgctagagagacgacattttggggagaaggccccggctccccagccccccagtttgccagacaggagcccccggccacagagacacataatgtcccgcagccccatggtggaaaggaggatgatggggcagcgaagcccggcctcagagagacgccccttggggaacttcactgcaccccccacctacactgagaccttgtccacagcccctctggcttcctgggtgaggtctcctccctcatattctgtcctgtatcccagctccgaccccaagtcttctcatctgaagggccaggcggttcctgccagcaagacgggcattctggaggagtcgatggcccgccggggcagccgcaaatccatgtttactttcgtggagaagcccaaggtgaccccgaatccagacttgctggatctggtacagacagcggatgagaagcggcggcagagggaccagggggaggtaggcgtggaggaggagcccttcgcactgggggccgaggcctccaacttccagcaggagccagcacctcgtgacagggccagccccgcggcggcggaggaggtggtaccagagtgggcctcctgcctcaagtcaccccgcatccaggccaagccgaagcccaaacccaaccagaacctctccgaggcctctgggaagggagctgagctctacgcccgccgccagtcacggatggagaaatatgtcatcgagtcttcaagccacacgccagagctggcccgctgcccatcacctaccatgtccctgccttcctcctggaaataccccactaacgcccccggggccttccgagtggcatcccgaagcccagcccggaccccgcctgcctccctctaccatggctacctgcctgagaacggggtcctgcgcccagagcccaccaagcagccgccataccagctgcgcccctcgctctttgtcctctcacctatcaaggagcctgccaaggtctcaccaagagctgcctcgcccgccaagcccagctccttggacctggtgcccaacctgcccaagggggctctccctccatctcctgccctgcctcggccctcgcgctcctcaccgggcctctacacctcccccggccaggacagcctgcagcccactgccgtgagccctccttacggcggtgacatctcccccgtgtctccctccagggcgtggtctccccgagccaagcaggcccccaggccctccttctctacccggaacgccgggatcgaggctcaggtgtggaagccttccttctgcttcaagtaacgaaccccacgggggtcccactgccggtcaagttcccctccttgagggccagatggagagcagatgtggcaggaaatggcacagagctgagtgaggagaatggggagtccatggttcaaggtcagatgcggccaccagctggctttgtgaccttgggcgagtcgcctcccctctctgagctgaagccgcccctcccctactacaacaggggtcggactccatgtctgagcggggaggagggtcatggagagagaactgtctggcagccctgatgcggtagaggggcatcctctggcctttgtgagctgtagggatgcagagtctgatgccagcgtcttgctgggggagtggcctagaaggggatcctaacagggacttctggagcagacagagcctgccagtgcctgtggagtcagccagccgagggtctgcctcctcagctgccccaggggggcctccctcctgaggctcaagctcctggcgtctttcttcctgttgctggattctcacctccatgggcctgtctcttctgcctctgccttctggacaccgtttcctctccgctgcttcagagagctttgcctcgcctccgcctgcgctcccctccagggtccttctgctggctgcggactcggcccaccactgctgtctgacgcttttcttcctgccccctctgaggcctggctctgttttagggagatcactgggcccaggcctcagccccagttctacctggcttgctgtcaccgctctaggggtgggggacgtcccaggggatccccaggagaaggagagccctgtagggggctgtgcagatgtgggtgtgccacagggagggtggcccctagccatgtatccattggctgttttggcttcagattcaaccaagatctgcctgactaaaagaagccacctcagcgcagtggaacggggcccagggggaggcaggagaggagggttccggtcccatgtcaccttctcatttgctgtgtgactttggcccactcacattctctttgggcctcagttttatcatttatacaaggagggcttttctagctgtaacaatctgtgaggattgagaggataggctggtgctttgaagaaaggccttgtaagtgacaagacagtcccctgggaagaaagagaaaggaaatgggctattgccaaaggacaggtggcgttagatggctgtgagggtgacctggtgagggaagggttggaatgagctgctgcaggaggccaagggatgcctgggctgggctgggctgggctggcttaggctcaggattgcctggggacagtaggagcatggcaggagctggggcaggtgcatagcagtgcagtgggaagggacagaggagatcttagaattttgaggaaaatctgggacttgagacctggattctaacagaccaactgcatgtgtgtctgtaggtctcagtttccacattcatacagtgagggtgttaagtcaggtagctggagacttcccatcgcctctgacacttttggaggtgatatgatacagcccccgaccaaaccaggctttgtggggggtgagagaatacagacacaagtggcaggattcagatggaagcttcgcaaggctgggggccgaggaccacccacttctctttcccagccctagttctgggttccccagtggggcaaggggtggtggaggcagtgcccatgctgggctgagcctgcagtttttgtgagctctgggcttgtctccatgggaacaggggtgccttcttagtgagctcatttcacacagatcgagggggtatgcgtgggggagttgtgagtgagctcagctccttcaggcctggcctctcccagaacagagtgaagcccctgccctggacccctgctcccttctacccttgagggccaccaatggaagagcccgcccttcattctgcagctcctgcggccaggctgagctctgcccccaactttgttttctctcatgttctcaatacactctgcctc

SEQ ID NO: 64573 - protein, 215 aa, Artificial Sequence
  derived and/or modified sequence
MLACLCTVLWHLPAVPALNRTGDPGPGPSIQKTYDLTRYLEHQLRSLAGTYLNYLGPPFNEPDFNPPRLGAETLPRATVDLEVWRSLNDKLRLTQNYEAYSHLLCYLRGLNRQAATAELRRSLAHFCTSLQGLLGSIAGVMAALGYPLPQPLPGTEPTWTPGPAHSDFLQKMDDFWLLKELQTWLWRSAKDFNRLKKKMQPPAAAVTLHLGAHGF

SEQ ID NO: 64574 - DNA, 648 bp, Artificial Sequence
  derived and/or modified sequence
atgctggcctgtctgtgcacggtcctctggcacctccctgccgtgccggcactcaatcggactggtgatccagggccaggaccctctattcagaaaacgtacgaccttacacggtatctcgaacatcagttgaggtcccttgctgggacttatttgaactatctagggcctcccttcaacgagccggacttcaatccaccaaggctcggcgccgagaccttacctcgcgctaccgtcgacctggaggtctggcgctccttgaatgataaactcagacttacgcagaactacgaggcttactcgcacctcctatgctatctcagagggttgaatcgacaagcagcgaccgccgagctgagacgaagtctcgctcatttctgtaccagcctacaggggcttctgggttcgatcgcaggtgtaatggcagccctggggtatccccttccgcagccactgcctggaacagaacctacgtggactcccgggcctgcccatagcgatttccttcaaaagatggatgatttctggttgttgaaagaattgcagacatggctgtggaggtccgccaaagattttaacagactgaaaaaaaaaatgcaaccaccagctgccgccgttacattgcacctaggcgctcatggcttttag

SEQ ID NO: 64575 - DNA, 648 bp, Artificial Sequence
  derived and/or modified sequence
atgcttgcgtgcctgtgcaccgtgttgtggcatctgcctgcagttcctgcactgaatcgaacgggagaccctggccctggcccctcaattcagaaaacctacgatctcacgcggtacttggaacaccagctcaggtcactggcggggacctatttgaactacctgggacccccctttaacgagcccgactttaacccaccgcggctgggagcagaaaccctgcctcgagcaaccgtggatctggaggtctggcgctccctaaacgataagctacggcttacccagaattacgaggcctattcacatctgctgtgttacctccgaggcctgaaccgccaggccgcaactgcagagctccgccgatcactcgctcacttttgcacttcactgcaaggcctcttaggcagtatcgcgggggtgatggccgcactgggctacccactcccacaacctctgcccggcacagagcctacttggacgcccggccctgcccactccgattttctccagaagatggatgatttctggctgctcaaggaattacagacatggctgtggcgttcagccaaggactttaatcggctgaaaaaaaagatgcagccccctgctgccgccgtgactttacatttgggggcccatggcttttag

SEQ ID NO: 64576 - DNA, 648 bp, Artificial Sequence
  derived and/or modified sequence
atgctggcctgcctgtgcaccgtgctgtggcacctgcctgctgtgcctgccctgaacagaactggagaccccggccctggccccagcatccagaagacctatgacctgacccgctacctggagcaccagctgcggagcctggccggcacctacctgaactacctgggcccccccttcaatgaaccagacttcaaccccccccggctgggcgctgagaccctgccccgggccaccgtggacctggaggtgtggaggagcctgaatgacaagctgcggctgacccagaactatgaggcctacagccacctgctgtgctacctgcggggcctgaaccggcaggccgccacagctgagctgcggcgcagcctggcccacttctgcaccagcctgcagggcctgctgggcagcattgctggggtgatggccgccctgggctaccccctgccccagcccctgcctggaacagagcccacctggaccccaggccctgcccacagcgacttcctgcagaagatggatgacttctggctgctgaaggagctgcagacctggctgtggaggtctgccaaggacttcaaccggctgaagaagaagatgcagcccccagctgctgctgtgaccctgcacctgggcgcccacggcttctag

SEQ ID NO: 64577 - DNA, 648 bp, Artificial Sequence
  derived and/or modified sequence
atgctggcctgcctgtgcaccgtgctgtggcacctgcccgccgtgcctgctttgaacagaaccggtgacccgggaccaggcccatcaatccaaaaaacctatgatctgaccagatacctggagcaccagctaagatctctggcagggacatatctgaattacttggggcccccttttaacgaaccggatttcaaccctccaagactgggcgctgagactctgcctagggcaacagttgacctcgaggtctggcgcagcctgaatgacaagctgcgcctcacgcaaaattacgaagcttacagccaccttctttgctacctgcgtgggctgaaccggcaggcagccaccgccgaactgcgacggagcttagcacatttctgtacatcactccagggtcttctgggatctattgccggggtgatggccgctctgggctatccgttacctcagcctcttcccgggacagagcccacttggaccccaggtcccgctcattccgacttcctacagaaaatggacgacttttggctgctgaaggagctccagacgtggctgtggagatccgcaaaggacttcaaccgcctcaagaaaaaaatgcagccccccgctgctgctgtcaccctacacctcggggcacatggcttttag

SEQ ID NO: 64578 - DNA, 648 bp, Artificial Sequence
  derived and/or modified sequence
atgctggcctgcctgtgcaccgtgctgtggcacctgcccgccgtgcctgctttgaacaggaccggagatcctgggccaggcccaagcatacagaagacatacgacctgacgaggtatttggagcatcagctgcgttccctggcggggacttatcttaattacctgggtcctcctttcaacgagcccgacttcaatccccccaggttgggggccgagaccttacctcgagccacagttgacttagaagtgtggagaagtctcaatgataaactgcgcctcacacagaactacgaagcctacagccatctcctatgttaccttcgtggcctcaaccgacaggccgctacagccgagctccggagaagcctcgcgcacttctgcacctctctgcagggtttactgggttcgatagcgggcgtcatggccgcgctgggttatcccttaccacagccattacctgggactgaacctacatggacaccaggtcctgcacattccgattttctgcagaagatggacgacttttggctgctgaaggaactccaaacatggctctggcggtctgctaaagatttcaacagactcaagaaaaagatgcaaccccccgctgccgccgtcaccctgcacctcggggcccacggcttctag

SEQ ID NO: 64579 - DNA, 648 bp, Artificial Sequence
  derived and/or modified sequence
atgcttgcatgtctgtgtacggtgctgtggcacctaccggctgtacccgctctgaaccgcaccggagaccccggaccagggccttccatccagaaaacttacgacttaacgcggtacctggaacatcagttgcgttctctcgccggtacgtacttgaattatttaggccctcctttcaacgagcccgacttcaatccgccacgactgggggcagaaacactgcccagggctactgtcgatctcgaggtctggcgctccctgaatgacaagctgcgcctgacacagaattacgaggcctatagtcaccttctgtgctaccttcgcggtctcaataggcaggcagctactgccgaactcaggcgctcacttgcgcatttttgcaccagcctgcagggtctgctgggatccatagctggggtaatggctgccttgggctacccactcccccagccattaccgggaacagaacctacttggaccccgggacccgcacattctgactttttgcaaaagatggatgatttttggctgctgaaggaactgcagacttggttgtggcgaagtgcaaaggattttaataggctcaagaaaaaaatgcagccccctgctgcggcagtcaccctgcatctcggggctcacgggttctag

SEQ ID NO: 64580 - DNA, 648 bp, Artificial Sequence
  derived and/or modified sequence
atgctcgcctgtctgtgcacggtgctgtggcatttgcccgcagtgccagccctcaataggactggagacccagggccaggaccaagtatccagaaaacttacgatttaacccggtacctagagcatcagctaagaagtctcgcaggcacatacctcaactatctgggccctcctttcaacgaacctgacttcaacccgcctcgactaggcgctgagactcttccacgcgcaactgtggaccttgaggtttggaggtcacttaacgacaagctgagactcactcaaaattacgaggcctactcacacctactgtgctacctgagaggattgaaccgacaggccgctacagccgagctgaggcgatctctcgctcatttttgtacctccctacaaggtctgctggggtcgattgcgggagtgatggcagccctggggtatcctttaccacaacctttgcctggtactgaacccacctggacccccggacccgcacattcagactttctacagaagatggatgacttctggctgcttaaggagctgcagacgtggctttggaggtcggccaaggacttcaacaggctcaaaaaaaaaatgcagccgcctgccgctgctgtgacgcttcacttaggcgcacatgggttctag

SEQ ID NO: 64581 - DNA, 648 bp, Artificial Sequence
  derived and/or modified sequence
atgctggcctgcctgtgcaccgtgctgtggcacctgcccgccgtgcccgccctgaacagaaccggcgaccccggccccggccccagcatccagaagacctacgacctgaccagatacctggagcaccagctgagaagcctggccggcacctacctgaactacctgggcccccccttcaacgagcccgacttcaacccccccagactgggcgccgagaccctgcccagagccaccgtggacctggaggtgtggagaagcctgaacgacaagctgagactgacccagaactacgaggcctacagccacctgctgtgctacctgagaggcctgaacagacaggccgccaccgccgagctgagaagaagcctggcccacttctgcaccagcctgcagggcctgctgggcagcatcgccggcgtgatggccgccctgggctaccccctgccccagcccctgcccggcaccgagcccacctggacccccggccccgcccacagcgacttcctgcagaagatggacgacttctggctgctgaaggagctgcagacctggctgtggagaagcgccaaggacttcaacagactgaagaagaagatgcagccccccgccgccgccgtgaccctgcacctgggcgcccacggcttctag

SEQ ID NO: 64582 - protein, 398 aa, Artificial Sequence
  derived and/or modified sequence
MESGLLRPAPVSEVIVLHYNYTGKLRGARYQPGAGLRADAVVCLAVCAFIVLENLAVLLVLGRHPRFHAPMFLLLGSLTLSDLLAGAAYAANILLSGPLTLKLSPALWFAREGGVFVALTASVLSLLAIALERSLTMARRGPAPVSSRGRTLAMAAAAWGVSLLLGLLPALGWNCLGRLDACSTVLPLYAKAYVLFCVLAFVGILAAICALYARIYCQVRANARRLPARPGTAGTTSTRARRKPRSLALLRTLSVVLLAFVACWGPLFLLLLLDVACPARTCPVLLQADPFLGLAMANSLLNPIIYTLTNRDLRHALLRLVCCGRHSCGRDPSGSQQSASAAEASGGLRRCLPPGLDGSFSGSERSSPQRDGLDTSGSTGSPGAPTAARTLVSEPAAD

SEQ ID NO: 64583 - protein, 310 aa, Artificial Sequence
  derived and/or modified sequence
MESGLLRPAPVSEVIVLHYNYTGKLRGARYQPGAGLRADAVVCLAVCAFIVLENLAVLLVLGRHPRFHAPMFLLLGSLTLSDLLAGAAYAANILLSGPLTLKLSPALWFAREGGVFVALTASVLSLLAIALERSLTMARRGPAPVSSRGRTLAMAAAAWGVSLLLGLLPALGWNCLGRLDACSTVLPLYAKAYVLFCVLAFVGILAAICALYALAGLAAHAQRGAPGLCGMLGPPLPAAVARRGVPGAHLSCTPAGRSLPGTGHGQLTSEPHHLHAHQPRPAPRAPAPGLLRTPLLRQRPEWLPAVGERG

SEQ ID NO: 64584 - DNA, 1197 bp, Artificial Sequence
  derived and/or modified sequence
atggagagcggcctgctgagacccgcccccgtgagcgaggtgatcgtgctgcactacaactacaccggcaagctgagaggcgccagataccagcccggcgccggcctgagagccgacgccgtggtgtgcctggccgtgtgcgccttcatcgtgctggagaacctggccgtgctgctggtgctgggcagacaccccagattccacgcccccatgttcctgctgctgggcagcctgaccctgagcgacctgctggccggcgccgcctacgccgccaacatcctgctgagcggccccctgaccctgaagctgagccccgccctgtggttcgccagagagggcggcgtgttcgtggccctgaccgccagcgtgctgagcctgctggccatcgccctggagagaagcctgaccatggccagaagaggccccgcccccgtgagcagcagaggcagaaccctggccatggccgccgccgcctggggcgtgagcctgctgctgggcctgctgcccgccctgggctggaactgcctgggcagactggacgcctgcagcaccgtgctgcccctgtacgccaaggcctacgtgctgttctgcgtgctggccttcgtgggcatcctggccgccatctgcgccctgtacgccagaatctactgccaggtgagagccaacgccagaagactgcccgccagacccggcaccgccggcaccaccagcaccagagccagaagaaagcccagaagcctggccctgctgagaaccctgagcgtggtgctgctggccttcgtggcctgctggggccccctgttcctgctgctgctgctggacgtggcctgccccgccagaacctgccccgtgctgctgcaggccgaccccttcctgggcctggccatggccaacagcctgctgaaccccatcatctacaccctgaccaacagagacctgagacacgccctgctgagactggtgtgctgcggcagacacagctgcggcagagaccccagcggcagccagcagagcgccagcgccgccgaggccagcggcggcctgagaagatgcctgccccccggcctggacggcagcttcagcggcagcgagagaagcagcccccagagagacggcctggacaccagcggcagcaccggcagccccggcgcccccaccgccgccagaaccctggtgagcgagcccgccgccgactag

SEQ ID NO: 64585 - DNA, 933 bp, Artificial Sequence
  derived and/or modified sequence
atggagagcggcctgctgagacccgcccccgtgagcgaggtgatcgtgctgcactacaactacaccggcaagctgagaggcgccagataccagcccggcgccggcctgagagccgacgccgtggtgtgcctggccgtgtgcgccttcatcgtgctggagaacctggccgtgctgctggtgctgggcagacaccccagattccacgcccccatgttcctgctgctgggcagcctgaccctgagcgacctgctggccggcgccgcctacgccgccaacatcctgctgagcggccccctgaccctgaagctgagccccgccctgtggttcgccagagagggcggcgtgttcgtggccctgaccgccagcgtgctgagcctgctggccatcgccctggagagaagcctgaccatggccagaagaggccccgcccccgtgagcagcagaggcagaaccctggccatggccgccgccgcctggggcgtgagcctgctgctgggcctgctgcccgccctgggctggaactgcctgggcagactggacgcctgcagcaccgtgctgcccctgtacgccaaggcctacgtgctgttctgcgtgctggccttcgtgggcatcctggccgccatctgcgccctgtacgccctggccggcctggccgcccacgcccagagaggcgcccccggcctgtgcggcatgctgggcccccccctgcccgccgccgtggccagaagaggcgtgcccggcgcccacctgagctgcacccccgccggcagaagcctgcccggcaccggccacggccagctgaccagcgagccccaccacctgcacgcccaccagcccagacccgcccccagagcccccgcccccggcctgctgagaacccccctgctgagacagagacccgagtggctgcccgccgtgggcgagagaggctag

SEQ ID NO: 64586 - DNA, 1197 bp, Artificial Sequence
  derived and/or modified sequence
atggaatccggccttcttcgacctgcgcctgtgagcgaagtcatagtgctgcactacaattatactgggaaattacggggcgcccgataccaacctggagccggtctcagggccgacgccgtcgtctgcctggcagtctgcgcattcattgtgctagagaaccttgcagttctcctggtgctgggtagacaccctcgttttcacgcccccatgttcttgttattgggcagcttaaccctatctgacctgcttgccggcgctgcttatgcggccaatatcttgctctccggcccactgactctaaagttatcccccgctctctggtttgctcgcgaagggggggtttttgtggctcttactgcctcggtgctttccctcttggcaattgccctcgaacgatctctgaccatggcccgacgcgggcccgcccccgtgtcctctcggggtcgaaccttggccatggccgctgctgcctggggggtgagcctgctactaggccttctgcccgctttaggatggaattgcctggggcgcctcgacgcgtgctctacagtgctccctctttatgctaaagcctatgtcttgttctgtgtgttggccttcgtgggtatcctggccgcaatctgtgcactgtacgcaagaatctactgccaggtgcgagccaacgcacggagactgcctgctagacccggcactgctggaacaacctccaccagagccaggcgtaagcctagatcccttgctctcctgcggacactgagtgtcgtccttctggcattcgttgcttgctgggggcccctttttcttctgttactcctggatgtggcctgtcctgcaaggacatgtccagtactgcttcaggcggaccctttccttggactcgcaatggccaacagtctcctcaacccaatcatttataccctgacaaacagagacctcaggcatgcgctcctccgactcgtgtgctgtggcaggcattcatgtgggcgggatcccagtggatctcagcagagcgccagcgcggccgaggcctcaggcggtctgagaaggtgtctgcctccaggacttgacgggagtttctccggcagcgaaagatcttccccacagcgcgatggcctggacacatctggctcaaccggcagtcccggcgctcccacggccgcccggactttagtctctgagccggctgcagactag

SEQ ID NO: 64587 - DNA, 933 bp, Artificial Sequence
  derived and/or modified sequence
atggaatcagggcttctgcggccagccccagtatcagaggtgatagttctgcattataactacaccgggaagcttcgtggagcaaggtaccaaccaggcgctggattacgcgccgatgcggtggtatgtctggccgtctgcgctttcattgtcctcgagaacctcgctgtgcttttagtgttggggcgacatccacggttccatgctcccatgtttttgctgctgggaagcctcacgctcagtgatctgctcgccggagccgcctacgctgctaacatcctcttgtccggacccctcaccttaaagctatctcccgccctctggttcgcgcgtgaagggggagtatttgtcgctctgacagctagcgtattaagcctgctcgctatagctctggaacgctccctgacaatggcaaggcgcggtcccgcaccggtatctagccgtgggagaacgctcgctatggccgcagcagcatggggtgtgtcgctcctgctcggacttctccccgctttggggtggaactgcttggggaggctagacgcttgttctaccgtactccccctttacgctaaggcgtacgttctcttctgcgtgctggcctttgtcggaatactggcagctatctgcgcactctacgccctggccggtctagccgcccatgctcaacgtggtgcccccgggctgtgtggtatgctgggacccccactgcccgccgcagtggctcggagaggggttccaggtgcacacctgagctgtaccccagccgggcggagcctccccggaaccggacacggtcaactcacaagcgaaccgcaccacctgcacgctcaccagcccaggcccgcaccccgtgctccggcacccgggttgctacggacacccttactcagacagcgcccagagtggctcccagccgtgggagaacggggttag

SEQ ID NO: 64588 - DNA, 1197 bp, Artificial Sequence
  derived and/or modified sequence
atggaaagcgggctcctaaggcctgcgccagtgagtgaagtcatcgtgctgcactacaactacacaggcaaattacgaggcgcaagataccagccaggtgcgggcctgagagcggatgccgtggtttgcctggctgtttgcgcttttattgtgcttgaaaatcttgcggtcttgcttgtattgggacgtcacccaagatttcatgccccgatgtttctcctcttgggttctttgacactgagcgacctgctcgctggggccgcctatgccgctaacatactgctgagcggtcccctgactcttaaattgtccccagccctctggttcgctcgcgagggaggcgtgtttgtggctctaaccgcttccgtgctgagcctgctggcaatcgctctcgaaagatccctcacaatggccaggcgcggccccgcccctgtctcctctcggggacggaccttagcgatggctgctgctgcatggggagtgagcctgcttctcggactcttgccagcccttggctggaactgcttggggcgcctggatgcttgttctacagtcctcccgctttatgccaaagcctatgtattattttgcgtacttgctttcgtcgggatcctggcagccatttgtgctctttacgccagaatatattgccaggtaagagccaatgcccggcggctaccggctcgcccaggcactgccgggacaacttctaccagagctaggcgtaagccccgctccctggccctactaagaacactcagcgtggtgttattggcgttcgtggcttgctggggacccctgttcctgctcctcctcctggacgtcgcctgccctgctagaacttgcccagtgctcttgcaagctgacccttttctaggattagcaatggctaacagcttgctgaaccccattatctacacccttacaaaccgcgaccttcgccacgctctgctgcgtctcgtctgttgtggccggcattcatgcggtcgtgacccgtctggctcccagcagtccgcaagtgctgccgaagcttccggtggacttcgcaggtgcctccccccgggactcgacgggagcttttcaggctcagaaagatctagcccacagcgcgatgggcttgacacctcaggaagcacaggttccccaggcgctccaactgcagcacgaactcttgtttcagagcccgccgcagattag

SEQ ID NO: 64589 - DNA, 1197 bp, Artificial Sequence
  derived and/or modified sequence
atggagagcggcctgctgcggcctgcccctgtgtctgaggtgattgtgctgcactacaactacaccgggaagctgcggggggcccgctaccagcccggggccggcctgcgggcagatgctgtggtgtgcctggccgtgtgtgccttcatcgtgctggagaacctggccgtgctgctggtgctgggccgccacccccgcttccacgcccccatgttcctgctgctgggcagcctgaccctgagtgacctgctggccggggccgcctatgctgccaacatcctgctgagcggccccctgaccctgaagctgagccctgccctgtggtttgcccgggagggcggcgtgtttgtggccctgacagcctctgtgctgagcctgctggccatcgccctggagaggagcctgaccatggcccggcggggccctgcccctgtgagcagccggggccgcaccctggccatggctgctgctgcctggggcgtgtccctgctgctgggcctgctgcctgccctgggctggaactgcctgggccgcctggatgcctgcagcacagtgctgcccctgtatgccaaggcctacgtgctcttctgtgtgctggcctttgtgggcatcctggccgccatctgtgccctgtatgcccgcatctactgccaggtgcgggccaatgcccggcggctgcctgcccggcccggcacagctggcaccaccagcacccgggcccggaggaagcccaggagcctggccctgctgcggaccctgtctgtggtgctgctggcctttgtggcctgctggggccccctcttcctgctgctgctgctggatgtggcctgcccagcccggacctgccctgtgctgctgcaggccgaccccttcctgggcctggccatggccaacagcctgctgaaccccatcatctacaccctgaccaacagagacctgcggcatgccctgctgcggctggtgtgctgcggccgccacagctgtggccgggaccccagcggcagccagcagagcgccagcgctgctgaggccagcggcggcctgcggcgctgcctgcccccaggcctggatggcagcttcagcggcagcgagaggagcagcccccagagagatggcctggacaccagcggcagcacaggcagccctggggcccccacagctgcccggaccctggtgtctgagcctgctgctgactag

SEQ ID NO: 64590 - DNA, 933 bp, Artificial Sequence
  derived and/or modified sequence
atggagagcggcctgctgcggcctgcccctgtgtctgaggtgattgtgctgcactacaactacaccgggaagctgcggggggcccgctaccagcccggggccggcctgcgggcagatgctgtggtgtgcctggccgtgtgtgccttcatcgtgctggagaacctggccgtgctgctggtgctgggccgccacccccgcttccacgcccccatgttcctgctgctgggcagcctgaccctgagtgacctgctggccggggccgcctatgctgccaacatcctgctgagcggccccctgaccctgaagctgagccctgccctgtggtttgcccgggagggcggcgtgtttgtggccctgacagcctctgtgctgagcctgctggccatcgccctggagaggagcctgaccatggcccggcggggccctgcccctgtgagcagccggggccgcaccctggccatggctgctgctgcctggggcgtgtccctgctgctgggcctgctgcctgccctgggctggaactgcctgggccgcctggatgcctgcagcacagtgctgcccctgtatgccaaggcctacgtgctcttctgtgtgctggcctttgtgggcatcctggccgccatctgtgccctgtatgccctggccggcctggccgcccacgcccagagaggagcccctggcctgtgtggcatgctgggcccccccctgcctgctgctgtggcccggcggggcgtgcctggggcccacctgagctgcaccccagctggccgcagcctgcccggcaccggccacggccagctgaccagcgagccccaccacctgcacgcccaccagcccaggcctgccccccgggccccagcccctggcctgctgcggacccccctgctgcggcagaggcctgagtggctgcctgctgtgggggagcggggctag

SEQ ID NO: 64591 - DNA, 1197 bp, Artificial Sequence
  derived and/or modified sequence
atggagagcggcctgctgcggcccgcccccgtgagcgaggtgatcgttctccactacaactataccggcaaactgaggggagcaagatatcagccaggtgccggtctgcgcgcagatgccgtggtctgcttagccgtctgcgcctttattgtgctagagaacctagccgtgctcttggtactgggccgacatccacggtttcacgccccaatgttccttctcctgggcagcctgacactgagtgacctattggcaggagctgcttatgccgccaatatcctgctaagtggcccccttaccctgaagctctccccagcactttggtttgcgcgggaagggggagtgttcgtcgccctcacggcttccgtactgtcactgctcgctatcgccctggaaaggagcctgaccatggctagaagaggtccagctcctgtgagctcccgggggcgtaccctcgccatggctgccgcggcttggggcgtctccttgctgctgggcctcctgcctgcactcgggtggaattgtctgggacgcctggacgcttgcagcaccgtgctgcccctttatgcgaaagcttacgtccttttctgcgtgctggcatttgtcggtatcctcgcagccatatgcgctctgtacgcaaggatttactgccaggtgcgtgccaacgccagacggctgccggctcgcccggggaccgctggaacgactagcactagagctcgcagaaagccgcgctcactagcgctgctgcggacactctccgttgtgcttttggcattcgtcgcatgttgggggcctttatttctgctcctcctattggatgtagcgtgtccggccaggacctgccccgtgctgttgcaggcagatcccttccttgggctcgctatggctaacagcttgctgaaccctattatctacacattgacaaatcgagacttaaggcatgcactcctgcgcctcgtctgctgcggacggcatagctgtggacgggatccttcaggttctcagcagagtgctagcgccgccgaggctagcggcggcctgcgcagatgtctcccgccaggcttagatgggagcttctccggatcagagcgcagttctccccagcgggacggtttggacacaagcgggagtaccgggtcaccgggcgccccaacagccgcacgcaccctagtgagcgagccagcagccgactag

SEQ ID NO: 64592 - DNA, 933 bp, Artificial Sequence
  derived and/or modified sequence
atggagagcggcctgctgcggcccgcccccgtgagcgaggtgatcgtcctccattacaactacaccgggaagttaaggggggccagatatcagcctggcgctggccttcgggccgatgctgtggtgtgcctggccgtttgtgccttcatcgttttggagaacttggcagtcttgcttgtgctgggaaggcatccgcgttttcacgcgccaatgtttctgctgctgggaagccttaccttgtctgacttgttggccggggccgcatatgcagcaaatattttgctgtccggtccactcacgttgaaactgtcaccagccctttggttcgcccgggaggggggggtgttcgttgctctgactgcctcagtcttgagcctcttagcgatcgctctggagaggtctctgacgatggctcggaggggcccagcaccagtctcttcgagaggtcgcactctggccatggccgccgccgcctggggagtgtcgttactgctgggactcctgcctgctctcggctggaactgtcttggcagactggatgcctgtagcactgtgctcccgctctacgccaaagcttatgttttattttgcgtcctggctttcgtggggattctggctgcaatttgtgccctttatgcactggcagggttggcggcccacgcccagagaggagctcctggtctttgtgggatgctgggaccccctcttcccgcagctgtggcacggaggggtgtgccgggcgcccatctgtcttgcaccccagcgggaaggagcctgcccgggaccggacacggacaattgacctccgaacctcaccatcttcatgcccaccagcctcgcccggcgcctagggcccctgcccccggactattacgcacaccgctgcttaggcagaggcccgagtggctgccagcagtgggcgaacgcggttag

SEQ ID NO: 64593 - DNA, 1197 bp, Artificial Sequence
  derived and/or modified sequence
atggagagcggcctgctgcggcccgcccccgtgagcgaggtgatcgttcttcattataattacactgggaaacttcgcggggctcgctatcaacctggcgccggtctcagggcggatgccgtggtctgcttggcagtctgcgctttcatagtgctggagaacctggcagtcctgctggtacttggtaggcatcctaggtttcatgctcctatgttcctcctccttggctctctcactctgtccgatctcctcgcaggcgccgcttatgcagcgaacatcctgctttctggtcccctcactctgaaactgtctcccgccctgtggttcgctcgggagggtggagtcttcgtggctcttaccgcatccgtcctaagcctgcttgctatcgccctggaacgctccctcactatggcccgtagaggtcctgctcctgttagttctcgcggtcgaactttggctatggccgcagccgcttggggcgtgagtctgctcttggggctccttcccgcactgggctggaactgtttaggtaggctggatgcctgctcgacagttttgcctctgtacgcaaaggcctatgtgctgttctgtgtgctagcattcgttggcatccttgccgccatctgcgcattgtacgcgcgcatttactgccaggtgagagcaaatgctcgcaggttgcctgctaggccaggcacggcggggaccaccagcacgagggcccgtcgaaagccaagatcccttgctttactcagaactctaagtgtcgtgttactggccttcgtggcatgctgggggccactatttctgttgctgctgctcgacgtggcctgtcctgcgcgcacttgccccgtgctacttcaagccgatccattcctgggtctcgccatggccaattccctgctgaatcctatcatttacacactgaccaaccgcgaccttcgacatgctctactgcgactcgtgtgttgtgggagacattcttgtggacgtgatcccagtgggagccagcagtccgcttccgccgctgaggctagtggaggacttaggaggtgtctgccccctggtcttgacgggagtttcagcggctccgagagatccagcccccagagagacggactcgatacctccggatccacaggcagtcccggggcccccaccgctgctcggaccttggttagtgagcctgccgccgactag

SEQ ID NO: 64594 - DNA, 1197 bp, Artificial Sequence
  derived and/or modified sequence
atggagagcggcctactgagaccagctccggtgtctgaggttatagtgttacactataattacaccggcaaactgcggggagcgagatatcaaccaggagccggactgcgggctgatgccgtcgtgtgcttggctgtgtgcgcattcatcgtccttgagaacctggctgtcctgcttgtgttagggaggcatccaagattccatgctccaatgttcctgctgctgggctccttaactctttcagacctgctcgctggcgctgcctacgctgccaatatcctcctgagtggaccgctgacacttaaactctctccagcactgtggttcgctcgtgagggaggagttttcgtggcactgaccgcctcagtactgtctttgctggcgatcgcactcgaaagatcgctcacgatggccagacgaggacccgcacccgtttcgagtcggggtcgcacccttgccatggctgccgctgcctggggggtgtcacttcttctagggctcttgccggctcttggatggaactgtctcggacgacttgacgcctgcagcactgtgctcccgctttatgcaaaagcatatgtgcttttttgtgtcttagcctttgttggaattctggctgctatctgcgctctgtatgctaggatctattgccaagtgcgcgctaacgctaggcgcctcccagcccgtcccggaaccgctgggactacttccacgagagcacgcaggaagccacggagtctggccctacttcgtacattatcagttgtactcctagcgtttgtggcctgttggggtcccttgtttttgctgctccttctcgatgtggcctgccccgcacgaacttgtccggtgttgctccaggccgaccctttcctaggccttgctatggccaatagcctgctgaacccgatcatctacaccctgactaacagggatctgagacatgcactgttaagattagtgtgctgtggaagacacagctgcggacgcgacccgtccggatcccagcaatcagcaagcgctgccgaggcttctggagggcttagaagatgcctccctcccggactggatggctcctttagcggcagcgaacgctcatcccctcaacgggatggactggacaccagcggcagcactggctcacccggtgcacctaccgcggctcgcactttagtaagcgaacccgcagccgactag

SEQ ID NO: 64595 - DNA, 933 bp, Artificial Sequence
  derived and/or modified sequence
atggagagcggcctgctgcggccagcaccagtgtctgaggtgattgtcctccactataactataccggaaagttgcgtggcgcaagataccaacccggagccggtctgcgagcagacgctgttgtgtgtctggcagtttgtgcgtttatagtcttggagaacctggctgtcttactggttcttgggaggcacccacgattccatgctcctatgtttctcctgttgggctcactgacgctgtcagatctgctcgctggcgcagcctatgcagctaacatactcctgtccggtccactgacactgaagttaagcccagctctgtggtttgccagggagggcggagtatttgtggctctcactgcctcggtgcttagtctcctggccatcgccctggagaggtcccttacaatggccagaaggggtccggcacctgtcagctcaagaggccgaacccttgctatggccgcagctgcctggggcgtctcgttactcctaggtctgctgcctgctctgggatggaactgtttaggcagacttgatgcttgttccactgtgttgcctctttacgccaaagcctacgttctgttctgtgtcctcgctttcgtgggaatattggcagctatttgcgcactgtacgccctggctggtctcgcagcccatgctcagagaggcgcaccagggttgtgtgggatgttaggaccaccccttcccgcagccgtcgctcggagaggcgtgcccggagctcatctgtcatgcacaccagctggaagatctctgcccggtaccggccatggacagctaacctccgagcctcaccacttgcacgctcaccagcccaggccagctccacgagctcctgccccagggctgctacgtactcctttattgcggcagcggcctgagtggcttcccgcagtgggtgaacgcggttag

SEQ ID NO: 64596 - DNA, 1197 bp, Artificial Sequence
  derived and/or modified sequence
atggagagtggcctcctgaggccagccccagtctccgaggtgattgtgctccactacaactatacgggaaagctgagaggcgctcggtaccagccaggggctggcttgcgagcagacgcagtggtctgtctcgccgtttgtgcattcattgtcttggaaaacctggccgtcttactggtgcttgggcgacatccaaggttccatgcaccgatgtttctgctacttgggtccttaaccctgagcgaccttctcgcaggtgctgcttatgcggcaaatatcctattgagcggaccactgacactgaaattaagtcccgctctctggtttgcccgtgagggcggagtcttcgttgctttaacagctagtgtcctaagtttgctggcaatcgctctagagagatccctgactatggcaagacgtggaccagcacccgtatcttctaggggaaggactttagccatggctgccgctgcatggggcgtttcgttattgttagggctgctgcccgctctcggttggaactgtctggggagactcgacgcatgctccaccgtgctacctctgtatgccaaagcctacgtgttattctgcgtccttgcatttgtgggcatactcgcagcgatctgcgcactgtacgctcgcatttattgccaggtgcgtgctaatgctaggaggctaccagcccgacccggtaccgctgggacgactagcactagggcgagaaggaaaccacggagcctggcccttcttcgcacgctttctgtggtgttgctggcatttgttgcgtgttggggtcccctgttcctcttgctgttgctggacgtggcatgtcctgctagaacttgcccggtgctgctccaagcagatcccttcctcggactggccatggctaattctcttctgaaccctatcatctataccctcactaatcgcgacctgcgccacgccttactcaggcttgtgtgctgcggaaggcacagctgcggcagagatcccagcggttcacagcagtcagcttctgccgcagaggcctccgggggtctgcgaaggtgcttacctccgggactggacggtagcttctccggctctgagcgctcttccccccagcgcgacggcttagacacgagcggttccaccgggtcaccaggggctccaactgccgctcgaacacttgtctccgaaccagccgcagattag

SEQ ID NO: 64597 - DNA, 2340 bp, Artificial Sequence
  derived and/or modified sequence
ctcactcggttcaaggcagcgcgactgcgggtggcgcacgaccagggcgcagaccttggggcgcgcggcccatggagtcggggctgctgcggccggcgccggtgagcgaggtcatcgtcctgcattacaactacaccggcaagctccgcggtgcgcgctaccagccgggtgccggcctgcgcgccgacgccgtggtgtgcctggcggtgtgcgccttcatcgtgctagagaatctagccgtgttgttggtgctcggacgccacccgcgcttccacgctcccatgttcctgctcctgggcagcctcacgttgtcggatctgctggcaggcgccgcctacgccgccaacatcctactgtcggggccgctcacgctgaaactgtcccccgcgctctggttcgcacgggagggaggcgtcttcgtggcactcactgcgtccgtgctgagcctcctggccatcgcgctggagcgcagcctcaccatggcgcgcagggggcccgcgcccgtctccagtcgggggcgcacgctggcgatggcagccgcggcctggggcgtgtcgctgctcctcgggctcctgccagcgctgggctggaattgcctgggtcgcctggacgcttgctccactgtcttgccgctctacgccaaggcctacgtgctcttctgcgtgctcgccttcgtgggcatcctggccgctatctgtgcactctacgcgcgcatctactgccaggtacgcgccaacgcgcggcgcctgccggcacggcccgggactgcggggaccacctcgacccgggcgcgtcgcaagccgcgctcgctggccttgctgcgcacgctcagcgtggtgctcctggcctttgtggcatgttggggccccctcttcctgctgctgttgctcgacgtggcgtgcccggcgcgcacctgtcctgtactcctgcaggccgatcccttcctgggactggccatggccaactcacttctgaaccccatcatctacacgctcaccaaccgcgacctgcgccacgcgctcctgcgcctggtctgctgcggacgccactcctgcggcagagacccgagtggctcccagcagtcggcgagcgcggctgaggcttccgggggcctgcgccgctgcctgcccccgggccttgatgggagcttcagcggctcggagcgctcatcgccccagcgcgacgggctggacaccagcggctccacaggcagccccggtgcacccacagccgcccggactctggtatcagaaccggctgcagactgacaccctcggcccacgactgtcttcccaagttttacagacttgttctttttacataaaggaatttgtaggaaatgcagccaaaggtgcagtcggaaaagatgcaggggaaatgtatttatgcagcgacaccccacaatgtgaacaaacagacaaaaaatctgtgccctcgtggaattgacgttctgcttgggaacacagaaaagaactcggtgatgaaataatggagatgattccagtgacaaacgacagagatggtgatggtggtcagggaagacctctctgcagaggtagtgacttgtgatgtgagctgagacctctgtcctgggaagaccaaaagaaaagcatttcaggatgagggaatggcatgcgcaaaggccctgaggctgaaatgtgcccatgtgttctaagaaatgcagcgatgctggtgtgcctggagcagggacggagggggagaatgggaggagacaaggagctgaaggagtagttcccgaaggaccttgtgggtgatatagaggacttcgcttttgctctgagtgaggtgggagccatagaagcttctaagcagaagagggacttgccctaattcaggtgatcacaggtgtcttgtggcctccatgggaggttgaaaaccagagaaggtgaaggggggctgcactgagccacaggaacaatgatggagattccagctaagcccagaccccgtggattctagatagattttagaggcagcagacagaattactgaggaattgagtgtaagagtggaataaagttatcaaggacaatgccaagggtggggcacccccaaatttgactctgggagactcagccaaatcctatctggtaataaaatttcttttttatttttcttttctttctttctttcttttttttttttttgagttgggatcttgtgctctgtcacccaggctggagtgcaatgggcacaattatagctcactgcagcctggaactcctgggatcaagcctggagttcctgcttcagcctccctagtagctgggactacaggcatgcaccaccatgcccagttaataaaatttcttcaaatgc

SEQ ID NO: 64598 - DNA, 2043 bp, Artificial Sequence
  derived and/or modified sequence
gctcactcggttcaaggcagcgcgactgcgggtggcgcacgaccagggcgcagaccttggggcgcgcggcccatggagtcggggctgctgcggccggcgccggtgagcgaggtcatcgtcctgcattacaactacaccggcaagctccgcggtgcgcgctaccagccgggtgccggcctgcgcgccgacgccgtggtgtgcctggcggtgtgcgccttcatcgtgctagagaatctagccgtgttgttggtgctcggacgccacccgcgcttccacgctcccatgttcctgctcctgggcagcctcacgttgtcggatctgctggcaggcgccgcctacgccgccaacatcctactgtcggggccgctcacgctgaaactgtcccccgcgctctggttcgcacgggagggaggcgtcttcgtggcactcactgcgtccgtgctgagcctcctggccatcgcgctggagcgcagcctcaccatggcgcgcagggggcccgcgcccgtctccagtcgggggcgcacgctggcgatggcagccgcggcctggggcgtgtcgctgctcctcgggctcctgccagcgctgggctggaattgcctgggtcgcctggacgcttgctccactgtcttgccgctctacgccaaggcctacgtgctcttctgcgtgctcgccttcgtgggcatcctggccgctatctgtgcactctacgcgctcgctggccttgctgcgcacgctcagcgtggtgctcctggcctttgtggcatgttggggccccctcttcctgctgctgttgctcgacgtggcgtgcccggcgcgcacctgtcctgtactcctgcaggccgatcccttcctgggactggccatggccaactcacttctgaaccccatcatctacacgctcaccaaccgcgacctgcgccacgcgctcctgcgcctggtctgctgcggacgccactcctgcggcagagacccgagtggctcccagcagtcggcgagcgcggctgaggcttccgggggcctgcgccgctgcctgcccccgggccttgatgggagcttcagcggctcggagcgctcatcgccccagcgcgacgggctggacaccagcggctccacaggcagccccggtgcacccacagccgcccggactctggtatcagaaccggctgcagactgacaccctcggcccacgactgtcttcccaagttttacagacttgttctttttacataaaggaatttgtaggaaatgcagccaaaggtgcagtcggaaaagatgcaggggaaatgtatttatgcagcgacaccccacaatgtgaacaaacagacaaaaaatctgtgccctcgtggaattgacgttctgcttgggaacacagaaaagaactcggtgatgaaataatggagatgattccagtgacaaacgacagagatggtgatggtggtcagggaagacctctctgcagaggtagtgacttgtgatgtgagctgagacctctgtcctgggaagaccaaaagaaaagcatttcaggatgagggaatggcatgcgcaaaggccctgaggctgaaatgtgcccatgtgttctaagaaatgcagcgatgctggtgtgcctggagcagggacggagggggagaatgggaggagacaaggagctgaaggagtagttcccgaaggaccttgtgggtgatatagaggacttcgcttttgctctgagtgaggtgggagccatagaagcttctaagcagaagagggacttgccctaattcaggtgatcacaggtgtcttgtggcctccatgggaggttgaaaaccagagaaggtgaaggggggctgcactgagccacaggaacaatgatggagattccagctaagcccagaccccgtggattctagatagattttagaggcagcagacagaattactgaggaattgagtgtaagagtggaataaagttatcaaggacaatgccaagggtggggcacccccaaatttgactctgggagactcagccaaatcctatctggtaataaaatttcttttttatttttc

SEQ ID NO: 64599 - DNA, 2456 bp, Artificial Sequence
  derived and/or modified sequence
aattgggaggggcctgtgcccgggagcagcgggaacctatctgctggtgggagaggactcaggctaaggtggcccccactgaagactcctgctaagcaacccactgaagacccctccgaatcatcgacggggcgtccttggggtgcagcccaggaagctcagttcacagccttggggcgcgcggcccatggagtcggggctgctgcggccggcgccggtgagcgaggtcatcgtcctgcattacaactacaccggcaagctccgcggtgcgcgctaccagccgggtgccggcctgcgcgccgacgccgtggtgtgcctggcggtgtgcgccttcatcgtgctagagaatctagccgtgttgttggtgctcggacgccacccgcgcttccacgctcccatgttcctgctcctgggcagcctcacgttgtcggatctgctggcaggcgccgcctacgccgccaacatcctactgtcggggccgctcacgctgaaactgtcccccgcgctctggttcgcacgggagggaggcgtcttcgtggcactcactgcgtccgtgctgagcctcctggccatcgcgctggagcgcagcctcaccatggcgcgcagggggcccgcgcccgtctccagtcgggggcgcacgctggcgatggcagccgcggcctggggcgtgtcgctgctcctcgggctcctgccagcgctgggctggaattgcctgggtcgcctggacgcttgctccactgtcttgccgctctacgccaaggcctacgtgctcttctgcgtgctcgccttcgtgggcatcctggccgctatctgtgcactctacgcgcgcatctactgccaggtacgcgccaacgcgcggcgcctgccggcacggcccgggactgcggggaccacctcgacccgggcgcgtcgcaagccgcgctcgctggccttgctgcgcacgctcagcgtggtgctcctggcctttgtggcatgttggggccccctcttcctgctgctgttgctcgacgtggcgtgcccggcgcgcacctgtcctgtactcctgcaggccgatcccttcctgggactggccatggccaactcacttctgaaccccatcatctacacgctcaccaaccgcgacctgcgccacgcgctcctgcgcctggtctgctgcggacgccactcctgcggcagagacccgagtggctcccagcagtcggcgagcgcggctgaggcttccgggggcctgcgccgctgcctgcccccgggccttgatgggagcttcagcggctcggagcgctcatcgccccagcgcgacgggctggacaccagcggctccacaggcagccccggtgcacccacagccgcccggactctggtatcagaaccggctgcagactgacaccctcggcccacgactgtcttcccaagttttacagacttgttctttttacataaaggaatttgtaggaaatgcagccaaaggtgcagtcggaaaagatgcaggggaaatgtatttatgcagcgacaccccacaatgtgaacaaacagacaaaaaatctgtgccctcgtggaattgacgttctgcttgggaacacagaaaagaactcggtgatgaaataatggagatgattccagtgacaaacgacagagatggtgatggtggtcagggaagacctctctgcagaggtagtgacttgtgatgtgagctgagacctctgtcctgggaagaccaaaagaaaagcatttcaggatgagggaatggcatgcgcaaaggccctgaggctgaaatgtgcccatgtgttctaagaaatgcagcgatgctggtgtgcctggagcagggacggagggggagaatgggaggagacaaggagctgaaggagtagttcccgaaggaccttgtgggtgatatagaggacttcgcttttgctctgagtgaggtgggagccatagaagcttctaagcagaagagggacttgccctaattcaggtgatcacaggtgtcttgtggcctccatgggaggttgaaaaccagagaaggtgaaggggggctgcactgagccacaggaacaatgatggagattccagctaagcccagaccccgtggattctagatagattttagaggcagcagacagaattactgaggaattgagtgtaagagtggaataaagttatcaaggacaatgccaagggtggggcacccccaaatttgactctgggagactcagccaaatcctatctggtaataaaatttcttttttatttttcttttctttctttctttcttttttttttttttgagttgggatcttgtgctctgtcacccaggctggagtgcaatgggcacaattatagctcactgcagcctggaactcctgggatcaagcctggagttcctgcttcagcctccctagtagctgggactacaggcatgcaccaccatgcccagttaataaaatttcttcaaatgc

SEQ ID NO: 64600 - DNA, 602 bp, Artificial Sequence
  derived and/or modified sequence
atggccaaaattgcctgcagcctggagaccaaggagctttgggacaaattccatgagctgggcaccgagatgatcatcaccaagtcgggcaggaggatgtttccaaccatccgggtgtccttttcgggggtggatcctgaggccaagtacatagtcctgatggacatcgtccctgtggacaacaagaggtaccgctacgcctaccaccggtcctcctggctggtggctggcaaggccgacccgccgttgccagccaggctctatgtgcatccagattctccttttaccggtgagcaactactcaaacagatggtgtcttttgaaaaggtgaaactcaccaacaatgaactggatcaacatggccatataattttgaactcaatgcataagtaccagccaagggtgcacatcattaagaagaaagaccacacagcctcattgctcaacctgaagtctgaagaatttagaactttcatctttccagaaacagtttttacggcagtcactgcctaccagaatcaactgataacgaagctgaaaatagatagcaatccttttgccaaaggattccgggattcctccaggctcactgacattgagag

SEQ ID NO: 64601 - protein, 719 aa, Artificial Sequence
  derived and/or modified sequence
MTANRLAESLLALSQQEELADLPKDYLLSESEDEGDNDGERKHQKLLEAISSLDGKNRRKLAERSEASLKVSEFNVSSEGSGEKLVLADLLEPVKTSSSLATVKKQLSRVKSKKTVELPLNKEEIERARTPLEQEIFNLLHKNKQPVTDPLLTPVEKASLRAMSLEEAKMRRAELQRARALQSYYEAKARREKKIKSKKYHKVVKKGKAKKALKEFEQLRKVNPAAALEELEKIEKARMMERMSLKHQNSGKWAKSKAIMAKYDLEARQAMQEQLSKNKELTQKLQVASESEEEEGGTEDVEELLVPDVVNEVQMNADGPNPWMLRSCTSDTKEAATQEDPEQLPELEAHGVSESEGEERPVAEEEILLREFEERRSLRKRSELSQDAEPAGSQETKDSGSQEVLSELRVLSQKLKENHQSRKQKASSEGTIPQVQREEPAPEEEEPLLLQRPERVQTLEELEELGKEECFQNKELPRPVLEGQQSERTPNNRPDAPKEKKKKEQMIDLQNLLTTQSPSVKSLAVPTIEELEDEEERNHRQMIKEAFAGDDVIRDFLKEKREAVEASKPKDVDLTLPGWGEWGGVGLKPSAKKRRRFLIKAPEGPPRKDKNLPNVIINEKRNIHAAAHQVRVLPYPFTHHWQFERTIQTPIGSTWNTQRAFQKLTTPKVVTKPGHIINPIKAEDVGYRSSSRSDLSVIQRNPKRITTRHKKQLKKCSVD

SEQ ID NO: 64602 - DNA, 2160 bp, Artificial Sequence
  derived and/or modified sequence
atgaccgccaacagactggccgagagcctgctggccctgagccagcaggaggagctggccgacctgcccaaggactacctgctgagcgagagcgaggacgagggcgacaacgacggcgagagaaagcaccagaagctgctggaggccatcagcagcctggacggcaagaacagaagaaagctggccgagagaagcgaggccagcctgaaggtgagcgagttcaacgtgagcagcgagggcagcggcgagaagctggtgctggccgacctgctggagcccgtgaagaccagcagcagcctggccaccgtgaagaagcagctgagcagagtgaagagcaagaagaccgtggagctgcccctgaacaaggaggagatcgagagagccagaacccccctggagcaggagatcttcaacctgctgcacaagaacaagcagcccgtgaccgaccccctgctgacccccgtggagaaggccagcctgagagccatgagcctggaggaggccaagatgagaagagccgagctgcagagagccagagccctgcagagctactacgaggccaaggccagaagagagaagaagatcaagagcaagaagtaccacaaggtggtgaagaagggcaaggccaagaaggccctgaaggagttcgagcagctgagaaaggtgaaccccgccgccgccctggaggagctggagaagatcgagaaggccagaatgatggagagaatgagcctgaagcaccagaacagcggcaagtgggccaagagcaaggccatcatggccaagtacgacctggaggccagacaggccatgcaggagcagctgagcaagaacaaggagctgacccagaagctgcaggtggccagcgagagcgaggaggaggagggcggcaccgaggacgtggaggagctgctggtgcccgacgtggtgaacgaggtgcagatgaacgccgacggccccaacccctggatgctgagaagctgcaccagcgacaccaaggaggccgccacccaggaggaccccgagcagctgcccgagctggaggcccacggcgtgagcgagagcgagggcgaggagagacccgtggccgaggaggagatcctgctgagagagttcgaggagagaagaagcctgagaaagagaagcgagctgagccaggacgccgagcccgccggcagccaggagaccaaggacagcggcagccaggaggtgctgagcgagctgagagtgctgagccagaagctgaaggagaaccaccagagcagaaagcagaaggccagcagcgagggcaccatcccccaggtgcagagagaggagcccgcccccgaggaggaggagcccctgctgctgcagagacccgagagagtgcagaccctggaggagctggaggagctgggcaaggaggagtgcttccagaacaaggagctgcccagacccgtgctggagggccagcagagcgagagaacccccaacaacagacccgacgcccccaaggagaagaagaagaaggagcagatgatcgacctgcagaacctgctgaccacccagagccccagcgtgaagagcctggccgtgcccaccatcgaggagctggaggacgaggaggagagaaaccacagacagatgatcaaggaggccttcgccggcgacgacgtgatcagagacttcctgaaggagaagagagaggccgtggaggccagcaagcccaaggacgtggacctgaccctgcccggctggggcgagtggggcggcgtgggcctgaagcccagcgccaagaagagaagaagattcctgatcaaggcccccgagggcccccccagaaaggacaagaacctgcccaacgtgatcatcaacgagaagagaaacatccacgccgccgcccaccaggtgagagtgctgccctaccccttcacccaccactggcagttcgagagaaccatccagacccccatcggcagcacctggaacacccagagagccttccagaagctgaccacccccaaggtggtgaccaagcccggccacatcatcaaccccatcaaggccgaggacgtgggctacagaagcagcagcagaagcgacctgagcgtgatccagagaaaccccaagagaatcaccaccagacacaagaagcagctgaagaagtgcagcgtggactag

SEQ ID NO: 64603 - DNA, 2160 bp, Artificial Sequence
  derived and/or modified sequence
atgactgcgaatcgtttggcagaatcgctgctggctttgtctcaacaggaagagctggctgacctcccgaaagattatctgctttctgagtccgaggacgagggggataacgacggggagaggaagcaccagaagttactggaagctataagttcactggatgggaagaaccgaaggaaactggccgaaagaagcgaagcatctctgaaggtcagtgaatttaatgtcagtagtgagggcagcggtgagaaattggtgctggcggatctattggagcctgtgaagacttcgtcttcattggccaccgtcaaaaagcaactgtcacgggtcaagtcaaaaaaaactgtagagctgcccctgaacaaagaagaaattgagcgtgcgagaactccactcgaacaggaaatcttcaacttattgcataaaaataaacagcccgtcacggaccccctgctgactccagttgagaaagcctcacttcgcgccatgagtctggaggaggccaagatgcgccgagccgagttacagcgtgctcgcgctctgcaatcttactacgaggcaaaagcccggagggagaagaagattaagtctaagaagtatcataaagtggttaagaagggtaaagccaagaaagccctcaaagagttcgaacagttaaggaaagttaaccccgctgccgccctggaggagctagaaaagattgaaaaagctcgcatgatggaacggatgtccctgaaacatcaaaacagcggtaagtgggccaaatccaaagccataatggccaagtatgatctcgaggcaagacaggctatgcaggagcagctctctaagaataaggaactcacacagaaactgcaggtggcatccgagtcggaagaggaagaagggggtactgaagacgttgaggagcttctcgtgccagatgtcgtgaacgaagtgcagatgaatgcagacggcccaaatccctggatgctgaggtcctgtacttccgatacgaaggaagctgccacgcaagaagacccggagcagctccctgagctggaagcgcacggcgttagcgagtccgagggggaagagaggcctgtggctgaggaagagatcctactgcgggagttcgaggaacggcggagcctgaggaagaggagtgaactgtcccaggacgccgaacccgcagggtcacaggaaactaaggatagtggatcccaggaggtgctgtcggagctgcgggtactatcacagaagttgaaagaaaaccaccaatcaagaaaacagaaagcaagcagcgaaggaacgattccacaggtgcagcgagaggaacctgcgccagaggaggaggaacccctgttgctgcagcggcctgaacgggtccaaaccctcgaggaactggaggagctgggaaaagaagagtgcttccagaataaagaacttccccgaccggtgcttgaaggccagcagagcgaacgtacacctaataatcggcccgacgctcccaaggagaaaaagaagaaggaacaaatgattgaccttcaaaacttgttaactacccagtctccctccgtgaagagccttgccgtgcctacaatagaggagctggaggacgaagaggagaggaaccacaggcagatgattaaggaggcatttgccggcgacgacgtcataagggactttctcaaagagaagagggaagccgtggaagcttcaaagcccaaggacgtggacctcaccctgcccggctggggcgaatggggaggcgtcggtctgaaacccagtgccaagaagaggcggcgcttcctgattaaggcaccggaaggtccacctaggaaggacaagaatctacccaatgtgattatcaatgagaagaggaacatccacgcagctgcgcaccaggtccgcgtgcttccttaccctttcacacatcactggcagttcgagcgcactatccaaactcctatcggatcgacttggaacacgcagagggctttccagaagctgacaacgccgaaggttgtcaccaaacccgggcatataataaaccccataaaggccgaggatgttgggtaccgcagcagcagccgcagcgatctgtccgtgatccagcgcaatcccaagcggattacaacacgccataaaaaacaattaaagaaatgctccgtagactag

SEQ ID NO: 64604 - DNA, 2160 bp, Artificial Sequence
  derived and/or modified sequence
atgacagccaaccggctggccgagagcctgctggccctgagccagcaggaggagctggccgacctgcccaaggactacctgctgtctgagagtgaagatgaaggagacaatgatggagagaggaagcaccagaagctgctggaggccatcagcagcctggatggcaagaacagaaggaagctggccgagaggtctgaggccagcctgaaggtgtctgagttcaacgtgagcagcgagggcagcggggagaagctggtgctggccgacctgctggagcctgtgaagaccagcagcagcctggccaccgtgaagaagcagctgagccgggtgaagagcaagaagacagtggagctgcccctgaacaaggaggagattgagcgggcccggacccccctggagcaggagatcttcaacctgctgcacaagaacaagcagcctgtgacagaccccctgctgacccctgtggagaaggccagcctgcgggccatgagcctggaggaggccaagatgagaagagctgagctgcagagggcccgggccctgcagagctactatgaggccaaggcccggcgggagaagaagatcaagagcaagaagtaccacaaggtggtgaagaagggcaaggccaagaaggccctgaaggagtttgagcagctgaggaaggtgaacccagctgctgccctggaggagctggagaagattgagaaggccaggatgatggagaggatgagcctgaagcaccagaacagcggcaagtgggccaagagcaaggccatcatggccaagtatgacctggaggcccggcaggccatgcaggagcagctgagcaagaacaaggagctgacccagaagctgcaggtggccagcgagagcgaggaggaggagggcggcacagaagatgtggaggagctgctggtgcctgatgtggtgaatgaggtgcagatgaatgctgatggccccaacccctggatgctgcggagctgcaccagtgacaccaaggaggccgccacccaggaggaccctgagcagctgcctgagctggaggcccacggcgtgtctgagagcgagggggaggagaggcctgtggccgaggaggagatcctgctgcgggagtttgaggagaggaggagcctgaggaagaggtctgagctgagccaggatgctgagcctgctggcagccaggagaccaaggacagcggcagccaggaggtgctgtctgagctgcgggtgctgagccagaagctgaaggagaaccaccagagcaggaagcagaaggccagcagcgagggcaccatcccccaggtgcagcgggaggagcccgcccctgaggaggaggagcccctgctgctgcagaggcctgagcgggtgcagaccctggaggagctggaggagctgggcaaggaggagtgcttccagaacaaggagctgcccaggcctgtgctggagggccagcagagcgagaggacccccaacaacagaccagatgcccccaaggagaagaagaagaaggagcagatgattgacctgcagaacctgctgaccacccagagccccagcgtgaagagcctggccgtgcccaccatcgaggagctggaggatgaggaggagaggaaccaccggcagatgatcaaggaggcctttgctggagatgatgtgatccgggacttcctgaaggagaagcgggaggccgtggaggccagcaagcccaaggatgtggacctgaccctgcccggctggggcgagtggggcggcgtgggcctgaagcccagcgccaagaagagaagacgcttcctgatcaaggcccctgagggcccccccaggaaggacaagaacctgcccaacgtcatcatcaatgagaagaggaacatccatgctgctgcccaccaggtgcgggtgctgccctaccccttcacccaccactggcagtttgagaggaccatccagacccccatcggcagcacctggaacacccagagggccttccagaagctgaccacccccaaggtggtgaccaagccaggccacatcatcaaccccatcaaggcagaagatgtgggctaccgcagcagcagcagaagtgacctgagcgtcatccagaggaaccccaagaggatcaccaccaggcacaagaagcagctgaagaagtgcagcgtggactag

SEQ ID NO: 64605 - DNA, 2160 bp, Artificial Sequence
  derived and/or modified sequence
atgaccgccaaccggctggccgagagcctgctggccctgagccagcaggaggaactagctgatctgcccaaagattatctgttgagcgaatccgaagatgagggggataacgatggcgaacgtaaacatcagaagttgctggaggccatttcaagcctggatgggaagaatcggcggaaactggcggagcgctcagaggcaagtctcaaggtgtccgagtttaatgtctcatctgaaggtagcggagagaaactcgtgcttgcggatttgctggaacctgtcaaaacttcatccagtctcgctacagtcaagaagcaattgtctcgggtgaaaagcaaaaaaacggtagagctcccactcaataaagaggagatagagcgagcgcgaaccccgctcgaacaggagatcttcaaccttttgcataagaacaaacagcccgtgacagacccgcttctcactcccgtggagaaggcttccctgcgcgcaatgagcctggaagaggccaaaatgcgcagggcagagctccagcgggcacgggctttacaatcttattacgaagccaaggcccggcgggaaaagaagatcaagtctaaaaagtaccacaaggtggtcaagaagggtaaagctaagaaggcactgaaggagtttgaacagctcaggaaagtgaaccccgcagccgctctggaagagctggagaaaatagagaaggcccgcatgatggaacgaatgtctctcaagcatcagaatagtgggaagtgggcaaaaagcaaagccattatggcaaagtacgatctcgaggcaaggcaggccatgcaggaacagctctccaagaacaaagagttaacccaaaagctccaagttgcgtccgagagcgaggaagaagaaggcgggactgaggacgttgaagagctgctggttccagacgtggtaaacgaagtgcaaatgaacgcggacggcccaaacccatggatgctccggtcttgcacctcagataccaaagaagcggctacacaggaggatcccgagcagctgcccgaacttgaggcccacggcgtcagcgagtccgaaggagaagaaagacctgtcgcagaagaggaaatcctgctcagagaatttgaggagagaaggagcttgcgaaagcggtccgagttgtcacaggatgctgaaccagccgggtcgcaagaaaccaaggacagtggctcccaggaggtgctttccgagttgcgggtgctttcacaaaagcttaaagaaaatcatcaaagcagaaagcaaaaagcatcttccgagggaacaatcccgcaggtgcaacgagaagagcccgcgcccgaggaggaggagcccctcttactacagcggccggagcgagtgcaaaccctggaagaactcgaagagctgggcaaggaagaatgcttccaaaataaggagcttcccaggcccgtcttagaggggcagcagtctgagcgaacaccaaataaccggccagatgccccgaaggaaaagaaaaaaaaggagcagatgattgatttgcagaatttactgacaacccagagcccatccgtgaagtccctggcagtccctactattgaagaattggaagacgaagaggagcgcaaccatcgtcagatgatcaaggaagcctttgccggagacgacgtgatcagagattttttaaaagagaaaagggaggctgtcgaggcttctaaacccaaagacgtggatttaacactacccggttggggcgaatggggtggagtgggtttaaagcctagcgccaagaagcgcaggcgtttcttaatcaaggcccctgagggaccccccagaaaggataagaaccttcctaacgtgatcataaatgagaagaggaatattcatgccgccgcccatcaagtccgcgtgcttccatatcctttcactcatcattggcaatttgagcgcacaattcagactcccattggttccacttggaacacccagcgcgccttccaaaagctgactacaccgaaagtggtgactaagccaggccatattattaaccccattaaggctgaagatgttggttaccgatcaagttcaaggagcgatctcagcgtgattcagaggaatcccaagcgcataacaacacgacataaaaagcagctgaagaagtgctcagtcgactag

SEQ ID NO: 64606 - DNA, 2160 bp, Artificial Sequence
  derived and/or modified sequence
atgaccgctaatagactggctgagagccttttagctctctcccagcaggaggaattagcggacctccctaaggattatctcctttcagagtctgaggatgagggagataatgatggcgagaggaaacatcagaagcttctggaggctatctccagccttgacggaaagaatcggaggaagcttgctgaaagatccgaggcgtcactgaaggtcagcgaatttaacgtgtctagcgagggcagcggcgaaaaactggtcctggccgacctgctggaacctgtgaagacaagtagcagcctggccacagtgaagaagcagctgagcagggtgaagtccaagaagacagtggaactgcctctgaataaagaagaaatagagagagcccgaacgcctctggagcaggagattttcaatcttttgcataagaataaacagccagtgacagatccactcttgacaccggttgaaaaagcgtcccttagggcgatgtcgctggaggaggccaaaatgaggagagcagagctacagcgcgctagggcgctgcaatcttactacgaagccaaagcgaggagggaaaaaaagatcaagtctaagaaataccataaggttgttaagaaaggcaaggcgaagaaggcactgaaggaatttgagcaactcagaaaagtgaatcctgccgctgccctcgaagagctggaaaaaatcgagaaggcccgaatgatggagaggatgtcacttaaacatcagaactccgggaaatgggcaaagagcaaagccatcatggctaaatatgatttagaagccaggcaggcaatgcaagaacaactatcaaagaacaaggaattgacacagaagctacaggtggcatccgaatctgaggaggaagaaggcggaacggaagacgtcgaggaattactcgtgccagacgtggttaatgaagtacaaatgaacgcggacgggcctaacccctggatgctccggtcttgtacctccgacacaaaggaggccgcaacacaggaagaccctgaacagctcccggagctcgaagcacacggagtttccgaaagtgaaggagaggaacgaccagtggcagaggaggaaattcttctccgggaatttgaggagcgtagaagtcttcgaaagaggtccgagctgtcgcaggacgctgaaccagcaggctctcaggagaccaaagacagtggctcccaagaagtcctttcagaattgagagtgttgagccagaagttaaaggagaaccatcagtcccgcaaacagaaggcttccagtgaaggcacgatccctcaggttcagcgcgaagaacccgctccggaagaagaagagcctctactcctgcagcggcctgaaagagttcaaacactggaggagttagaggagctcggaaaggaagagtgtttccagaataaggaactgccccgaccggtccttgagggtcagcagtctgaaaggacacctaataaccgtcctgacgcccctaaggaaaaaaagaaaaaggaacagatgatcgacctccagaatctgctgactacacagtctccatcagtgaagtctctcgccgttcccacaattgaggagctggaggatgaggaggagagaaatcacagacagatgattaaggaggccttcgcgggagacgacgtgatcagagatttcctgaaggaaaaacgcgaagcagtggaagccagtaaaccaaaggacgtggatcttactttgccaggatggggagaatggggcggagttggattaaagccatccgctaaaaagcggagacgcttcctcattaaggctccagagggaccgccacgtaaagacaagaacctccccaacgttataatcaatgagaagagaaatatccatgccgcagcccaccaggttcgggtgctcccctacccgttcacacatcactggcaattcgaacgaactatacagacgcctattgggtcaacctggaatactcagcgtgccttccaaaaattgactacgcctaaggttgtgacaaaaccgggtcacattattaacccaataaaggctgaggatgtgggctaccgctctagttcccggagcgatctgtccgtgattcaaagaaaccctaagcgcattactaccaggcacaagaagcagctcaaaaaatgttcagtagattag

SEQ ID NO: 64607 - DNA, 2403 bp, Artificial Sequence
  derived and/or modified sequence
acggaaacagaaattgctttgcggcccgcacggaaattgctttccttcggcttccgttcttggtccatgtgagagaagctggctgctgaaatgactgcgaaccggcttgcagagagccttctggctttgagccaacaggaagaactagcggatttgccaaaagactacctcttgagtgagagtgaagatgagggggacaatgatggagagagaaagcatcaaaagcttctggaagcaatcagttcccttgatggaaagaataggcggaaattggctgagaggtctgaggctagtctgaaggtgtcagagttcaatgtcagttctgaaggatcaggagaaaagctggtccttgcagatctgcttgagcctgttaaaacttcatcttctttggccactgtgaaaaagcaactgagtagagtcaaatcaaagaagacagtggagttacctctgaacaaagaagagattgaacgggcaagaactcccctggagcaggaaattttcaacctcctccataagaacaagcagccagtgacagaccctttactgacccctgtggaaaaggcctctctccgagccatgagcctagaagaggcaaagatgcgacgagcagagcttcagagggctcgggctctgcagtcctactatgaggccaaggctcgaagagagaagaaaatcaaaagtaaaaagtatcacaaagtcgtgaagaaaggaaaggccaagaaagccctaaaagagtttgagcagctgcggaaggttaatccagctgcagcactagaagaactggaaaaaattgaaaaggccagaatgatggaaagaatgagccttaagcaccaaaacagtgggaaatgggccaagtcaaaggcaattatggccaaatatgacctggaggctcgccaagctatgcaggaacagttgtctaagaacaaagaactgacacagaaactccaggtagcctctgagagtgaggaagaggagggaggcacagaagatgtggaagaactccttgtccctgatgtagtgaatgaagtgcagatgaatgcagatgggccgaatccctggatgctcaggagctgcaccagtgacaccaaagaggctgcaacccaggaggaccctgagcaactgccagagcttgaggcccatggagtttctgaaagtgagggagaagaaagaccagtggcagaagaagaaattttgttgagagaatttgaggaaaggcgatcccttagaaaaagatctgagctcagccaagatgctgagccagcaggcagtcaagaaacaaaagattctggcagccaggaggtgctgtctgaattgagagtactatctcagaaattgaaggaaaaccatcagtccaggaagcaaaaagcaagttcagaggggactattccccaggtccagagagaggaacctgccccagaagaagaggagcccctgttgctacagagaccagagagagtacagacgctggaagagctagaagagctgggaaaagaagaatgttttcaaaataaggagcttcccagacctgtgttagaagggcagcagtcagagaggaccccaaataatcgccctgatgcccctaaggagaagaaaaagaaggagcaaatgatcgacctacagaacctcctaaccacacaatctccctccgtgaagtctttggcagttcccacaatagaggagctggaagatgaagaggagagaaaccataggcagatgataaaggaagcttttgctggggatgatgtcatcagagatttcttgaaagagaagagggaagctgtggaggcgagtaagccaaaggacgtggacctgacactacctggctggggcgagtggggtggtgtgggcctaaagcccagtgccaagaaaagacgccggtttctcattaaagcccctgagggtcctccaagaaaagataagaatttgccaaatgtgattatcaatgagaagcgcaacatccacgcagctgctcatcaggtacgagtgcttccatatccatttacccaccattggcaatttgaaaggaccatccagacccccataggatccacatggaacacccagagggctttccaaaagctgactactcccaaggtcgtcaccaagccaggccatatcattaaccccataaaagcagaagacgtgggctaccggtcttcctcaaggtcggacctgtctgtcatacagaggaatccaaaacgaatcaccacacgtcacaaaaaacagctgaagaaatgctctgtagattgagttgctggaggagtgacagccaggagccctgacttcacttcctttggtccagttttactctgatacagggtggattccaaaactggctcagtacattgcatgtagttaagccacattttaaaaataaaggcattttttaatctatttacctgg

SEQ ID NO: 64608 - protein, 960 aa, Artificial Sequence
  derived and/or modified sequence
MLVVEAKFDGEQLATDPVDHTDQPEFATELAWEIDRKALHQHRLQRTPIKLQCFALDPVTSAKETIGYIVLDLRTAQETKQAPKWYQLLSNKYTKFKSEIQISIALETDTKPPVDSFKAKGAPPRDGKVPAILAGLDPRDIVAVLNEEGGYHQIGPAEYCTDSFIMSVTIAFATQLEQLIPCTMKLPERQPEFFFYYSLLGNDVTNEPFNDLINPNFEPERASVRIRSSVEILRVYLALQSKLQIHLCCGDQSLGSTEIPLTGLLKKGSTEINQHPVTVEGAFTLDPPNRAKQKLAPIPVELAPTVGVSVALQREGIDSQSLIELKTQNEHEPEHSKKKVLTPIKEKTLTGPKSPTVSPVPSHNQSPPTKDDATESEVESLQYDKDTKPNPKASSSVPASLAQLVTTSNASEVASGQKIAVPATSHHFCFSIDLRSIHALEIGFPINCILRYSYPFFGSAAPIMTNPPVEVRKNMEVFLPQSYCAFDFATMPHQLQDTFLRIPLLVELWHKDKMSKDLLLGIARIQLSNILSSEKTRFLGSNGEQCWRQTYSESVPVIAAQGSNNRIADLSYTVTLEDYGLVKMREIFISDSSQGVSAVQQKPSSLPPAPCPSEIQTEPRETLEYKAALELEMWKEMQEDIFENQLKQKELAHMQALAEEWKKRDRERESLVKKKVAEYTILEGKLQKTLIDLEKREQQLASVESELQREKKELQSERQRNLQELQDSIRRAKEDCIHQVELERLKIKQLEEDKHRLQQQLNDAENKYKILEKEFQQFKDQQNNKPEIRLQSEINLLTLEKVELERKLESATKSKLHYKQQWGRALKELARLKQREQESQMARLKKQQEELEQMRLRYLAAEEKDTVKTERQELLDIRNELNRLRQQEQKQYQDSTEIASGKKDGPHGSVLEEGLDDYLTRLIEERDTLMRTGVYNHEDRIISELDRQIREILAKSNASN

SEQ ID NO: 64609 - protein, 534 aa, Artificial Sequence
  derived and/or modified sequence
MRVLCAFPEAMPSSNSRPPACLAPGALYLALLLHLSLSSQAGDRRPLPVDRAAGLKEKTLILLDVSTKNPVRTVNENFLSLQLDPSIIHDGWLDFLSSKRLVTLARGLSPAFLRFGGKRTDFLQFQNLRNPAKSRGGPGPDYYLKNYEDDIVRSDVALDKQKGCKIAQHPDVMLELQREKAAQMHLVLLKEQFSNTYSNLILTEPNNYRTMHGRAVNGSQLGKDYIQLKSLLQPIRIYSRASLYGPNIGRPRKNVIALLDGFMKVAGSTVDAVTWQHCYIDGRVVKVMDFLKTRLLDTLSDQIRKIQKVVNTYTPGKKIWLEGVVTTSAGGTNNLSDSYAAGFLWLNTLGMLANQGIDVVIRHSFFDHGYNHLVDQNFNPLPDYWLSLLYKRLIGPKVLAVHVAGLQRKPRPGRVIRDKLRIYAHCTNHHNHNYVRGSITLFIINLHRSRKKIKLAGTLRDKLVHQYLLQPYGQEGLKSKSVQLNGQPLVMVDDGTLPELKPRPLRAGRTLVIPPVTMGFYVVKNVNALACRYR

SEQ ID NO: 64610 - DNA, 1605 bp, Artificial Sequence
  derived and/or modified sequence
atgagggtgctgtgtgccttccccgaggcgatgccttcatcaaattcccggcctccagcgtgcttggcaccaggggcgttgtacctggcacttcttttacatctatcattaagctcccaggctggcgatcgaaggcccctcccagtggatcgggctgccggcctgaaagagaagacacttattttgcttgatgtgtcgacgaaaaaccccgtgaggacggtcaacgagaactttctttcgctccaactagatcccagtattatacacgatggctggcttgattttctgagcagcaaacgtctcgtgacactagctcggggcctgtctccagcattcttaagattcggaggcaagaggaccgattttctgcagtttcaaaaccttcgaaatccagccaagagccgcgggggccccgggccggattactacctgaaaaattacgaagatgatatcgtcaggtctgacgtcgcattggataagcaaaagggatgcaagatcgcacaacaccccgatgtgatgctcgagcttcaacgagagaaagcggcacaaatgcacctggtgcttctcaaggaacagtttagtaacacctatagcaaccttatccttacggaaccaaataattaccgcaccatgcacggcagagcagtgaatggcagccagctgggtaaggactacattcaactgaaatctttgctgcagcctattcgcatctacagtcgggccagcctgtatggccccaatataggccggccccgcaaaaatgttatcgccttactggatggcttcatgaaggtggccggcagcacagtggacgccgtcacttggcagcactgctacatcgacggtagggttgtcaaggtgatggattttctcaagacccggctgcttgatactttgagtgatcagatcagaaagattcagaaagttgtgaatacatacacacctggaaaaaaaatttggctcgagggagtggtaactaccagtgcgggcggcaccaacaaccttagcgactcttacgctgcgggctttctgtggttgaacactctggggatgctggccaaccagggcattgatgtagtcattcggcactccttcttcgatcatggctataaccacctggtggatcaaaatttcaaccctctcccagattactggctgagcttactttataagagactgattggaccaaaggttctcgcggtgcatgttgccgggctgcagcgcaaacctaggccagggcgcgtcatcagggacaagctccgcatctatgcccactgcactaaccaccacaatcacaattatgttcggggttctatcaccctattcatcattaacctccatcgctctcgcaagaagattaaactggcaggcactctgcgcgacaagttagtccaccagtatctgctgcagccatacggacaggaggggctaaagtcaaaatctgtgcagctgaatggccagcccctcgtgatggtggatgatgggacgctacccgaactgaagcctcgtcctctgcgcgcaggacggaccttagttattccaccggtcacaatgggcttctatgtagttaagaacgtcaatgcgctggcatgtagataccggtag

SEQ ID NO: 64611 - DNA, 2121 bp, Artificial Sequence
  derived and/or modified sequence
aaggacaattagtcactagcgagacccagtaggaagagaggtttaaatcagagggattgaatgagggtgctttgtgccttccctgaagccatgccctccagcaactcccgcccccccgcgtgcctagccccgggggctctctacttggctctgttgctccatctctccctttcctcccaggctggagacaggagacccttgcctgtagacagagctgcaggtttgaaggaaaagaccctgattctacttgatgtgagcaccaagaacccagtcaggacagtcaatgagaacttcctctctctgcagctggatccgtccatcattcatgatggctggctcgatttcctaagctccaagcgcttggtgaccctggcccggggactttcgcccgcctttctgcgcttcgggggcaaaaggaccgacttcctgcagttccagaacctgaggaacccggcgaaaagccgcgggggcccgggcccggattactatctcaaaaactatgaggatgacattgttcgaagtgatgttgccttagataaacagaaaggctgcaagattgcccagcaccctgatgttatgctggagctccaaagggagaaggcagctcagatgcatctggttcttctaaaggagcaattctccaatacttacagtaatctcatattaacagagccaaataactatcggaccatgcatggccgggcagtaaatggcagccagttgggaaaggattacatccagctgaagagcctgttgcagcccatccggatttattccagagccagcttatatggccctaatattgggcggccgaggaagaatgtcatcgccctcctagatggattcatgaaggtggcaggaagtacagtagatgcagttacctggcaacattgctacattgatggccgggtggtcaaggtgatggacttcctgaaaactcgcctgttagacacactctctgaccagattaggaaaattcagaaagtggttaatacatacactccaggaaagaagatttggcttgaaggtgtggtgaccacctcagctggaggcacaaacaatctatccgattcctatgctgcaggattcttatggttgaacactttaggaatgctggccaatcagggcattgatgtcgtgatacggcactcattttttgaccatggatacaatcacctcgtggaccagaattttaacccattaccagactactggctctctctcctctacaagcgcctgatcggccccaaagtcttggctgtgcatgtggctgggctccagcggaagccacggcctggccgagtgatccgggacaaactaaggatttatgctcactgcacaaaccaccacaaccacaactacgttcgtgggtccattacactttttatcatcaacttgcatcgatcaagaaagaaaatcaagctggctgggactctcagagacaagctggttcaccagtacctgctgcagccctatgggcaggagggcctaaagtccaagtcagtgcaactgaatggccagcccttagtgatggtggacgacgggaccctcccagaattgaagccccgcccccttcgggccggccggacattggtcatccctccagtcaccatgggcttttatgtggtcaagaatgtcaatgctttggcctgccgctaccgataagctatcctcacactcacggctaccagtgggcctgctgggctgcttccactcctccactccagtagtatcctctgttttcagacatcctagcaaccagcccctgctgccccatcctgctggaatcaacacagacttgctctccaaagagactaaatgtcatagcgtgatcttagcctaggtaggccacatccatcccaaaggaaaatgtagacatcacctgtacctatataaggataaaggcatgtgtatagagcagaatgtttcccttcatgtgcactatgaaaacgagctgacagcacactcccaggagaaatgtttccagacaactccccatgatcctgtcacacagcattataaccacaaatccaaaccttagcctgctgctgctgctgccctcagaggaagatgaggaaggaaaaaaactgggtggacctacaaaaacccatcctctcccaa

SEQ ID NO: 64612 - DNA, 1605 bp, Artificial Sequence
  derived and/or modified sequence
atgagggtgctgtgtgccttccctgaggccatgcccagcagcaacagccggcccccagcctgcctggcccctggggccctgtacctggccctgctgctgcacctgagcctgagcagccaggccggggaccggcggcccctgcctgtggacagagctgctggcctgaaggagaagaccctcatcctgctggatgtgtccaccaagaaccctgtgaggacagtgaatgaaaacttcctgagcctgcagctggaccccagcatcatccatgatggctggctggacttcctgagcagcaagaggctggtgaccctggcccggggcctgagccctgccttcctgcgctttggaggcaagaggacagacttcctgcagttccagaacctgagaaatcctgccaagagccggggcggccctggccctgactactacctgaagaactatgaagatgacatcgtgcggagtgatgtggccctggacaagcagaagggctgcaagatcgcccagcacccagatgtgatgctggagctgcagcgggagaaggccgcccagatgcacctggtgctgctgaaggagcagttcagcaacacctacagcaacctgatcctgacagagcccaacaactaccgcaccatgcacggccgggctgtgaatggcagccagctgggcaaggactacatccagctgaagagcctgctgcagcccatccgcatctacagccgggccagcctgtatggccccaacatcggccggcccaggaagaatgtcatcgccctgctggatggcttcatgaaggtggccggcagcacagtggatgctgtgacctggcagcactgctacattgatggccgggtggtgaaggtgatggacttcctgaagacccggctgctggacaccctgagtgaccagatcaggaagatccagaaggtggtgaacacctacaccccaggcaagaagatctggctggagggcgtggtgaccaccagcgctgggggcaccaacaacctgagtgacagctatgctgctggcttcctgtggctgaacaccctgggcatgctggccaaccagggcattgatgtggtgatccgccacagcttctttgaccacggctacaaccacctggtggaccagaacttcaaccccctgcctgactactggctgagcctgctgtacaagaggctcatcggccccaaggtgctggccgtgcacgtggccggcctgcagaggaagccccggcccggccgggtcatccgggacaagctgcgcatctatgcccactgcaccaaccaccacaaccacaactacgtgcggggcagcatcaccctcttcatcatcaacctgcacaggagcaggaagaagatcaagctggccggcaccctgcgggacaagctggtgcaccagtacctgctgcagccctacggccaggagggcctgaagagcaagtctgtgcagctgaatggccagcccctggtgatggtggatgatggcaccctgcctgagctgaagccccggcccctgcgggccggccgcaccctggtgatcccccctgtgaccatgggcttctacgtggtgaagaatgtgaatgccctggcctgccgctacagatag

SEQ ID NO: 64613 - DNA, 1605 bp, Artificial Sequence
  derived and/or modified sequence
atgcgggtgctgtgcgccttccccgaggccatgcccagcagcaacagcagaccacccgcttgcctggccccaggcgccctgtatttagcactcttgttgcacctatctttgtccagccaggcaggcgatcggagaccgttgcccgttgaccgcgcagcaggactcaaggaaaaaaccctgatactcctggacgtttccactaagaaccccgtccggaccgtaaacgagaattttcttagtctgcagctagacccgtctatcattcacgatgggtggcttgacttcctctctagcaagcggttggtcacactggcccgcggactgagccctgcctttttaaggtttggcgggaaaaggaccgacttcctgcaatttcagaatttacgcaaccccgccaagagcaggggaggccccggcccagactattacctgaagaactacgaggacgacatagttagatctgacgttgcactggataagcagaagggttgcaaaatcgctcaacatcctgacgtgatgctagagcttcaaagagaaaaagccgcacagatgcatttggtgttgctgaaggagcaatttagcaacacatactcgaatcttatactgacagagccaaacaattacaggacaatgcatggccgcgccgtcaatggatctcagctcggcaaagattacattcagctcaaatccctgctgcaaccaatcagaatctactcccgagcaagcttatatgggcctaatataggcaggccccggaagaacgtaattgccttgctggacggattcatgaaggtagccggtagcacagttgacgctgtcacttggcagcattgctatatagacgggagagtggtgaaggttatggacttcctcaagacacgactgcttgacacattgagtgatcagatccgcaaaatacagaaagtggtgaatacgtatacacctggcaagaagatctggctggagggtgtcgtgactacatccgcaggtggaacaaataacttgtccgatagctatgcagccggattcctgtggttgaacactctgggcatgctggccaatcaaggaattgacgtggtcataaggcatagttttttcgatcacggctacaatcacctggtggatcagaatttcaatcctctgccagattactggctgagcctcctctataagcggctgattggaccaaaggtgttagcagtccatgtagcagggctccagcggaaacctcgccccggccgagttatcagggataaactgaggatttacgcacactgtactaatcatcacaaccacaactacgtacgggggtctattacgcttttcatcatcaaccttcaccgatcgcgaaagaaaattaaactggctgggactcttcgggacaagctcgttcaccaatacctgcttcaaccctacgggcaggaaggcctgaagtctaaatccgtccagttgaacggccaacctctggtcatggtggacgatggaacactgcccgagctaaagccacgtcccctgcgtgccggacgcacgctggtaatcccccccgtgaccatgggattttacgtggtgaaaaacgtgaacgccttagcctgccggtatcgatag

SEQ ID NO: 64614 - DNA, 1605 bp, Artificial Sequence
  derived and/or modified sequence
atgcgagtcctgtgcgccttcccagaggccatgccatcctctaatagccgtccgccagcctgccttgccccaggagccctgtacctcgccctgcttttgcacctgtccctcagctctcaggctggggacagaaggcctttgcctgtggacagggcagccggtctgaaggaaaagaccctgatcctgcttgacgtctcaactaagaaccccgtgaggaccgtgaacgagaacttcctgtcattacaacttgacccttctattatccatgacggctggttggacttcctctcttctaagagactcgtgacccttgcccgagggttgagcccggcttttctgaggttcggcggaaaaaggacagacttcctgcagtttcagaaccttcggaaccccgcaaagagccgaggcggacctggcccagactattatcttaaaaactacgaagacgatattgttaggtctgacgtcgctttagacaagcagaagggttgcaaaatcgcccaacatcccgacgtcatgctggagttacagcgtgaaaaggctgcacagatgcacttggttttgctgaaggagcaattcagcaacacctactctaacctgatacttacagagccaaacaattatcgtactatgcatgggagagctgttaatggctctcagctgggcaaggattatattcagctcaaatcccttctgcagccgattagaatatacagccgcgcatccctatatgggccaaatattgggagaccacgaaagaacgttatcgcactgctcgacgggtttatgaaagtggctggctcaaccgtagacgcagtcacctggcaacattgttacatcgacgggcgtgtcgtcaaagtcatggatttcttgaaaaccagactactcgacacactgagcgaccaaatacgcaagatccagaaagttgttaatacctacacccctggaaagaagatctggctggaaggagtggttaccactagtgccggagggaccaataacctgagtgatagctatgccgctggatttctatggctcaacaccctgggcatgctagctaaccagggaattgacgtagtgattcggcacagtttttttgatcacggctataaccaccttgtagatcagaatttcaatccacttcccgattactggttgtcattgctctataagaggctgattggtcctaaagtgttagcagtccacgtcgctgggctgcaaaggaaacctagacctggtcgcgtcatcagagacaaactcagaatttacgcacattgtactaaccatcacaatcataattacgttcgcggaagcatcaccttattcatcatcaatctccatagatctagaaagaagatcaagttagccggtaccttgcgcgataaactggttcatcagtacttgttgcagccttacgggcaggagggcctaaagagcaaaagcgttcagctgaatggccagcctctcgtaatggtggacgatgggacactcccagagctgaaacccagaccactgagggccggtcggaccctcgtgattcctccagtaactatgggtttctatgtggtgaagaacgtgaatgctcttgcatgccggtacagatag

SEQ ID NO: 64615 - DNA, 1605 bp, Artificial Sequence
  derived and/or modified sequence
atgagagtgctgtgcgccttccccgaggccatgcccagcagcaacagcagaccccccgcctgcctggcccccggcgccctgtacctggccctgctgctgcacctgagcctgagcagccaggccggcgacagaagacccctgcccgtggacagagccgccggcctgaaggagaagaccctgatcctgctggacgtgagcaccaagaaccccgtgagaaccgtgaacgagaacttcctgagcctgcagctggaccccagcatcatccacgacggctggctggacttcctgagcagcaagagactggtgaccctggccagaggcctgagccccgccttcctgagattcggcggcaagagaaccgacttcctgcagttccagaacctgagaaaccccgccaagagcagaggcggccccggccccgactactacctgaagaactacgaggacgacatcgtgagaagcgacgtggccctggacaagcagaagggctgcaagatcgcccagcaccccgacgtgatgctggagctgcagagagagaaggccgcccagatgcacctggtgctgctgaaggagcagttcagcaacacctacagcaacctgatcctgaccgagcccaacaactacagaaccatgcacggcagagccgtgaacggcagccagctgggcaaggactacatccagctgaagagcctgctgcagcccatcagaatctacagcagagccagcctgtacggccccaacatcggcagacccagaaagaacgtgatcgccctgctggacggcttcatgaaggtggccggcagcaccgtggacgccgtgacctggcagcactgctacatcgacggcagagtggtgaaggtgatggacttcctgaagaccagactgctggacaccctgagcgaccagatcagaaagatccagaaggtggtgaacacctacacccccggcaagaagatctggctggagggcgtggtgaccaccagcgccggcggcaccaacaacctgagcgacagctacgccgccggcttcctgtggctgaacaccctgggcatgctggccaaccagggcatcgacgtggtgatcagacacagcttcttcgaccacggctacaaccacctggtggaccagaacttcaaccccctgcccgactactggctgagcctgctgtacaagagactgatcggccccaaggtgctggccgtgcacgtggccggcctgcagagaaagcccagacccggcagagtgatcagagacaagctgagaatctacgcccactgcaccaaccaccacaaccacaactacgtgagaggcagcatcaccctgttcatcatcaacctgcacagaagcagaaagaagatcaagctggccggcaccctgagagacaagctggtgcaccagtacctgctgcagccctacggccaggagggcctgaagagcaagagcgtgcagctgaacggccagcccctggtgatggtggacgacggcaccctgcccgagctgaagcccagacccctgagagccggcagaaccctggtgatcccccccgtgaccatgggcttctacgtggtgaagaacgtgaacgccctggcctgcagatacagatag

SEQ ID NO: 64616 - protein, 480 aa, Artificial Sequence
  derived and/or modified sequence
MRVLCAFPEAMPSSNSRPPACLAPGALYLALLLHLSLSSQAGDRRPLPVDRAAGLKEKTLILLDVSTKNPVRTVNENFLSLQLDPSIIHDGWLDFLSSKRLVTLARGLSPAFLRFGGKRTDFLQFQNLRNPAKSRGGPGPDYYLKNYEDEPNNYRTMHGRAVNGSQLGKDYIQLKSLLQPIRIYSRASLYGPNIGRPRKNVIALLDGFMKVAGSTVDAVTWQHCYIDGRVVKVMDFLKTRLLDTLSDQIRKIQKVVNTYTPGKKIWLEGVVTTSAGGTNNLSDSYAAGFLWLNTLGMLANQGIDVVIRHSFFDHGYNHLVDQNFNPLPDYWLSLLYKRLIGPKVLAVHVAGLQRKPRPGRVIRDKLRIYAHCTNHHNHNYVRGSITLFIINLHRSRKKIKLAGTLRDKLVHQYLLQPYGQEGLKSKSVQLNGQPLVMVDDGTLPELKPRPLRAGRTLVIPPVTMGFYVVKNVNALACRYR

SEQ ID NO: 64617 - DNA, 1443 bp, Artificial Sequence
  derived and/or modified sequence
atgcgagtgctgtgcgccttcccagaagccatgccttccagcaactcccggcctcccgcatgtctggcccctggggcactgtatcttgccttgctcctgcacctgtcgctgtcctctcaggcaggggaccgcaggcccctgcccgtggaccgggcggctgggttgaaggagaaaacactgatcctcctcgacgtttctaccaaaaatccggtgcggaccgtgaacgagaacttcctttctcttcaactggacccaagcattattcacgacggttggctggactttctgtctagcaagcgcctggtgactctcgccagaggtctctctccagccttcctccggttcggtggtaaaaggactgatttcctccagtttcagaacctgcgaaaccctgcaaaatcacgtggcggccctggaccggactactatctgaagaactacgaggatgagcctaacaactataggaccatgcatggcagggctgtcaatggcagccagctgggaaaagactacattcagctgaagagtttgctgcaaccgattcgtatttactcccgcgcctccttgtacggccctaatatcggccgccccaggaaaaacgtgatcgcgctccttgacgggttcatgaaagtggccgggtcgacggtggatgcagttacttggcagcactgttatattgacggccgggtcgttaaagtaatggattttttgaagacacggctgctcgataccctgagcgatcagattaggaaaatacagaaagtggtgaatacatacactcctgggaagaagatttggttagaaggcgtagtcactacatcagctgggggaacgaataatctgtctgattcttatgctgcgggcttcctgtggctgaatacactggggatgttagccaaccaaggcattgatgttgtcattagacacagcttctttgatcacggttacaatcatctcgtagatcagaatttcaaccccttacccgactactggttgagtctcctgtacaagaggttaatcggtcccaaggtgctcgccgtccacgtcgccggtctgcaacggaagccgcgccccggccgagtcatccgggataaactccgcatatatgcccattgcaccaaccaccacaatcataattatgtgagagggtcaatcactctctttattattaatttacacagaagccggaagaagatcaaactggctggaaccttgagagataagttggtccatcagtacctgctgcaaccttatggccaggaggggcttaaatctaaatcagtacagttgaatggacaaccgctggtgatggttgatgacggaacactacccgagctcaagccacgcccactgagagcagggaggaccctggttattccacctgtgaccatgggtttctatgtggtaaagaacgtgaatgctctcgcctgccgctatcgatag

SEQ ID NO: 64618 - DNA, 1443 bp, Artificial Sequence
  derived and/or modified sequence
atgagggtgctttgtgccttccctgaagccatgccctccagcaactcccgcccccccgcgtgcctagccccgggggctctctacttggctctgttgctccatctctccctttcctcccaggctggagacaggagacccttgcctgtagacagagctgcaggtttgaaggaaaagaccctgattctacttgatgtgagcaccaagaacccagtcaggacagtcaatgagaacttcctctctctgcagctggatccgtccatcattcatgatggctggctcgatttcctaagctccaagcgcttggtgaccctggcccggggactttcgcccgcctttctgcgcttcgggggcaaaaggaccgacttcctgcagttccagaacctgaggaacccggcgaaaagccgcgggggcccgggcccggattactatctcaaaaactatgaggatgagccaaataactatcggaccatgcatggccgggcagtaaatggcagccagttgggaaaggattacatccagctgaagagcctgttgcagcccatccggatttattccagagccagcttatatggccctaatattgggcggccgaggaagaatgtcatcgccctcctagatggattcatgaaggtggcaggaagtacagtagatgcagttacctggcaacattgctacattgatggccgggtggtcaaggtgatggacttcctgaaaactcgcctgttagacacactctctgaccagattaggaaaattcagaaagtggttaatacatacactccaggaaagaagatttggcttgaaggtgtggtgaccacctcagctggaggcacaaacaatctatccgattcctatgctgcaggattcttatggttgaacactttaggaatgctggccaatcagggcattgatgtcgtgatacggcactcattttttgaccatggatacaatcacctcgtggaccagaattttaacccattaccagactactggctctctctcctctacaagcgcctgatcggccccaaagtcttggctgtgcatgtggctgggctccagcggaagccacggcctggccgagtgatccgggacaaactaaggatttatgctcactgcacaaaccaccacaaccacaactacgttcgtgggtccattacactttttatcatcaacttgcatcgatcaagaaagaaaatcaagctggctgggactctcagagacaagctggttcaccagtacctgctgcagccctatgggcaggagggcctaaagtccaagtcagtgcaactgaatggccagcccttagtgatggtggacgacgggaccctcccagaattgaagccccgcccccttcgggccggccggacattggtcatccctccagtcaccatgggcttttatgtggtcaagaatgtcaatgctttggcctgccgctaccgataa

SEQ ID NO: 64619 - DNA, 1443 bp, Artificial Sequence
  derived and/or modified sequence
atgagggtgctgtgtgccttccctgaggccatgcccagcagcaacagccggcccccagcctgcctggcccctggggccctgtacctggccctgctgctgcacctgagcctgagcagccaggccggggaccggcggcccctgcctgtggacagagctgctggcctgaaggagaagaccctcatcctgctggatgtgtccaccaagaaccctgtgaggacagtgaatgaaaacttcctgagcctgcagctggaccccagcatcatccatgatggctggctggacttcctgagcagcaagaggctggtgaccctggcccggggcctgagccctgccttcctgcgctttggaggcaagaggacagacttcctgcagttccagaacctgagaaatcctgccaagagccggggcggccctggccctgactactacctgaagaactatgaagatgagcccaacaactaccgcaccatgcacggccgggctgtgaatggcagccagctgggcaaggactacatccagctgaagagcctgctgcagcccatccgcatctacagccgggccagcctgtatggccccaacatcggccggcccaggaagaatgtcatcgccctgctggatggcttcatgaaggtggccggcagcacagtggatgctgtgacctggcagcactgctacattgatggccgggtggtgaaggtgatggacttcctgaagacccggctgctggacaccctgagtgaccagatcaggaagatccagaaggtggtgaacacctacaccccaggcaagaagatctggctggagggcgtggtgaccaccagcgctgggggcaccaacaacctgagtgacagctatgctgctggcttcctgtggctgaacaccctgggcatgctggccaaccagggcattgatgtggtgatccgccacagcttctttgaccacggctacaaccacctggtggaccagaacttcaaccccctgcctgactactggctgagcctgctgtacaagaggctcatcggccccaaggtgctggccgtgcacgtggccggcctgcagaggaagccccggcccggccgggtcatccgggacaagctgcgcatctatgcccactgcaccaaccaccacaaccacaactacgtgcggggcagcatcaccctcttcatcatcaacctgcacaggagcaggaagaagatcaagctggccggcaccctgcgggacaagctggtgcaccagtacctgctgcagccctacggccaggagggcctgaagagcaagtctgtgcagctgaatggccagcccctggtgatggtggatgatggcaccctgcctgagctgaagccccggcccctgcgggccggccgcaccctggtgatcccccctgtgaccatgggcttctacgtggtgaagaatgtgaatgccctggcctgccgctacagatag

SEQ ID NO: 64620 - DNA, 1443 bp, Artificial Sequence
  derived and/or modified sequence
atgcgggtgctgtgcgccttccccgaggccatgcccagcagcaactctcgccctccagcctgcctcgcacctggggcactgtacttagctctcttgttgcacttatctttgtcctcccaagccggagatcgccggccactgccagttgatcgcgccgctggactgaaggagaagacattaatactgttggatgtgagcaccaagaatcctgtgcgtacagttaacgaaaattttttgagcctccagctcgatccaagtattatccatgacggttggctagatttcctgagcagcaaaagacttgtgaccctagcccgtggactgtctcccgcatttctgagattcgggggcaaaagaacagatttccttcagttccaaaatcttcgcaacccagccaagagccgaggaggtcctgggcccgattattatctgaaaaattatgaagatgagcctaataattacagaaccatgcacggcagggccgttaatggaagccagctcgggaaagattatatacagcttaaatccctgttgcagccaataagaatctactctagagcctcactgtatgggcctaacattggaaggccacggaaaaacgttatcgccctgcttgatggattcatgaaagtcgcgggcagcactgtggacgcagtgacttggcagcattgctacattgatggacgcgtcgtgaaagtgatggactttttaaaaaccagactactcgatacacttagcgaccagatcagaaaaatccagaaggtggttaatacctatactcctggcaagaagatctggcttgaaggcgttgttacaaccagcgccgggggtacgaataatcttagtgactcttatgcagccgggttcctgtggctcaatacattgggcatgctagccaaccagggcatagatgttgtcatacgtcactcctttttcgaccacggctacaaccacctggttgaccagaatttcaaccctctgccagactattggctgtctctcctttataaaaggcttattgggccaaaagtgttggcggtgcacgtggccggtctgcagcgaaaacctagacctggtcgtgtcattcgagacaaacttcgcatatacgcccattgtactaatcaccacaaccacaactacgtgagaggtagtattactctgttcattattaacctgcatcgcagccgcaaaaaaatcaagttagccggtacattgcgtgataagctggtacatcagtatcttctccaaccctatgggcaggagggcctgaagtcaaaatccgtgcaactcaacggacagccgctcgttatggttgatgacggaacactgcccgagctcaaaccaagacctctgcgggctggaagaacactcgtcatcccccccgtgactatgggattctatgtggttaagaacgtcaacgcgctggcttgccggtataggtag

SEQ ID NO: 64621 - DNA, 1443 bp, Artificial Sequence
  derived and/or modified sequence
atgcgcgtgctttgtgccttccctgaggctatgcctagttccaatagcagacccccagcctgtctcgcacccggtgccctctacttggccctgctgctccatcttagcctgagctctcaggctggcgatcggaggcccttgcctgtcgatagggcagctggactgaaagaaaagaccctcatcctactggacgtctctacaaaaaatcctgtccggacagttaatgagaattttctgtccctgcagctggatccaagcattattcatgacggatggctcgacttccttagcagtaaacggcttgtcacccttgccagaggtctcagccccgcttttctgaggtttggcggaaagaggacagattttctccaatttcagaacctgcggaatcctgcgaagtcccggggaggtcccggacccgattattacttaaagaactatgaagacgaacccaacaattatcgcactatgcacggccgagccgtgaacggcagtcaactaggaaaggattacatacagctgaagagcctgctccaaccgatccgaatttattctcgagccagtctgtacggcccaaacatcggcaggccgaggaaaaatgtgatcgcgttgctcgatggctttatgaaggttgccggatctaccgtcgatgcggtgacgtggcaacactgttatattgatggcagggtagtgaaagtgatggacttccttaagactcgtctgctggacacccttagcgatcaaattcgtaagatccagaaggtggtcaatacatacactcctggtaagaagatatggctagagggtgtggtgactactagcgccggaggaacgaacaatctctccgactcgtatgcagccggattcttgtggctcaatacactgggaatgctggctaatcagggtattgacgtggtcatccggcattccttcttcgaccacggatacaatcaccttgtggaccaaaacttcaatccattgccagactactggctgtccctgttgtacaagcgcctcatcggtcccaaagtgttagcagttcacgttgcgggattgcaacggaaacccaggcccggtcgtgtgattcgagataagctccgaatctacgctcactgtaccaatcatcacaaccacaactatgtcagggggagcattaccttgtttattatcaacctccataggtcacgcaagaagatcaaactcgccggaactctccgggataaattggtacaccagtacctgcttcaaccgtacggacaggaagggttgaagagcaaaagtgtgcaacttaatggacagcctttagtgatggtagatgacggcacattgcccgagctgaagccaaggcccctcagagcagggagaacactggtgataccccctgtgactatgggtttctatgtagtgaagaatgtgaatgctctggcgtgtaggtacagatag

SEQ ID NO: 64622 - DNA, 1443 bp, Artificial Sequence
  derived and/or modified sequence
atgagagtgctgtgcgccttccccgaggccatgcccagcagcaacagcagaccccccgcctgcctggcccccggcgccctgtacctggccctgctgctgcacctgagcctgagcagccaggccggcgacagaagacccctgcccgtggacagagccgccggcctgaaggagaagaccctgatcctgctggacgtgagcaccaagaaccccgtgagaaccgtgaacgagaacttcctgagcctgcagctggaccccagcatcatccacgacggctggctggacttcctgagcagcaagagactggtgaccctggccagaggcctgagccccgccttcctgagattcggcggcaagagaaccgacttcctgcagttccagaacctgagaaaccccgccaagagcagaggcggccccggccccgactactacctgaagaactacgaggacgagcccaacaactacagaaccatgcacggcagagccgtgaacggcagccagctgggcaaggactacatccagctgaagagcctgctgcagcccatcagaatctacagcagagccagcctgtacggccccaacatcggcagacccagaaagaacgtgatcgccctgctggacggcttcatgaaggtggccggcagcaccgtggacgccgtgacctggcagcactgctacatcgacggcagagtggtgaaggtgatggacttcctgaagaccagactgctggacaccctgagcgaccagatcagaaagatccagaaggtggtgaacacctacacccccggcaagaagatctggctggagggcgtggtgaccaccagcgccggcggcaccaacaacctgagcgacagctacgccgccggcttcctgtggctgaacaccctgggcatgctggccaaccagggcatcgacgtggtgatcagacacagcttcttcgaccacggctacaaccacctggtggaccagaacttcaaccccctgcccgactactggctgagcctgctgtacaagagactgatcggccccaaggtgctggccgtgcacgtggccggcctgcagagaaagcccagacccggcagagtgatcagagacaagctgagaatctacgcccactgcaccaaccaccacaaccacaactacgtgagaggcagcatcaccctgttcatcatcaacctgcacagaagcagaaagaagatcaagctggccggcaccctgagagacaagctggtgcaccagtacctgctgcagccctacggccaggagggcctgaagagcaagagcgtgcagctgaacggccagcccctggtgatggtggacgacggcaccctgcccgagctgaagcccagacccctgagagccggcagaaccctggtgatcccccccgtgaccatgggcttctacgtggtgaagaacgtgaacgccctggcctgcagatacagatag

SEQ ID NO: 64623 - protein, 548 aa, Artificial Sequence
  derived and/or modified sequence
MRVLCAFPEAMPSSNSRPPACLAPGALYLALLLHLSLSSQAGDRRPLPVDRAAGLKEKTLILLDVSTKNPVRTVNENFLSLQLDPSIIHDGWLDFLSSKRLVTLARGLSPAFLRFGGKRTDFLQFQNLRNPAKSRGGPGPDYYLKNYEDDIVRSDVALDKQKGCKIAQHPDVMLELQREKAAQMHLVLLKEQFSNTYSNLILTARSLDKLYNFADCSGLHLIFALNALRRNPNNSWNSSSALSLLKYSASKKYNISWELGNEPNNYRTMHGRAVNGSQLGKDYIQLKSLLQPIRIYSRASLYGPNIGRPRKNVIALLDGFMKVAGSTVDAVTWQHCYIDGRVVKVMDFLKTRLLDTLSDQIRKIQKVVNTYTPGKKIWLEGVVTTSAGGTNNLSDSYAAGFLWLNTLGMLANQGIDVVIRHSFFDHGYNHLVDQNFNPLPDYWLSLLYKRLIGPKVLAVHVAGLQRKPRPGRVIRDKLRIYAHCTNHHNHNYVRGSITLFIINLHRSRKKIKLAGTLRDKLVHQYLLQPYGQEGLKSKTQRCQYCGII

SEQ ID NO: 64624 - DNA, 1647 bp, Artificial Sequence
  derived and/or modified sequence
atgcgagtgctgtgcgcctttcctgaagccatgccctcttccaattctcgccccccagcgtgcctcgcgcccggggcgctttatcttgcgctgctgctccacctctctctcagctctcaggccggtgacagaagaccactgccggtggaccgtgccgctggcctgaaagagaaaaccctgatcctgctcgatgtttctaccaaaaatccagtccgaacagtgaacgaaaattttctaagccttcagctggatccaagtatcatccacgacggatggttagactttctgagttctaagagactcgtaaccctggccaggggactgagtcccgcattcctgcgctttggtggaaagcgtactgattttctgcaatttcaaaacttgcgaaatccggccaaatctagaggcggaccagggcctgattactatcttaagaactacgaggacgatattgtgcgttctgatgtcgctctcgataagcagaaaggatgcaagattgcacagcaccccgatgtgatgttggagctccagcgggaaaaagccgcacagatgcatttagtgctgcttaaggagcagttttcaaacacatatagtaaccttattttgaccgcgcggtccttggataagctctacaattttgcagattgtagtggactgcacctaattttcgctctcaacgccctgaggagaaatcccaataattcctggaacagctcatcagccctctcactgctgaaatattcggcatctaagaagtacaacattagctgggaactggggaacgagcctaacaattatcgcaccatgcatggcagggcagttaacgggagccaactgggaaaagactatatacagctcaagtcattactgcaaccaattaggatctacagcagggccagcttatacgggcccaacatcggacgcccaaggaagaacgtgatcgccctgctggacggtttcatgaaggttgccggttctacggtcgacgctgttacgtggcaacattgctatatcgacgggagggtagtcaaggtgatggactttttaaagactcggctgctcgataccctatccgaccaaatcagaaaaatccagaaagtggtgaacacgtacaccccaggtaaaaagatctggctggagggcgttgtcacaactagcgccgggggcacaaataacctgtccgacagttatgctgccgggtttctgtggctcaatacactcggcatgctggcaaaccaaggcatcgatgttgtgatccgtcacagcttttttgatcacggatataatcacctcgtcgatcagaattttaatccattgccagactattggttgtctctcttgtacaaacggctgatagggcccaaggttctggcagttcacgtagcgggcttgcaacgcaagcccaggccaggccgggttatccgagataaacttaggatttacgcccactgtaccaatcaccataaccataactatgtccgaggctcaatcacactcttcataataaatctccacagaagccggaagaagataaagctcgccgggactctgcgcgataagttggtgcaccagtacctcctgcaaccttatggtcaggaaggcctcaaatccaagacccaacgctgccaatattgtggtatcatctag

SEQ ID NO: 64625 - DNA, 1849 bp, Artificial Sequence
  derived and/or modified sequence
atgagggtgctttgtgccttccctgaagccatgccctccagcaactcccgcccccccgcgtgcctagccccgggggctctctacttggctctgttgctccatctctccctttcctcccaggctggagacaggagacccttgcctgtagacagagctgcaggtttgaaggaaaagaccctgattctacttgatgtgagcaccaagaacccagtcaggacagtcaatgagaacttcctctctctgcagctggatccgtccatcattcatgatggctggctcgatttcctaagctccaagcgcttggtgaccctggcccggggactttcgcccgcctttctgcgcttcgggggcaaaaggaccgacttcctgcagttccagaacctgaggaacccggcgaaaagccgcgggggcccgggcccggattactatctcaaaaactatgaggatgacattgttcgaagtgatgttgccttagataaacagaaaggctgcaagattgcccagcaccctgatgttatgctggagctccaaagggagaaggcagctcagatgcatctggttcttctaaaggagcaattctccaatacttacagtaatctcatattaacagccaggtctctagacaaactttataactttgctgattgctctggactccacctgatatttgctctaaatgcactgcgtcgtaatcccaataactcctggaacagttctagtgccctgagtctgttgaagtacagcgccagcaaaaagtacaacatttcttgggaactgggtaatgagccaaataactatcggaccatgcatggccgggcagtaaatggcagccagttgggaaaggattacatccagctgaagagcctgttgcagcccatccggatttattccagagccagcttatatggccctaatattgggcggccgaggaagaatgtcatcgccctcctagatggattcatgaaggtggcaggaagtacagtagatgcagttacctggcaacattgctacattgatggccgggtggtcaaggtgatggacttcctgaaaactcgcctgttagacacactctctgaccagattaggaaaattcagaaagtggttaatacatacactccaggaaagaagatttggcttgaaggtgtggtgaccacctcagctggaggcacaaacaatctatccgattcctatgctgcaggattcttatggttgaacactttaggaatgctggccaatcagggcattgatgtcgtgatacggcactcattttttgaccatggatacaatcacctcgtggaccagaattttaacccattaccagactactggctctctctcctctacaagcgcctgatcggccccaaagtcttggctgtgcatgtggctgggctccagcggaagccacggcctggccgagtgatccgggacaaactaaggatttatgctcactgcacaaaccaccacaaccacaactacgttcgtgggtccattacactttttatcatcaacttgcatcgatcaagaaagaaaatcaagctggctgggactctcagagacaagctggttcaccagtacctgctgcagccctatgggcaggagggcctaaagtccaaaacccaaagatgtcaatactgtgggatcatctgaatctaaaagggcattacctaattcttcagaagaaaggtcagtgcaactgaatggccagcccttagtgatggtggacgacgggaccctcccagaattgaagccccgcccccttcgggccggccggacattggtcatccctccagtcaccatgggcttttatgtggtcaagaatgtcaatgctttggcctgccgctaccgataa

SEQ ID NO: 64626 - DNA, 1647 bp, Artificial Sequence
  derived and/or modified sequence
atgagggtgctgtgtgccttccctgaggccatgcccagcagcaacagccggcccccagcctgcctggcccctggggccctgtacctggccctgctgctgcacctgagcctgagcagccaggccggggaccggcggcccctgcctgtggacagagctgctggcctgaaggagaagaccctcatcctgctggatgtgtccaccaagaaccctgtgaggacagtgaatgaaaacttcctgagcctgcagctggaccccagcatcatccatgatggctggctggacttcctgagcagcaagaggctggtgaccctggcccggggcctgagccctgccttcctgcgctttggaggcaagaggacagacttcctgcagttccagaacctgagaaatcctgccaagagccggggcggccctggccctgactactacctgaagaactatgaagatgacatcgtgcggagtgatgtggccctggacaagcagaagggctgcaagatcgcccagcacccagatgtgatgctggagctgcagcgggagaaggccgcccagatgcacctggtgctgctgaaggagcagttcagcaacacctacagcaacctgatcctgacagcccggagcctggacaagctgtacaactttgctgactgcagcggcctgcacctgatctttgccctgaatgccctgcggaggaaccccaacaacagctggaacagcagcagcgccctgagcctgctgaagtacagcgccagcaagaagtacaacatctcctgggagctgggcaatgagcccaacaactaccgcaccatgcacggccgggctgtgaatggcagccagctgggcaaggactacatccagctgaagagcctgctgcagcccatccgcatctacagccgggccagcctgtatggccccaacatcggccggcccaggaagaatgtcatcgccctgctggatggcttcatgaaggtggccggcagcacagtggatgctgtgacctggcagcactgctacattgatggccgggtggtgaaggtgatggacttcctgaagacccggctgctggacaccctgagtgaccagatcaggaagatccagaaggtggtgaacacctacaccccaggcaagaagatctggctggagggcgtggtgaccaccagcgctgggggcaccaacaacctgagtgacagctatgctgctggcttcctgtggctgaacaccctgggcatgctggccaaccagggcattgatgtggtgatccgccacagcttctttgaccacggctacaaccacctggtggaccagaacttcaaccccctgcctgactactggctgagcctgctgtacaagaggctcatcggccccaaggtgctggccgtgcacgtggccggcctgcagaggaagccccggcccggccgggtcatccgggacaagctgcgcatctatgcccactgcaccaaccaccacaaccacaactacgtgcggggcagcatcaccctcttcatcatcaacctgcacaggagcaggaagaagatcaagctggccggcaccctgcgggacaagctggtgcaccagtacctgctgcagccctacggccaggagggcctgaagagcaagacccagcgctgccagtactgcggcatcatctag

SEQ ID NO: 64627 - DNA, 1647 bp, Artificial Sequence
  derived and/or modified sequence
atgcgggtgctgtgcgccttccccgaggccatgcccagcagcaactccagacctcccgcttgcctggcccccggagccttatacctcgccttacttctgcacttgagtctctcctctcaggctggagatcgaaggccactcccggtggacagggcagctggcctgaaggagaagacactgatacttctcgatgtctccaccaagaatcccgttcgcaccgtgaatgagaacttcctaagcttacaactggatccatcaattattcatgatggttggcttgacttcttgagttcaaagaggctcgtcacacttgccagggggctttccccagctttcctgaggtttggaggaaaacggacagacttcttacagtttcagaacttgcggaatcctgctaagtctagaggaggccccggccccgattattacttaaagaattatgaagatgatatcgtcagatcggatgtagccctggataaacagaaaggctgcaaaattgcccaacaccctgatgtgatgttggagcttcagagagagaaagctgcacagatgcatctggtattgctgaaggagcagttttcaaacacctactctaacctgatcctgaccgctaggtccctggataagctctataacttcgcggactgttcaggcctgcacctgatattcgcgctgaatgcgctgcgccggaacccaaacaacagttggaactcgagctcagccctcagcctcctgaagtacagtgcttctaaaaaatataacattagttgggagcttgggaacgagcccaacaactataggaccatgcacggccgagccgtaaacggttcgcaactaggcaaggactatattcaacttaaatctctgctacaacctatccggatctattcacgggcctctctctacggaccaaacatcggacggccaagaaaaaacgtcatcgcgctactagatggttttatgaaggtggccggaagtactgtcgacgccgtcacatggcagcactgttacattgacggccgtgttgtgaaggtgatggacttcttgaagacgcggctgctcgacacattatcagatcagattcggaagatccagaaagtggtgaatacttacacgccaggaaaaaaaatttggctggagggcgttgtgaccacaagtgctggcggaacaaacaatttgagcgacagttacgccgcaggcttcttgtggctcaatacgttagggatgctcgcaaaccaggggatagatgtcgtcatcagacacagcttttttgaccatggttataatcacctggtggaccaaaatttcaaccccttacctgattattggttgtcgctcctgtacaagagactgatcggtcccaaggtcctagccgtgcacgtcgccgggctccagcgaaagcccagacccggtagggtcattagggacaagctgcgaatatatgcacactgcacgaaccaccacaatcataattacgttaggggtagcattactctcttcatcattaacctccatcgctcaaggaagaaaatcaagcttgcgggcacgttgcgggataagctggtgcaccagtatctgttacagccttatggccaggagggtctcaagtcaaaaacccaaaggtgccagtattgtggcataatttag

SEQ ID NO: 64628 - DNA, 1647 bp, Artificial Sequence
  derived and/or modified sequence
atgcgcgtgttgtgcgcgtttcctgaagcgatgccgtccagtaattcgcggccacccgcttgcctggcccctggggctctctatctagcactactgctgcacctctcactctcctcccaggcgggtgaccggaggcccttacctgtggacagggcagccggattaaaggagaagaccctcatcctacttgatgtgtccacaaagaacccagtgaggactgtcaacgagaatttcctttccctgcagttagaccccagcataatccatgacggctggttagacttcctgtctagcaagagattagttacgctcgcccgaggtctgtctccagcatttctaagattcggtggcaaacgcaccgattttctgcagttccagaatcttcgtaaccccgcaaagtcccgcggagggccaggaccagattactatttaaagaattacgaggacgacattgtccggagtgatgtggcccttgataaacagaagggctgcaaaatcgctcagcaccccgacgtgatgttagaactgcaacgggagaaggccgcacagatgcacttggttctactgaaagagcagttcagcaatacctatagcaacctcattctgactgcacgttctctagataaactgtacaattttgccgactgttccggtttacatctaatatttgctctaaacgctctaaggcggaatccaaataactcttggaatagttccagcgcactctctctgttgaaatacagcgcctctaagaaatataacatctcttgggagctgggcaacgaaccaaacaactatcgaaccatgcacggacgagcagtgaacggaagccagctcggaaaggattacattcagctgaagagtctgctgcagccaatccggatttacagtcgcgcaagtctgtatggtcccaatataggccgacctagaaagaatgtgatcgccttgttagatggtttcatgaaagtggccggatcaactgttgacgcggtgacatggcaacattgctatattgatggcagggtagtcaaggtgatggactttctcaaaaccaggctgctcgacaccctctcagatcagatccgcaagatccagaaggtcgttaacacttacactcccggaaagaagatctggctggagggtgtggtgactacaagcgctgggggtaccaacaacctgtccgactcttatgccgcaggctttctgtggctcaatacacttggcatgttagccaatcaagggattgacgtggtgatacgccatagtttctttgaccacggctataatcatctggtggaccagaattttaaccccctgccagactactggttgtcgctcctttacaagaggcttatcggaccgaaggtactggcagttcatgtggctggactgcaacgaaaaccaaggccagggcgtgtgatccgggataagttgcggatctacgctcactgcacaaatcatcataatcacaattacgttagaggtagtataacgctgtttatcattaacctccacagaagcagaaaaaaaataaaactggcgggtacgttgcgcgacaaattagtgcaccagtacctgctgcagccatacggacaagaagggcttaaaagcaaaacccagaggtgccagtattgtgggattatttag

SEQ ID NO: 64629 - DNA, 1647 bp, Artificial Sequence
  derived and/or modified sequence
atgagagtgctgtgcgccttccccgaggccatgcccagcagcaacagcagaccccccgcctgcctggcccccggcgccctgtacctggccctgctgctgcacctgagcctgagcagccaggccggcgacagaagacccctgcccgtggacagagccgccggcctgaaggagaagaccctgatcctgctggacgtgagcaccaagaaccccgtgagaaccgtgaacgagaacttcctgagcctgcagctggaccccagcatcatccacgacggctggctggacttcctgagcagcaagagactggtgaccctggccagaggcctgagccccgccttcctgagattcggcggcaagagaaccgacttcctgcagttccagaacctgagaaaccccgccaagagcagaggcggccccggccccgactactacctgaagaactacgaggacgacatcgtgagaagcgacgtggccctggacaagcagaagggctgcaagatcgcccagcaccccgacgtgatgctggagctgcagagagagaaggccgcccagatgcacctggtgctgctgaaggagcagttcagcaacacctacagcaacctgatcctgaccgccagaagcctggacaagctgtacaacttcgccgactgcagcggcctgcacctgatcttcgccctgaacgccctgagaagaaaccccaacaacagctggaacagcagcagcgccctgagcctgctgaagtacagcgccagcaagaagtacaacatcagctgggagctgggcaacgagcccaacaactacagaaccatgcacggcagagccgtgaacggcagccagctgggcaaggactacatccagctgaagagcctgctgcagcccatcagaatctacagcagagccagcctgtacggccccaacatcggcagacccagaaagaacgtgatcgccctgctggacggcttcatgaaggtggccggcagcaccgtggacgccgtgacctggcagcactgctacatcgacggcagagtggtgaaggtgatggacttcctgaagaccagactgctggacaccctgagcgaccagatcagaaagatccagaaggtggtgaacacctacacccccggcaagaagatctggctggagggcgtggtgaccaccagcgccggcggcaccaacaacctgagcgacagctacgccgccggcttcctgtggctgaacaccctgggcatgctggccaaccagggcatcgacgtggtgatcagacacagcttcttcgaccacggctacaaccacctggtggaccagaacttcaaccccctgcccgactactggctgagcctgctgtacaagagactgatcggccccaaggtgctggccgtgcacgtggccggcctgcagagaaagcccagacccggcagagtgatcagagacaagctgagaatctacgcccactgcaccaaccaccacaaccacaactacgtgagaggcagcatcaccctgttcatcatcaacctgcacagaagcagaaagaagatcaagctggccggcaccctgagagacaagctggtgcaccagtacctgctgcagccctacggccaggagggcctgaagagcaagacccagagatgccagtactgcggcatcatctag

SEQ ID NO: 64630 - protein, 580 aa, Artificial Sequence
  derived and/or modified sequence
MMEALGFLKLEVNGPMVTVALSVALLALLKWYSTSAFSRLEKLGLRHPKPSPFIGNLTFFRQGFWESQMELRKLYGPLCGYYLGRRMFIVISEPDMIKQVLVENFSNFTNRMASGLEFKSVADSVLFLRDKRWEEVRGALMSAFSPEKLNELGLLIMQERIKGHMGGQQAPQRIPPTRLSKPSGIYVNLHYATLPFCMVPLISQACELLLAHLKRYAESGDAFDIQRCYCNYTTDVVASVAFGTPVDSWQAPEDPFVKHCKRFFEFCIPRPILVLLLSFPSIMVPLARILPNKNRDELNGFFNKLIRNVIALRDQQAAEERRRDFLQMVLDARHSASPMGVQDFDIVRDVFSSTGCKPNPSRQHQPSPMARPLTVDEIVGQAFIFLIAGYEIITNTLSFATYLLATNPDCQEKLLREVDVFKEKHMAPEFCSLEEGLPYLDMVIAETLRMYPPAFRFTREAAQDCEVLGQRIPAGAVLEMAVGALHHDPEHWPSPETFNPERFTAEARQQHRPFTYLPFGAGPRSCLGVRLGLLEVKLTLLHVLHKFRFQACPETQVPLQLESKSALGPKNGVYIKIVSR

SEQ ID NO: 64631 - protein, 150 aa, Artificial Sequence
  derived and/or modified sequence
MEALGFLKLEVNGPMVTVALSVALLALLKWYSTSAFSRLEKLGLRHPKPSPFIGNLTFFRQGFWESQMELRKLYGPLCGYYLGRRMFIVISEPDMIKQVLVENFSNFTNRMASGLEFKSVADSVLFLRDKRWEEVRGALMSAFSPEKLNE

SEQ ID NO: 64632 - DNA, 1743 bp, Artificial Sequence
  derived and/or modified sequence
atgatggaggccctgggcttcctgaagctggaggtgaacggccccatggtgaccgtggccctgagcgtggccctgctggccctgctgaagtggtacagcaccagcgccttcagcagactggagaagctgggcctgagacaccccaagcccagccccttcatcggcaacctgaccttcttcagacagggcttctgggagagccagatggagctgagaaagctgtacggccccctgtgcggctactacctgggcagaagaatgttcatcgtgatcagcgagcccgacatgatcaagcaggtgctggtggagaacttcagcaacttcaccaacagaatggccagcggcctggagttcaagagcgtggccgacagcgtgctgttcctgagagacaagagatgggaggaggtgagaggcgccctgatgagcgccttcagccccgagaagctgaacgagctgggcctgctgatcatgcaggagagaatcaagggccacatgggcggccagcaggccccccagagaatcccccccaccagactgagcaagcccagcggcatctacgtgaacctgcactacgccaccctgcccttctgcatggtgcccctgatcagccaggcctgcgagctgctgctggcccacctgaagagatacgccgagagcggcgacgccttcgacatccagagatgctactgcaactacaccaccgacgtggtggccagcgtggccttcggcacccccgtggacagctggcaggcccccgaggaccccttcgtgaagcactgcaagagattcttcgagttctgcatccccagacccatcctggtgctgctgctgagcttccccagcatcatggtgcccctggccagaatcctgcccaacaagaacagagacgagctgaacggcttcttcaacaagctgatcagaaacgtgatcgccctgagagaccagcaggccgccgaggagagaagaagagacttcctgcagatggtgctggacgccagacacagcgccagccccatgggcgtgcaggacttcgacatcgtgagagacgtgttcagcagcaccggctgcaagcccaaccccagcagacagcaccagcccagccccatggccagacccctgaccgtggacgagatcgtgggccaggccttcatcttcctgatcgccggctacgagatcatcaccaacaccctgagcttcgccacctacctgctggccaccaaccccgactgccaggagaagctgctgagagaggtggacgtgttcaaggagaagcacatggcccccgagttctgcagcctggaggagggcctgccctacctggacatggtgatcgccgagaccctgagaatgtacccccccgccttcagattcaccagagaggccgcccaggactgcgaggtgctgggccagagaatccccgccggcgccgtgctggagatggccgtgggcgccctgcaccacgaccccgagcactggcccagccccgagaccttcaaccccgagagattcaccgccgaggccagacagcagcacagacccttcacctacctgcccttcggcgccggccccagaagctgcctgggcgtgagactgggcctgctggaggtgaagctgaccctgctgcacgtgctgcacaagttcagattccaggcctgccccgagacccaggtgcccctgcagctggagagcaagagcgccctgggccccaagaacggcgtgtacatcaagatcgtgagcagatag

SEQ ID NO: 64633 - DNA, 1743 bp, Artificial Sequence
  derived and/or modified sequence
atgatggaagccctcggatttttgaagctcgaagttaacgggccaatggtgacagtggcccttagcgtggccctgctggctctgctgaaatggtactctacaagtgccttttccaggctggagaaactggggttgcggcatccaaaaccatcacccttcatcgggaatctgacgttctttcgccagggtttttgggagtctcagatggagttgaggaaattgtacggcccgctgtgtggatactaccttggccgcagaatgtttatcgtgatttctgaacctgacatgattaaacaggtcctggtcgagaacttctctaactttaccaacaggatggcaagcggactggagttcaagtctgttgctgattctgtcctcttcctaagggacaagaggtgggaggaggtgaggggcgcgcttatgtctgcatttagtccagagaagctgaacgagctcggactgctgataatgcaggagaggattaaagggcatatgggggggcaacaggctccgcagaggataccgccaaccaggctgagcaagcctagtggtatctacgtcaacctccattacgctacgttaccattctgcatggtgccactgatctcacaggcgtgtgaattgctcctggcccatctgaaaagatatgcggaatccggcgacgccttcgatattcagaggtgttattgcaattatacaacagatgttgtggcctctgtagctttcggaacacccgtcgatagttggcaggcccccgaagacccttttgtgaaacattgcaagcgattcttcgagttctgcattccccggcccatactggtgctcctgctgagcttcccctctattatggtgcctctcgctaggattctgcccaacaaaaatcgagacgagctgaatgggttttttaacaagctcatcagaaacgtgattgcactccgagaccagcaggcagctgaggaacgtagacgcgattttttgcagatggtgctggacgcccggcactcagcttcaccaatgggcgtgcaggatttcgatatagtgcgggacgtgttcagttctacggggtgtaaaccgaaccctagccgacaacatcagccctcacccatggcccgaccgctgactgttgacgagattgttgggcaggccttcatattcctgatcgccggctatgaaatcattacgaatacactatcctttgctacatacctactggcgaccaatccggattgtcaagaaaaattacttcgggaagtggacgtgttcaaggaaaaacacatggcccccgaattctgctcgctggaggagggattgccatatcttgatatggtgatcgctgaaaccctgcggatgtaccctcccgcgttcagatttacgcgagaggccgcacaggactgtgaggtgctgggccagcggataccagcgggcgctgtgttggagatggctgtaggggccctgcaccacgatcctgaacactggccgagtccggagacctttaaccctgagcggttcacggccgaggctcggcagcagcaccgcccatttacctacctacctttcggggctggcccgagaagttgtctgggcgtgcggctgggcttgctggaggtcaaactgaccctgctgcatgtcctacacaagttccggttccaggcatgtccggagacgcaggtgcccctgcaactggaatcaaagtccgcattaggaccaaaaaatggagtttatatcaagatcgtctctcgctag

SEQ ID NO: 64634 - DNA, 1743 bp, Artificial Sequence
  derived and/or modified sequence
atgatggaggccctgggcttcctgaagctggaggtgaatggccccatggtgacagtggccctgtctgtggccctgctggccctgctgaagtggtacagcaccagcgccttcagccggctggagaagctgggcctgcggcaccccaagcccagccccttcatcggcaacctgaccttcttccggcagggcttctgggagagccagatggagctgaggaagctgtatggccccctgtgtggctactacctgggccgcaggatgtttattgtcatcagcgagccagacatgatcaagcaggtgctggtggagaacttcagcaacttcaccaacaggatggccagcggcctggagttcaagtctgtggccgacagcgtgctcttcctgcgggacaagcgctgggaggaggtgcggggggccctgatgtctgccttcagccctgagaagctgaatgagctgggcctgctgatcatgcaggagcgcatcaagggccacatgggcggccagcaggccccccagagaattcctcccacccggctgagcaagcccagcggcatctacgtgaacctgcactacgccaccctgcccttctgcatggtgcccctcatcagccaggcctgtgagctgctgctggcccacctgaagagatatgcagagagcggagatgcctttgacatccagcgctgctactgcaactacaccacagatgtggtggcctctgtggccttcggcacccctgtggacagctggcaggcccctgaggacccctttgtgaagcactgcaagcgcttctttgagttctgcatcccccggcccatcctggtgctgctgctgtccttccccagcatcatggtgcccctggcccgcatcctgcccaacaagaacagagatgagctgaatggcttcttcaacaagctgatcagaaatgtcatcgccctgcgggaccagcaggccgctgaggagcggcggcgggacttcctgcagatggtgctggatgcccggcacagcgccagccccatgggcgtgcaggactttgacatcgtgagagatgtgttcagcagcacaggctgcaagcccaaccccagccggcagcaccagcccagccccatggcccggcccctgactgtggatgagatcgtgggccaggccttcatcttcctgattgctggctatgagatcatcaccaacaccctgagctttgccacctacctgctggccaccaacccagactgccaggagaagctgctgcgggaggtggatgtgttcaaggagaagcacatggcccctgagttctgcagcctggaggagggcctgccctacctggacatggtgattgctgagaccctgaggatgtaccccccagccttccgcttcacccgggaggccgcccaggactgtgaggtgctgggccagaggatcccagctggagctgtgctggagatggctgtgggcgccctgcaccacgaccctgagcactggcccagccctgagaccttcaaccctgagcgcttcaccgctgaggcccggcagcagcaccggcccttcacctacctgccctttggagctggccccaggagctgcctgggcgtgcggctgggcctgctggaggtgaagctgaccctgctgcacgtgctgcacaagttccgcttccaggcctgcccagagacccaggtgcccctgcagctggagagcaagagcgccctgggccccaagaatggagtgtacatcaagatcgtgtccaggtag

SEQ ID NO: 64635 - DNA, 1743 bp, Artificial Sequence
  derived and/or modified sequence
atgatggaggccctgggcttcctgaagctggaggtgaacggccccatggtaactgtggcactgagcgttgccctgctcgccttgcttaagtggtactcaacatctgccttcagtaggctggagaagctgggccttaggcatccgaaaccaagcccgtttattggtaatctgacgtttttcagacaggggttctgggagagccagatggagttgcggaagctgtatggaccactgtgtggttactatctgggaaggcgaatgtttattgttatctcggagccagacatgataaagcaggtgctggttgagaacttctccaactttacgaataggatggcgtcaggcttagagtttaagagcgtggctgactctgtactgtttcttagagacaagcgttgggaggaggtaaggggggcccttatgtcagctttttccccggagaagctgaatgaactgggtcttctcatcatgcaggagaggattaaggggcacatgggaggacagcaggccccacagcgcattcctccgactcggctatctaagcccagtggcatctacgtgaatttacactacgccactctacctttttgcatggtgcctttaatttcacaggcctgcgagctattgctggcgcacctcaagaggtatgcagagtcaggcgacgctttcgacatacagcggtgctattgtaattatacgaccgatgtggtggcatccgtggccttcggaacacctgtggactcttggcaagctcccgaggacccgttcgttaaacactgtaagcgcttttttgagttctgtattcctagacctatccttgtcctgcttctaagttttccttccatcatggtccctctcgcacgtatactcccgaacaagaacagagacgaactcaatggtttttttaacaagctcatccgaaatgtcatcgccctgcgcgatcaacaggcagcagaagaacgccgtcgtgacttcctccagatggtgctcgatgccaggcattctgcttcccccatgggtgtgcaagatttcgacatagtccgcgacgtgttctctagcaccggctgcaagcccaaccctagccgccagcaccagccctcgccaatggccaggcctctgactgttgatgagattgtcgggcaggctttcatatttttgattgctggctacgagatcataaccaataccctcagcttcgctacctaccttctggcgaccaatcctgactgccaagagaaacttctaagggaagtggatgtgttcaaggaaaagcacatggccccggagttttgctctctagaagagggtctaccttacctggatatggtgatcgcagaaacactgcgtatgtaccctcccgctttccgcttcactagagaggcggctcaggattgtgaagtcctggggcagcggatccccgctggcgccgtcttagaaatggctgtaggcgcacttcaccacgacccagaacactggccatctccggagacattcaacccagagagatttaccgcagaagctcgtcaacagcatcgcccattcacctatcttcctttcggggctgggccccgctcctgtttaggagtacgcctgggtctgctggaggtgaagctgaccctgctccacgtgctccataagttcagattccaagcttgtccggaaactcaggtgccgttgcagctcgaaagtaaatccgcattgggccctaagaacggcgtgtacattaagatcgtcagccgatag

SEQ ID NO: 64636 - DNA, 1743 bp, Artificial Sequence
  derived and/or modified sequence
atgatggaagcgctcggctttctgaaattagaagtcaatgggccaatggtaactgtggctttgagtgtggctcttctcgctctgctgaaatggtacagcacatccgctttctccaggttagagaagcttggactaaggcaccccaaaccaagccccttcatcggtaatctcacatttttccggcaggggttttgggaatcacaaatggagttgcgcaaactgtacggaccgttgtgcggctattatctgggaaggaggatgtttatcgttatatctgaacctgacatgatcaagcaagtcctggtggagaatttctccaacttcactaaccgtatggccagtggacttgagttcaagtcggttgcagatagtgtattgttcctccgcgataagcggtgggaggaggtgaggggagctctgatgtcagccttctcaccggagaaactcaatgaactgggactcctaataatgcaggaaaggattaaaggccacatggggggacagcaggcccctcagcgcattccaccgacccgcctgagtaaaccaagcggcatctacgtgaatctgcattacgctacactgcccttttgcatggtccccctgatctctcaggcctgcgagctgttgctcgcccaccttaaacgctacgccgagagcggagacgcctttgatatacagaggtgctattgtaattacacaaccgacgtggtggcaagcgtggcattcggaacaccagtagactcatggcaggctccagaggaccccttcgtgaagcactgcaagcggtttttcgagttttgtatcccacgcccaattttggttctgctgttaagtttcccctccattatggtgccactggctagaatcctgccaaataaaaacagagacgaactcaacggtttctttaacaaattaattcgaaatgtgattgctctgagagatcaacaagcagccgaggagagacgaagagatttcctgcagatggtgctggatgccaggcactctgcatcccccatgggggtccaagatttcgatattgtacgagatgttttcagctccaccggctgcaaaccaaacccatctagacagcaccaacctagtcccatggctcgcccactgactgtggacgagattgtgggacaggcctttattttccttattgccggttacgagatcatcaccaacacattgtcattcgcaacctacctgctggccaccaatcctgactgtcaggaaaaactgctgagggaggtggacgtgttcaaggagaagcacatggcccctgagttttgctcgttggaagagggactaccttatctggacatggtcattgcagagaccctgcggatgtatcccccagccttccggttcacacgcgaggccgcacaggactgtgaagtactcggacagcggattccagccggagcagtcctggaaatggctgtgggtgcattacatcatgacccggagcattggcccagccctgagacattcaaccctgagagattcactgctgaggcgagacagcagcatagacccttcacataccttccattcggagctggacctagatcttgtctaggggtcagactgggactgcttgaggtcaagctcactctgctacatgttttgcataagtttaggttccaggcgtgtcctgagacacaggtcccactacagctggaaagcaagtctgctctgggtcccaaaaacggagtctatattaaaattgtctcccgatag

SEQ ID NO: 64637 - DNA, 2202 bp, Artificial Sequence
  derived and/or modified sequence
aaggaataaagttgctgattcattcctttacactgaaaccctttgttgtgccctcctcttccttcctctttatagggagacactctgagaaagagcacattgtgggggcccactccatgtgatgtttgcttggttgcctgttcccttttctacctgcagagcacggttcccataagggcggcgagatcagcctcctgtctcatctggaagaccaccactctggggtctcagaggaatgatggaagccttggggtttctaaaattggaagtgaatggccccatggtgacggtggccctgtcagtggctctcttggccctcctgaaatggtactccacatcagcattctcaagactggagaagttaggcctcagacatcccaagccttctcctttcattggaaacttgacatttttccgccagggtttttgggaaagccaaatggagctcagaaagctgtatggacctctgtgtgggtactatcttggtcgtcggatgtttattgttatttctgagccagacatgatcaagcaggtgttggttgagaacttcagtaactttaccaacagaatggcgtcgggtttggagttcaagtcggtagccgacagcgttctgtttttacgtgacaaaagatgggaagaggtcagaggtgccctgatgtctgctttcagtcctgaaaagctgaacgagcttggccttttaatcatgcaagagagaataaaaggtcacatgggtggccagcaggctccacaaagaattccacccacccgtttgtcgaagccgagtggtatctatgtgaatctccattatgccactctacctttctgtatggttcccctcatcagccaagcctgcgaacttctcctggctcatttaaaacgctatgcggaatctggggacgcatttgacatccagaggtgctactgcaattacaccacagatgtggttgccagcgtcgcctttggcaccccggtggactcctggcaggcccctgaggatccctttgtgaaacactgcaagcgtttcttcgaattctgcatccccagacctatcctggttttactcttatcatttccatccataatggtcccactggcccggattttgcccaataagaaccgagacgaactgaatggcttttttaacaaactcattaggaatgtgattgccttgcgggaccagcaagctgccgaagagaggcggagagacttcctccaaatggtcctggatgcccgacattctgcaagtcccatgggcgtgcaagactttgacatcgtcagagacgttttctcctctactgggtgcaagccgaacccttcccggcaacaccagcccagccctatggccaggcctttgactgtggatgagattgtgggccaggccttcatcttcctcatcgctggctatgaaatcatcaccaacacactttcttttgccacctacctactggccaccaaccctgactgccaagagaagcttctgagagaggtagacgtttttaaggagaaacacatggcccctgagttctgcagcctcgaggaaggcctgccctatctggacatggtgattgcagagacgctgaggatgtacccgccagctttcagattcacacgggaggcagctcaggactgcgaggtgctggggcagcgcatccccgcaggcgctgtgctagagatggccgtgggtgccctgcaccatgaccctgagcactggccaagcccggagaccttcaaccctgaaaggttcacggctgaggcccggcagcagcaccggcccttcacgtacctgcccttcggggccggcccacggagctgcctcggggtgcgtctagggctgcttgaggtcaagttgacactgctccacgtgctgcacaagttccggttccaagcctgccctgagacccaggtaccgctgcagctagaatccaaatctgccctaggtccaaaaaatggtgtctatatcaagatcgtatcccgctgacacagaaggctgccgggtggggggagggcacccccaaattcaaagaaaaccctaagtgtggatgttcagaattttggaaaaatgtcactgaagtgattgaaagagtgcctggcatgcaaggataagaggttctttacataacatttcctaaatgcttaataaacgtttgttgcacttggttttgacattgccaatggggtttgaaccagtgctctctctaaatg

SEQ ID NO: 64638 - DNA, 1401 bp, Artificial Sequence
  derived and/or modified sequence
atggagctgagaaagctgtacggccccctgtgcggctactacctgggcagaagaatgttcatcgtgatcagcgagcccgacatgatcaagcaggtgctggtggagaacttcagcaacttcaccaacagaatggccagcggcctggagttcaagagcgtggccgacagcgtgctgttcctgagagacaagagatgggaggaggtgagaggcgccctgatgagcgccttcagccccgagaagctgaacgagatggtgcccctgatcagccaggcctgcgagctgctgctggcccacctgaagagatacgccgagagcggcgacgccttcgacatccagagatgctactgcaactacaccaccgacgtggtggccagcgtggccttcggcacccccgtggacagctggcaggcccccgaggaccccttcgtgaagcactgcaagagattcttcgagttctgcatccccagacccatcctggtgctgctgctgagcttccccagcatcatggtgcccctggccagaatcctgcccaacaagaacagagacgagctgaacggcttcttcaacaagctgatcagaaacgtgatcgccctgagagaccagcaggccgccgaggagagaagaagagacttcctgcagatggtgctggacgccagacacagcgccagccccatgggcgtgcaggacttcgacatcgtgagagacgtgttcagcagcaccggctgcaagcccaaccccagcagacagcaccagcccagccccatggccagacccctgaccgtggacgagatcgtgggccaggccttcatcttcctgatcgccggctacgagatcatcaccaacaccctgagcttcgccacctacctgctggccaccaaccccgactgccaggagaagctgctgagagaggtggacgtgttcaaggagaagcacatggcccccgagttctgcagcctggaggagggcctgccctacctggacatggtgatcgccgagaccctgagaatgtacccccccgccttcagattcaccagagaggccgcccaggactgcgaggtgctgggccagagaatccccgccggcgccgtgctggagatggccgtgggcgccctgcaccacgaccccgagcactggcccagccccgagaccttcaaccccgagagattcaccgccgaggccagacagcagcacagacccttcacctacctgcccttcggcgccggccccagaagctgcctgggcgtgagactgggcctgctggaggtgaagctgaccctgctgcacgtgctgcacaagttcagattccaggcctgccccgagacccaggtgcccctgcagctggagagcaagagcgccctgggccccaagaacggcgtgtacatcaagatcgtgagcagatag

SEQ ID NO: 64639 - DNA, 1401 bp, Artificial Sequence
  derived and/or modified sequence
atggagttgcgaaagttgtacggccccctgtgtggatactacctcggcaggagaatgttcattgtcataagtgagcctgatatgatcaaacaggtcctcgtggagaatttcagtaattttactaacagaatggctagcggactggaatttaagtccgtggcagattcagtccttttcctccgtgacaaaaggtgggaagaggtccggggtgcactgatgtccgccttttcccccgagaaactgaatgaaatggtgccgctgatttcgcaggcttgcgagctactgctggcccacctgaagagatacgctgagagtggcgatgcatttgatattcagcgctgctactgtaattataccacagatgtcgtggcaagtgtggcatttggcacccccgtcgactcttggcaggctccagaagatccttttgtcaagcactgcaaacgcttcttcgagttctgcattcccagacctatcctggtgctactactgtctttccccagcattatggtgcctctcgctcggatactgcctaataaaaatcgcgatgaattgaatgggttctttaacaagctgatccgaaatgttatcgccctgcgggatcaacaggccgccgaagagcgccggagagatttcctgcagatggttttggacgctagacatagcgcatctccaatgggggtccaggattttgacatcgtcagagacgtgttctccagtactgggtgtaaacctaacccatccagacagcaccagcccagcccgatggcccgcccactgacagtggatgagatcgtcgggcaagcctttattttcctcattgcaggttatgagattatcactaacaccttgtcctttgctacctacctcttggctaccaatccggactgtcaggagaagctactgcgcgaagtcgatgtgttcaaggaaaaacacatggctcccgagttttgtagtctggaagagggcctgccctacctggatatggtgatcgccgaaacattgagaatgtatccgcctgcctttaggttcactcgggaagcagcccaggactgcgaagtgctgggacaaaggatccctgctggcgccgtccttgaaatggccgtgggcgcattgcaccacgatccggaacattggccctcccccgagactttcaatccagagcgcttcacagcagaggcgagacagcaacaccgccctttcacctacctccctttcggggccgggccccgtagctgtctgggagtccgtctgggcctactcgaggtcaaactaaccctgcttcatgtccttcacaagttccggtttcaggcctgtccggagactcaggtgccactgcagctggagtccaagtcagccctcggaccaaagaacggtgtgtatattaaaattgtgagccgatag

SEQ ID NO: 64640 - DNA, 1401 bp, Artificial Sequence
  derived and/or modified sequence
atggagctgaggaagctgtatggccccctgtgtggctactacctgggccgcaggatgtttattgtcatcagcgagccagacatgatcaagcaggtgctggtggagaacttcagcaacttcaccaacaggatggccagcggcctggagttcaagtctgtggccgacagcgtgctcttcctgcgggacaagcgctgggaggaggtgcggggggccctgatgtctgccttcagccctgagaagctgaatgagatggtgcccctcatcagccaggcctgtgagctgctgctggcccacctgaagagatatgcagagagcggagatgcctttgacatccagcgctgctactgcaactacaccacagatgtggtggcctctgtggccttcggcacccctgtggacagctggcaggcccctgaggacccctttgtgaagcactgcaagcgcttctttgagttctgcatcccccggcccatcctggtgctgctgctgtccttccccagcatcatggtgcccctggcccgcatcctgcccaacaagaacagagatgagctgaatggcttcttcaacaagctgatcagaaatgtcatcgccctgcgggaccagcaggccgctgaggagcggcggcgggacttcctgcagatggtgctggatgcccggcacagcgccagccccatgggcgtgcaggactttgacatcgtgagagatgtgttcagcagcacaggctgcaagcccaaccccagccggcagcaccagcccagccccatggcccggcccctgactgtggatgagatcgtgggccaggccttcatcttcctgattgctggctatgagatcatcaccaacaccctgagctttgccacctacctgctggccaccaacccagactgccaggagaagctgctgcgggaggtggatgtgttcaaggagaagcacatggcccctgagttctgcagcctggaggagggcctgccctacctggacatggtgattgctgagaccctgaggatgtaccccccagccttccgcttcacccgggaggccgcccaggactgtgaggtgctgggccagaggatcccagctggagctgtgctggagatggctgtgggcgccctgcaccacgaccctgagcactggcccagccctgagaccttcaaccctgagcgcttcaccgctgaggcccggcagcagcaccggcccttcacctacctgccctttggagctggccccaggagctgcctgggcgtgcggctgggcctgctggaggtgaagctgaccctgctgcacgtgctgcacaagttccgcttccaggcctgcccagagacccaggtgcccctgcagctggagagcaagagcgccctgggccccaagaatggagtgtacatcaagatcgtgtccaggtag

SEQ ID NO: 64641 - DNA, 1401 bp, Artificial Sequence
  derived and/or modified sequence
atggagctgcggaagctgtacggccccctgtgcggctactacctgggtcgtcgtatgttcatcgtgatttcggagcccgacatgataaaacaggtccttgtggagaatttctctaacttcaccaaccgaatggcctcgggcttagagttcaagagtgtcgccgactccgttcttttcctccgggataagcggtgggaagaggtgcgcggcgcgctgatgtccgcattcagtcccgaaaaattgaatgaaatggtacccttgatcagtcaggcctgtgaactgttgttggcccacctgaaaaggtatgcggagtcgggggacgccttcgatatccaacgttgctattgtaactatacgacagacgtcgtagccagcgttgcttttgggactccagttgactcatggcaggcaccggaagaccccttcgtcaagcactgtaaacgcttttttgagttctgcattccccgtccgattcttgtgttactcctgagctttcctagtatcatggtgccgctggccagaatcctaccaaataagaacagagacgaattgaatggcttttttaataagttgattaggaatgtcatcgcgttgcgggatcaacaggccgctgaagaaaggcgcagggacttcctgcagatggtcctggatgcaaggcacagtgcctcccccatgggagtgcaggacttcgatatcgtgcgcgacgtgttctcctctacaggctgcaaacctaatccctcacgccagcatcagccaagtcctatggcacggccgctcactgtcgacgagattgtcggccaggccttcatcttcctcatcgccggctatgaaatcatcactaataccctgtcctttgccacctacttgttggccacaaaccccgactgccaggagaaactgctccgagaagtggacgtatttaaggaaaagcacatggccccggaattctgtagtttagaagagggattgccgtacctggacatggttattgctgagactttgcggatgtacccacctgcctttcggttcactagagaagcagctcaggactgtgaagttctaggccagcgcatacctgctggggctgtcctggaaatggccgtcggcgctctccaccacgaccccgagcactggccgagccccgagacgttcaatccagaaagattcaccgctgaggctaggcaacagcatcgacccttcacctatttgccgttcggagcaggtcccaggagttgtctgggagtaaggttgggcctcctggaggttaaattaactctgctgcacgtactgcataagtttaggtttcaggcctgtcctgagacgcaagtgccactacagttggaatctaagagtgctttaggcccaaagaatggagtctacatcaaaatcgtgtcccgctag

SEQ ID NO: 64642 - DNA, 1401 bp, Artificial Sequence
  derived and/or modified sequence
atggaactcagaaagttatatgggcctctgtgcgggtactacttgggcagacggatgttcatcgtgatttcagagcctgatatgattaaacaagtcctagtggagaatttttcgaattttacgaaccgtatggccagcggcttggagttcaagtcagtcgcagatagtgtgctgtttcttcgagataagcgctgggaggaggtgcgcggtgcccttatgagcgcatttagcccggaaaagttgaatgaaatggttcctctgatatcccaggcgtgcgagctcctgctggctcatctcaaacgctacgccgaatcaggggatgcattcgatatacagcggtgctattgtaattacacaaccgacgtcgtagcgtctgtagcttttggcacaccggtggatagctggcaggctcccgaggacccttttgtgaaacactgcaaacggttcttcgagttctgtatccctcgcccaattctagttttactgcttagcttcccatccatcatggtgccgcttgctaggatccttcctaacaagaatagagacgagctgaatggctttttcaacaaacttattaggaacgtgatcgctctgcgagaccaacaggccgcagaggaacgaagaagagactttttgcagatggttctcgatgcccgtcattctgcctctccgatgggggtccaggatttcgatatagtgagagatgtcttctcctccaccggttgtaaaccaaacccatctcggcagcaccagccgtcgcctatggccagaccgttaactgtcgacgaaatcgttggccaggcattcatttttctaatcgccggatatgagattattacaaacacattgagttttgcaacctacctgctggctacgaacccagattgtcaggagaagctcctccgcgaagtcgacgtctttaaagaaaaacatatggctcccgaattctgcagcctggaggaaggacttccctatctggacatggtcatcgcagagacattacggatgtatccaccagctttcagattcacaagggaggccgcacaggattgtgaggtgctagggcaacggatcccagctggcgctgtgcttgagatggctgtgggagcgcttcaccatgatcctgagcactggcccagccccgagacttttaaccctgaaagattcaccgcagaggccagacagcagcaccggccattcacttatttgccatttggagccggacccagatcgtgtctgggagtccgccttggcctgctggaggttaagttgaccctcctgcatgtgctgcacaaatttagatttcaagcatgcccggaaacccaagtccctctccaactagagtcaaaaagcgccctgggccctaaaaatggcgtctacatcaaaatcgtcagtaggtag

SEQ ID NO: 64643 - DNA, 591 bp, Artificial Sequence
  derived and/or modified sequence
atggacgaggccgtgggcgacctgaagcaggccctgccctgcgtggccgagagccccaccgtgcacgtggaggtgcaccagagaggcagcagcaccgccaagaaggaggacatcaacctgagcgtgagaaagctgctgaacagacacaacatcgtgttcggcgactacacctggaccgagttcgacgagcccttcctgaccagaaacgtgcagagcgtgagcatcatcgacaccgagctgaaggtgaaggacagccagcccatcgacctgagcgcctgcaccgtggccctgcacatcttccagctgaacgaggacggccccagcagcgagaacctggaggaggagaccgagaacatcatcgccgccaaccactgggtgctgcccgccgccgagttccacggcctgtgggacagcctggtgtacgacgtggaggtgaagagccacctgctggactacgtgatgaccaccctgctgttcagcgacaagaacgtgaacagcaacctgatcaccatcgagggcttcctgcaggccctgagcctggccgtggacaagcagttcgaggagagaaagaagctggccgcctacatctag

SEQ ID NO: 64644 - DNA, 591 bp, Artificial Sequence
  derived and/or modified sequence
atggatgaggccgtcggcgatctgaaacaggcccttccatgtgtcgccgaaagccctactgtccatgtggaggtgcatcagagggggagttccacggcgaaaaaggaggacatcaacttaagtgtgcggaagctcctgaacagacacaacatcgtgttcggtgactacacgtggactgaattcgatgagccattcctgacgaggaacgtgcagagcgtaagcattatcgacactgagctgaaggtcaaggactcccagcccatcgatctgtccgcttgtacagtcgccctccacatctttcagctgaatgaggacggtccatccagtgaaaacctggaggaagaaacggaaaatatcatagcagccaaccactgggtgctgccagcggccgagttccatggcttatgggactccctggtctacgatgtggaagttaagagtcatctgctggattacgtcatgactactctgctgttttctgataagaacgtcaactccaatctgataacaatcgagggatttctgcaagccctgtcactggctgtggacaagcagtttgaggagagaaaaaagctggctgcatatatttag

SEQ ID NO: 64645 - DNA, 591 bp, Artificial Sequence
  derived and/or modified sequence
atggatgaggccgtgggggacctgaagcaggccctgccctgtgtggccgagagccccaccgtgcacgtggaggtgcaccagaggggcagcagcacagccaagaaggaggacatcaacctgtctgtgaggaagctgctgaacagacacaacatcgtgtttggagactacacctggacagaatttgatgagcccttcctgaccagaaatgtgcagagcgtgtccatcatcgacacagagctgaaggtgaaggacagccagcccatcgacctgagcgcctgcaccgtggccctgcacatcttccagctgaatgaagatggccccagcagcgagaacctggaggaggagacagagaacatcatcgccgccaaccactgggtgctgcctgctgctgagttccacggcctgtgggacagcctggtgtatgatgtggaggtgaagagccacctgctggactatgtgatgaccaccctgctcttcagtgacaagaatgtgaacagcaacctgatcaccatcgagggcttcctgcaggccctgagcctggccgtggacaagcagtttgaggagaggaagaagctggccgcctacatctag

SEQ ID NO: 64646 - DNA, 591 bp, Artificial Sequence
  derived and/or modified sequence
atggacgaggccgtgggcgacctgaagcaggccctgccctgcgtggctgagagcccaaccgtgcacgtcgaggtgcatcagcgcgggtcgagcaccgctaagaaggaggatatcaacctgtcagtgaggaaactgttgaatagacataacattgtattcggcgactacacgtggaccgagttcgatgagccttttctcacacgtaatgtacagagcgtttccatcatcgacacagaattgaaagtgaaggacagccaaccaatagacctgtccgcctgcacggtagcgcttcatatcttccagcttaacgaggacgggcctagcagtgagaacctggaggaagagactgagaacattatcgctgccaatcactgggtgctgccagctgccgaatttcacggcctgtgggattccctcgtgtatgatgtagaggttaagagtcatttacttgattatgtcatgactaccctcctgttttcagacaagaacgtaaacagcaatctcatcaccatcgaggggtttcttcaggcgctgagtctggccgtggataagcagttcgaagaacggaagaagctggccgcttatatttag

SEQ ID NO: 64647 - DNA, 591 bp, Artificial Sequence
  derived and/or modified sequence
atggatgaggcagttggtgatcttaagcaggcactgccttgcgtcgccgaatcacccacagtacatgtagaagttcatcaacgaggctccagtactgcgaagaaagaggatatcaatctctctgtgcggaagttactgaaccggcataatatcgtcttcggcgactacacctggactgagtttgacgaaccgtttcttacgaggaatgttcagagcgtcagcatcatcgacacagagctgaaagtcaaagactcccaacctatcgatttgtccgcttgcacagtcgctctgcacattttccagttgaacgaagacggaccttcttccgaaaatctggaagaggagaccgaaaatattatcgccgctaaccattgggtgctccctgcagccgagttccacggactgtgggatagcctggtgtatgacgtggaggtgaaatcccacctgctggattacgtcatgactacccttctgtttagcgacaaaaatgtgaactctaacctgatcaccattgagggattcctccaggccttaagtctggctgtcgataaacagttcgaagagcggaagaagcttgccgcatacatctag

SEQ ID NO: 64648 - DNA, 736 bp, Artificial Sequence
  derived and/or modified sequence
cgggtcaggaggtggtgcgcctcgcgcggcagattcgaagctagggcggggcccgcgggctgaggcagcggctgtggcggcgacgctgggcgtgaggtggcggcggccgcgccctggttgggtccccactgctctcgggggcgccatggacgaggccgtgggcgacctgaagcaggcgcttccctgtgtggccgagtcgccaacggtccacgtggaggtgcatcagcgcggcagcagcactgcaaagaaagaagacataaacctgagtgttagaaagctactcaacagacataatattgtgtttggtgattacacatggactgagtttgatgaaccttttttgaccagaaatgtgcagtctgtgtctattattgacacagaattaaaggttaaagactcacagcccatcgatttgagtgcatgcactgttgcacttcacattttccagctgaatgaagatggccccagcagtgaaaatctggaggaagagacagaaaacataattgcagcaaatcactgggttctacctgcagctgaattccatgggctttgggacagcttggtatacgatgtggaagtcaaatcccatctcctcgattatgtgatgacaactttactgttttcagacaagaacgtcaacagcaacctcatcaccatagaggggttcctccaggccctgtctctggcagtggacaagcagtttgaagagagaaagaagcttgcagcttacatctga

SEQ ID NO: 64649 - protein, 1353 aa, Artificial Sequence
  derived and/or modified sequence
MDTKLMCLLFFFSLPPLLVSNHTGRIKVVFTPSICKVTCTKGSCQNSCEKGNTTTLISENGHAADTLTATNFRVVICHLPCMNGGQCSSRDKCQCPPNFTGKLCQIPVHGASVPKLYQHSQQPGKALGTHVIHSTHTLPLTVTSQQGVKVKFPPNIVNIHVKHPPEASVQIHQVSRIDGPTGQKTKEAQPGQSQVSYQGLPVQKTQTIHSTYSHQQVIPHVYPVAAKTQLGRCFQETIGSQCGKALPGLSKQEDCCGTVGTSWGFNKCQKCPKKPSYHGYNQMMECLPGYKRVNNTFCQDINECQLQGVCPNGECLNTMGSYRCTCKIGFGPDPTFSSCVPDPPVISEEKGPCYRLVSSGRQCMHPLSVHLTKQLCCCSVGKAWGPHCEKCPLPGTAAFKEICPGGMGYTVSGVHRRRPIHHHVGKGPVFVKPKNTQPVAKSTHPPPLPAKEEPVEALTFSREHGPGVAEPEVATAPPEKEIPSLDQEKTKLEPGQPQLSPGISTIHLHPQFPVVIEKTSPPVPVEVAPEASTSSASQVIAPTQVTEINECTVNPDICGAGHCINLPVRYTCICYEGYRFSEQQRKCVDIDECTQVQHLCSQGRCENTEGSFLCICPAGFMASEEGTNCIDVDECLRPDVCGEGHCVNTVGAFRCEYCDSGYRMTQRGRCEDIDECLNPSTCPDEQCVNSPGSYQCVPCTEGFRGWNGQCLDVDECLEPNVCANGDCSNLEGSYMCSCHKGYTRTPDHKHCRDIDECQQGNLCVNGQCKNTEGSFRCTCGQGYQLSAAKDQCEDIDECQHRHLCAHGQCRNTEGSFQCVCDQGYRASGLGDHCEDINECLEDKSVCQRGDCINTAGSYDCTCPDGFQLDDNKTCQDINECEHPGLCGPQGECLNTEGSFHCVCQQGFSISADGRTCEDVNECELLSGVCGEAFCENVEGSFLCVCADENQEYSPMTGQCRSRTSTDLDVDVDQPKEEKKECYYNLNDASLCDNVLAPNVTKQECCCTSGVGWGDNCEIFPCPVLGTAEFTEMCPKGKGFVPAGESSSEAGGENYKDADECLLFGQEICKNGFCLNTRPGYECYCKQGTYYDPVKLQCFDMDECQDPSSCIDGQCVNTEGSYNCFCTHPMVLDASEKRCIRPAESNEQIEETDVYQDLCWEHLSDEYVCSRPLVGKQTTYTECCCLYGEAWGMQCALCPLKDSDDYAQLCNIPVTGRRQPYGRDALVDFSEQYTPEADPYFIQDRFLNSFEELQAEECGILNGCENGRCVRVQEGYTCDCFDGYHLDTAKMTCVDVNECDELNNRMSLCKNAKCINTDGSYKCLCLPGYVPSDKPNYCTPLNTALNLEKDSDLE

SEQ ID NO: 64650 - DNA, 4062 bp, Artificial Sequence
  derived and/or modified sequence
atggacacgaagttgatgtgtctgctgttttttttctccttgccacctctcctagtgtctaatcataccggacgcatcaaagttgtgtttaccccaagtatttgtaaagtcacatgtacaaagggctcttgtcagaactcctgcgaaaagggtaacaccacaaccttgatcagtgagaacgggcatgctgccgacaccctgacggctacaaacttccgcgttgtcatctgccatctgccctgcatgaatgggggccagtgcagtagccgggacaagtgtcagtgtccaccaaattttacaggaaaactgtgtcaaattccagtgcacggcgccagtgtgcctaagttatatcaacactcacagcagcccggaaaagccctcggcactcacgtgatccactccacccacacactccctttaaccgtcacctctcagcaaggcgtgaaggttaagtttcctcccaatatagtaaacatccacgtgaagcatccgccagaggcttcagtgcagattcatcaggtgagccggattgatggcccgacgggacagaagacaaaggaagctcagcccggacagtcccaggttagttatcagggcctgcccgtccaaaagacgcagaccattcattccacgtatagtcaccagcaggttatcccgcacgtctacccagtcgcagccaaaactcagctgggcagatgctttcaagaaaccatcgggagccagtgcggcaaggcgctgcccggattgtcaaaacaggaggactgttgcggaactgttggcacatcatgggggttcaacaagtgtcaaaagtgtcctaagaagcctagttaccatggttacaatcaaatgatggagtgcctgcctggatacaaaagggtcaacaacacattctgccaggatatcaacgagtgtcaactccagggggtatgccccaacggcgagtgcttgaacacgatgggcagctaccgttgtacctgcaaaatcgggtttggaccggatcccactttctcatcttgcgtgccagacccacccgtgatctccgaagaaaagggaccctgctataggctggtgtcttctggccgccagtgcatgcaccctctgtccgttcacctgaccaagcagctgtgctgttgttcagtgggcaaggcatggggcccacactgtgagaagtgtcctcttcctggtaccgccgccttcaaggaaatctgtcctggtgggatgggctacacagtcagcggggtccatcggcgtagacccatccatcaccatgtggggaagggaccggtctttgttaagcctaaaaacactcagcctgtggcgaagagcacccaccccccccctctccctgccaaggaggaacctgtcgaggctcttaccttcagccgggagcacgggcccggcgtggcagagcctgaagttgcaacggccccacccgagaaagaaatcccgtctctagaccaagagaagactaagctcgagcccggccagcctcagctgtcccctggcatttccaccatccatcttcacccacagttccctgtggtaatagaaaaaaccagcccgcctgttcccgtggaagtagctcccgaagcttctacttcaagcgcctcacaggtgatagccccaactcaagttacagagatcaacgaatgcaccgtgaatccggacatttgcggggccggtcactgtatcaatctgccagtccggtatacctgcatctgctacgaaggctacagattctcagagcagcaaagaaaatgcgtcgatatcgacgagtgcacgcaggtgcagcacctgtgctcccaaggcagatgtgagaataccgaaggcagcttcctctgcatttgtcctgccggattcatggcctcggaggaaggcacaaactgcatagatgtggacgagtgtctccgcccagatgtgtgtggagaagggcattgcgtcaatactgtgggagcatttaggtgtgaatactgcgactccggttataggatgacgcaaaggggtaggtgtgaggatattgatgaatgtctgaaccccagtacatgcccagatgaacagtgcgtcaattcgccgggttcctatcagtgcgtcccctgcactgagggcttccgagggtggaacgggcaatgcctggatgttgacgagtgtttagagcccaatgtttgtgccaacggcgattgtagcaatctcgaagggagctacatgtgttcctgccacaaagggtacactaggacacctgatcataagcactgcagggacatcgacgagtgccagcaggggaacttatgtgttaacggtcaatgcaagaatacagaggggtcctttcggtgtacctgcggccagggataccagttatccgccgccaaggaccagtgcgaagacattgatgagtgccagcaccgccatctgtgcgcccacgggcagtgccgcaacaccgagggaagctttcaatgcgtatgcgatcagggataccgagcgtctgggttaggtgatcattgtgaagacattaacgagtgtctcgaggataagagtgtatgccagcggggcgactgtattaacactgccgggtcttatgactgtacttgccccgatggcttccagctcgatgataataagacatgtcaggatattaacgagtgtgaacatcccgggctatgtggcccacaaggggagtgtctgaacacagagggatcatttcactgcgtttgccagcagggctttagcatatcggctgacgggcgcacttgcgaagatgtgaatgagtgtgaattattgagcggtgtttgtggagaagctttttgtgagaatgtcgagggctcttttttatgcgtctgcgccgacgaaaatcaggaatattcacctatgactggtcagtgcagatcaaggacctcgacggatttggatgtggacgtcgatcagcccaaagaggaaaagaaggagtgctactataacctaaatgatgcttcactttgtgacaatgtgcttgcgcccaatgtgacaaaacaagaatgttgttgcacatccggcgttggctggggtgacaattgtgagatctttccctgtcctgtgctgggaaccgccgagtttacagagatgtgtcctaaaggaaaaggcttcgttccggctggggagtcgagctccgaggctgggggcgagaattataaagacgccgatgagtgtctgctctttggacaggagatatgcaaaaacggcttttgcttaaacactcggcctggctacgagtgttattgtaaacagggaacatattacgatcctgtgaagctccaatgctttgacatggacgaatgtcaagacccctctagttgcatcgacggccagtgtgtaaatacagagggatcttacaattgtttctgcacccatcccatggtgctggacgcttcagagaaaagatgtatccgtccagccgaaagcaacgaacagatcgaagaaaccgacgtctaccaggacctgtgttgggaacacctcagtgacgagtatgtatgcagcagacccctggtgggaaaacagactacatacaccgagtgttgctgtctgtatggcgaagcctggggcatgcagtgcgctctttgtccactgaaggactctgacgactatgctcagctgtgcaatattcccgtgacagggagaaggcagccctacgggcgtgatgccctggtggatttcagcgaacaatacacccccgaggcggatccctatttcattcaggatagattcctgaactcctttgaagagctccaggcagaggaatgcggtattcttaatgggtgcgaaaatgggaggtgcgtgcgcgtgcaagaaggttatacttgcgactgcttcgacggataccacctggacactgcgaagatgacgtgtgttgatgtgaacgaatgcgacgaattaaacaaccggatgtccctgtgtaaaaacgccaaatgcatcaataccgacggatcgtataaatgcctctgtttgcccggatacgtccccagcgacaagcctaactattgtacacccctgaatacagcacttaatcttgagaaagactccgatctggaatag

SEQ ID NO: 64651 - DNA, 5164 bp, Artificial Sequence
  derived and/or modified sequence
gagacaccactgaatacagagcagcgagcactgaaggcttccctctttccttaaacctgtcgggttgtgggctctctcttttcccctcttgctcctttcttttctttttttctgtttttttaaaccttccaaggcaagttcatggatactaagctgatgtgtttgttgttctttttctccctgcctccgctcctagtgagtaaccacactggccgcatcaaggtggtctttactccgagcatctgtaaagtgacctgcaccaagggcagctgtcagaacagctgtgagaaggggaacaccaccactctcattagtgagaatggtcatgctgccgacaccctgacggccacgaacttccgagtggtaatttgccatcttccatgtatgaatggtggccagtgcagttcaagggacaaatgtcagtgccctccaaatttcacaggaaaactttgtcagatcccagtccatggtgccagcgtgcctaaactttatcagcattcccagcagccaggcaaggcgttggggacgcatgtcatccattcaacacataccttgcctctgaccgtgactagccagcaaggagtcaaagtgaaatttcctcctaacatagtcaatatccatgtgaaacatcctcctgaagcttccgtccagatacatcaggtttcaagaattgatggcccaacaggccagaagacaaaagaagctcaaccaggccaatcccaagtctcgtaccaagggcttcctgtccagaagacccagaccatacattccacatactcccaccagcaggtcattcctcacgtctaccccgtggctgctaagacacagcttggccggtgcttccaggaaaccattgggtcacagtgtggcaaagcgctccctggcctttcaaagcaagaggactgctgtggaactgtgggtacctcctggggctttaacaaatgccagaaatgccccaagaaaccatcttatcatggatacaaccaaatgatggaatgcctaccgggttataagcgggttaacaacaccttttgccaagatattaatgaatgtcagctacaaggtgtatgccctaatggtgagtgtttgaataccatgggcagctatcgatgtacctgcaaaataggatttgggccggatcctaccttttcaagttgtgttcctgatccccctgtgatctcggaagagaaagggccctgttaccgacttgtcagttctggaagacagtgtatgcaccctctgtctgttcacctcaccaagcagctctgctgttgtagtgtgggcaaggcctggggcccacactgtgagaaatgtccccttccaggcacagctgcttttaaggaaatctgtcctggtggaatgggttatacggtttctggcgttcatagacgcaggccaatccatcaccatgtaggtaaaggacctgtatttgtcaagccaaagaacactcaacctgttgctaaaagtactcatcctccacctctcccagccaaggaagagccagtggaggccctgaccttctcccgggaacacgggccaggagtggcggagccagaagtggcaactgcaccccctgaaaaggaaataccttcattggatcaagagaaaaccaaacttgagcctggtcaaccccagctgtctccaggcatttccactattcatctgcatccacagtttccagtagtgattgaaaaaacatcacctcctgtgcctgttgaagtagctcctgaagcttctacgtctagtgccagccaagtgattgctcctactcaagtgacagaaatcaatgaatgtactgtgaaccctgatatctgtggagcaggacactgcattaacctaccagtgagatatacctgtatatgctacgagggctacaggttcagtgaacaacagaggaaatgtgtggatattgatgagtgtactcaggtccaacacctctgctcccagggccgctgtgaaaacaccgagggaagtttcttgtgcatttgcccagcaggatttatggccagtgaggagggtactaactgcatagatgttgacgaatgcctgaggccggacgtctgtggggaggggcactgtgtcaatactgtgggggccttccggtgtgaatactgtgacagcgggtaccgcatgactcagagaggccgttgtgaggatattgatgaatgtttgaatccaagcacttgtccagatgagcagtgtgtgaattctcctggatcttaccagtgcgttccctgcacagaaggattccgaggctggaatggacagtgccttgatgtggacgagtgcctggaaccaaacgtctgcgcaaatggtgattgttccaaccttgaaggctcctacatgtgttcatgccacaaaggctatacccggactccggaccacaagcactgtagagatattgatgaatgtcagcaagggaatctatgtgtaaacgggcagtgcaaaaataccgagggctccttcaggtgcacctgtggacaggggtaccagctgtcggcagctaaagaccagtgtgaagacattgatgaatgccagcaccgtcatctctgtgctcatgggcagtgcaggaacactgagggctcttttcaatgtgtgtgtgaccagggttacagagcatctgggcttggagaccactgtgaagatatcaatgaatgcttggaggacaagagtgtttgccagagaggagactgcattaatactgcagggtcctatgattgtacttgtccggatggatttcagctagatgacaataaaacatgtcaagatattaatgaatgtgaacatccagggctctgtggtccgcaaggggagtgcctaaacacagagggttctttccattgtgtctgccagcagggtttctcaatctctgcagatggccgtacgtgtgaagatgtgaatgaatgtgaactgctcagtggggtgtgtggtgaagccttctgtgaaaacgtggaagggtccttcctgtgcgtgtgtgctgatgaaaaccaagagtacagccccatgactgggcagtgccgctcccggacctccacagatttagatgtagatgtagatcaacccaaagaagaaaagaaagaatgctactataatctcaatgacgccagtctctgtgataatgtgttggcccccaatgtcacgaaacaagaatgctgctgtacatcaggcgtgggatggggagataactgcgaaatcttcccctgcccggtcttgggaactgctgagttcactgaaatgtgtcccaaagggaaaggttttgtgcctgctggagaatcatcttctgaagctggtggtgagaactataaagatgcagatgaatgcctactttttggacaagaaatctgcaaaaatggtttctgtttgaacactcggcctgggtatgaatgctactgtaagcaagggacgtactatgatcctgtgaaactgcagtgctttgatatggatgaatgtcaagaccccagtagttgtattgatggccagtgtgttaatacagagggctcttacaactgcttctgtactcaccccatggtcctggatgcgtcagaaaaaagatgtatacgaccggctgagtcaaacgaacaaatagaagaaactgatgtctaccaagatttgtgctgggaacatctgagtgatgaatacgtgtgtagccggcctcttgtgggcaagcagacaacgtacactgagtgctgctgtctgtatggagaggcctggggcatgcagtgtgccctctgccccctgaaggattcagatgactatgctcagctgtgtaacatccccgtgacgggacgccggcagccatatggacgggacgccttggttgacttcagtgaacagtatactccagaagccgatccctacttcatccaagaccgttttctaaatagctttgaggagttacaggctgaggaatgcggcatcctcaatggatgtgaaaatggtcgctgtgtgagggtccaggaaggttacacctgcgattgctttgatgggtatcacttggatacggccaagatgacctgtgtcgatgtaaatgaatgcgatgagttgaacaaccggatgtctctctgcaagaatgccaagtgcattaacaccgatggttcctacaagtgtttgtgtctgccaggctacgtgccttctgacaagccaaactactgcactccgttgaataccgccttgaatttagagaaagacagtgacctggagtgaaacagaatctacataacctaagcccatatactctgcactgtgtaaaggaaaagggagaaatgtattatacttgagacattgcacctaccccggaaggctggaaatacagaaacagcatggaattgcaagtcctctgaagacaatgagaggatttaggatgagcccgataggtgtggcagaccaaatggacatttctctaaaaaaccagtatatatagtctgttcatatgtaaaattcaatggaagagaggtggaacagtgctgttattttaaacagaaggttgtattattatgttgttttgtttttttactattgcttgattaaatttggcatttaaatagtggtggaaatattttatataattttcattttttggttgtgcagttccttggctactgtttttcttttacttcagttttttaaaaatctcaaatgaaaaagtcttcgatacaatattgttaagctgtattataagtattgttacacagggttatgcaattcccggcctggagcatttttgaaattcaaattgtctgtcctgtggagcaggcagtgattttgttccaaaactttgtatacacatttggagaaaagtactttatattttcagtgttttgtctgattttaatgtccgttcttagccaagctgctagcaggtgttaattggatccctttccttcactgaaatggaagagtttataagcttacgttagtattgtaatatgtaaagtaagcccaacaaaaatttttaaaaatttgatgatccccaatatatctaccattgtatgttaaataaatcaccatttttgtagaaaaaattctacctgagagtaattgtcaatgagtacatgtgtataagttgtatcccactctccccacttttatcttttccagtggtcttctgttaatgtagtgtcttttacaagttaatcattaaatttgttagatcttgttatgggct

SEQ ID NO: 64652 - DNA, 4062 bp, Artificial Sequence
  derived and/or modified sequence
atggacaccaagctgatgtgcctgctcttcttcttcagcctgccccccctgctggtgagcaaccacacaggccgcatcaaggtggtgttcacccccagcatctgcaaggtgacctgcaccaagggcagctgccagaacagctgtgagaagggcaacaccaccaccctcatcagtgaaaatggacatgctgctgacaccctgacagccaccaacttccgggtggtgatctgccacctgccctgcatgaatggaggccagtgcagcagccgggacaagtgccagtgcccccccaacttcaccgggaagctgtgccagatccctgtgcatggagcctctgtgcccaagctgtaccagcacagccagcagcccgggaaggccctgggcacccacgtgatccacagcacccacaccctgcccctgactgtgaccagccagcagggcgtgaaggtgaagtttcctcccaacatcgtgaacatccacgtgaagcaccccccagaggcctctgtgcagatccaccaggtgtccagaattgatggccccaccggccagaagaccaaggaggcccagcccggccagagccaggtgtcctaccagggcctgcctgtgcagaagacccagaccatccacagcacctacagccaccagcaggtgatcccccacgtgtaccctgtggccgccaagacccagctgggccgctgcttccaggagaccatcggcagccagtgtgggaaggccctgcccggcctgagcaagcaggaggactgctgcggcaccgtgggcacctcctggggcttcaacaagtgccagaagtgccccaagaagcccagctaccacggctacaaccagatgatggagtgcctgcccggctacaagagggtgaacaacaccttctgccaggacatcaatgaatgccagctgcagggcgtgtgccccaacggggagtgcctgaacaccatgggcagctaccgctgcacctgcaagattggcttcggccctgaccccaccttcagcagctgtgtgcctgacccccctgtgatcagcgaggagaagggcccctgctaccgcctggtgagcagcggccggcagtgcatgcaccccctgtctgtgcacctgaccaagcagctgtgctgctgcagcgtgggcaaggcctggggcccccactgtgagaagtgccccctgcccggcacagctgccttcaaggagatctgccctgggggcatgggctacacagtgtctggagtgcacagaagaagacccatccaccaccacgtgggcaagggccctgtgtttgtgaagcccaagaacacccagcctgtggccaagagcacccaccccccacccctgcctgccaaggaggagcctgtggaggccctgaccttcagccgggagcacggccctggggtggccgagcctgaggtggccacagcccctcctgagaaggagatccccagcctggaccaggagaagaccaagctggagcccggccagccccagctgagccctggcatcagcaccatccacctgcacccccagtttcctgtggtgattgagaagaccagcccccctgtgcctgtggaggtggcccctgaggccagcaccagcagcgccagccaggtgattgcccccacccaggtgacagagatcaatgaatgtactgtgaacccagacatctgtggggccggccactgcatcaacctgcctgtgcgctacacctgcatctgctatgagggctaccgcttcagcgagcagcagaggaaatgtgtggacattgatgagtgcacccaggtgcagcacctgtgcagccagggccgctgtgagaacacagagggcagcttcctgtgcatctgcccagctggcttcatggccagcgaggagggcaccaactgcattgatgtggatgagtgcctgcggccagatgtgtgtggggagggccactgtgtgaacacagtgggcgccttccgctgtgagtactgtgacagcggctacaggatgacccagaggggccgctgtgaagatattgatgaatgtctgaaccccagcacctgcccagatgagcagtgtgtgaacagccctggcagctaccagtgtgtgccctgcacagagggcttccggggctggaatggccagtgcctggatgtggatgaatgtctggagcccaacgtgtgtgccaacggggactgcagcaacctggagggcagctacatgtgcagctgccacaagggctacaccaggaccccagaccacaagcactgccgggacattgatgagtgccagcagggcaacctgtgtgtgaatggccagtgcaagaacacagagggcagcttccgctgcacctgtggccagggctaccagctgtctgctgccaaggaccagtgtgaagatattgatgagtgccagcaccgccacctgtgtgcccacggccagtgcaggaacacagagggcagcttccagtgtgtgtgtgaccagggctaccgggccagcggcctgggggaccactgtgaggacatcaatgaatgtctggaggacaagtctgtgtgccagagaggagactgcatcaacacagctggcagctatgactgcacctgcccagatggcttccagctggatgacaacaagacctgccaggacatcaatgaatgtgagcaccctggcctgtgtggcccccagggagaatgtctgaacacagagggcagcttccactgtgtgtgccagcagggcttcagcatctctgcagatggccgcacctgtgaagatgtgaatgaatgtgagctgctgagcggcgtgtgtggggaggccttctgtgaaaatgtggagggcagcttcctgtgtgtgtgtgctgatgagaaccaggagtacagccccatgacaggccagtgccgcagcaggaccagcacagacctggatgtggatgtggaccagcccaaggaggagaagaaggagtgctactacaacctgaatgatgccagcctgtgtgacaacgtgctggcccccaacgtgaccaagcaggagtgctgctgcaccagcggcgtgggctggggagacaactgtgagatcttcccctgccctgtgctgggcacagctgagttcacagagatgtgccccaagggcaaaggatttgtgcctgctggggagagcagcagcgaggccggcggggagaactacaaggatgctgatgaatgtctgctgtttggccaggagatctgcaagaatggcttctgcctgaacacccggcccggctatgagtgctactgcaagcagggcacctactatgaccctgtgaagctgcagtgctttgacatggatgagtgccaggaccccagcagctgcattgatggccagtgtgtgaacacagagggcagctacaactgcttctgcacccaccccatggtgctggatgccagcgagaagcgctgcatccggcctgctgagagcaatgagcagatcgaggagacagatgtgtaccaggacctgtgctgggagcacctgagtgatgaatatgtgtgcagccggcccctggtgggcaagcagaccacctacacagagtgctgctgcctgtatggagaggcctggggcatgcagtgtgccctgtgccccctgaaggacagtgatgattatgcccagctgtgcaacatccctgtgacaggccggcggcagccctacggcagagatgccctggtggacttcagcgagcagtacaccccagaggccgacccctacttcatccaggaccgcttcctgaacagctttgaggagctgcaggccgaggagtgtggcatcctgaatggctgtgaaaatggccgctgtgtgcgggtgcaggagggctacacctgtgactgctttgatggctaccacctggacacagccaagatgacctgtgtggatgtgaatgaatgtgatgagctgaacaacaggatgagcctgtgcaagaatgccaagtgcatcaacacagatggcagctacaagtgcctgtgcctgcccggctacgtgcccagcgacaagcccaactactgcacccccctgaacacagccctgaacctggagaaggacagcgacctggagtag

SEQ ID NO: 64653 - DNA, 4062 bp, Artificial Sequence
  derived and/or modified sequence
atggacaccaagctgatgtgcctgctgttcttcttcagcctgccccctctactagtaagcaaccatacagggcgaattaaagtggtattcaccccgtccatctgcaaagtcacctgtaccaagggctcttgtcagaattcatgtgagaaggggaacactaccacgctgatatccgaaaatgggcacgctgcagatactctgacggcgaccaatttccgagtggtcatctgccacctcccctgcatgaatggcggccaatgttctagcagagataaatgccaatgccctcctaacttcactggcaagctctgccagatcccagttcacggtgcttcggtccccaagctgtatcagcactcacagcaacccggaaaggctctaggtactcacgttatccacagcacccacaccttgccattgacggttacctctcaacagggtgtgaaagtgaaattccctccaaacatagtcaatatacacgtcaagcacccccctgaggcctcggtgcaaattcatcaggtctcccgtattgatggccctaccgggcaaaagactaaggaggcgcagccaggacagagtcaggtcagctaccagggactgcctgtccaaaaaacccagacaatccatagcacgtattctcaccagcaggtcatcccacatgtatatcctgtagcagcaaaaacccagctgggcagatgctttcaggagaccattggatcacagtgcggtaaggctcttccggggctgtcaaagcaagaagattgttgcggcacagtagggacgtcgtggggtttcaataagtgccagaagtgccccaaaaaaccgtcctatcatggttacaatcaaatgatggagtgcctgcccggctacaaacgggtgaacaacacgttctgccaggatatcaatgaatgtcagctccagggcgtgtgtcctaatggagaatgtctcaacacaatgggatcttaccgctgtacctgcaagatcggcttcgggcctgacccaacattcagcagttgtgttcccgatccacccgtcatctccgaggagaagggtccatgctacaggctggtttcttcgggacgccagtgtatgcatccattgagcgttcacctgacaaagcagttatgctgctgcagcgtcggtaaagcctggggcccacattgtgagaaatgtcctttacccggtaccgctgcattcaaagagatttgtcccggcgggatgggatacactgtgtccggcgtgcaccgtagaaggccgatccaccaccatgtcggcaagggcccagtgttcgtgaagcctaaaaatactcaacccgtagccaaatccactcaccctcctccgctccccgcaaaggaggagcctgtcgaggcccttacattctcgagagaacacggacctggggtagccgaacctgaagtggccactgcaccccccgagaaagagatccctagcttggaccaggagaagacaaagttagagccgggacaaccgcagctgtcccctggcattagtactatacatcttcacccacagttccctgttgttatcgagaagacctcaccacccgtcccggtggaggtggctccagaagcctccactagcagtgcctctcaggtgattgcccccacccaggtgactgagataaacgaatgcacagtgaaccctgacatatgcggggccggccattgcattaacctgccagtccgctacacatgcatctgctatgagggctatcgcttttccgagcagcagcggaagtgcgttgatatcgacgagtgcactcaagtgcagcatctttgtagccaaggacgctgcgaaaacactgaaggatcttttctgtgcatctgccccgccggcttcatggcatcggaggaaggcactaattgtatcgacgttgacgaatgcttgaggccagatgtgtgtggagagggccactgcgttaataccgttggtgcttttcgctgtgagtattgtgactcggggtaccgcatgactcagcgcggccgctgtgaggacattgacgagtgcctcaatccaagtacctgccccgatgagcagtgcgttaactcgcctgggagctatcagtgcgttccttgtactgaaggatttcggggctggaatggccagtgtctcgatgtggacgagtgcctggaaccaaacgtttgtgcaaacggagattgctccaacctggaaggttcctacatgtgtagctgccacaaaggctacacccggacacctgatcacaaacactgccgcgatatcgacgagtgtcagcagggaaacttgtgcgtcaatgggcaatgcaagaacacagaaggcagctttcgttgcacatgcggccagggatatcaactgtccgccgccaaagaccagtgcgaagacatcgacgagtgtcagcacaggcacctgtgcgctcacggccaatgtcgtaacactgaagggtcctttcagtgtgtttgtgaccaagggtatagagcgagtggcttgggggatcattgtgaagatatcaatgaatgcctggaggataagtctgtatgccagaggggcgattgcatcaatacagcgggaagttacgattgtacttgtcccgacggattccagctagacgacaacaagacgtgtcaggatatcaatgagtgcgaacaccccggactgtgtggcccacagggagagtgtcttaacactgaggggtcattccattgcgtgtgccagcaggggttctctatctccgccgacggacggacgtgcgaggatgtgaacgagtgcgagctgctgtccggagtatgtggggaagctttttgcgaaaatgtggagggaagtttcctgtgtgtttgcgccgacgaaaaccaagaatatagtccaatgacagggcagtgcaggtcgcgaacatccacggaccttgatgtagacgttgatcaacccaaggaggagaagaaggaatgttattataacctgaatgacgcctcgctatgcgacaacgttctcgcacctaatgtaaccaagcaggaatgctgttgcacctcaggcgtgggctggggcgataactgtgagatcttcccttgcccagtgctgggcactgccgagtttacagaaatgtgcccaaagggcaagggatttgtgcctgcgggagaatctagctccgaggcaggcggcgagaattacaaagacgcagatgaatgcttgttgtttggccaggagatctgtaaaaacggattttgtctcaacactaggcctgggtacgagtgctactgcaagcaggggacctactatgacccggttaaactgcaatgcttcgacatggacgaatgccaagatcctagcagttgcatcgacggtcagtgcgtaaatacagaagggagctataactgtttttgtacacacccaatggtgctggatgccagtgaaaagcgctgcatccggccagcggaatcgaatgagcagatagaggagacggatgtgtatcaagatctatgttgggagcacctctccgacgaatatgtatgcagtaggcctttggtcggaaaacagaccacttataccgagtgttgttgtttgtacggcgaagcctgggggatgcaatgcgcgctctgtcccctgaaggactcagacgattatgctcagctctgcaatatccctgttactggtcgcagacagccttacggtagggacgcactggtcgacttttccgagcaatacacccccgaggccgacccatactttattcaagaccgcttcctgaatagtttcgaggaactacaggctgaggagtgcgggatcttgaacgggtgcgaaaatgggagatgtgtcagggtgcaggagggatatacctgcgactgctttgatggatatcacctagatacagcaaagatgacctgtgtggacgtgaacgagtgcgatgaactgaataaccgcatgtcgctctgtaaaaatgcaaaatgtattaacactgacggaagttacaagtgcttgtgtctccccggttatgtcccatctgacaagccgaattactgcactcccctgaacaccgcgctgaacctggaaaaagactcggatctcgagtag

SEQ ID NO: 64654 - DNA, 4062 bp, Artificial Sequence
  derived and/or modified sequence
atggatacgaagctgatgtgtctactgttcttcttcagtttaccacccttgctggtctcgaaccacaccggcaggattaaagtggtgttcacccccagtatttgcaaagtcacatgtaccaagggatcttgtcagaactcttgcgagaaggggaatactacaactttgattagcgaaaatggacatgctgcagataccctaacagccactaactttagggtagttatttgccacctgccttgcatgaatgggggtcagtgttcctcacgtgacaagtgtcagtgtccacctaatttcaccgggaagttgtgtcaaattcccgtgcatggcgcttcagtgcccaagctctatcagcactcgcaacaacccggaaaagctctggggactcacgtcatccactccacccatacactgccgttgactgtgacgtcacaacaaggggtgaaggttaagtttccccctaacattgtgaacatccacgtcaagcatccaccagaagcaagcgtgcagatccatcaggtgtcacggatcgacgggccaacgggccagaaaaccaaggaggcacagcccggacagtcacaggtcagctatcaggggcttcctgtgcagaagacccagactatacattctacctattctcaccagcaggtgataccccatgtatatcccgttgcagctaaaacccagctgggcaggtgctttcaggaaaccattgggtctcagtgtggcaaggcactcccagggctcagcaaacaggaagactgctgcggaacagtgggaactagttgggggttcaacaaatgccagaaatgccctaaaaaaccatcataccacggttataaccagatgatggaatgtttgcctgggtataaacgcgttaacaacacattctgtcaggacatcaatgagtgtcagctgcagggtgtgtgcccaaatggggaatgcctgaacacgatgggcagctatcggtgtacttgtaagatcggattcggccctgatccgacattttcctcctgcgtccctgacccccctgttatatctgaagagaaagggccttgttaccggctggtgtcctccgggaggcagtgtatgcacccccttagtgtgcatctgactaagcagctgtgctgttgctccgttggtaaagcatggggaccccactgcgagaagtgtccactgcctggcaccgccgcattcaaggagatttgtcccggaggcatgggatacacggtcagcggcgtgcatcggagaaggcctatacaccatcatgtaggcaaggggcctgttttcgtgaagcccaaaaatactcaaccggtggccaaatctacccacccccctcccctgcccgcaaaggaggagcctgttgaggccctgactttctctcgcgaacacggtcccggagtggccgagcccgaagtagccactgctcctcccgaaaaagagatcccatctctggaccaagagaaaactaaattagaaccaggccagcctcaactcagtcctggaatctccacgatacatctgcacccgcagtttccagtggtgatcgagaagacctcccctcccgtaccagtggaggtggctccagaagccagcactagctccgcatctcaagtcatcgccccaactcaggtcaccgagattaatgaatgcacagtgaaccccgacatatgtggggctggacactgtataaacctgcctgttcgatatacctgtatttgttacgaaggttaccgcttctccgagcagcagcgcaaatgtgttgacatcgacgaatgcactcaggtacagcacctgtgtagccagggtagatgtgaaaacaccgaaggtagcttcctgtgtatttgtccagctggcttcatggcctcagaagagggaactaactgcatcgatgtggacgaatgtctcagaccagatgtttgcggggaaggccactgcgtgaatactgtcggggcatttcggtgcgagtactgtgacagcggataccggatgacccaacgcggacggtgcgaggacattgacgagtgcttgaacccttctacctgtccagatgaacagtgtgtcaactcaccgggatcctaccagtgcgtgccatgcacagagggtttccggggttggaatggacagtgtcttgatgtcgatgagtgcctggaacccaacgtctgcgctaatggcgattgctccaatcttgaaggaagttacatgtgttcttgtcataagggatacacccggacccccgaccataagcattgtagagatattgacgagtgccagcaaggtaacctgtgtgtgaacggacaatgtaaaaacaccgaaggctccttcagatgcacctgtggccaaggttatcaactctctgcagctaaggaccagtgcgaagatatcgacgaatgtcagcatcggcatctctgtgcccatggccagtgtagaaatacagaggggagcttccagtgcgtgtgcgaccaggggtaccgagcatcaggactaggcgaccactgcgaggacataaacgagtgtctagaagataagtctgtttgtcagaggggggattgtatcaatactgctgggagctacgactgtacatgccctgacgggttccagctcgatgacaataaaacatgtcaggatattaacgaatgtgagcacccaggcctgtgcgggccacagggcgaatgtctgaatacagaggggtcatttcactgtgtgtgccagcaaggcttctccataagtgcagatggaagaacttgcgaagatgtgaacgaatgcgagctgctgagcggcgtgtgcggtgaagcattctgcgagaacgttgagggtagttttttgtgtgtctgcgccgacgagaaccaagaatattcccctatgaccgggcagtgccgaagccggacctccaccgacctggacgtagatgtggaccagccgaaggaggaaaaaaaagaatgttactacaacctgaatgatgctagtctgtgcgacaacgtcctggccccaaacgtaacaaaacaggagtgctgttgtacatccggagttgggtggggagataattgtgaaatttttccttgccctgtcctgggaactgcagagttcacagagatgtgcccaaaggggaagggctttgtgcccgctggagagtcaagttcagaggcgggtggcgaaaactacaaggacgcggacgaatgccttctgttcggtcaggagatctgtaagaacggcttctgtctgaacacccggccaggatacgaatgctactgcaagcaagggacctattacgatcctgttaagctgcagtgtttcgacatggacgaatgtcaggaccctagctcttgcatcgacgggcagtgtgtcaatacggagggcagttacaactgtttttgcacgcatccaatggtcttggacgcttccgaaaaacggtgcattcggcctgctgagagcaacgagcagattgaggagaccgatgtgtaccaggatttgtgttgggagcacctgtcggatgaatacgtttgttcccgccctctggtgggcaaacagacaacttataccgagtgctgctgcctgtacggcgaagcttggggtatgcagtgtgcactgtgccctctcaaggatagtgacgattatgctcagctgtgcaatattccagttaccggtcgacgacagccctacggtcgcgatgcgctggtagacttctcagagcagtacacacccgaggctgacccctattttattcaggaccgctttcttaatagctttgaagaactgcaggcagaggaatgcggcatcctgaatggctgcgaaaatgggaggtgcgtgcgagtgcaagaaggctatacctgtgactgctttgatggctatcatttggacactgccaaaatgacctgcgtagacgtgaacgagtgcgacgagctaaacaaccgcatgagcctgtgtaagaacgcaaaatgtattaacacagacgggtcctacaagtgtctgtgtctccctggttatgttccttccgataaacccaactattgtacacctttgaatactgcacttaatctggaaaaggattcagatctggagtag

SEQ ID NO: 64655 - DNA, 4062 bp, Artificial Sequence
  derived and/or modified sequence
atggacaccaagctgatgtgcctgctgttcttcttcagcctgccccccctgctggtgagcaaccacaccggcagaatcaaggtggtgttcacccccagcatctgcaaggtgacctgcaccaagggcagctgccagaacagctgcgagaagggcaacaccaccaccctgatcagcgagaacggccacgccgccgacaccctgaccgccaccaacttcagagtggtgatctgccacctgccctgcatgaacggcggccagtgcagcagcagagacaagtgccagtgcccccccaacttcaccggcaagctgtgccagatccccgtgcacggcgccagcgtgcccaagctgtaccagcacagccagcagcccggcaaggccctgggcacccacgtgatccacagcacccacaccctgcccctgaccgtgaccagccagcagggcgtgaaggtgaagttcccccccaacatcgtgaacatccacgtgaagcacccccccgaggccagcgtgcagatccaccaggtgagcagaatcgacggccccaccggccagaagaccaaggaggcccagcccggccagagccaggtgagctaccagggcctgcccgtgcagaagacccagaccatccacagcacctacagccaccagcaggtgatcccccacgtgtaccccgtggccgccaagacccagctgggcagatgcttccaggagaccatcggcagccagtgcggcaaggccctgcccggcctgagcaagcaggaggactgctgcggcaccgtgggcaccagctggggcttcaacaagtgccagaagtgccccaagaagcccagctaccacggctacaaccagatgatggagtgcctgcccggctacaagagagtgaacaacaccttctgccaggacatcaacgagtgccagctgcagggcgtgtgccccaacggcgagtgcctgaacaccatgggcagctacagatgcacctgcaagatcggcttcggccccgaccccaccttcagcagctgcgtgcccgacccccccgtgatcagcgaggagaagggcccctgctacagactggtgagcagcggcagacagtgcatgcaccccctgagcgtgcacctgaccaagcagctgtgctgctgcagcgtgggcaaggcctggggcccccactgcgagaagtgccccctgcccggcaccgccgccttcaaggagatctgccccggcggcatgggctacaccgtgagcggcgtgcacagaagaagacccatccaccaccacgtgggcaagggccccgtgttcgtgaagcccaagaacacccagcccgtggccaagagcacccaccccccccccctgcccgccaaggaggagcccgtggaggccctgaccttcagcagagagcacggccccggcgtggccgagcccgaggtggccaccgccccccccgagaaggagatccccagcctggaccaggagaagaccaagctggagcccggccagccccagctgagccccggcatcagcaccatccacctgcacccccagttccccgtggtgatcgagaagaccagcccccccgtgcccgtggaggtggcccccgaggccagcaccagcagcgccagccaggtgatcgcccccacccaggtgaccgagatcaacgagtgcaccgtgaaccccgacatctgcggcgccggccactgcatcaacctgcccgtgagatacacctgcatctgctacgagggctacagattcagcgagcagcagagaaagtgcgtggacatcgacgagtgcacccaggtgcagcacctgtgcagccagggcagatgcgagaacaccgagggcagcttcctgtgcatctgccccgccggcttcatggccagcgaggagggcaccaactgcatcgacgtggacgagtgcctgagacccgacgtgtgcggcgagggccactgcgtgaacaccgtgggcgccttcagatgcgagtactgcgacagcggctacagaatgacccagagaggcagatgcgaggacatcgacgagtgcctgaaccccagcacctgccccgacgagcagtgcgtgaacagccccggcagctaccagtgcgtgccctgcaccgagggcttcagaggctggaacggccagtgcctggacgtggacgagtgcctggagcccaacgtgtgcgccaacggcgactgcagcaacctggagggcagctacatgtgcagctgccacaagggctacaccagaacccccgaccacaagcactgcagagacatcgacgagtgccagcagggcaacctgtgcgtgaacggccagtgcaagaacaccgagggcagcttcagatgcacctgcggccagggctaccagctgagcgccgccaaggaccagtgcgaggacatcgacgagtgccagcacagacacctgtgcgcccacggccagtgcagaaacaccgagggcagcttccagtgcgtgtgcgaccagggctacagagccagcggcctgggcgaccactgcgaggacatcaacgagtgcctggaggacaagagcgtgtgccagagaggcgactgcatcaacaccgccggcagctacgactgcacctgccccgacggcttccagctggacgacaacaagacctgccaggacatcaacgagtgcgagcaccccggcctgtgcggcccccagggcgagtgcctgaacaccgagggcagcttccactgcgtgtgccagcagggcttcagcatcagcgccgacggcagaacctgcgaggacgtgaacgagtgcgagctgctgagcggcgtgtgcggcgaggccttctgcgagaacgtggagggcagcttcctgtgcgtgtgcgccgacgagaaccaggagtacagccccatgaccggccagtgcagaagcagaaccagcaccgacctggacgtggacgtggaccagcccaaggaggagaagaaggagtgctactacaacctgaacgacgccagcctgtgcgacaacgtgctggcccccaacgtgaccaagcaggagtgctgctgcaccagcggcgtgggctggggcgacaactgcgagatcttcccctgccccgtgctgggcaccgccgagttcaccgagatgtgccccaagggcaagggcttcgtgcccgccggcgagagcagcagcgaggccggcggcgagaactacaaggacgccgacgagtgcctgctgttcggccaggagatctgcaagaacggcttctgcctgaacaccagacccggctacgagtgctactgcaagcagggcacctactacgaccccgtgaagctgcagtgcttcgacatggacgagtgccaggaccccagcagctgcatcgacggccagtgcgtgaacaccgagggcagctacaactgcttctgcacccaccccatggtgctggacgccagcgagaagagatgcatcagacccgccgagagcaacgagcagatcgaggagaccgacgtgtaccaggacctgtgctgggagcacctgagcgacgagtacgtgtgcagcagacccctggtgggcaagcagaccacctacaccgagtgctgctgcctgtacggcgaggcctggggcatgcagtgcgccctgtgccccctgaaggacagcgacgactacgcccagctgtgcaacatccccgtgaccggcagaagacagccctacggcagagacgccctggtggacttcagcgagcagtacacccccgaggccgacccctacttcatccaggacagattcctgaacagcttcgaggagctgcaggccgaggagtgcggcatcctgaacggctgcgagaacggcagatgcgtgagagtgcaggagggctacacctgcgactgcttcgacggctaccacctggacaccgccaagatgacctgcgtggacgtgaacgagtgcgacgagctgaacaacagaatgagcctgtgcaagaacgccaagtgcatcaacaccgacggcagctacaagtgcctgtgcctgcccggctacgtgcccagcgacaagcccaactactgcacccccctgaacaccgccctgaacctggagaaggacagcgacctggagtag

SEQ ID NO: 64656 - protein, 1342 aa, Artificial Sequence
  derived and/or modified sequence
MDTKLMCLLFFFSLPPLLVSNHTGRIKVVFTPSICKVTCTKGSCQNSCEKGNTTTLISENGHAADTLTATNFRVVICHLPCMNGGQCSSRDKCQCPPNFTGKLCQIPVHGASVPKLYQHSQQPGKALGTHVIHSTHTLPLTVTSQQGVKVKFPPNIVNIHVKHPPEASVQIHQVSRIDGPTGQKTKEAQPGQSQVSYQGLPVQKTQTIHSTYSHQQVIPHVYPVAAKTQLGRCFQETIGSQCGKALPGLSKQEDCCGTVGTSWGFNKCQKCPKKPSYHGYNQMMECLPGYKRVNNTFCQDINECQLQGVCPNGECLNTMGSYRCTCKIGFGPDPTFSSCVPDPPVISEEKGPCYRLVSSGRQCMHPLSVHLTKQLCCCSVGKAWGPHCEKCPLPGTAKEEPVEALTFSREHGPGVAEPEVATAPPEKEIPSLDQEKTKLEPGQPQLSPGISTIHLHPQFPVVIEKTSPPVPVEVAPEASTSSASQVIAPTQVTEINECTVNPDICGAGHCINLPVRYTCICYEGYRFSEQQRKCVDIDECTQVQHLCSQGRCENTEGSFLCICPAGFMASEEGTNCIDVDECLRPDVCGEGHCVNTVGAFRCEYCDSGYRMTQRGRCEDIDECLNPSTCPDEQCVNSPGSYQCVPCTEGFRGWNGQCLDVDECLEPNVCANGDCSNLEGSYMCSCHKGYTRTPDHKHCRDIDECQQGNLCVNGQCKNTEGSFRCTCGQGYQLSAAKDQCEDIDECQHRHLCAHGQCRNTEGSFQCVCDQGYRASGLGDHCEDINECLEDKSVCQRGDCINTAGSYDCTCPDGFQLDDNKTCQDINECEHPGLCGPQGECLNTEGSFHCVCQQGFSISADGRTCEDIDECVNNTVCDSHGFCDNTAGSFRCLCYQGFQAPQDGQGCVDVNECELLSGVCGEAFCENVEGSFLCVCADENQEYSPMTGQCRSRTSTDLDVDVDQPKEEKKECYYNLNDASLCDNVLAPNVTKQECCCTSGVGWGDNCEIFPCPVLGTAEFTEMCPKGKGFVPAGESSSEAGGENYKDADECLLFGQEICKNGFCLNTRPGYECYCKQGTYYDPVKLQCFDMDECQDPSSCIDGQCVNTEGSYNCFCTHPMVLDASEKRCIRPAESNEQIEETDVYQDLCWEHLSDEYVCSRPLVGKQTTYTECCCLYGEAWGMQCALCPLKDSDDYAQLCNIPVTGRRQPYGRDALVDFSEQYTPEADPYFIQDRFLNSFEELQAEECGILNGCENGRCVRVQEGYTCDCFDGYHLDTAKMTCVDVNECDELNNRMSLCKNAKCINTDGSYKCLCLPGYVPSDKPNYCTPLNTALNLEKDSDLE

SEQ ID NO: 64657 - DNA, 4029 bp, Artificial Sequence
  derived and/or modified sequence
atggacacaaagttgatgtgtctgctctttttcttctctctgccaccactgctggtatccaaccatactggcaggatcaaggtggtattcacccctagtatttgcaaagtcacgtgcaccaaaggatcttgtcagaatagctgcgagaaagggaacacaaccaccttgatcagcgaaaacggacacgcggctgatacactcacagcaaccaactttcgcgtcgtcatatgccacctcccttgcatgaatggagggcaatgttcttcgcgtgataaatgccagtgtcctcccaattttactggaaaattatgccaaatcccggtgcatggcgccagtgtgccgaaactgtaccaacacagccagcagcccggaaaagctctggggacacacgtaatacactccacgcatactttgcctctgaccgtcacctcccagcagggtgtgaaagtgaagtttccaccaaatattgtcaacatacatgtaaaacaccctccggaggctagcgtgcagatacaccaggtgagtcggatcgacggtcccaccggccagaaaactaaagaagcacagccgggacaaagccaggtctcctatcagggattgccagtgcaaaaaactcaaacgatccattcaacatatagccaccagcaagttattcctcatgtgtatcctgttgctgcaaaaacgcagctagggagatgctttcaggagaccatagggtcccagtgcggtaaagctttgccgggcctctcaaagcaggaagactgttgcgggacggtcggaaccagctggggtttcaacaagtgccagaagtgcccaaagaaaccctcctatcacggatataaccagatgatggaatgcttgcctggatataagcgggtgaacaataccttttgccaagacattaacgagtgtcagctccaaggagtttgtcctaacggcgagtgcctgaatacgatgggctcctataggtgcacctgtaagatcggttttggtccggaccctacattcagctcctgtgtgcctgaccccccggtcatcagcgaagaaaaggggccatgttatcgtctcgttagtagcggaaggcagtgcatgcacccattgtcagtacatctcactaagcagctatgctgctgctctgtcggcaaagcatggggccctcattgtgaaaaatgtcctctccctggaacggccaaagaagagcccgtcgaagcattgacattctcccgtgagcacggccccggcgtggccgagcctgaagtggcgacagcgccgcccgagaaagagataccatcacttgatcaggaaaagactaagttggagcctgggcagcctcaactgagtccagggatctctaccatccacctgcaccctcagtttccagtggtgatcgagaagacatccccacccgtgcccgtggaagtggcccccgaggcttcgacctcctcggcctctcaggtcattgcccctacgcaggttacagagatcaacgagtgcacagtcaatcctgacatctgcggcgccggtcactgcataaatcttccagtacgctacacctgtatttgttacgaaggttataggttttcagagcaacaacgaaagtgcgtggacattgatgagtgcacacaggtgcagcacctctgttctcagggccggtgcgagaacactgagggtagcttcctgtgtatctgcccagcagggtttatggcatcagaggaaggcactaactgcatagatgtcgacgaatgtctgaggcctgatgtgtgtggcgaaggacactgtgtaaataccgtaggcgcctttcgatgcgaatactgtgattcagggtacagaatgacccaaagaggaaggtgcgaggatatcgacgagtgtctgaacccgtcaacctgtcctgacgaacaatgcgttaactctcctggaagctaccagtgtgttccctgtactgagggttttcgtggatggaatgggcagtgcctggacgtggatgaatgtctcgagccgaacgtgtgtgcaaacggtgattgctccaacttggaaggctcttatatgtgctcttgtcataaaggctacacgcggacaccggatcacaagcactgtcgcgacatcgacgagtgccagcagggtaacctctgtgtcaatgggcagtgcaaaaatacagagggctcctttcgatgtacctgcggacagggataccagcttagcgctgcaaaagatcagtgtgaagacatagacgagtgccagcacagacacctttgtgcgcacggtcaatgcagaaacacagagggcagcttccaatgcgtgtgtgatcagggctaccgagcctctggactcggcgaccattgtgaggatattaatgaatgtttagaagataagtctgtctgccagcgaggtgattgcatcaatacagcgggaagctatgattgtacttgcccggatggctttcagttggacgataataagacttgtcaggacatcaacgagtgtgaacaccccggcctctgcggtccccagggggagtgccttaatactgaggggagtttccactgcgtgtgtcagcaggggttttctatttctgctgacggaagaacatgcgaggatatagacgagtgtgtgaataataccgtatgcgacagccatgggttttgtgacaataccgccggttcctttcgctgtctgtgctaccaggggttccaagccccacaagacggccaggggtgcgtcgatgttaacgagtgtgagctcctttctggtgtttgcggagaagctttctgtgagaacgtagagggctccttcctgtgtgtatgtgccgacgaaaatcaggaatactcgcctatgaccggacaatgtagatcccgcacctctactgatctagatgtcgatgtagatcagcccaaggaagaaaagaaagagtgttattacaacctaaacgacgcatccctgtgtgacaatgtcctcgcacccaacgtgaccaagcaagagtgttgctgcacatctggggttgggtggggtgacaactgcgaaatttttccgtgcccggtgctcgggaccgccgagtttacagagatgtgccctaaaggcaaaggctttgtgccggctggagagtcctctagcgaggcggggggggagaactacaaggatgcagatgagtgtttgttgttcggtcaggagatctgcaaaaacggcttctgcctgaacacaagaccgggctacgagtgttactgtaaacaaggcacctactacgatcccgtcaaactccagtgtttcgacatggatgagtgccaggacccttcttcctgcatcgacggacagtgtgttaatactgagggatcttacaattgtttttgtacacaccctatggtcctcgatgcctcagagaagcgctgcataaggcctgccgaatccaacgagcagatcgaggagacggacgtgtatcaggacctctgctgggagcatctgtcggatgagtacgtgtgttctaggcccctggttggtaagcaaacaacctatacagagtgttgctgtttgtacggagaggcctgggggatgcaatgtgctctgtgccctctgaaagacagcgatgactacgcgcagctctgcaacatccctgtgaccggaagacgccagccctacggacgtgatgccctggttgatttctcagagcagtatacacctgaggcagatccctactttatccaggatagatttttaaatagctttgaagagctgcaggcagaggaatgtggtatcctcaacgggtgcgaaaatggaaggtgtgtgcgggtccaggagggctatacttgtgactgttttgatggttaccacctggacaccgccaagatgacgtgtgttgacgttaatgagtgcgatgagctgaacaacaggatgtccctgtgtaagaacgctaagtgcattaacactgacgggtcttacaagtgtttgtgtctgcctggttacgttccatctgacaagcctaactactgcacgccgcttaatacagctctcaacttggagaaggacagcgacctagagtag

SEQ ID NO: 64658 - DNA, 5092 bp, Artificial Sequence
  derived and/or modified sequence
ctctttccttaaacctgtcgggttgtgggctctctcttttcccctcttgctcctttcttttctttttttctgtttttttaaaccttccaaggcaagttcatggatactaagctgatgtgtttgttgttctttttctccctgcctccgctcctagtgagtaaccacactggccgcatcaaggtggtctttactccgagcatctgtaaagtgacctgcaccaagggcagctgtcagaacagctgtgagaaggggaacaccaccactctcattagtgagaatggtcatgctgccgacaccctgacggccacgaacttccgagtggtaatttgccatcttccatgtatgaatggtggccagtgcagttcaagggacaaatgtcagtgccctccaaatttcacaggaaaactttgtcagatcccagtccatggtgccagcgtgcctaaactttatcagcattcccagcagccaggcaaggcgttggggacgcatgtcatccattcaacacataccttgcctctgaccgtgactagccagcaaggagtcaaagtgaaatttcctcctaacatagtcaatatccatgtgaaacatcctcctgaagcttccgtccagatacatcaggtttcaagaattgatggcccaacaggccagaagacaaaagaagctcaaccaggccaatcccaagtctcgtaccaagggcttcctgtccagaagacccagaccatacattccacatactcccaccagcaggtcattcctcacgtctaccccgtggctgctaagacacagcttggccggtgcttccaggaaaccattgggtcacagtgtggcaaagcgctccctggcctttcaaagcaagaggactgctgtggaactgtgggtacctcctggggctttaacaaatgccagaaatgccccaagaaaccatcttatcatggatacaaccaaatgatggaatgcctaccgggttataagcgggttaacaacaccttttgccaagatattaatgaatgtcagctacaaggtgtatgccctaatggtgagtgtttgaataccatgggcagctatcgatgtacctgcaaaataggatttgggccggatcctaccttttcaagttgtgttcctgatccccctgtgatctcggaagagaaagggccctgttaccgacttgtcagttctggaagacagtgtatgcaccctctgtctgttcacctcaccaagcagctctgctgttgtagtgtgggcaaggcctggggcccacactgtgagaaatgtccccttccaggcacagccaaggaagagccagtggaggccctgaccttctcccgggaacacgggccaggagtggcggagccagaagtggcaactgcaccccctgaaaaggaaataccttcattggatcaagagaaaaccaaacttgagcctggtcaaccccagctgtctccaggcatttccactattcatctgcatccacagtttccagtagtgattgaaaaaacatcacctcctgtgcctgttgaagtagctcctgaagcttctacgtctagtgccagccaagtgattgctcctactcaagtgacagaaatcaatgaatgtactgtgaaccctgatatctgtggagcaggacactgcattaacctaccagtgagatatacctgtatatgctacgagggctacaggttcagtgaacaacagaggaaatgtgtggatattgatgagtgtactcaggtccaacacctctgctcccagggccgctgtgaaaacaccgagggaagtttcttgtgcatttgcccagcaggatttatggccagtgaggagggtactaactgcatagatgttgacgaatgcctgaggccggacgtctgtggggaggggcactgtgtcaatactgtgggggccttccggtgtgaatactgtgacagcgggtaccgcatgactcagagaggccgttgtgaggatattgatgaatgtttgaatccaagcacttgtccagatgagcagtgtgtgaattctcctggatcttaccagtgcgttccctgcacagaaggattccgaggctggaatggacagtgccttgatgtggacgagtgcctggaaccaaacgtctgcgcaaatggtgattgttccaaccttgaaggctcctacatgtgttcatgccacaaaggctatacccggactccggaccacaagcactgtagagatattgatgaatgtcagcaagggaatctatgtgtaaacgggcagtgcaaaaataccgagggctccttcaggtgcacctgtggacaggggtaccagctgtcggcagctaaagaccagtgtgaagacattgatgaatgccagcaccgtcatctctgtgctcatgggcagtgcaggaacactgagggctcttttcaatgtgtgtgtgaccagggttacagagcatctgggcttggagaccactgtgaagatatcaatgaatgcttggaggacaagagtgtttgccagagaggagactgcattaatactgcagggtcctatgattgtacttgtccggatggatttcagctagatgacaataaaacatgtcaagatattaatgaatgtgaacatccagggctctgtggtccgcaaggggagtgcctaaacacagagggttctttccattgtgtctgccagcagggtttctcaatctctgcagatggccgtacgtgtgaagatattgatgaatgtgtaaacaacactgtttgtgacagtcacgggttttgtgacaatacagctggctccttccgctgcctctgttatcagggctttcaagccccacaggatgggcaagggtgtgtggatgtgaatgaatgtgaactgctcagtggggtgtgtggtgaagccttctgtgaaaacgtggaagggtccttcctgtgcgtgtgtgctgatgaaaaccaagagtacagccccatgactgggcagtgccgctcccggacctccacagatttagatgtagatgtagatcaacccaaagaagaaaagaaagaatgctactataatctcaatgacgccagtctctgtgataatgtgttggcccccaatgtcacgaaacaagaatgctgctgtacatcaggcgtgggatggggagataactgcgaaatcttcccctgcccggtcttgggaactgctgagttcactgaaatgtgtcccaaagggaaaggttttgtgcctgctggagaatcatcttctgaagctggtggtgagaactataaagatgcagatgaatgcctactttttggacaagaaatctgcaaaaatggtttctgtttgaacactcggcctgggtatgaatgctactgtaagcaagggacgtactatgatcctgtgaaactgcagtgctttgatatggatgaatgtcaagaccccagtagttgtattgatggccagtgtgttaatacagagggctcttacaactgcttctgtactcaccccatggtcctggatgcgtcagaaaaaagatgtatacgaccggctgagtcaaacgaacaaatagaagaaactgatgtctaccaagatttgtgctgggaacatctgagtgatgaatacgtgtgtagccggcctcttgtgggcaagcagacaacgtacactgagtgctgctgtctgtatggagaggcctggggcatgcagtgtgccctctgccccctgaaggattcagatgactatgctcagctgtgtaacatccccgtgacgggacgccggcagccatatggacgggacgccttggttgacttcagtgaacagtatactccagaagccgatccctacttcatccaagaccgttttctaaatagctttgaggagttacaggctgaggaatgcggcatcctcaatggatgtgaaaatggtcgctgtgtgagggtccaggaaggttacacctgcgattgctttgatgggtatcacttggatacggccaagatgacctgtgtcgatgtaaatgaatgcgatgagttgaacaaccggatgtctctctgcaagaatgccaagtgcattaacaccgatggttcctacaagtgtttgtgtctgccaggctacgtgccttctgacaagccaaactactgcactccgttgaataccgccttgaatttagagaaagacagtgacctggagtgaaacagaatctacataacctaagcccatatactctgcactgtgtaaaggaaaagggagaaatgtattatacttgagacattgcacctaccccggaaggctggaaatacagaaacagcatggaattgcaagtcctctgaagacaatgagaggatttaggatgagcccgataggtgtggcagaccaaatggacatttctctaaaaaaccagtatatatagtctgttcatatgtaaaattcaatggaagagaggtggaacagtgctgttattttaaacagaaggttgtattattatgttgttttgtttttttactattgcttgattaaatttggcatttaaatagtggtggaaatattttatataattttcattttttggttgtgcagttccttggctactgtttttcttttacttcagttttttaaaaatctcaaatgaaaaagtcttcgatacaatattgttaagctgtattataagtattgttacacagggttatgcaattcccggcctggagcatttttgaaattcaaattgtctgtcctgtggagcaggcagtgattttgttccaaaactttgtatacacatttggagaaaagtactttatattttcagtgttttgtctgattttaatgtccgttcttagccaagctgctagcaggtgttaattggatccctttccttcactgaaatggaagagtttataagcttacgttagtattgtaatatgtaaagtaagcccaacaaaaatttttaaaaatttgatgatccccaatatatctaccattgtatgttaaataaatcaccatttttgtagaaaaaattctacctgagagtaattgtcaatgagtacatgtgtataagttgtatcccactctccccacttttatcttttccagtggtcttctgttaatgtagtgtcttttacaagttaatcattaaatttgttagatcttgttatgggctaaa

SEQ ID NO: 64659 - DNA, 4029 bp, Artificial Sequence
  derived and/or modified sequence
atggacaccaagctgatgtgcctgctcttcttcttcagcctgccccccctgctggtgagcaaccacacaggccgcatcaaggtggtgttcacccccagcatctgcaaggtgacctgcaccaagggcagctgccagaacagctgtgagaagggcaacaccaccaccctcatcagtgaaaatggacatgctgctgacaccctgacagccaccaacttccgggtggtgatctgccacctgccctgcatgaatggaggccagtgcagcagccgggacaagtgccagtgcccccccaacttcaccgggaagctgtgccagatccctgtgcatggagcctctgtgcccaagctgtaccagcacagccagcagcccgggaaggccctgggcacccacgtgatccacagcacccacaccctgcccctgactgtgaccagccagcagggcgtgaaggtgaagtttcctcccaacatcgtgaacatccacgtgaagcaccccccagaggcctctgtgcagatccaccaggtgtccagaattgatggccccaccggccagaagaccaaggaggcccagcccggccagagccaggtgtcctaccagggcctgcctgtgcagaagacccagaccatccacagcacctacagccaccagcaggtgatcccccacgtgtaccctgtggccgccaagacccagctgggccgctgcttccaggagaccatcggcagccagtgtgggaaggccctgcccggcctgagcaagcaggaggactgctgcggcaccgtgggcacctcctggggcttcaacaagtgccagaagtgccccaagaagcccagctaccacggctacaaccagatgatggagtgcctgcccggctacaagagggtgaacaacaccttctgccaggacatcaatgaatgccagctgcagggcgtgtgccccaacggggagtgcctgaacaccatgggcagctaccgctgcacctgcaagattggcttcggccctgaccccaccttcagcagctgtgtgcctgacccccctgtgatcagcgaggagaagggcccctgctaccgcctggtgagcagcggccggcagtgcatgcaccccctgtctgtgcacctgaccaagcagctgtgctgctgcagcgtgggcaaggcctggggcccccactgtgagaagtgccccctgcccggcacagccaaggaggagcctgtggaggccctgaccttcagccgggagcacggccctggggtggccgagcctgaggtggccacagcccctcctgagaaggagatccccagcctggaccaggagaagaccaagctggagcccggccagccccagctgagccctggcatcagcaccatccacctgcacccccagtttcctgtggtgattgagaagaccagcccccctgtgcctgtggaggtggcccctgaggccagcaccagcagcgccagccaggtgattgcccccacccaggtgacagagatcaatgaatgtactgtgaacccagacatctgtggggccggccactgcatcaacctgcctgtgcgctacacctgcatctgctatgagggctaccgcttcagcgagcagcagaggaaatgtgtggacattgatgaatgtacccaggtgcagcacctgtgcagccagggccgctgtgaaaatacagagggcagcttcctgtgcatctgcccagctggcttcatggccagcgaggagggcaccaactgcattgatgtggatgaatgtctgcggccagatgtgtgtggggagggccactgtgtgaacacagtgggcgccttccgctgtgagtactgtgacagcggctacaggatgacccagaggggccgctgtgaggacattgatgagtgcctgaaccccagcacctgcccagatgagcagtgtgtgaacagccctggcagctaccagtgtgtgccctgcacagagggcttccggggctggaatggccagtgcctggatgtggatgagtgcctggagcccaacgtgtgtgccaatggagactgcagcaacctggagggcagctacatgtgcagctgccacaagggctacaccaggaccccagaccacaagcactgccgggacattgatgagtgccagcagggcaacctgtgtgtgaatggccagtgcaagaacacagagggcagcttccgctgcacctgtggccagggctaccagctgtctgctgccaaggaccagtgtgaggacattgatgagtgccagcaccgccacctgtgtgcccacggccagtgcaggaacacagagggcagcttccagtgtgtgtgtgaccagggctaccgggccagcggcctgggggaccactgtgaggacatcaatgaatgtctggaggacaagtctgtgtgccagagaggagactgcatcaacacagctggcagctatgactgcacctgcccagatggcttccagctggatgacaacaagacctgccaggacatcaatgaatgtgagcaccctggcctgtgtggcccccagggcgagtgcctgaacacagagggcagcttccactgtgtgtgccagcagggcttcagcatctctgcagatggccgcacctgtgaggacattgatgaatgtgtgaacaacacagtgtgtgacagccacggcttctgtgacaacacagctggcagcttccgctgcctgtgctaccagggcttccaggccccccaggacggccagggctgtgtggatgtgaatgaatgtgagctgctgtctggagtgtgtggggaggccttctgtgaaaatgtggagggcagcttcctgtgtgtgtgtgctgatgagaaccaggagtacagccccatgacaggccagtgccgcagcaggaccagcacagacctggatgtggatgtggaccagcccaaggaggagaagaaggagtgctactacaacctgaatgatgccagcctgtgtgacaacgtgctggccccaaatgtgaccaagcaggagtgctgctgcaccagcggcgtgggctggggagacaactgtgagatcttcccctgccctgtgctgggcacagctgagttcacagagatgtgccccaagggcaagggctttgtgcctgctggggagagcagcagcgaggccggaggagagaactacaaggatgctgatgagtgcctgctgtttggccaggagatctgcaagaatggcttctgcctgaacaccaggcctggctatgagtgctactgcaagcagggcacctactatgaccctgtgaagctgcagtgctttgacatggatgagtgccaggaccccagcagctgcattgatggccagtgtgtgaacacagagggcagctacaactgcttctgcacccaccccatggtgctggatgccagcgagaagcgctgcatccggcctgctgagagcaatgagcagatcgaggagacagatgtgtaccaggacctgtgctgggagcacctgagtgatgaatatgtgtgcagccggcccctggtgggcaagcagaccacctacacagagtgctgctgcctgtatggagaggcctggggcatgcagtgtgccctgtgccccctgaaggacagtgatgattatgcccagctgtgcaacatccctgtgactggaagacggcagccctacggcagagatgccctggtggacttcagcgagcagtacaccccagaggccgacccctacttcatccaggaccgcttcctgaacagctttgaggagctgcaggccgaggagtgtggcatcctgaatggctgtgaaaatggccgctgtgtgcgggtgcaggagggctacacctgtgactgctttgatggctaccacctggacacagccaagatgacctgtgtggatgtgaatgaatgtgatgagctgaacaacaggatgagcctgtgcaagaatgccaagtgcatcaacacagatggcagctacaagtgcctgtgcctgcccggctacgtgcccagcgacaagcccaactactgcacccccctgaacacagccctgaacctggagaaggacagcgacctggagtag

SEQ ID NO: 64660 - DNA, 4029 bp, Artificial Sequence
  derived and/or modified sequence
atggacaccaagctgatgtgcctgctgttcttcttcagcctgcccccgctactcgtgtccaatcataccgggcggatcaaggtggtgttcaccccctcaatctgcaaggtcacctgcaccaagggaagctgtcagaattcgtgcgagaaaggcaacactacaactctgatatccgaaaatgggcacgctgccgacacactgacggctactaatttccgagtggtgatatgccacttaccctgcatgaacggggggcagtgcagcagccgagacaaatgtcaatgccccccaaacttcaccggtaagttatgccagataccagtgcatggcgcttcggtcccaaaactctaccagcactctcagcagccggggaaggcactaggtactcacgttattcattcaacccataccctacccctgacagtaacgagccagcaaggggtgaaggtcaagttcccccccaatattgtaaatattcacgtgaaacatccccccgaggcctcagtgcagatccaccaggtctcccggatcgacggtccaactgggcagaagaccaaggaggcgcagcccggacagtcgcaggtttcttaccagggtctccccgtccaaaagacgcagacgatacattcaacttactcgcaccaacaggtcattccgcatgtttaccctgttgcagctaagactcagctggggaggtgtttccaggagacaatcggctcccaatgcggaaaagccctacccgggttaagtaaacaagaggattgttgtgggaccgttgggactagctggggatttaacaagtgccaaaagtgtcctaagaagccgagctatcacggctataaccagatgatggagtgcctaccggggtacaaaagagtgaataacactttctgtcaggacatcaatgaatgtcagctgcaaggcgtttgtccaaacggggagtgcctgaatacaatgggaagctacaggtgcacgtgcaagattggattcggacccgaccctactttttcttcctgcgtgccagacccaccagtgattagtgaggaaaagggcccgtgttatcgtctggtgtcctccggtaggcagtgtatgcaccccttaagtgttcatttgactaaacaactgtgctgttgctccgtaggcaaggcctggggacctcattgtgaaaagtgccccctgcccggaacagccaaggaggaacccgttgaggccctgacttttagcagggagcacggtccgggcgtagctgaacctgaggtggccaccgcaccaccagagaaggaaatcccaagtctagatcaggagaaaacgaaactggagccgggacagccgcagcttagcccagggatatccaccatccacttacacccacagtttcctgttgtgattgaaaagactagcccacccgtgccagttgaagtcgcgcctgaagccagcaccagtagtgcctcacaggttatcgctcccacacaggtcactgaaatcaacgagtgtacagtgaaccctgacatttgtggagctggccattgcatcaatctcccagtgcggtacacttgtatttgttatgaaggctacaggttcagcgagcagcagcgcaagtgcgtcgatatagacgaatgtacgcaggtccagcacttgtgctctcagggccgctgtgagaacactgaaggctcctttctgtgtatttgtcccgcaggatttatggcatctgaggagggtaccaattgtattgatgtagatgaatgcctacgcccagatgtttgtggcgagggccactgtgtcaacactgtgggagctttcaggtgtgaatattgcgactctggctacaggatgacacagcgcgggagatgtgaagacatagatgaatgccttaatccatcgacatgcccggatgagcagtgcgtcaatagtccgggatcttatcagtgcgtgccctgtactgagggctttaggggatggaacggacagtgtctggacgtagatgagtgcctggagcccaatgtatgtgcaaatggagactgttccaacctcgaaggttcctacatgtgttcatgccacaaagggtataccagaacaccggaccataagcattgtcgcgacatcgacgagtgtcagcaaggcaacttgtgcgttaatggacagtgcaagaacacagaagggagcttccgctgcacctgcggccagggataccagttgagcgccgccaaagatcaatgcgaggacattgatgaatgtcagcatcgccatctttgtgcccatggtcagtgccggaatactgaaggtagctttcaatgcgtgtgcgaccagggctaccgtgcttcagggctcggcgatcactgcgaagacattaatgaatgtcttgaggataaaagcgtatgccagagaggtgactgcataaataccgccggctcttacgactgcacctgccctgacgggtttcagctggacgacaacaaaacatgtcaggatataaatgagtgcgagcatcctggtctgtgtggccctcaaggtgagtgcctcaacacagagggctcctttcactgcgtgtgtcagcagggcttcagtataagtgccgatggtagaacatgtgaggatatagatgagtgtgtgaacaacacagtttgcgactctcatggcttctgcgataacacagccggatccttccgctgcttatgttaccagggctttcaagcccctcaggatggtcaggggtgcgtggatgtgaacgaatgcgagttacttagtggagtgtgtggtgaggcgttctgcgagaacgttgaaggctctttcctgtgcgtgtgtgctgatgagaaccaggaatatagtccgatgaccggccagtgcaggtcccgaaccagtacggacctagacgtcgatgtggatcaacctaaggaggagaagaaagagtgttactataacctcaacgatgcatccctgtgcgacaatgtcctggcaccaaatgttaccaagcaggaatgctgttgtacgagcggagtggggtggggagataattgcgagatcttcccatgtccagtattaggcacggctgagttcactgaaatgtgccccaaaggcaagggatttgttcccgccggcgagtcgtcatcagaggccggcggagaaaactacaaggacgctgacgagtgtcttctttttgggcaagaaatctgtaaaaatggcttctgtctcaacacccgacccggatatgagtgctactgcaagcaaggaacgtattacgaccctgtgaagctccaatgtttcgacatggacgagtgccaggatccctcctcatgtatcgatgggcagtgcgtcaataccgaagggagttacaattgcttttgtactcaccccatggttcttgatgcgtctgagaagcgatgtatcaggcccgccgagtcaaatgagcagatcgaagagactgatgtttatcaggatctgtgttgggagcacctgtccgacgagtacgtgtgcagccgcccgctggttgggaagcagactacctacaccgaatgttgttgcctctatggcgaagcctgggggatgcagtgcgctctgtgccctctcaaggattctgatgactacgctcagctctgcaacataccagtcactgggcgcagacaaccatacggaagagatgctctggttgactttagtgagcagtatactccagaggcagacccatactttattcaggacagattcctgaacagcttcgaagaactccaggctgaagaatgtggaatccttaacggttgcgagaatggcagatgcgtgcgtgtccaggaagggtatacatgtgactgtttcgacggttaccatctggacacagccaaaatgacgtgcgttgatgtaaatgaatgcgacgaactcaataaccgcatgagtctctgcaagaatgccaaatgcattaacaccgacggatcttataagtgtctgtgtctgcctggatacgtaccctccgataaacctaattattgcacacctctcaatacagcactgaacttggaaaaggacagcgacctggaatag

SEQ ID NO: 64661 - DNA, 4029 bp, Artificial Sequence
  derived and/or modified sequence
atggataccaagcttatgtgtctgctgttttttttcagtttacctcctttgctggtgagcaaccatactggacgaatcaaagtggtgtttactccttccatttgcaaggtgacatgtacaaaggggagttgccagaactcatgcgagaaggggaatacgactacactaattagtgagaacggccatgctgccgacacactgactgcaacaaactttagggtagtcatttgtcatctcccctgcatgaacggcggtcagtgctccagcagagacaagtgccagtgcccacctaatttcactggcaagttgtgccaaatcccggtgcacggcgcatctgtgcccaagctctaccagcattcccagcaacccggtaaggccctggggacacatgtcattcacagtactcacacactgcccctaaccgtgacttcacagcagggcgttaaggtgaagttcccgcctaatatcgtaaacatccacgtcaaacatcctcccgaagctagtgttcagattcatcaagtgagtcgcatcgatggccctactggacagaaaactaaggaggcgcagccaggacagtctcaggtatcatatcagggactcccggttcagaaaacccagacaatccattctacctattcccatcaacaggttattccgcatgtgtatcctgtcgcagctaaaacacagcttggtagatgcttccaggaaacaatcggatcccaatgcgggaaagctcttccaggtttgtccaaacaggaagattgttgtggaactgtgggtactagttggggctttaacaagtgccagaagtgcccaaagaagcccagttaccacggctataaccagatgatggagtgtctgcccggatacaaacgcgtcaacaacactttttgtcaagatatcaatgagtgtcagttgcagggagtctgtcccaacggagaatgcctgaacacaatgggatcgtatagatgtacctgtaaaatcggcttcggaccggatcccaccttctcttcttgcgtcccggaccctcccgtgatctcagaggaaaagggcccatgctaccgactcgtttccagcgggaggcagtgcatgcatcctctgtcagtgcacctgaccaaacaactgtgttgctgttccgttggaaaagcctgggggcctcactgtgaaaagtgtccactgcctggtactgctaaggaggaacctgtggaggccctgacattcagtcgagagcatggacctggcgttgctgagcctgaagtagcaaccgcacctccagaaaaggaaattccctctctcgatcaggaaaaaacaaaactggagccagggcaaccccagctctctcctggcatcagtaccatccacctgcatcctcagttcccagtggtaattgaaaaaacatcacctccagtgcccgttgaggtggcaccggaggcctctacctcttctgcatcacaggtcatcgccccaacacaggtcaccgaaatcaacgagtgtaccgtaaatcccgacatatgtggggcagggcactgcatcaatctaccagtcagatacacctgcatctgctacgaaggctatcgattttctgagcaacagcgaaagtgtgtggatattgatgaatgtactcaggtccagcacctctgttcccagggcagatgtgagaacaccgagggttccttcctatgcatttgccctgctggcttcatggcctcagaggaagggactaattgcatcgacgtggacgagtgcctcagaccagacgtgtgtggtgagggacactgcgttaataccgtcggcgcttttcgatgcgagtactgtgatagcggctacaggatgacacagagaggccgatgtgaagatatcgacgagtgcttaaatccctccacatgtcccgacgagcagtgtgtcaatagtccaggcagctatcagtgcgtaccgtgcacagagggctttcggggatggaacggccaatgtcttgacgttgacgagtgccttgagccaaatgtttgcgccaacggtgattgctccaacctcgagggctcttatatgtgctcatgtcacaagggatacacacggacgcccgaccataaacactgccgcgacatcgatgagtgccaacagggtaatctgtgcgtaaacggccagtgcaaaaacacagaaggctctttccgctgcacatgcggacagggttaccagttaagcgcagccaaggaccagtgtgaagacatcgatgaatgccagcacaggcatctctgcgcgcacggccagtgcagaaacaccgagggttcattccagtgtgtgtgtgaccaggggtatagggcaagcgggttaggcgatcattgcgaggacattaatgaatgcctagaagacaaatccgtgtgtcagaggggggattgtataaatactgcagggagctatgactgcacttgtcctgacggcttccaactggatgataataaaacttgccaggacatcaacgaatgcgaacacccaggcctgtgcggcccacagggggagtgcctcaacaccgaggggtccttccactgtgtttgccagcagggcttttccatctccgcggacggtaggacctgcgaggatatcgatgagtgtgtcaacaatacagtctgcgacagccacgggttttgcgacaatactgccggtagtttccgctgcttgtgctatcaagggttccaggccccacaggatggccaaggctgtgtcgacgtaaatgagtgcgagctgctgagcggggtatgtggcgaagctttctgcgaaaatgtagaaggatcctttctttgcgtgtgtgcagatgagaaccaggaatactctccaatgactggtcagtgtcggagtagaacatcaacagatctggacgtggacgtagaccagcctaaagaggaaaaaaaggaatgctactataatctcaacgatgcgtcactctgcgacaatgtgctggcccctaatgttaccaagcaggagtgctgttgcacctcaggcgtgggctggggcgataattgtgagattttcccttgcccagtgctgggtaccgccgagttcaccgagatgtgtcccaaggggaagggctttgttcctgctggcgaaagctcctccgaagcaggcggagaaaactacaaagacgccgatgagtgtctactgtttggacaagaaatttgcaaaaacggcttttgcctgaatacccgacccggttacgagtgctattgtaagcaaggaacatactacgaccccgtcaagctgcagtgtttcgacatggatgaatgccaggacccatcttcctgcatcgatggacagtgcgtgaataccgagggatcgtacaactgcttttgcacccaccctatggtgcttgacgctagtgaaaagcggtgtatacggccagcagagagtaacgagcagattgaagaaaccgatgtgtaccaagatctgtgttgggagcatctgagcgacgagtacgtttgttcacggccacttgtgggtaaacagactacttatactgaatgttgttgcctgtatggggaagcctggggtatgcaatgcgcattatgccctctgaaggattccgatgactacgcccaattgtgtaacattccagtgactgggaggcggcagccttatgggagggatgcattagtggatttttccgagcagtacacgccagaggctgacccgtatttcattcaggataggtttctgaatagctttgaagagctgcaggctgaggagtgcggcatcctgaatggatgcgaaaatggccgatgcgttcgggtgcaggaaggatacacctgcgactgcttcgatggatatcatctggacaccgccaagatgacttgcgtggacgtgaatgagtgcgatgaactgaataatagaatgtcactatgtaagaatgcaaagtgtataaatactgacgggtcctataagtgcttgtgtctaccaggctatgtcccctcagataaacctaattactgcacgccactcaacacagccctgaacctcgagaaggacagtgatctggagtag

SEQ ID NO: 64662 - DNA, 4029 bp, Artificial Sequence
  derived and/or modified sequence
atggacaccaagctgatgtgcctgctgttcttcttcagcctgccccccctgctggtgagcaaccacaccggcagaatcaaggtggtgttcacccccagcatctgcaaggtgacctgcaccaagggcagctgccagaacagctgcgagaagggcaacaccaccaccctgatcagcgagaacggccacgccgccgacaccctgaccgccaccaacttcagagtggtgatctgccacctgccctgcatgaacggcggccagtgcagcagcagagacaagtgccagtgcccccccaacttcaccggcaagctgtgccagatccccgtgcacggcgccagcgtgcccaagctgtaccagcacagccagcagcccggcaaggccctgggcacccacgtgatccacagcacccacaccctgcccctgaccgtgaccagccagcagggcgtgaaggtgaagttcccccccaacatcgtgaacatccacgtgaagcacccccccgaggccagcgtgcagatccaccaggtgagcagaatcgacggccccaccggccagaagaccaaggaggcccagcccggccagagccaggtgagctaccagggcctgcccgtgcagaagacccagaccatccacagcacctacagccaccagcaggtgatcccccacgtgtaccccgtggccgccaagacccagctgggcagatgcttccaggagaccatcggcagccagtgcggcaaggccctgcccggcctgagcaagcaggaggactgctgcggcaccgtgggcaccagctggggcttcaacaagtgccagaagtgccccaagaagcccagctaccacggctacaaccagatgatggagtgcctgcccggctacaagagagtgaacaacaccttctgccaggacatcaacgagtgccagctgcagggcgtgtgccccaacggcgagtgcctgaacaccatgggcagctacagatgcacctgcaagatcggcttcggccccgaccccaccttcagcagctgcgtgcccgacccccccgtgatcagcgaggagaagggcccctgctacagactggtgagcagcggcagacagtgcatgcaccccctgagcgtgcacctgaccaagcagctgtgctgctgcagcgtgggcaaggcctggggcccccactgcgagaagtgccccctgcccggcaccgccaaggaggagcccgtggaggccctgaccttcagcagagagcacggccccggcgtggccgagcccgaggtggccaccgccccccccgagaaggagatccccagcctggaccaggagaagaccaagctggagcccggccagccccagctgagccccggcatcagcaccatccacctgcacccccagttccccgtggtgatcgagaagaccagcccccccgtgcccgtggaggtggcccccgaggccagcaccagcagcgccagccaggtgatcgcccccacccaggtgaccgagatcaacgagtgcaccgtgaaccccgacatctgcggcgccggccactgcatcaacctgcccgtgagatacacctgcatctgctacgagggctacagattcagcgagcagcagagaaagtgcgtggacatcgacgagtgcacccaggtgcagcacctgtgcagccagggcagatgcgagaacaccgagggcagcttcctgtgcatctgccccgccggcttcatggccagcgaggagggcaccaactgcatcgacgtggacgagtgcctgagacccgacgtgtgcggcgagggccactgcgtgaacaccgtgggcgccttcagatgcgagtactgcgacagcggctacagaatgacccagagaggcagatgcgaggacatcgacgagtgcctgaaccccagcacctgccccgacgagcagtgcgtgaacagccccggcagctaccagtgcgtgccctgcaccgagggcttcagaggctggaacggccagtgcctggacgtggacgagtgcctggagcccaacgtgtgcgccaacggcgactgcagcaacctggagggcagctacatgtgcagctgccacaagggctacaccagaacccccgaccacaagcactgcagagacatcgacgagtgccagcagggcaacctgtgcgtgaacggccagtgcaagaacaccgagggcagcttcagatgcacctgcggccagggctaccagctgagcgccgccaaggaccagtgcgaggacatcgacgagtgccagcacagacacctgtgcgcccacggccagtgcagaaacaccgagggcagcttccagtgcgtgtgcgaccagggctacagagccagcggcctgggcgaccactgcgaggacatcaacgagtgcctggaggacaagagcgtgtgccagagaggcgactgcatcaacaccgccggcagctacgactgcacctgccccgacggcttccagctggacgacaacaagacctgccaggacatcaacgagtgcgagcaccccggcctgtgcggcccccagggcgagtgcctgaacaccgagggcagcttccactgcgtgtgccagcagggcttcagcatcagcgccgacggcagaacctgcgaggacatcgacgagtgcgtgaacaacaccgtgtgcgacagccacggcttctgcgacaacaccgccggcagcttcagatgcctgtgctaccagggcttccaggccccccaggacggccagggctgcgtggacgtgaacgagtgcgagctgctgagcggcgtgtgcggcgaggccttctgcgagaacgtggagggcagcttcctgtgcgtgtgcgccgacgagaaccaggagtacagccccatgaccggccagtgcagaagcagaaccagcaccgacctggacgtggacgtggaccagcccaaggaggagaagaaggagtgctactacaacctgaacgacgccagcctgtgcgacaacgtgctggcccccaacgtgaccaagcaggagtgctgctgcaccagcggcgtgggctggggcgacaactgcgagatcttcccctgccccgtgctgggcaccgccgagttcaccgagatgtgccccaagggcaagggcttcgtgcccgccggcgagagcagcagcgaggccggcggcgagaactacaaggacgccgacgagtgcctgctgttcggccaggagatctgcaagaacggcttctgcctgaacaccagacccggctacgagtgctactgcaagcagggcacctactacgaccccgtgaagctgcagtgcttcgacatggacgagtgccaggaccccagcagctgcatcgacggccagtgcgtgaacaccgagggcagctacaactgcttctgcacccaccccatggtgctggacgccagcgagaagagatgcatcagacccgccgagagcaacgagcagatcgaggagaccgacgtgtaccaggacctgtgctgggagcacctgagcgacgagtacgtgtgcagcagacccctggtgggcaagcagaccacctacaccgagtgctgctgcctgtacggcgaggcctggggcatgcagtgcgccctgtgccccctgaaggacagcgacgactacgcccagctgtgcaacatccccgtgaccggcagaagacagccctacggcagagacgccctggtggacttcagcgagcagtacacccccgaggccgacccctacttcatccaggacagattcctgaacagcttcgaggagctgcaggccgaggagtgcggcatcctgaacggctgcgagaacggcagatgcgtgagagtgcaggagggctacacctgcgactgcttcgacggctaccacctggacaccgccaagatgacctgcgtggacgtgaacgagtgcgacgagctgaacaacagaatgagcctgtgcaagaacgccaagtgcatcaacaccgacggcagctacaagtgcctgtgcctgcccggctacgtgcccagcgacaagcccaactactgcacccccctgaacaccgccctgaacctggagaaggacagcgacctggagtag

SEQ ID NO: 64663 - protein, 652 aa, Artificial Sequence
  derived and/or modified sequence
MTSASPEDQNAPVGCPKGARRRRPISVIGGVSLYGTNQTEELDNLLTQPASRPPMPAHQVPPYKAVSARFRPFTFSQSTPIGLDRVGRRRQMRASNVSSDGGTEPSALVDDNGSEEDFSYEDLCQASPRYLQPGGEQLAINELISDGNVVCAEALWDHVTMDDQELGFKAGDVIQVLEASNKDWWWGRSEDKEAWFPASFVRLRVNQEELSENSSSTPSEEQDEEASQSRHRHCENKQQMRTNVIREIMDTERVYIKHLRDICEGYIRQCRKHTGMFTVAQLATIFGNIEDIYKFQRKFLKDLEKQYNKEEPHLSEIGSCFLQNQEGFAIYSEYCNNHPGACLELANLMKQGKYRHFFEACRLLQQMIDIAIDGFLLTPVQKICKYPLQLAELLKYTTQEHGDYSNIKAAYEAMKNVACLINERKRKLESIDKIARWQVSIVGWEGLDILDRSSELIHSGELTKITKQGKSQQRTFFLFDHQLVSCKKDLLRRDMLYYKGRLDMDEMELVDLGDGRDKDCNLSVKNAFKLVSRTTDEVYLFCAKKQEDKARWLQACADERRRVQEDKEMGMEISENQKKLAMLNAQKAGHGKSKGYNRCPVAPPHQGLHPIHQRHITMPTSVPQQQVFGLAEPKRKSSLFWHTFNRLTPFRK

SEQ ID NO: 64664 - protein, 1277 aa, Artificial Sequence
  derived and/or modified sequence
MTQAAVRPWAPCLENMTTAPNGLGPGPAAPCAGSDLKDAKMVTSLACGNGVCGCSPGGDTDTQEAKLSPAKLVRLFSTSRKRTGAHPERPHSMVLVGNSSTWNTLASFRKMGSFKKLKSSVLKGIQSREGSNACSKGEASEHGLGKSIPNGAVPGAQASRGSPLAPGPACGALRPAEWGTLDGSDLEDTDDAFQRSTHRSRSLRRAYGLGRICLLDAPQNHATPTIATGQVPAVCEILVRDPENNSMGYRRSKSTDNLAFLKKSSFKRKSTSNLADLRTAHDARVPQRTLSSSSTDSQKLGSGRTKRWRSPIRAKDFDRVFKLVSNVTEAAWRRESPRSGAPSPGEASLRLQAHSRLHDDYSRRVSRSTEQDSRRGGAVMHGTTATCTVAPGFGSATSKGPHLDADTAVFPLETKSSWAVESDSSCTCSSLPSPIVQDVLSKDSCDPNAGSQLTFDPEQPPTPLRPTTPKPQSPQSPQSPGAGSASCHSNHSALSANSEESEGRAEEPAQREPGPVSLQDPLEATHGDEGSKDLLVNIGVAAGPEEKEKEEVVPDGPWRRSSSQDEERTEAQRTPKRRWGSGRRPRPRPFSDYGQLASRSLSIPEDSVAADPQKEDRVDEDPQASMTSASPEDQNAPVGCPKGARRRRPISVIGGVSLYGTNQTEELDNLLTQPASRPPMPAHQVPPYKAVSARFRPFTFSQSTPIGLDRVGRRRQMRASNVSSDGGTEPSALVDDNGSEEDFSYEDLCQASPRYLQPGGEQLAINELISDGNVVCAEALWDHVTMDDQELGFKAGDVIQVLEASNKDWWWGRSEDKEAWFPASFVRLRVNQEELSENSSSTPSEEQDEEASQSRHRHCENKQQMRTNVIREIMDTERVYIKHLRDICEGYIRQCRKHTGMFTVAQLATIFGNIEDIYKFQRKFLKDLEKQYNKEEPHLSEIGSCFLQNQEGFAIYSEYCNNHPGACLELANLMKQGKYRHFFEACRLLQQMIDIAIDGFLLTPVQKICKYPLQLAELLKYTTQEHGDYSNIKAAYEAMKNVACLINERKRKLESIDKIARWQVSIVGWEGLDILDRSSELIHSGELTKITKQGKSQQRTFFLFDHQLVSCKKDLLRRDMLYYKGRLDMDEMELVDLGDGRDKDCNLSVKNAFKLVSRTTDEVYLFCAKKQEDKARWLQACADERRRVQEDKEMGMEISENQKKLAMLNAQKAGHGKSKGYNRCPVAPPHQGLHPIHQRHITMPTSVPQQQVFGLAEPKRKSSLFWHTFNRLTPFRK

SEQ ID NO: 64665 - protein, 639 aa, Artificial Sequence
  derived and/or modified sequence
MSLGQSACLFLSIARSRSVMTGEQMAAFHPSSTPNPLERPIKMGWLKKQRSIVKNWQQRYFVLRAQQLYYYKDEEDTKPQGCMYLPGCTIKEIATNPEEAGKFVFEIIPASWDQNRMGQDSYVLMASSQAEMEEWVKFLRRVAGTPCGAVFGQRLDETVAYEQKFGPHLVPILVEKCAEFILEHGRNEEGIFRLPGQDNLVKQLRDAFDAGERPSFDRDTDVHTVASLLKLYLRDLPEPVVPWSQYEGFLLCGQLTNADEAKAQQELMKQLSILPRDNYSLLSYICRFLHEIQLNCAVNKMSVDNLATVIGVNLIRSKVEDPAVIMRGTPQIQRVMTMMIRDHEVLFPKSKDIPLSPPAQKNDPKKAPVARSSVGWDATEDLRISRTDSFSSMTSDSDTTSPTGQQPSDAFPEDSSKVPREKPGDWKMQSRKRTQTLPNRKCFLTSAFQGANSSKMEIFKNEFWSPSSEAKAGEGHRRTMSQDLRQLSDSQRTSTYDNVPSLPGSPGEEASALSSQACDSKGDTLASPNSETGPGKKNSGEEEIDSLQRMVQELRKEIETQKQMYEEQIKNLEKENYDVWAKVVRLNEELEKEKKKSAALEISLRNMERSREDVEKRNKALEEEVKEFVKSMKEPKTEA

SEQ ID NO: 64666 - protein, 591 aa, Artificial Sequence
  derived and/or modified sequence
MSLGQSACLFLSIARSRSVMTGEQMAAFHPSSTPNPLERPIKMGWLKKQRSIVKNWQQRYFVLRAQQLYYYKDEEDTKPQGCMYLPGCTIKEIATNPEEAGKFVFEIIPASWDQNRMGQDSYVLMASSQAEMEEWVKFLRRVAGTPCGAVFGQRLDETVAYEQKFGPHLVPILVEKCAEFILEHGRNEEGIFRLPGQDNLVKQLRDAFDAGERPSFDRDTDVHTVASLLKLYLRDLPEPVVPWSQYEGFLLCGQLTNADEAKAQQELMKQLSILPRDNYSLLSYICRFLHEIQLNCAVNKMSVDNLATVIGVNLIRSKVEDPAVIMRGTPQIQRVMTMMIRDHEVLFPKSKDIPLSPPAQKNDPKKAPVARSSVGWDATEDLRISRTDSFSSMTSDSDTTSPTGQQPSDAFPEDSSKVPREKPGDWKMQSRKRTQTLPNRKCFLTSAFQGANSSKMEIFKNEFWSPSSEAKAGEGHRRTMSQDLRQLSDSQRTSTYDNVPSLPGSPGEEASALSSQACDSKGDTLASPNSETGPGKKNSGEEEIDSLQRMVQELRKEIETQKQMYEEQIKNLEKENYDVWAKVVRPFLSAI

SEQ ID NO: 64667 - protein, 458 aa, Artificial Sequence
  derived and/or modified sequence
MSLGQSACLFLSIARSRSVMTGEQMAAFHPSSTPNPLERPIKMGWLKKQRSIVKNWQQRYFVLRAQQLYYYKDEEDTKPQGCMYLPGCTIKEIATNPEEAGKFVFEIIPASWDQNRMGQDSYVLMASSQAEMEEWVKFLRRVAGTPCGAVFGQRLDETVAYEQKFGPHLVPILVEKCAEFILEHGRNEEGIFRLPGQDNLVKQLRDAFDAGERPSFDRDTDVHTVASLLKLYLRDLPEPVVPWSQYEGFLLCGQLTNADEAKAQQELMKQLSILPRDNYSLLSYICRFLHEIQLNCAVNKMSVDNLATVIGVNLIRSKVEDPAVIMRGTPQIQRVMTMMIRDHEVLFPKSKDIPLSPPAQKNDPKKAPVARSSVGWDATEDLRISRTDSFSSMVRCREPSCFHWVLPLVQAIPCKACSRVAIWGVLGDAVAVGAAATDSSEHTLKAWPLSKSSFYWHL

SEQ ID NO: 64668 - protein, 630 aa, Artificial Sequence
  derived and/or modified sequence
MSLGQSACLFLSIARSRSVMTGEQMAAFHPSSTPNPLERPIKMGWLKKQRSIVKNWQQSYYYKDEEDTKPQGCMYLPGCTIKEIATNPEEAGKFVFEIIPASWDQNRMGQDSYVLMASSQAEMEEWVKFLRRVAGTPCGAVFGQRLDETVAYEQKFGPHLVPILVEKCAEFILEHGRNEEGIFRLPGQDNLVKQLRDAFDAGERPSFDRDTDVHTVASLLKLYLRDLPEPVVPWSQYEGFLLCGQLTNADEAKAQQELMKQLSILPRDNYSLLSYICRFLHEIQLNCAVNKMSVDNLATVIGVNLIRSKVEDPAVIMRGTPQIQRVMTMMIRDHEVLFPKSKDIPLSPPAQKNDPKKAPVARSSVGWDATEDLRISRTDSFSSMTSDSDTTSPTGQQPSDAFPEDSSKVPREKPGDWKMQSRKRTQTLPNRKCFLTSAFQGANSSKMEIFKNEFWSPSSEAKAGEGHRRTMSQDLRQLSDSQRTSTYDNVPSLPGSPGEEASALSSQACDSKGDTLASPNSETGPGKKNSGEEEIDSLQRMVQELRKEIETQKQMYEEQIKNLEKENYDVWAKVVRLNEELEKEKKKSAALEISLRNMERSREDVEKRNKALEEEVKEFVKSMKEPKTEA

SEQ ID NO: 64669 - DNA, 1920 bp, Artificial Sequence
  derived and/or modified sequence
atgtccttgggtcagtccgcttgcctttttttgtccattgcaaggagcaggtcagttatgacaggagaacagatggccgcatttcatccttcatccactccaaacccactcgaacgtccaatcaagatgggatggctaaagaagcagcggtcaatcgtcaagaattggcagcagagatattttgtactgcgggctcaacagctgtactattataaggacgaagaagacactaagccgcaaggttgtatgtatttgcctggttgtaccatcaaggagatagccaccaacccagaggaggcgggcaagtttgtgtttgagattatcccagcctcatgggaccaaaatcggatggggcaggacagctacgtcctgatggcctcttcccaggcagagatggaggagtgggtgaagttcctgaggagagtggcaggcaccccctgcggagcggtcttcggtcaaaggctggacgaaacagtggcatacgagcaaaaatttggcccccacctggtgccaatcctggttgagaaatgtgcggagtttattctagaacacgggcgcaacgaagagggcatcttcagactgcctggtcaagacaatttagtgaagcaattgcgtgacgcgtttgacgcaggtgaacgccccagtttcgatcgagacacagacgtacacacggtggcatccttgcttaaactctacttgcgagatctgccggagccagtggttccctggtctcagtatgaagggtttttgctttgtggacaactgacaaacgcagacgaggctaaggcacagcaagaacttatgaaacagctctcaattctcccccgagacaactactccctcctgtcttatatatgtaggtttttgcacgaaatccagctgaactgtgcggtgaacaagatgtcagtagacaacctggcgactgtcattggagtcaatctgataaggtccaaggttgaagaccccgccgtgatcatgcggggcacacctcagattcagagggtgatgaccatgatgatcagagaccacgaggtcctgtttcccaagtccaaagacattccattgtccccgcccgctcaaaagaatgaccccaagaaagctcccgtggctaggagctccgtgggatgggatgcgacagaagatcttagaatatctcgcaccgatagcttttcaagcatgacctctgatagcgataccacaagccccaccggccagcaaccctccgacgcattccctgaggacagcagcaaagtccctagagagaagccgggagattggaagatgcaatcaaggaagcggacacagacccttcccaaccggaaatgcttccttacatccgcttttcagggtgccaacagcagcaaaatggaaattttcaagaatgagttctggtctccctctagcgaggccaaggcaggagaaggtcatagaaggaccatgagccaggacttgaggcagctctccgactctcaacggactagcacatacgataacgtgccctccctgccaggtagccccggtgaggaagcttccgctctgagctcgcaggcttgtgactctaaaggcgacactttggcttcccccaactcagagacaggaccgggcaaaaaaaattccggtgaggaggagatcgattccctccagcggatggtgcaggagctgcgcaaagagatcgaaactcagaagcagatgtatgaggagcagatcaaaaacctggagaaagagaactacgatgtttgggcgaaagttgttaggctaaatgaggagctcgaaaaggaaaaaaaaaagtccgccgccctcgaaatcagcctgcggaatatggagcgctcgcgggaggatgtcgaaaaaaggaataaagcattagaagaggaagtcaaggagttcgtgaagtcaatgaaggagccgaaaacagaagcctag

SEQ ID NO: 64670 - DNA, 1776 bp, Artificial Sequence
  derived and/or modified sequence
atgtcgctaggacagagtgcatgcctgtttctgtcaatcgcccgtagtcggtcggtgatgaccggtgaacagatggccgcttttcatccttctagcacaccaaatcctcttgagcgccccatcaaaatgggctggctcaagaagcagcggtcaatcgtgaagaattggcaacaaagatattttgttttgcgggcccagcagctgtattactacaaggacgaagaggatactaagcctcagggatgtatgtacttacctggttgcacgatcaaagaaatagccacgaaccccgaagaggctgggaaattcgtgtttgaaatcatacctgcgagctgggatcagaataggatggggcaggacagctatgttttgatggctagcagccaggcagaaatggaagagtgggtcaaatttcttcgccgcgtcgcaggcacaccctgcggagctgtcttcggccagcggctcgacgagaccgttgcatatgagcagaagttcgggcctcacctggtgcccatacttgtggagaagtgcgccgaatttatactggagcacgggcgaaacgaggagggtatttttagactgccaggccaggataatctggtgaaacaattgcgcgacgccttcgatgccggggaaaggcccagttttgaccgtgacacagatgttcacactgtggcctcattgctgaaactgtatttgcgggaccttcctgagcccgtcgtcccgtggagccagtacgaaggttttttgttgtgcgggcaactcacgaatgcggatgaggcaaaagcccagcaagaactaatgaagcaattgtccatcctgcctcgtgataattattcccttttgtcttacatctgccgatttctgcatgaaattcagctgaattgtgcggtaaataagatgtcagtggataacttggcaacagttatcggtgtgaatttaatcaggtccaaagtcgaagaccctgctgtgatcatgcggggtacccctcagatccagcgagtgatgactatgatgatccgcgatcacgaggtattattcccaaagtccaaagatatccccttaagcccccctgctcagaagaatgaccccaaaaaggcgccagtagcccgcagtagcgtgggctgggatgcaacagaggatctgcggatctcaagaacggactccttttcatccatgacgagcgactctgacaccacctctcccacgggccaacaaccttcggatgctttccctgaggactcttccaaggtgccgcgcgagaagcctggagattggaagatgcagagcagaaagcgcacacaaacactgcccaatcggaaatgttttctcacaagcgcctttcagggggccaatagcagtaaaatggagattttcaagaacgagttctggtcgcctagttcagaggctaaggcgggggagggacatcgtaggactatgtcccaggacttaagacagctgtcggacagccagaggacctcaacctatgataacgttccaagccttcctggctctccaggtgaagaagcctcagccctgagcagccaggcttgtgatagtaagggggataccctcgcctccccaaactcagagacgggccccggaaaaaaaaactccggcgaggaagagattgacagtctccaaaggatggtacaggagctgcggaaggagattgagactcagaaacagatgtacgaagagcaaattaagaacctggagaaggagaactatgacgtctgggccaaggtagttcgtccttttttatcagccatctag

SEQ ID NO: 64671 - DNA, 1377 bp, Artificial Sequence
  derived and/or modified sequence
atgtccctgggacaaagtgcgtgcctgttcctgagcatagcacgtagtaggagcgtgatgactggcgagcagatggctgcgttccacccatcgagcactcctaatcccctcgagcgccctatcaaaatgggctggcttaagaagcagagaagtatcgttaaaaactggcagcagcgatatttcgtgcttagggctcagcaactgtactactacaaggatgaggaggacactaagccacaaggctgcatgtacctgccaggttgcacgattaaagagatagcaaccaatccggaagaggctggcaagttcgtctttgaaatcatccccgcctcatgggatcaaaacaggatgggccaagactcatatgttttaatggcatcatcccaagctgaaatggaggaatgggtgaaatttctgagaagggtagcggggaccccatgtggggccgtattcggccaaaggcttgatgagaccgtggcttacgagcaaaaattcggcccgcacctcgtgcctattctagtggagaagtgtgccgagtttattctggaacatgggaggaacgaagaaggtatatttaggttgccagggcaggacaatcttgtgaagcagctgagagacgccttcgacgcgggggagcgcccttcttttgaccgcgacacagatgtccacaccgtcgcttctctgctcaaactgtatctccgcgacctgcccgaacccgtggtgccatggagtcaatacgaaggcttccttctgtgcggacagctaacgaacgccgacgaagctaaagctcagcaagaattgatgaagcagttatccatcctgccccgcgacaattactctctcttatcctacatctgccggtttctgcatgaaatccaactgaattgtgccgtcaataagatgtcagtcgataacctcgctacagtgataggggtcaaccttatccgatcgaaggtagaagaccctgcggtcatcatgcggggaaccccacagatccagcgggtaatgacaatgatgatacgagaccatgaagtcttatttccaaaatctaaagacattccactgagcccaccagcccagaaaaatgacccgaaaaaggctcccgtcgctagatcatccgtggggtgggatgctacagaagatctccgcatatcccggacagattccttttcatcgatggtgcggtgcagagagccgagctgtttccactgggtgttacccctggtacaggccatcccatgcaaagcgtgttcccgggttgcgatttggggagtgcttggagacgccgttgctgtgggagccgcagctactgacagctccgagcacacacttaaggcctggccactgagcaaatcatcattctattggcatctttag

SEQ ID NO: 64672 - DNA, 1893 bp, Artificial Sequence
  derived and/or modified sequence
atgtcactcggccaatcagcgtgtctgtttctctcaatagcaagatccagatcagtaatgaccggcgagcagatggctgcctttcacccctctagtacgcccaaccccctggaacgacctattaagatgggctggcttaaaaaacagcgtagcatcgtgaagaattggcagcagtcctattattacaaggatgaggaggacactaagccgcagggatgtatgtatttgccaggctgtacaatcaaagagatcgctaccaatcccgaagaagctggtaaatttgtgttcgagattattcctgcaagttgggaccagaaccgaatgggtcaggacagctatgttttgatggcctcctcccaggccgagatggaggaatgggtaaagtttctgagaagagtggctggcactccgtgtggcgccgtgttcggacagagactggacgagacagtcgcttatgaacagaagttcggacctcacttggtacctatcttagtggaaaaatgcgcggaattcatactggaacacggcagaaatgaggaaggaatttttcgcctgcccgggcaagataaccttgtgaagcaactgagagacgcgttcgacgctggggaacgcccgtccttcgaccgcgatacagatgtccacacggtggcctctctgttgaagctctatctgagagatctccccgagcctgttgtgccatggagccagtacgagggctttctgctgtgtggccaattaacgaatgctgacgaggcgaaggcacagcaggaactgatgaagcagctgagcattttgcctcgcgacaattatagcctgttgtcctatatttgtcggtttctgcacgagattcagctgaattgtgccgtgaacaagatgtcagtggacaatcttgcgactgtgattggagtgaatctcattcgttctaaggtagaggatccagccgtcatcatgcgcgggacccctcagattcagcgcgtgatgactatgatgattagagatcacgaggtactgttccctaagtccaaggatattcccctctccccgccggctcaaaagaacgatccaaagaaagcaccagtagcaagaagctcagttggatgggacgccaccgaagatttgcgcatttcacgcactgactccttcagcagcatgacctctgattccgacacaactagccccacaggccagcagccaagtgacgcctttcccgaggactcctcaaaagtgcccagagaaaagcccggagactggaaaatgcagtcacgcaaaaggacacagaccctgccaaacagaaagtgtttccttactagtgccttccagggggccaatagctccaaaatggaaatcttcaagaacgaattctggagcccatcgtccgaggcgaaagctggcgaagggcatagacgtactatgagtcaggatctgagacagttatccgattcacagcgcacctctacctatgataacgttccaagtctgcccggttctccaggggaggaagctagcgcgctgagcagccaggcctgtgactctaaaggcgacacgctcgcaagccctaattctgagactggacctgggaagaagaacagcggtgaggaagaaatcgactcactccagcggatggtgcaggaactgagaaaagaaattgagacgcagaaacagatgtacgaggagcagattaagaacctagaaaaggaaaactatgacgtgtgggcgaaggtggtgcgcctgaatgaagagcttgaaaaggaaaagaagaaaagcgccgcccttgaaatatcccttcgaaacatggagagatcaagagaggacgtggaaaaacgcaataaggcccttgaagaggaggtgaaagaatttgttaaaagtatgaaagaacctaaaacagaggcttag

SEQ ID NO: 64673 - DNA, 1920 bp, Artificial Sequence
  derived and/or modified sequence
atgagcctgggccagagcgcctgcctcttcctgagcatcgcccggagccgctctgtgatgactggagagcagatggccgccttccaccccagcagcacccccaaccccctggagcggcccatcaagatgggctggctgaagaagcagaggagcatcgtgaagaactggcagcagcgctactttgtgctgcgggcccagcagctgtactactacaaggatgaggaggacaccaagccccagggctgcatgtacctgcccggctgcaccatcaaggagatcgccaccaaccctgaggaggccggcaagtttgtgtttgagatcatcccagcctcctgggaccagaacaggatgggccaggacagctatgtgctgatggccagcagccaggccgagatggaggagtgggtgaagttcctgcggcgggtggccggcaccccctgtggggctgtgtttggccagaggctggatgagaccgtggcctatgagcagaagtttggcccccacctggtgcccatcctggtggagaagtgtgccgagttcatcctggagcacggcagaaatgaggagggcatcttccggctgcccggccaggacaacctggtgaagcagctgagagatgcctttgatgctggggagcggcccagctttgaccgggacacagatgtgcacacagtggccagcctgctgaagctgtacctgcgggacctgcctgagcctgtggtgccctggagccagtatgagggcttcctgctgtgtggccagctgaccaatgctgatgaggccaaggcccagcaggagctgatgaagcagctgagcatcctgccccgggacaactacagcctgctgagctacatctgccgcttcctgcacgagatccagctgaactgtgctgtgaacaagatgtctgtggacaacctggccaccgtcatcggcgtgaacctgatccgcagcaaggtggaggaccctgctgtgatcatgaggggcaccccccagatccagagggtgatgaccatgatgatccgggaccacgaggtgctcttccccaagagcaaggacatccccctgagccccccagcccagaagaatgaccccaagaaggcccctgtggcccggagctctgtgggctgggatgccacagaggacctgcgcatcagcaggacagacagcttcagctccatgaccagtgacagcgacaccaccagccccaccggccagcagcccagtgatgccttccctgaggacagcagcaaggtgccccgggagaagccaggggactggaagatgcagagcaggaagaggacccagaccctgcccaacaggaagtgcttcctgaccagcgccttccagggcgccaacagcagcaagatggagatcttcaagaatgagttctggagccccagcagcgaggccaaggccggggagggccacaggaggaccatgagccaggacctgcggcagctgagtgacagccagaggaccagcacctatgacaacgtgcccagcctgcccggcagccctggagaggaggccagcgccctgagcagccaggcctgtgacagcaaaggagacaccctggccagccccaacagcgagaccggccctgggaagaagaacagcggggaggaggagattgacagcctgcagaggatggtgcaggagctgaggaaggagattgagacccagaagcagatgtatgaggagcagatcaagaacctggagaaggaaaattatgatgtgtgggccaaggtggtgcggctgaatgaggagctggagaaggagaagaagaagtctgctgccctggagatcagcctgaggaacatggagaggagccgggaggatgtggagaagaggaacaaggccctggaggaggaggtgaaggagtttgtgaagtccatgaaggagcccaagacagaggcctag

SEQ ID NO: 64674 - DNA, 1776 bp, Artificial Sequence
  derived and/or modified sequence
atgagcctgggccagagcgcctgcctcttcctgagcatcgcccggagccgctctgtgatgactggagagcagatggccgccttccaccccagcagcacccccaaccccctggagcggcccatcaagatgggctggctgaagaagcagaggagcatcgtgaagaactggcagcagcgctactttgtgctgcgggcccagcagctgtactactacaaggatgaggaggacaccaagccccagggctgcatgtacctgcccggctgcaccatcaaggagatcgccaccaaccctgaggaggccggcaagtttgtgtttgagatcatcccagcctcctgggaccagaacaggatgggccaggacagctatgtgctgatggccagcagccaggccgagatggaggagtgggtgaagttcctgcggcgggtggccggcaccccctgtggggctgtgtttggccagaggctggatgagaccgtggcctatgagcagaagtttggcccccacctggtgcccatcctggtggagaagtgtgccgagttcatcctggagcacggcagaaatgaggagggcatcttccggctgcccggccaggacaacctggtgaagcagctgagagatgcctttgatgctggggagcggcccagctttgaccgggacacagatgtgcacacagtggccagcctgctgaagctgtacctgcgggacctgcctgagcctgtggtgccctggagccagtatgagggcttcctgctgtgtggccagctgaccaatgctgatgaggccaaggcccagcaggagctgatgaagcagctgagcatcctgccccgggacaactacagcctgctgagctacatctgccgcttcctgcacgagatccagctgaactgtgctgtgaacaagatgtctgtggacaacctggccaccgtcatcggcgtgaacctgatccgcagcaaggtggaggaccctgctgtgatcatgaggggcaccccccagatccagagggtgatgaccatgatgatccgggaccacgaggtgctcttccccaagagcaaggacatccccctgagccccccagcccagaagaatgaccccaagaaggcccctgtggcccggagctctgtgggctgggatgccacagaggacctgcgcatcagcaggacagacagcttcagctccatgaccagtgacagcgacaccaccagccccaccggccagcagcccagtgatgccttccctgaggacagcagcaaggtgccccgggagaagccaggggactggaagatgcagagcaggaagaggacccagaccctgcccaacaggaagtgcttcctgaccagcgccttccagggcgccaacagcagcaagatggagatcttcaagaatgagttctggagccccagcagcgaggccaaggccggggagggccacaggaggaccatgagccaggacctgcggcagctgagtgacagccagaggaccagcacctatgacaacgtgcccagcctgcccggcagccctggagaggaggccagcgccctgagcagccaggcctgtgacagcaaaggagacaccctggccagccccaacagcgagaccggccctgggaagaagaacagcggggaggaggagattgacagcctgcagaggatggtgcaggagctgaggaaggagattgagacccagaagcagatgtatgaggagcagatcaagaacctggagaaggaaaattatgatgtgtgggccaaggtggtgcggcccttcctgagcgccatctag

SEQ ID NO: 64675 - DNA, 1377 bp, Artificial Sequence
  derived and/or modified sequence
atgagcctgggccagagcgcctgcctcttcctgagcatcgcccggagccgctctgtgatgactggagagcagatggccgccttccaccccagcagcacccccaaccccctggagcggcccatcaagatgggctggctgaagaagcagaggagcatcgtgaagaactggcagcagcgctactttgtgctgcgggcccagcagctgtactactacaaggatgaggaggacaccaagccccagggctgcatgtacctgcccggctgcaccatcaaggagatcgccaccaaccctgaggaggccggcaagtttgtgtttgagatcatcccagcctcctgggaccagaacaggatgggccaggacagctatgtgctgatggccagcagccaggccgagatggaggagtgggtgaagttcctgcggcgggtggccggcaccccctgtggggctgtgtttggccagaggctggatgagaccgtggcctatgagcagaagtttggcccccacctggtgcccatcctggtggagaagtgtgccgagttcatcctggagcacggcagaaatgaggagggcatcttccggctgcccggccaggacaacctggtgaagcagctgagagatgcctttgatgctggggagcggcccagctttgaccgggacacagatgtgcacacagtggccagcctgctgaagctgtacctgcgggacctgcctgagcctgtggtgccctggagccagtatgagggcttcctgctgtgtggccagctgaccaatgctgatgaggccaaggcccagcaggagctgatgaagcagctgagcatcctgccccgggacaactacagcctgctgagctacatctgccgcttcctgcacgagatccagctgaactgtgctgtgaacaagatgtctgtggacaacctggccaccgtcatcggcgtgaacctgatccgcagcaaggtggaggaccctgctgtgatcatgaggggcaccccccagatccagagggtgatgaccatgatgatccgggaccacgaggtgctcttccccaagagcaaggacatccccctgagccccccagcccagaagaatgaccccaagaaggcccctgtggcccggagctctgtgggctgggatgccacagaggacctgcgcatcagcaggacagacagcttcagctccatggtgcgctgccgggagcccagctgcttccactgggtgctgcccctggtgcaggccatcccctgcaaggcctgcagccgggtggccatctggggcgtgctgggagatgctgtggccgtgggcgctgctgccacagacagcagcgagcacaccctgaaggcctggcccctgagcaagagcagcttctactggcacctgtag

SEQ ID NO: 64676 - DNA, 1893 bp, Artificial Sequence
  derived and/or modified sequence
atgagcctgggccagagcgcctgcctcttcctgagcatcgcccggagccgctctgtgatgactggagagcagatggccgccttccaccccagcagcacccccaaccccctggagcggcccatcaagatgggctggctgaagaagcagaggagcatcgtgaagaactggcagcagagctactactacaaggatgaggaggacaccaagccccagggctgcatgtacctgcccggctgcaccatcaaggagatcgccaccaaccctgaggaggccggcaagtttgtgtttgagatcatcccagcctcctgggaccagaacaggatgggccaggacagctatgtgctgatggccagcagccaggccgagatggaggagtgggtgaagttcctgcggcgggtggccggcaccccctgtggggctgtgtttggccagaggctggatgaaacagtggcctatgagcagaagtttggcccccacctggtgcccatcctggtggagaagtgtgccgagttcatcctggagcacggcagaaatgaggagggcatcttccggctgcccggccaggacaacctggtgaagcagctgagagatgcctttgatgctggggagcggcccagctttgaccgggacacagatgtgcacacagtggccagcctgctgaagctgtacctgcgggacctgcctgagcctgtggtgccctggagccagtatgagggcttcctgctgtgtggccagctgaccaatgctgatgaggccaaggcccagcaggagctgatgaagcagctgagcatcctgccccgggacaactacagcctgctgagctacatctgccgcttcctgcacgagatccagctgaactgtgctgtgaacaagatgtctgtggacaacctggccaccgtgattggagtgaacctgatccgcagcaaggtggaggaccctgctgtgatcatgaggggcaccccccagatccagagggtgatgaccatgatgatccgggaccacgaggtgctcttccccaagagcaaggacatccccctgagccccccagcccagaagaatgaccccaagaaggcccctgtggcccggagctctgtgggctgggatgccacagaggacctgcgcatcagcaggacagacagcttcagctccatgaccagtgacagcgacaccaccagccccaccggccagcagcccagtgatgccttccctgaggacagcagcaaggtgccccgggagaagccaggggactggaagatgcagagcaggaagaggacccagaccctgcccaacaggaagtgcttcctgaccagcgccttccagggcgccaacagcagcaagatggagatcttcaagaatgagttctggagccccagcagcgaggccaaggccggggagggccacaggaggaccatgagccaggacctgcggcagctgagtgacagccagaggaccagcacctatgacaacgtgcccagcctgcccggcagccctggagaggaggccagcgccctgagcagccaggcctgtgacagcaagggggacaccctggccagccccaacagcgagactggacctgggaagaagaacagcggggaggaggagattgacagcctgcagaggatggtgcaggagctgaggaaggagattgagacccagaagcagatgtatgaggagcagatcaagaacctggagaaggagaactatgatgtgtgggccaaggtggtgcggctgaatgaggagctggagaaggagaagaagaagtctgctgccctggagatcagcctgaggaacatggagaggagcagagaagatgtggagaagaggaacaaggccctggaggaggaggtgaaggagtttgtgaagtccatgaaggagcccaagacagaggcctag

SEQ ID NO: 64677 - DNA, 1920 bp, Artificial Sequence
  derived and/or modified sequence
atgagcctgggccagagcgcctgcctgttcctgagcatcgcccggtctagaagcgtaatgaccggcgagcagatggctgccttccatccctcgagtacacctaatccacttgaacgaccgatcaagatgggctggctgaagaaacagagatccatagtcaaaaactggcagcagcgatactttgtcctgagggcgcagcagttgtattactacaaggacgaagaggacacaaaaccacagggctgcatgtatttgcccgggtgtacaattaaggagatcgccaccaatcccgaggaggctgggaaattcgtgttcgagattataccggcatcctgggatcagaaccgtatgggacaagatagctatgtgttaatggccagctcccaggccgagatggaagaatgggtgaaatttctgcgcagagtcgccggcacaccatgtggggccgtgtttggccagcgcttggacgaaaccgttgcgtatgaacagaaattcggtccacatttagtcccaatcctggtggagaagtgtgctgaatttattctggagcacgggcggaacgaagaaggcatcttccgcctccccggacaggacaatttagtaaaacaactgagggatgcgttcgacgccggcgaacgaccttcttttgatcgcgatactgatgtccataccgtcgcaagcctgctgaaactgtatctgcgcgatctgccagagccagttgtcccttggagtcaatacgagggttttctgttatgcggtcagctcaccaacgctgatgaggccaaggctcagcaggagctcatgaagcagctgtctattctgccaagagataactactccctcctatcctacatctgtaggttccttcacgagatccagctaaactgcgccgtcaataaaatgagtgtggacaacctggccacagtgattggcgttaacctgattcgttccaaggtagaggaccctgcagtgatcatgagaggcaccccacaaattcagcgggtcatgactatgatgattcgagaccacgaagtcctcttccccaaaagcaaggacatcccactgtctcctccagcccaaaagaacgaccccaaaaaggcacccgtggctagatcttccgtaggttgggatgctactgaagaccttcggatttccagaacagattcattctcatccatgacatccgactcagacaccacatctcctaccggacaacaacctagcgacgcctttcctgaagacagcagcaaggtccccagggagaagcccggagattggaagatgcagtccagaaagcggacccagaccctgcccaaccgaaaatgcttcctcacatcagccttccaaggggctaatagttctaagatggaaatttttaagaacgagttttggagcccgagcagtgaagccaaagcgggggaaggccatagaaggaccatgagccaagaccttaggcagttgtccgactcccaaaggaccagcacatacgacaatgtacccagcctgcccgggtccccaggtgaggaagcctccgcgctgtcttcccaggcctgtgattcaaagggtgatactctggcctctcccaactccgaaaccggcccaggaaagaaaaattcgggggaggaggagattgacagcctgcagcgcatggtgcaggagttgcgcaaagagatcgagacccagaaacaaatgtacgaagagcagattaagaatctggaaaaggaaaactacgatgtatgggccaaggttgttcgcctgaacgaagaattggagaaggaaaagaagaaaagtgccgcgctggagatatctttaagaaatatggaacgctccagagaggatgtggagaaaaggaataaggccttggaagaggaggttaaagaattcgtgaagagtatgaaagaaccaaagactgaggcatag

SEQ ID NO: 64678 - DNA, 1776 bp, Artificial Sequence
  derived and/or modified sequence
atgagcctgggccagagcgcctgcctgttcctgagcatcgcccggagccggtctgtgatgactggagaacagatggctgcctttcacccatcttcaactccaaatcccctggaaagacccattaaaatgggttggcttaagaaacagagaagtattgtgaagaattggcagcagcgatacttcgtccttagggcgcaacagctgtattattacaaagatgaggaagatacaaagccacagggctgcatgtacctgcccggctgcacaatcaaagaaattgccactaatcccgaagaggctggaaaatttgtgtttgagataatccccgccagctgggaccaaaaccggatgggccaggattcgtatgtcctgatggcctcttcacaggcagagatggaggaatgggtgaaatttctgcgaagagttgccggcacaccctgtggcgccgtctttggacagaggcttgatgagacggtggcatacgagcagaagttcgggccccacttggtaccgattctggtagaaaagtgcgcagagtttatattggagcatggtagaaacgaggaaggaattttcagactccccggacaggataacctagttaaacagctgcgggacgccttcgatgcgggtgaacgaccctcattcgaccgggatacagatgttcacaccgttgcatctctgttgaagttgtacttacgagacctgcctgagccagtggttccctggagccagtacgagggcttcctgttgtgtgggcagctgaccaacgcggatgaggcgaaggcccaacaggaactcatgaagcaattgtccatccttccacgcgataactactctctgctgtcctacatatgccggtttctgcatgagatccaactgaattgcgccgttaacaaaatgtcagtggataatctcgccacggtgatcggagtgaaccttatccgttctaaggtagaagatccggctgtaatcatgcggggtaccccccaaattcagagagtgatgaccatgatgatcagagaccacgaggtccttttccctaaaagcaaagacatcccactgtcaccccccgctcagaaaaacgacccaaaaaaagcccccgtcgctagaagttcggtcgggtgggatgccacagaggatttgcgtatatccaggacggatagcttttcctctatgacttccgattcggatacgactagtcctaccggccaacagccctctgacgcttttcccgaagactcttctaaagtgcctcgggagaaacctggggactggaagatgcaatcaaggaagagaacgcagaccctgccaaacaggaagtgctttttgacctccgccttccagggagccaattcctcaaagatggagatttttaagaatgagttctggagtccatccagtgaggccaaggcaggggagggccaccggcggaccatgagccaggatctgcgtcagctgtccgatagtcagcggacctctacgtacgataacgtacccagtctgccagggtcgccgggcgaggaggcaagcgcactatcctcacaggcttgcgatagcaagggtgacactctagcctcaccaaactctgagacagggcccggcaaaaaaaactctggcgaggaggaaatcgactccttacagcggatggtgcaggagttgcggaaggagatcgagacgcagaagcagatgtacgaggagcagattaagaacctggagaaagagaattacgacgtctgggccaaagtagtccggccattccttagcgcaatctag

SEQ ID NO: 64679 - DNA, 1377 bp, Artificial Sequence
  derived and/or modified sequence
atgagcctgggccagagcgcctgcctgttcctgagcatcgcccggtcacgctccgtgatgaccggcgagcagatggctgctttccatccttcaagtacccccaacccacttgaacgcccaatcaagatgggctggttgaagaaacagcgcagcatagtgaaaaactggcaacaacgctatttcgtgctccgcgctcagcagttgtattactataaggatgaggaggacacgaaacctcagggatgtatgtacttaccagggtgcacaattaaggagattgctaccaacccggaggaagcgggtaaatttgtctttgagatcatacccgccagctgggaccagaacagaatggggcaggatagttacgtgcttatggctagcagccaagcggagatggaagagtgggtaaagttcttgcggagagtggccggcactccatgcggtgccgtcttcgggcaacgactggatgaaacagtcgcttacgaacagaagttcggcccccacctggtgcctattctagttgaaaaatgtgctgaattcatcctggagcacggacgtaacgaggaaggcatttttcggctgcctggtcaagacaatctggtcaagcaattgcgggatgctttcgatgctggggagcggccttccttcgaccgcgatacagacgttcataccgttgccagccttcttaagttgtacctgcgggacctgccggagccagtcgtgccctggtcacagtacgagggatttctgctgtgtggccagctgaccaacgcagacgaagcgaaggcccaacaagagctaatgaaacagttaagcatactgcctagagacaactattccctgctctcctatatctgtagattcttgcacgagatccagttgaactgtgccgtcaacaaaatgtccgtggacaacctggcgacagttattggcgtgaacttaatcagatctaaggtggaagatccagcagtcattatgcgaggcacccctcagatccaacgagttatgacaatgatgatcagagatcacgaagtgctgtttcctaagtctaaggatatacctctctccccaccggctcagaaaaatgaccccaagaaagcccctgtcgcaagaagttccgttggctgggatgcgactgaagacctgcgcatcagtagaaccgacagctttagttcgatggttagatgcagagaaccaagctgttttcactgggtgctgcccctcgtgcaggcaatcccgtgcaaggcatgtagtcgcgtggccatttggggcgttcttggggatgctgttgccgtaggtgccgctgctacagatagttcagagcacactctcaaggcatggccactgagtaaaagttctttctactggcacctgtag

SEQ ID NO: 64680 - DNA, 1893 bp, Artificial Sequence
  derived and/or modified sequence
atgagcctgggccagagcgcctgcctgttcctgagcatcgcccggtctcggagtgtgatgaccggggagcaaatggcagctttccatccttccagtacccctaaccccttagagcggcctatcaaaatggggtggctcaaaaagcaacgcagcatcgtcaagaattggcagcagagttattattacaaagacgaggaggataccaagccacagggttgtatgtacttgcctggatgtacaattaaggagatcgccacgaatcctgaggaggcaggaaaatttgtttttgagataatccccgcctcttgggaccagaatagaatgggccaagacagttacgtgctgatggcatcctcacaggcggaaatggaagaatgggtaaagtttttgcggagggtggctggaactccttgcggcgccgtgtttggtcaacgtctggatgaaaccgtagcctacgagcagaagttcggaccccatcttgtgccaattctggtggagaaatgcgcggagtttatccttgagcacggccggaatgaagagggaattttcaggctgccaggacaggacaacttagtgaagcagttacgcgacgcattcgatgccggggagcgcccctcgtttgaccgtgataccgacgtccacacggttgcatccctcctcaagctgtatctgcgggacctgcctgagccagtcgtgccttggagtcaatacgagggcttcctcctgtgcgggcagttaactaacgccgatgaggccaaggcccaacaggaattgatgaaacagctttccatcctcccgcgggacaattacagcttactcagttatatttgtcggttcctgcatgagattcaactgaactgcgcggtcaacaagatgagcgtcgacaacctggcaactgtgatcggcgtgaacctgatccgaagtaaggtcgaggaccccgccgtgataatgaggggtactccccaaattcaaagagtaatgacaatgatgatcagggaccatgaagtcctgttccctaagtctaaagacattcctctctccccgcccgcccagaagaacgaccccaagaaggctccggtggcccggagtagtgtgggatgggatgctaccgaagacctacggatttcaagaaccgactccttcagttctatgaccagcgattcagacaccacaagtcccaccgggcagcagccgtcggacgccttccctgaagacagctccaaagtgccaagagaaaaaccaggcgattggaaaatgcagagtcggaagagaacccaaacgctgcctaatcgcaagtgctttctgaccagtgccttccagggtgctaattcaagcaagatggaaatttttaaaaatgagttttggtccccttcgtccgaagctaaagcgggggaaggccaccgcagaaccatgtctcaggaccttaggcagttgtcagacagccaacggaccagcacttatgataacgtgcccagcctgcccggatcccctggagaggaagcgtcggcgctctcctcgcaggcatgtgatagcaaaggcgatacgttggcttctcccaactctgaaactggaccagggaaaaaaaactccggggaggaggagatagattctctccaaaggatggttcaggagctaaggaaggagatcgagacccagaaacagatgtatgaggagcagatcaagaacctcgagaaggagaactatgatgtctgggccaaggtagtcaggctcaacgaggagctggaaaaagaaaagaagaaatccgctgctttagagatttcgctgagaaacatggaacgttcccgcgaggacgttgaaaagcgcaataaggccctggaggaggaagttaaggagtttgtgaagtcaatgaaagaacccaaaactgaagcttag

SEQ ID NO: 64681 - DNA, 1920 bp, Artificial Sequence
  derived and/or modified sequence
atgtctctagggcagtcagcatgcctcttcctgtcaattgcccgaagtagaagcgtcatgaccggcgaacagatggcagcttttcatccgagctctaccccaaaccccctggagcgcccaataaaaatgggatggctcaaaaagcagcgctccattgtgaaaaattggcagcagaggtactttgtactgcgagctcagcaactatactattataaggacgaggaggacacaaaaccccagggatgtatgtacctaccgggatgcactattaaagagatcgcgacaaacccagaggaagcaggcaaatttgtgttcgagattattcctgcttcttgggaccaaaaccgcatggggcaagattcctatgtgttgatggccagtagtcaggcagagatggaggaatgggtaaagtttctgagacgcgtggcgggtacgccttgcggggctgtgtttggacagcgcctggatgaaacagtggcctatgaacagaaatttggaccacatctggtacctattttggtggaaaagtgcgcggaatttattctggagcacggccgaaatgaggaaggcatatttagactgccgggtcaagataacttagtgaagcaactcagagacgcgtttgacgctggagagagaccatctttcgatcgggacactgacgttcataccgtggccagtctgttgaagctctatctgagggacttgccagaaccagtggtaccgtggtcgcagtacgaaggctttttattgtgcggccagttaacaaacgcagatgaagctaaggctcagcaagaactcatgaagcagttatccatcctcccacgtgataactacagcctcctctcatatatatgtcgtttcctgcatgagatacagctgaactgcgccgtgaacaagatgtccgtcgacaatctggccactgtgatcggcgtgaacctcattcggtctaaggtggaggaccctgctgtcattatgcgaggtaccccacagatccagagagtgatgacaatgatgattcgggaccatgaggtgttgtttcccaagagtaaagatatccccctgtctccccctgctcagaaaaatgaccctaagaaggcccctgtggcacgatcatccgtggggtgggatgcaaccgaggacttaagaatctcaaggaccgactcattttcctcaatgacctcggattccgataccacgtccccgacaggccagcaaccctcagacgctttccccgaggactcttctaaggtgcctagggaaaagcccggtgactggaagatgcaaagtagaaagaggacacagactttgcccaataggaagtgttttctaacttccgcgtttcagggagccaattcatccaagatggagattttcaagaatgagttctggagtccctctagtgaagccaaagccggagagggccaccggaggaccatgtcccaggacctgaggcagctttctgacagtcagcgtaccagtacatatgataacgtgccaagccttcccggatcgccaggtgaggaggcgtctgcgctgagcagccaggcttgtgactctaaaggtgatactctagccagtccaaattcagagaccggtcccggaaagaaaaactcaggggaggaagaaattgacagtcttcagaggatggtacaggagcttaggaaggagatagagacacagaaacagatgtatgaagagcagataaagaacttggaaaaggagaactacgatgtctgggccaaggttgtgagactgaacgaagagcttgagaaagagaaaaagaaaagtgccgctctggagatctcactcaggaatatggaacgttctcgggaagacgtggagaagcggaacaaggctcttgaggaggaggtgaaggaatttgtgaaatctatgaaagagccaaagacggaagcttag

SEQ ID NO: 64682 - DNA, 1776 bp, Artificial Sequence
  derived and/or modified sequence
atgagccttggacaatcagcgtgtttgtttctctctatcgccaggagccggagtgtgatgactggcgaacagatggccgcattccatcccagcagtacccccaacccgttggagcgtccgataaaaatggggtggctcaagaagcagcgaagcattgttaaaaattggcagcagagatacttcgttttgagggcacaacaattgtactactataaggatgaggaagacacaaagcctcaggggtgtatgtaccttccgggttgtaccattaaggaaatcgctacgaaccctgaggaagcagggaagtttgtattcgaaatcattcccgcatcttgggaccagaatagaatgggccaggattcgtacgtgctcatggcgtcatcccaagcggagatggaagagtgggtaaaattcctcaggagggtcgccggtactccttgtggcgcagtgttcggccaacgcctcgatgagaccgttgcctacgaacagaagttcggcccacacctggtgcccatcctagtagaaaagtgcgctgaatttatcctggaacatggccgaaacgaagaaggaatcttcagactacctggacaggataatctggttaagcagctgcgagatgcatttgatgcaggagagaggccctccttcgatagagatacggatgtacacacagtcgcatcccttttgaaattgtatctgagggatcttcctgaacccgtcgtgccctggagccagtatgagggttttcttctatgcggacagctgaccaatgccgacgaggccaaagcccagcaggagctgatgaagcagctgagtatcctccccagagacaattactccctcttgtcatacatttgcagattcctccacgaaatacagctgaattgtgccgtgaacaagatgtccgtggacaacctggctacagttataggtgtcaatctgataaggagcaaagtcgaggatcccgctgtgataatgcggggaacgccccagattcagcgggtgatgacgatgatgattagggatcacgaagtcttgtttcccaaatctaaggacattcccctttccccgcctgcacagaagaatgacccaaagaaggcgccagtagcacggagctctgtcgggtgggacgcaaccgaggacctaaggatcagtcggaccgactcatttagctccatgacctctgatagtgacacgacatctccgaccggtcaacagccatccgatgcctttccagaggatagttccaaggtacccagagagaaaccgggagactggaagatgcaatctcgcaaacgcacccagacccttcccaatcgaaagtgctttcttacatctgcattccaaggggctaactcgagcaagatggagatcttcaaaaacgaattctggtccccctcatcagaggctaaagcaggagagggacaccgacgcaccatgtcacaggacttgcggcagttgagtgatagccaacggacctctacatacgataacgttccctccctgcctggcagcccaggtgaagaggcatctgcactgtccagccaggcctgcgattcgaaaggtgatactctggcctccccaaactccgaaaccggccctgggaaaaagaatagtggtgaagaagagattgactcattgcagagaatggtgcaggaactccggaaggaaatcgaaacccaaaaacaaatgtatgaagaacagattaagaatctggagaaggagaactacgacgtatgggctaaagtagtgagaccgtttctcagcgccatctag

SEQ ID NO: 64683 - DNA, 1377 bp, Artificial Sequence
  derived and/or modified sequence
atgagcctaggccagtcagcctgcttattcctgtccatagcccgatcccgatccgtcatgactggggagcagatggcggcatttcacccatccagtacgcctaacccattggagcgacccattaagatgggctggctgaaaaaacagcgttctattgtcaagaattggcaacagaggtactttgttctgagggcccagcaactctattattataaggatgaagaggatactaaaccccaaggctgcatgtatcttcctggatgtactatcaaagaaatcgctacaaatcccgaggaagcagggaaatttgttttcgaaatcattcccgctagttgggaccaaaaccgaatggggcaggattcgtacgtcctgatggcctcttcccaggcagaaatggaggaatgggtaaagtttttgcgcagagttgcaggaacgccctgcggggctgtgttcggtcagaggctcgatgagactgtggcatacgaacagaagtttgggcctcatttagtgcccatactcgtggagaagtgcgctgaatttatcttagagcacggaagaaatgaagaggggatcttcaggctgcccggtcaggacaacctggtgaaacagctgcgtgacgccttcgacgccggtgaacgccctagcttcgatagagatactgatgtccatactgttgcaagtctactcaagctgtacctgcgggaccttcctgagcctgtcgtgccctggagccagtacgaaggcttcttactttgcggccagctgaccaacgcagacgaagccaaggcccagcaggaactgatgaagcagctcagtattcttccccgagacaactacagcttattgtcatatatctgcagatttttacatgagatacagctgaactgcgccgttaataagatgagcgtggataatctggcaacggtaatcggcgtgaacctcatccgctccaaagtggaagatcccgctgtgatcatgcggggaactccgcagattcagcgcgttatgacgatgatgattcgcgatcacgaggttcttttccccaaatccaaggatattcctctctcacccccagctcaaaagaacgaccctaaaaaagccccagtggcccgaagcagtgttggctgggatgctaccgaagatctgcggattagcaggaccgattcgttcagctccatggtgcggtgccgagagcccagctgtttccactgggtgctgcctctggtgcaggctattccctgcaaagcctgcagcagagtcgccatatggggcgttttaggagatgctgtggccgttggcgcagctgccacagatagttctgagcacacactgaaagcatggcctctatccaagagttctttctactggcacctttag

SEQ ID NO: 64684 - DNA, 1893 bp, Artificial Sequence
  derived and/or modified sequence
atgagtttgggccagtccgcctgccttttcttaagtatcgcccgttcaagaagtgtcatgactggtgaacaaatggctgctttccacccatcatccactcctaacccccttgagagaccaatcaagatgggctggctcaaaaaacagcgcagcatcgtgaagaattggcagcagtcctactactataaggatgaggaagacaccaagccccaaggctgcatgtatctccccggttgtacaattaaagagattgcaacaaatcctgaggaagccggaaaatttgtgtttgaaataatacccgctagctgggatcaaaatcggatggggcaggacagctatgtgctcatggccagttcacaggctgaaatggaagagtgggttaaattccttcggagagtggcgggaactccttgtggggcagttttcggtcagcggctcgatgagacagttgcctatgagcagaagttcggccctcacttggtccccatcctcgtcgagaaatgtgccgagtttattctggaacacggaaggaatgaggaaggcatcttccgcctccccggacaagacaacctggtcaagcaattgcgcgatgcctttgatgccggagagcgaccctcattcgacagggacaccgatgtacacacggtggcaagcttgcttaagctctacctccgggacttacccgagcccgtggtaccatggtcccagtacgaaggatttctcctgtgcgggcagctgacaaacgctgatgaggccaaggcacaacaggaactaatgaagcaactcagtatcttaccgcgtgataactactcccttttgagttatatctgccggttcctccacgagatacagttgaactgcgctgtcaacaaaatgagcgtggataacctcgccacagtgattggtgtgaacctcatccgttcgaaggtagaagatcccgctgtcattatgagaggtacccctcagatccagcgagtgatgactatgatgataagggaccacgaggtgctcttccctaaatctaaggatatccccctgagccctcccgcacagaagaacgacccgaagaaggcccctgtcgcccgaagtagcgttgggtgggacgccaccgaagacctgaggatctcaaggaccgactccttttcatccatgacgtctgatagcgatacaactagccccactggccagcagccatccgatgcgtttcccgaggattctagcaaagtacctcgggaaaagcccggtgattggaaaatgcagtccagaaagcggacacaaacactgccgaaccgcaagtgtttcctcactagtgcattccaaggtgcaaatagtagtaagatggaaattttcaaaaacgaattttggtcacccagtagcgaggcaaaagcgggtgagggtcacaggagaaccatgtcccaagacctcaggcagctgtccgactcgcaaaggaccagcacctatgacaacgtgccttctcttcctgggtccccgggagaggaagctagcgctctgagttcccaggcctgtgactcgaagggcgacaccctagcttctcccaatagcgagacaggcccaggcaagaaaaactcaggagaggaggaaatcgacagtcttcaacggatggtccaggagcttaggaaagaaatcgagactcaaaagcagatgtatgaagagcagattaagaacctggagaaggagaattatgacgtgtgggccaaggtggtacggctgaacgaagagttagaaaaagaaaagaaaaaatctgctgcgctggagatcagtctacggaatatggagcgctcccgcgaggatgttgagaaaaggaacaaagccctggaggaggaagtcaaggagtttgtgaagagtatgaaggagcctaaaactgaagcgtag

SEQ ID NO: 64685 - DNA, 2939 bp, Artificial Sequence
  derived and/or modified sequence
ccgagccttcagagtgaggcattattttctcctctctcttgtcagatactgactcccacgcaggaaaaaggaagcaccttttgtcagatgctgtggccacttcctcttcagaaggctccagccaacctttcggtttgcagaatgacggggcccgccgcggtgccggactgcctgtgcacggggccaccgactgcagcctgggttttattcttggcctggccctgaccgggagctggcccctcggctgcttctctggctcgggggggactttctctggctcagatccggacccctgaactggacctggttgtcgtccccccgcttctcagccccctctggggttcctctctcctctccgcccactctttgctcactgccccatgtccctcggtcagtcggcctgtctgttcctctctatagctcggtcaaggagtgtgatgactggcgagcagatggctgccttccatccatcgtccacccccaacccgctggagaggcccatcaagatgggctggctgaagaagcagaggtccatcgtgaagaactggcagcagaggtactttgtgctgagggcgcagcagctctactactacaaggatgaagaggacacgaagccccagggctgcatgtatctaccaggatgtacaatcaaggagatcgccacaaacccagaagaagctgggaagtttgtctttgaaatcattccagcctcatgggaccagaatcgcatgggacaggactcctatgtcctcatggccagctctcaggcggagatggaggagtgggttaaattcctcaggagagttgctggcacaccctgtggagcagtgtttggccagcgcttggatgagactgtggcctatgaacagaaattcggcccccatctggtgcccatcctggtggagaaatgtgcagagttcatcctggagcacggccggaatgaagagggcatcttccgtctgcctgggcaggacaacctggtgaagcagctgagagacgcttttgatgctggggagcggccctcctttgacagagacacagatgtgcacactgtggcttccctgttaaagctctacctccgagacctcccagagcccgtggttccctggagccagtacgaagggttcctgctctgtgggcagctcacgaatgcggatgaggcaaaggctcagcaggagttgatgaagcagctctccatccttcctcgtgacaactatagtctcctgagctacatctgcaggttcctacatgaaatacagctgaactgtgctgttaacaagatgagtgtggacaacctggctactgtgattggtgtgaatctcatcaggtcgaaggtcgaagaccctgccgtgatcatgagagggactcctcagatccaaagagtgatgactatgatgatcagagaccatgaagtcctcttccccaagtccaaggatatacccctgtcaccccctgcccagaaaaatgaccccaagaaagctccagtggcccgaagctctgtaggctgggatgccactgaagacctccgaatttctaggacagacagcttcagtagcatgacaagcgactctgatacaaccagccccaccggacagcagccgagcgatgcgtttccggaggacagcagcaaagtacccagggaaaagccaggagactggaaaatgcaatctcgtaaaaggactcaaacactccctaaccggaaatgtttcttgacatcagcttttcagggtgccaacagcagcaaaatggagatctttaaaaatgaattctggtcgccttcctcagaggctaaggcaggggaagggcacaggagaacgatgtctcaagacttgcgccaactttctgactcccaacggacttccacctacgataacgtcccttccctgccagggtcccctggggaggaagccagtgcactctcttcccaagcctgtgactccaagggagatactcttgccagtccaaactctgaaactgggcctggaaaaaagaactctggagaagaggaaattgattctttgcagaggatggtccaagagctacgaaaggaaatagaaacacagaagcaaatgtatgaggaacagattaaaaaccttgagaaggaaaattatgacgtttgggctaaagtggtgaggctcaatgaagaactggagaaggaaaagaagaagtctgcagccctagagatcagcctccgcaacatggagcgctcccgggaggatgttgagaagaggaacaaggccttggaagaagaagtcaaggaatttgtcaaatccatgaaggaacccaagaccgaggcttaagggtcccaggagtactgcagggacagccccagagaggcccaactctggcccctttctcagtgctatctgatgacggggaaacaaaattattctctgagagggaaaggacatttgagggaaacatcaaatttccccataaataaatgaatggagtttgcaggaaggtgagggtgagcagagatgtgtgtggacatctctgaccatccatcgctgtattcaaatggattgttttattccattctggtctcaggcatgaccacgtccagtgaagacatttgaggcagcacatctcaggacccaggcaatagactggccccaactcaggctggactaaggtgtgattaattctttgttttttgtgtggaacagctcaccttgtcagacagcctcagggcatctctgagacacaggggcagaaaatgacattcatcttttgagtcctcatccatggagtgctgtgtttggggggctgcatctgctgaagcgagaaccccattctgccaccccaccaggatgcccattctccaggacttctccaacttactattagactaaaccagaacaagcaacaaactgtatttatgcaagcaaaattgatgagaaaattatattcaaataaagcaaaaattaaaaaaaaaa

SEQ ID NO: 64686 - DNA, 2156 bp, Artificial Sequence
  derived and/or modified sequence
ccgagccttcagagtgaggcattattttctcctctctcttgtcagatactgactcccacgcaggaaaaaggaagcaccttttgtcagatgctgtggccacttcctcttcagaaggctccagccaacctttcggtttgcagaatgacggggcccgccgcggtgccggactgcctgtgcacggggccaccgactgcagcctgggttttattcttggcctggccctgaccgggagctggcccctcggctgcttctctggctcgggggggactttctctggctcagatccggacccctgaactggacctggttgtcgtccccccgcttctcagccccctctggggttcctctctcctctccgcccactctttgctcactgccccatgtccctcggtcagtcggcctgtctgttcctctctatagctcggtcaaggagtgtgatgactggcgagcagatggctgccttccatccatcgtccacccccaacccgctggagaggcccatcaagatgggctggctgaagaagcagaggtccatcgtgaagaactggcagcagaggtactttgtgctgagggcgcagcagctctactactacaaggatgaagaggacacgaagccccagggctgcatgtatctaccaggatgtacaatcaaggagatcgccacaaacccagaagaagctgggaagtttgtctttgaaatcattccagcctcatgggaccagaatcgcatgggacaggactcctatgtcctcatggccagctctcaggcggagatggaggagtgggttaaattcctcaggagagttgctggcacaccctgtggagcagtgtttggccagcgcttggatgagactgtggcctatgaacagaaattcggcccccatctggtgcccatcctggtggagaaatgtgcagagttcatcctggagcacggccggaatgaagagggcatcttccgtctgcctgggcaggacaacctggtgaagcagctgagagacgcttttgatgctggggagcggccctcctttgacagagacacagatgtgcacactgtggcttccctgttaaagctctacctccgagacctcccagagcccgtggttccctggagccagtacgaagggttcctgctctgtgggcagctcacgaatgcggatgaggcaaaggctcagcaggagttgatgaagcagctctccatccttcctcgtgacaactatagtctcctgagctacatctgcaggttcctacatgaaatacagctgaactgtgctgttaacaagatgagtgtggacaacctggctactgtgattggtgtgaatctcatcaggtcgaaggtcgaagaccctgccgtgatcatgagagggactcctcagatccaaagagtgatgactatgatgatcagagaccatgaagtcctcttccccaagtccaaggatatacccctgtcaccccctgcccagaaaaatgaccccaagaaagctccagtggcccgaagctctgtaggctgggatgccactgaagacctccgaatttctaggacagacagcttcagtagcatgacaagcgactctgatacaaccagccccaccggacagcagccgagcgatgcgtttccggaggacagcagcaaagtacccagggaaaagccaggagactggaaaatgcaatctcgtaaaaggactcaaacactccctaaccggaaatgtttcttgacatcagcttttcagggtgccaacagcagcaaaatggagatctttaaaaatgaattctggtcgccttcctcagaggctaaggcaggggaagggcacaggagaacgatgtctcaagacttgcgccaactttctgactcccaacggacttccacctacgataacgtcccttccctgccagggtcccctggggaggaagccagtgcactctcttcccaagcctgtgactccaagggagatactcttgccagtccaaactctgaaactgggcctggaaaaaagaactctggagaagaggaaattgattctttgcagaggatggtccaagagctacgaaaggaaatagaaacacagaagcaaatgtatgaggaacagattaaaaaccttgagaaggaaaattatgacgtttgggctaaagtggtgaggccctttctcagtgctatctga

SEQ ID NO: 64687 - DNA, 1843 bp, Artificial Sequence
  derived and/or modified sequence
gaatgacggggcccgccgcggtgccggactgcctgtgcacggggccaccgactgcagcctgggttttattcttggcctggccctgaccgggagctggcccctcggctgcttctctggctcgggggggactttctctggctcagatccggacccctgaactggacctggttgtcgtccccccgcttctcagccccctctggggttcctctctcctctccgcccactctttgctcactgccccatgtccctcggtcagtcggcctgtctgttcctctctatagctcggtcaaggagtgtgatgactggcgagcagatggctgccttccatccatcgtccacccccaacccgctggagaggcccatcaagatgggctggctgaagaagcagaggtccatcgtgaagaactggcagcagaggtactttgtgctgagggcgcagcagctctactactacaaggatgaagaggacacgaagccccagggctgcatgtatctaccaggatgtacaatcaaggagatcgccacaaacccagaagaagctgggaagtttgtctttgaaatcattccagcctcatgggaccagaatcgcatgggacaggactcctatgtcctcatggccagctctcaggcggagatggaggagtgggttaaattcctcaggagagttgctggcacaccctgtggagcagtgtttggccagcgcttggatgagactgtggcctatgaacagaaattcggcccccatctggtgcccatcctggtggagaaatgtgcagagttcatcctggagcacggccggaatgaagagggcatcttccgtctgcctgggcaggacaacctggtgaagcagctgagagacgcttttgatgctggggagcggccctcctttgacagagacacagatgtgcacactgtggcttccctgttaaagctctacctccgagacctcccagagcccgtggttccctggagccagtacgaagggttcctgctctgtgggcagctcacgaatgcggatgaggcaaaggctcagcaggagttgatgaagcagctctccatccttcctcgtgacaactatagtctcctgagctacatctgcaggttcctacatgaaatacagctgaactgtgctgttaacaagatgagtgtggacaacctggctactgtgattggtgtgaatctcatcaggtcgaaggtcgaagaccctgccgtgatcatgagagggactcctcagatccaaagagtgatgactatgatgatcagagaccatgaagtcctcttccccaagtccaaggatatacccctgtcaccccctgcccagaaaaatgaccccaagaaagctccagtggcccgaagctctgtaggctgggatgccactgaagacctccgaatttctaggacagacagcttcagtagcatggtaaggtgcagagaaccttcctgcttccattgggttcttcctttagtccaggccatcccatgtaaggcctgctctcgggtggcaatttggggagttttaggtgatgcagtggcagtgggcgctgctgctacagactcatctgaacacaccttgaaagcctggcctctttccaaatctagtttctattggcatctttgaggggggtgagtgacaagtgtgccaatcacccagtgactgagcaatgaggtcctcactgaagcccactctgaaagagagactcaaatacagtccagagaagttcagtgggaaaaatgtatacaacattgtaaatgttttggtcagaattgttgaaaattctgggtgaacgtccagagaaaactggtttcctgctaacccatgaaacgtgattcctttctcagagta

SEQ ID NO: 64688 - DNA, 2515 bp, Artificial Sequence
  derived and/or modified sequence
atgtccctcggtcagtcggcctgtctgttcctctctatagctcggtcaaggagtgtgatgactggcgagcagatggctgccttccatccatcgtccacccccaacccgctggagaggcccatcaagatgggctggctgaagaagcagaggtccatcgtgaagaactggcagcagagctactactacaaggatgaagaggacacgaagccccagggctgcatgtatctaccaggatgtacaatcaaggagatcgccacaaacccagaagaagctgggaagtttgtctttgaaatcattccagcctcatgggaccagaatcgcatgggacaggactcctatgtcctcatggccagctctcaggcggagatggaggagtgggttaaattcctcaggagagttgctggcacaccctgtggagcagtgtttggccagcgcttggatgagactgtggcctatgaacagaaattcggcccccatctggtgcccatcctggtggagaaatgtgcagagttcatcctggagcacggccggaatgaagagggcatcttccgtctgcctgggcaggacaacctggtgaagcagctgagagacgcttttgatgctggggagcggccctcctttgacagagacacagatgtgcacactgtggcttccctgttaaagctctacctccgagacctcccagagcccgtggttccctggagccagtacgaagggttcctgctctgtgggcagctcacgaatgcggatgaggcaaaggctcagcaggagttgatgaagcagctctccatccttcctcgtgacaactatagtctcctgagctacatctgcaggttcctacatgaaatacagctgaactgtgctgttaacaagatgagtgtggacaacctggctactgtgattggtgtgaatctcatcaggtcgaaggtcgaagaccctgccgtgatcatgagagggactcctcagatccaaagagtgatgactatgatgatcagagaccatgaagtcctcttccccaagtccaaggatatacccctgtcaccccctgcccagaaaaatgaccccaagaaagctccagtggcccgaagctctgtaggctgggatgccactgaagacctccgaatttctaggacagacagcttcagtagcatgacaagcgactctgatacaaccagccccaccggacagcagccgagcgatgcgtttccggaggacagcagcaaagtacccagggaaaagccaggagactggaaaatgcaatctcgtaaaaggactcaaacactccctaaccggaaatgtttcttgacatcagcttttcagggtgccaacagcagcaaaatggagatctttaaaaatgaattctggtcgccttcctcagaggctaaggcaggggaagggcacaggagaacgatgtctcaagacttgcgccaactttctgactcccaacggacttccacctacgataacgtcccttccctgccagggtcccctggggaggaagccagtgcactctcttcccaagcctgtgactccaagggagatactcttgccagtccaaactctgaaactgggcctggaaaaaagaactctggagaagaggaaattgattctttgcagaggatggtccaagagctacgaaaggaaatagaaacacagaagcaaatgtatgaggaacagattaaaaaccttgagaaggaaaattatgacgtttgggctaaagtggtgaggctcaatgaagaactggagaaggaaaagaagaagtctgcagccctagagatcagcctccgcaacatggagcgctcccgggaggatgttgagaagaggaacaaggccttggaagaagaagtcaaggaatttgtcaaatccatgaaggaacccaagaccgaggcttaagggtcccaggagtactgcagggacagccccagagaggcccaactctggcccctttctcagtgctatctgatgacggggaaacaaaattattctctgagagggaaaggacatttgagggaaacatcaaatttccccataaataaatgaatggagtttgcaggaaggtgagggtgagcagagatgtgtgtggacatctctgaccatccatcgctgtattcaaatggattgttttattccattctggtctcaggcatgaccacgtccagtgaagacatttgaggcagcacatctcaggacccaggcaatagactggccccaactcaggctggactaaggtgtgattaattctttgttttttgtgtggaacagctcaccttgtcagacagcctcagggcatctctgagacacaggggcagaaaatgacattcatcttttgagtcctcatccatggagtgctgtgtttggggggctgcatctgctgaagcgagaaccccattctgccaccccaccaggatgcccattctccaggacttctccaacttactattagactaaaccagaacaagcaacaaactgtatttatgcaagcaaaattgatgagaaaattatattcaaataaagc

SEQ ID NO: 64689 - DNA, 1920 bp, Artificial Sequence
  derived and/or modified sequence
atgagcctgggccagagcgcctgcctgttcctgagcatcgccagaagcagaagcgtgatgaccggcgagcagatggccgccttccaccccagcagcacccccaaccccctggagagacccatcaagatgggctggctgaagaagcagagaagcatcgtgaagaactggcagcagagatacttcgtgctgagagcccagcagctgtactactacaaggacgaggaggacaccaagccccagggctgcatgtacctgcccggctgcaccatcaaggagatcgccaccaaccccgaggaggccggcaagttcgtgttcgagatcatccccgccagctgggaccagaacagaatgggccaggacagctacgtgctgatggccagcagccaggccgagatggaggagtgggtgaagttcctgagaagagtggccggcaccccctgcggcgccgtgttcggccagagactggacgagaccgtggcctacgagcagaagttcggcccccacctggtgcccatcctggtggagaagtgcgccgagttcatcctggagcacggcagaaacgaggagggcatcttcagactgcccggccaggacaacctggtgaagcagctgagagacgccttcgacgccggcgagagacccagcttcgacagagacaccgacgtgcacaccgtggccagcctgctgaagctgtacctgagagacctgcccgagcccgtggtgccctggagccagtacgagggcttcctgctgtgcggccagctgaccaacgccgacgaggccaaggcccagcaggagctgatgaagcagctgagcatcctgcccagagacaactacagcctgctgagctacatctgcagattcctgcacgagatccagctgaactgcgccgtgaacaagatgagcgtggacaacctggccaccgtgatcggcgtgaacctgatcagaagcaaggtggaggaccccgccgtgatcatgagaggcaccccccagatccagagagtgatgaccatgatgatcagagaccacgaggtgctgttccccaagagcaaggacatccccctgagcccccccgcccagaagaacgaccccaagaaggcccccgtggccagaagcagcgtgggctgggacgccaccgaggacctgagaatcagcagaaccgacagcttcagcagcatgaccagcgacagcgacaccaccagccccaccggccagcagcccagcgacgccttccccgaggacagcagcaaggtgcccagagagaagcccggcgactggaagatgcagagcagaaagagaacccagaccctgcccaacagaaagtgcttcctgaccagcgccttccagggcgccaacagcagcaagatggagatcttcaagaacgagttctggagccccagcagcgaggccaaggccggcgagggccacagaagaaccatgagccaggacctgagacagctgagcgacagccagagaaccagcacctacgacaacgtgcccagcctgcccggcagccccggcgaggaggccagcgccctgagcagccaggcctgcgacagcaagggcgacaccctggccagccccaacagcgagaccggccccggcaagaagaacagcggcgaggaggagatcgacagcctgcagagaatggtgcaggagctgagaaaggagatcgagacccagaagcagatgtacgaggagcagatcaagaacctggagaaggagaactacgacgtgtgggccaaggtggtgagactgaacgaggagctggagaaggagaagaagaagagcgccgccctggagatcagcctgagaaacatggagagaagcagagaggacgtggagaagagaaacaaggccctggaggaggaggtgaaggagttcgtgaagagcatgaaggagcccaagaccgaggcctag

SEQ ID NO: 64690 - DNA, 1776 bp, Artificial Sequence
  derived and/or modified sequence
atgagcctgggccagagcgcctgcctgttcctgagcatcgccagaagcagaagcgtgatgaccggcgagcagatggccgccttccaccccagcagcacccccaaccccctggagagacccatcaagatgggctggctgaagaagcagagaagcatcgtgaagaactggcagcagagatacttcgtgctgagagcccagcagctgtactactacaaggacgaggaggacaccaagccccagggctgcatgtacctgcccggctgcaccatcaaggagatcgccaccaaccccgaggaggccggcaagttcgtgttcgagatcatccccgccagctgggaccagaacagaatgggccaggacagctacgtgctgatggccagcagccaggccgagatggaggagtgggtgaagttcctgagaagagtggccggcaccccctgcggcgccgtgttcggccagagactggacgagaccgtggcctacgagcagaagttcggcccccacctggtgcccatcctggtggagaagtgcgccgagttcatcctggagcacggcagaaacgaggagggcatcttcagactgcccggccaggacaacctggtgaagcagctgagagacgccttcgacgccggcgagagacccagcttcgacagagacaccgacgtgcacaccgtggccagcctgctgaagctgtacctgagagacctgcccgagcccgtggtgccctggagccagtacgagggcttcctgctgtgcggccagctgaccaacgccgacgaggccaaggcccagcaggagctgatgaagcagctgagcatcctgcccagagacaactacagcctgctgagctacatctgcagattcctgcacgagatccagctgaactgcgccgtgaacaagatgagcgtggacaacctggccaccgtgatcggcgtgaacctgatcagaagcaaggtggaggaccccgccgtgatcatgagaggcaccccccagatccagagagtgatgaccatgatgatcagagaccacgaggtgctgttccccaagagcaaggacatccccctgagcccccccgcccagaagaacgaccccaagaaggcccccgtggccagaagcagcgtgggctgggacgccaccgaggacctgagaatcagcagaaccgacagcttcagcagcatgaccagcgacagcgacaccaccagccccaccggccagcagcccagcgacgccttccccgaggacagcagcaaggtgcccagagagaagcccggcgactggaagatgcagagcagaaagagaacccagaccctgcccaacagaaagtgcttcctgaccagcgccttccagggcgccaacagcagcaagatggagatcttcaagaacgagttctggagccccagcagcgaggccaaggccggcgagggccacagaagaaccatgagccaggacctgagacagctgagcgacagccagagaaccagcacctacgacaacgtgcccagcctgcccggcagccccggcgaggaggccagcgccctgagcagccaggcctgcgacagcaagggcgacaccctggccagccccaacagcgagaccggccccggcaagaagaacagcggcgaggaggagatcgacagcctgcagagaatggtgcaggagctgagaaaggagatcgagacccagaagcagatgtacgaggagcagatcaagaacctggagaaggagaactacgacgtgtgggccaaggtggtgagacccttcctgagcgccatctag

SEQ ID NO: 64691 - DNA, 1377 bp, Artificial Sequence
  derived and/or modified sequence
atgagcctgggccagagcgcctgcctgttcctgagcatcgccagaagcagaagcgtgatgaccggcgagcagatggccgccttccaccccagcagcacccccaaccccctggagagacccatcaagatgggctggctgaagaagcagagaagcatcgtgaagaactggcagcagagatacttcgtgctgagagcccagcagctgtactactacaaggacgaggaggacaccaagccccagggctgcatgtacctgcccggctgcaccatcaaggagatcgccaccaaccccgaggaggccggcaagttcgtgttcgagatcatccccgccagctgggaccagaacagaatgggccaggacagctacgtgctgatggccagcagccaggccgagatggaggagtgggtgaagttcctgagaagagtggccggcaccccctgcggcgccgtgttcggccagagactggacgagaccgtggcctacgagcagaagttcggcccccacctggtgcccatcctggtggagaagtgcgccgagttcatcctggagcacggcagaaacgaggagggcatcttcagactgcccggccaggacaacctggtgaagcagctgagagacgccttcgacgccggcgagagacccagcttcgacagagacaccgacgtgcacaccgtggccagcctgctgaagctgtacctgagagacctgcccgagcccgtggtgccctggagccagtacgagggcttcctgctgtgcggccagctgaccaacgccgacgaggccaaggcccagcaggagctgatgaagcagctgagcatcctgcccagagacaactacagcctgctgagctacatctgcagattcctgcacgagatccagctgaactgcgccgtgaacaagatgagcgtggacaacctggccaccgtgatcggcgtgaacctgatcagaagcaaggtggaggaccccgccgtgatcatgagaggcaccccccagatccagagagtgatgaccatgatgatcagagaccacgaggtgctgttccccaagagcaaggacatccccctgagcccccccgcccagaagaacgaccccaagaaggcccccgtggccagaagcagcgtgggctgggacgccaccgaggacctgagaatcagcagaaccgacagcttcagcagcatggtgagatgcagagagcccagctgcttccactgggtgctgcccctggtgcaggccatcccctgcaaggcctgcagcagagtggccatctggggcgtgctgggcgacgccgtggccgtgggcgccgccgccaccgacagcagcgagcacaccctgaaggcctggcccctgagcaagagcagcttctactggcacctgtag

SEQ ID NO: 64692 - DNA, 1893 bp, Artificial Sequence
  derived and/or modified sequence
atgagcctgggccagagcgcctgcctgttcctgagcatcgccagaagcagaagcgtgatgaccggcgagcagatggccgccttccaccccagcagcacccccaaccccctggagagacccatcaagatgggctggctgaagaagcagagaagcatcgtgaagaactggcagcagagctactactacaaggacgaggaggacaccaagccccagggctgcatgtacctgcccggctgcaccatcaaggagatcgccaccaaccccgaggaggccggcaagttcgtgttcgagatcatccccgccagctgggaccagaacagaatgggccaggacagctacgtgctgatggccagcagccaggccgagatggaggagtgggtgaagttcctgagaagagtggccggcaccccctgcggcgccgtgttcggccagagactggacgagaccgtggcctacgagcagaagttcggcccccacctggtgcccatcctggtggagaagtgcgccgagttcatcctggagcacggcagaaacgaggagggcatcttcagactgcccggccaggacaacctggtgaagcagctgagagacgccttcgacgccggcgagagacccagcttcgacagagacaccgacgtgcacaccgtggccagcctgctgaagctgtacctgagagacctgcccgagcccgtggtgccctggagccagtacgagggcttcctgctgtgcggccagctgaccaacgccgacgaggccaaggcccagcaggagctgatgaagcagctgagcatcctgcccagagacaactacagcctgctgagctacatctgcagattcctgcacgagatccagctgaactgcgccgtgaacaagatgagcgtggacaacctggccaccgtgatcggcgtgaacctgatcagaagcaaggtggaggaccccgccgtgatcatgagaggcaccccccagatccagagagtgatgaccatgatgatcagagaccacgaggtgctgttccccaagagcaaggacatccccctgagcccccccgcccagaagaacgaccccaagaaggcccccgtggccagaagcagcgtgggctgggacgccaccgaggacctgagaatcagcagaaccgacagcttcagcagcatgaccagcgacagcgacaccaccagccccaccggccagcagcccagcgacgccttccccgaggacagcagcaaggtgcccagagagaagcccggcgactggaagatgcagagcagaaagagaacccagaccctgcccaacagaaagtgcttcctgaccagcgccttccagggcgccaacagcagcaagatggagatcttcaagaacgagttctggagccccagcagcgaggccaaggccggcgagggccacagaagaaccatgagccaggacctgagacagctgagcgacagccagagaaccagcacctacgacaacgtgcccagcctgcccggcagccccggcgaggaggccagcgccctgagcagccaggcctgcgacagcaagggcgacaccctggccagccccaacagcgagaccggccccggcaagaagaacagcggcgaggaggagatcgacagcctgcagagaatggtgcaggagctgagaaaggagatcgagacccagaagcagatgtacgaggagcagatcaagaacctggagaaggagaactacgacgtgtgggccaaggtggtgagactgaacgaggagctggagaaggagaagaagaagagcgccgccctggagatcagcctgagaaacatggagagaagcagagaggacgtggagaagagaaacaaggccctggaggaggaggtgaaggagttcgtgaagagcatgaaggagcccaagaccgaggcctag

SEQ ID NO: 64693 - protein, 606 aa, Artificial Sequence
  derived and/or modified sequence
MSLKLPRNWDFNLKVEAAKIARSRSVMTGEQMAAFHPSSTPNPLERPIKMGWLKKQRSIVKNWQQRYFVLRAQQLYYYKDEEDTKPQGCMYLPGCTIKEIATNPEEAGKFVFEIIPVFGQRLDETVAYEQKFGPHLVPILVEKCAEFILEHGRNEEGIFRLPGQDNLVKQLRDAFDAGERPSFDRDTDVHTVASLLKLYLRDLPEPVVPWSQYEGFLLCGQLTNADEAKAQQELMKQLSILPRDNYSLLSYICRFLHEIQLNCAVNKMSVDNLATVIGVNLIRSKVEDPAVIMRGTPQIQRVMTMMIRDHEVLFPKSKDIPLSPPAQKNDPKKAPVARSSVGWDATEDLRISRTDSFSSMTSDSDTTSPTGQQPSDAFPEDSSKVPREKPGDWKMQSRKRTQTLPNRKCFLTSAFQGANSSKMEIFKNEFWSPSSEAKAGEGHRRTMSQDLRQLSDSQRTSTYDNVPSLPGSPGEEASALSSQACDSKGDTLASPNSETGPGKKNSGEEEIDSLQRMVQELRKEIETQKQMYEEQIKNLEKENYDVWAKVVRLNEELEKEKKKSAALEISLRNMERSREDVEKRNKALEEEVKEFVKSMKEPKTEA

SEQ ID NO: 64694 - DNA, 1821 bp, Artificial Sequence
  derived and/or modified sequence
atgagtttgaagttacccaggaattgggacttcaatctgaaggtcgaggccgccaagattgcacgatcccgttctgtaatgactggcgaacagatggcggcctttcacccaagcagcacacccaatccgctcgagcggcctattaaaatggggtggttgaagaagcaacggagcattgtgaagaactggcagcagcgctattttgtcctgagggctcagcagctctactattataaggacgaagaagacaccaaacctcagggctgtatgtacctccccggctgtacgataaaggagatcgctaccaaccccgaagaagcaggtaagttcgtgtttgagattatccctgtattcggacagcggttggacgagactgtggcctacgagcagaagtttgggccccatctggttcccattttagttgagaaatgcgcagaatttatcttggaacacggccgaaacgaggagggcattttccggcttcccggacaggacaatttggtgaagcagctgagggacgcatttgatgcaggcgagcgacccagctttgaccgcgacaccgacgtgcatacggtggcgtcgcttctgaagctgtatctgagagacttgcctgaacccgtagtgccttggtcccaatacgagggattcctcctgtgcggacaactgacaaacgctgacgaggccaaggcacaacaggaactgatgaagcagttgagtatactgccccgagacaactattctctgctgtcctacatatgtagattcctgcatgaaatacagctgaactgcgccgtcaataaaatgtcagtggacaacctcgccacagttatcggcgtgaatctcatccggtccaaagtagaggatcccgcagtaattatgcgcgggaccccccagatccagcgcgtgatgacgatgatgatcagggatcatgaggtgttgtttcccaagtccaaagatatcccactcagtcctcctgctcagaaaaatgacccgaagaaagccccggtggctaggtcatccgtcggctgggacgccaccgaggacttgcggatcagtcgtaccgacagcttcagtagcatgacaagcgactctgatacaactagccccaccggccagcaaccgtctgatgccttccccgaggacagcagcaaagttccacgtgaaaagcctggggattggaaaatgcaaagccggaagcgaactcaaaccctgccaaatcgtaagtgctttttaacttccgcctttcaaggagccaatagcagcaagatggagatctttaagaacgagttttggtctccttcttcagaagcaaaagctggcgaagggcataggcggactatgtctcaggatctgaggcaactgagcgactcccagcgcaccagcacctatgataatgttcccagtttacccgggtctcccggtgaagaagcttccgccctctcttcccaggcttgcgactccaagggcgataccctggcatcgcctaattctgaaactggtcctggaaaaaaaaacagtggagaggaggaaatagactctctccagaggatggtgcaggagctccgcaaagaaatagaaacccaaaagcagatgtacgaagaacagatcaagaacctcgaaaaggagaactacgatgtatgggcaaaagtggtcagactcaacgaagagctcgagaaagagaagaagaagtccgctgccttggagatctctttgcggaatatggagcgatctcgcgaggatgtagagaagcggaataaagccctggaggaggaggtgaaggaattcgtgaaatccatgaaggagccaaagactgaagcctag

SEQ ID NO: 64695 - DNA, 1821 bp, Artificial Sequence
  derived and/or modified sequence
atgagcctgaagctgcccaggaactgggacttcaacctgaaggtggaggccgccaagatcgcccggagccgctctgtgatgaccggggagcagatggccgccttccaccccagcagcacccccaaccccctggagcggcccatcaagatgggctggctgaagaagcagaggagcatcgtgaagaactggcagcagcgctactttgtgctgcgggcccagcagctgtactactacaaggatgaggaggacaccaagccccagggctgcatgtacctgcccggctgcaccatcaaggagatcgccaccaaccctgaggaggccggcaagtttgtgtttgagatcatccctgtgtttggccagaggctggatgaaacagtggcctatgagcagaagtttggcccccacctggtgcccatcctggtggagaagtgtgccgagttcatcctggagcacggcagaaatgaggagggcatcttccggctgcccggccaggacaacctggtgaagcagctgagagatgcctttgatgctggggagcggcccagctttgaccgggacacagatgtgcacacagtggccagcctgctgaagctgtacctgcgggacctgcctgagcctgtggtgccctggagccagtatgagggcttcctgctgtgtggccagctgaccaatgctgatgaggccaaggcccagcaggagctgatgaagcagctgagcatcctgccccgggacaactacagcctgctgagctacatctgccgcttcctgcacgagatccagctgaactgtgctgtgaacaagatgtctgtggacaacctggccaccgtgattggagtgaacctgatccgcagcaaggtggaggaccctgctgtgatcatgaggggcaccccccagatccagagggtgatgaccatgatgatccgggaccacgaggtgctcttccccaagagcaaggacatccccctgagccccccagcccagaagaatgaccccaagaaggcccctgtggcccggagctctgtgggctgggatgccacagaggacctgcgcatcagcaggacagacagcttcagctccatgaccagtgacagcgacaccaccagccccaccggccagcagcccagtgatgccttccctgaggacagcagcaaggtgccccgggagaagccaggggactggaagatgcagagcaggaagaggacccagaccctgcccaacaggaagtgcttcctgaccagcgccttccagggcgccaacagcagcaagatggagatcttcaagaatgagttctggagccccagcagcgaggccaaggccggggagggccacaggaggaccatgagccaggacctgcggcagctgagtgacagccagaggaccagcacctatgacaacgtgcccagcctgcccggcagccctggagaggaggccagcgccctgagcagccaggcctgtgacagcaagggggacaccctggccagccccaacagcgagactggacctgggaagaagaacagcggggaggaggagattgacagcctgcagaggatggtgcaggagctgaggaaggagattgagacccagaagcagatgtatgaggagcagatcaagaacctggagaaggagaactatgatgtgtgggccaaggtggtgcggctgaatgaggagctggagaaggagaagaagaagtctgctgccctggagatcagcctgaggaacatggagaggagcagagaagatgtggagaagaggaacaaggccctggaggaggaggtgaaggagtttgtgaagtccatgaaggagcccaagacagaggcctag

SEQ ID NO: 64696 - DNA, 1821 bp, Artificial Sequence
  derived and/or modified sequence
atgagcctgaagctgccccggaactgggacttcaacctgaaggtggaagccgccaaaatcgctcggagtcgtagcgtgatgacaggagagcaaatggccgcttttcatccaagctcaactccaaatcccctggagaggccgatcaagatgggctggctaaagaagcagagatcaatagtaaaaaactggcaacagagatacttcgtgctgagggctcaacagttgtactattacaaagatgaggaagataccaaaccacagggatgtatgtatttgccaggttgcaccatcaaggagattgcaaccaatccagaagaggcgggaaagttcgtttttgaaataattcctgtgtttggacagcgactggacgaaactgtagcgtatgaacagaaattcggtcctcaccttgttccgatactggtggagaagtgtgctgagtttatcctggaacatggtcgcaatgaagaaggcatcttccgtttgccaggccaagataatctcgtgaagcagctccgcgacgcattcgatgccggcgaacggccttcctttgatagggacaccgatgtccacactgttgcctcactgctgaagctgtaccttcgggatctgccggagcctgtggtaccctggtcgcagtacgaaggctttcttttatgcggccaactgacgaacgccgacgaagcaaaggcccagcaagagctgatgaagcagctctctattctgccccgggacaactatagcctgcttagttacatttgtcgatttctgcatgaaattcagctgaactgcgctgtgaacaagatgtccgttgacaatctggctactgttattggggtgaatctgattcggtccaaggtcgaggacccagcagtgatcatgagggggacacctcagattcagagggtgatgactatgatgatcagagaccacgaggtgctcttccccaagtcaaaagacatacctctcagtccacctgcccagaaaaatgaccccaaaaaggcccccgttgcacgctcttcggttggatgggacgctactgaagacctacggatttccagaaccgattcgttttcctccatgacgtcggactccgacactacatcccctacggggcaacaaccaagcgacgcattccccgaggattcgtccaaggtgccccgtgaaaagcctggcgattggaagatgcagtctcgcaaacggactcagacactcccaaacagaaagtgctttctgacttcggcattccagggcgccaatagtagcaaaatggagatttttaaaaatgagttttggtcgccttccagcgaagctaaggctggggaagggcaccgtcggactatgtctcaggacctgcgtcagctgtccgactcccaacgaacctcgacatacgacaacgtgcctagtcttccaggcagtccaggtgaggaggcctccgccctctcatcacaagcatgtgattccaagggtgatacactggcatctcccaacagcgaaacaggacctggcaagaaaaatagtggtgaagaagagatcgactccctccagcggatggttcaggagctgaggaaggagatcgaaacacagaaacagatgtatgaggaacaaatcaagaatcttgagaaggagaactacgatgtttgggctaaagttgttaggctcaacgaggagcttgagaaagaaaagaaaaaaagcgccgcattggaaatttcgcttagaaacatggagcgttcgcgggaggatgtcgaaaagagaaataaagcactggaagaagaggtcaaggagttcgtgaagtcaatgaaggagccaaagacagaagcctag

SEQ ID NO: 64697 - DNA, 1821 bp, Artificial Sequence
  derived and/or modified sequence
atgtctctcaagttgccccgtaactgggacttcaacctaaaggtggaagcagcaaagatcgctcgctcgagatcagtgatgacgggggaacaaatggccgcttttcacccctcaagcacaccaaatcctttagagagacctattaagatggggtggctgaaaaagcaaagatcaatcgtgaagaactggcaacagagatattttgtgttgcgagcccagcaactgtattattacaaggacgaagaagacactaaaccacagggctgcatgtatctccccggatgtacaatcaaggaaatcgccactaatcccgaagaggctggcaaatttgttttcgagataatcccagttttcggacagcggctagacgagacagtagcctatgagcagaagttcggtccacaccttgtcccgatcttagttgaaaagtgtgcagagtttatcctcgaacacggcagaaatgaagagggaattttccggctacccggacaggataacctggtaaagcagcttagggatgcttttgacgctggggagcgaccgagtttcgacagggacactgatgtgcacaccgtcgctagtctgctgaaactctacctgcgggatttgccagagcccgtcgtgccatggagtcaatacgagggctttctgctatgcggacagttgacgaacgctgacgaggccaaggcgcagcaggaattgatgaagcaattatcgattctccccagagacaactacagtcttctcagctatatctgccggtttttacacgaaattcaattgaactgcgccgtgaataagatgtcggtggacaacttagcaaccgtgataggtgtgaatctgatccgctccaaggtagaggaccccgcagttatcatgaggggcactccacagattcagcgcgtcatgaccatgatgatcagagatcatgaggttttgtttcctaagtccaaagacattccactgtcgcctccagcccagaaaaacgatcccaagaaagctccggtagcccgttcatctgtcggatgggacgccacggaagacctgcggatttctcgcaccgactcgttctcttccatgacaagcgactctgacactactagccctacgggccagcaacccagcgacgccttccctgaagattcttcaaaagtcccacgtgagaagccaggagattggaagatgcagtccagaaaaaggacgcaaaccttgcctaacagaaagtgtttcctgacttcggccttccagggggcaaactcttcaaagatggaaatatttaagaacgagttctggagtccgagtagcgaggctaaggctggggagggtcacaggcggaccatgtcacaagatctgaggcaactatctgattctcagcgcacctctacctatgataatgtcccatcacttcccggatcccccggagaggaggctagtgccttgtcctcgcaggcttgcgacagcaaaggcgatacgctggcctcgccaaactccgaaacaggacccggtaaaaagaatagtggcgaagaggaaatcgatagtctgcaaagaatggtgcaggaactgcgcaaagaaattgagacccagaagcagatgtatgaagaacagattaaaaacttggaaaaggagaactacgatgtgtgggctaaggtggttaggctgaatgaggagctggaaaaggagaagaagaagtctgctgccctcgagatttccttgagaaatatggaaagatcccgcgaggacgtggagaaacggaataaggccttagaagaagaggtcaaggagtttgtaaagagcatgaaggagccgaagaccgaggcgtag

SEQ ID NO: 64698 - DNA, 2247 bp, Artificial Sequence
  derived and/or modified sequence
cagagggaagtgtcaactgggatatttctggtaaaactgaaagcaagaaaagcagggtgctagcccctgtgggactgagggtggaggctgggggagtttgggtgccatcctccagtgacagatggatggacctttcatctaagagaaaggaggagacacgttggcaaatcagcctcaagcctaagattgcttgtgaagcaatcataaggaggaacaaaaacagacacaaaaacagagggaaagagtgaaaagacaagaagggcgcaaactgtgacagactcaccgcttcactaactactcacttaaactggaagcaaaatgtccctaaaattgccaaggaactgggatttcaacctgaaagtggaggctgcgaaaatagctcggtcaaggagtgtgatgactggcgagcagatggctgccttccatccatcgtccacccccaacccgctggagaggcccatcaagatgggctggctgaagaagcagaggtccatcgtgaagaactggcagcagaggtactttgtgctgagggcgcagcagctctactactacaaggatgaagaggacacgaagccccagggctgcatgtatctaccaggatgtacaatcaaggagatcgccacaaacccagaagaagctgggaagtttgtctttgaaatcattccagtgtttggccagcgcttggatgagactgtggcctatgaacagaaattcggcccccatctggtgcccatcctggtggagaaatgtgcagagttcatcctggagcacggccggaatgaagagggcatcttccgtctgcctgggcaggacaacctggtgaagcagctgagagacgcttttgatgctggggagcggccctcctttgacagagacacagatgtgcacactgtggcttccctgttaaagctctacctccgagacctcccagagcccgtggttccctggagccagtacgaagggttcctgctctgtgggcagctcacgaatgcggatgaggcaaaggctcagcaggagttgatgaagcagctctccatccttcctcgtgacaactatagtctcctgagctacatctgcaggttcctacatgaaatacagctgaactgtgctgttaacaagatgagtgtggacaacctggctactgtgattggtgtgaatctcatcaggtcgaaggtcgaagaccctgccgtgatcatgagagggactcctcagatccaaagagtgatgactatgatgatcagagaccatgaagtcctcttccccaagtccaaggatatacccctgtcaccccctgcccagaaaaatgaccccaagaaagctccagtggcccgaagctctgtaggctgggatgccactgaagacctccgaatttctaggacagacagcttcagtagcatgacaagcgactctgatacaaccagccccaccggacagcagccgagcgatgcgtttccggaggacagcagcaaagtacccagggaaaagccaggagactggaaaatgcaatctcgtaaaaggactcaaacactccctaaccggaaatgtttcttgacatcagcttttcagggtgccaacagcagcaaaatggagatctttaaaaatgaattctggtcgccttcctcagaggctaaggcaggggaagggcacaggagaacgatgtctcaagacttgcgccaactttctgactcccaacggacttccacctacgataacgtcccttccctgccagggtcccctggggaggaagccagtgcactctcttcccaagcctgtgactccaagggagatactcttgccagtccaaactctgaaactgggcctggaaaaaagaactctggagaagaggaaattgattctttgcagaggatggtccaagagctacgaaaggaaatagaaacacagaagcaaatgtatgaggaacagattaaaaaccttgagaaggaaaattatgacgtttgggctaaagtggtgaggctcaatgaagaactggagaaggaaaagaagaagtctgcagccctagagatcagcctccgcaacatggagcgctcccgggaggatgttgagaagaggaacaaggccttggaagaagaagtcaaggaatttgtcaaatccatgaaggaacccaagaccgaggcttaagggtcccaggagtactgcagggacagccccagagaggcccaactctggcccctttctcagtgctatctgatgacggggaaacaaaattattctctgagagggaaagga

SEQ ID NO: 64699 - DNA, 1821 bp, Artificial Sequence
  derived and/or modified sequence
atgagcctgaagctgcccagaaactgggacttcaacctgaaggtggaggccgccaagatcgccagaagcagaagcgtgatgaccggcgagcagatggccgccttccaccccagcagcacccccaaccccctggagagacccatcaagatgggctggctgaagaagcagagaagcatcgtgaagaactggcagcagagatacttcgtgctgagagcccagcagctgtactactacaaggacgaggaggacaccaagccccagggctgcatgtacctgcccggctgcaccatcaaggagatcgccaccaaccccgaggaggccggcaagttcgtgttcgagatcatccccgtgttcggccagagactggacgagaccgtggcctacgagcagaagttcggcccccacctggtgcccatcctggtggagaagtgcgccgagttcatcctggagcacggcagaaacgaggagggcatcttcagactgcccggccaggacaacctggtgaagcagctgagagacgccttcgacgccggcgagagacccagcttcgacagagacaccgacgtgcacaccgtggccagcctgctgaagctgtacctgagagacctgcccgagcccgtggtgccctggagccagtacgagggcttcctgctgtgcggccagctgaccaacgccgacgaggccaaggcccagcaggagctgatgaagcagctgagcatcctgcccagagacaactacagcctgctgagctacatctgcagattcctgcacgagatccagctgaactgcgccgtgaacaagatgagcgtggacaacctggccaccgtgatcggcgtgaacctgatcagaagcaaggtggaggaccccgccgtgatcatgagaggcaccccccagatccagagagtgatgaccatgatgatcagagaccacgaggtgctgttccccaagagcaaggacatccccctgagcccccccgcccagaagaacgaccccaagaaggcccccgtggccagaagcagcgtgggctgggacgccaccgaggacctgagaatcagcagaaccgacagcttcagcagcatgaccagcgacagcgacaccaccagccccaccggccagcagcccagcgacgccttccccgaggacagcagcaaggtgcccagagagaagcccggcgactggaagatgcagagcagaaagagaacccagaccctgcccaacagaaagtgcttcctgaccagcgccttccagggcgccaacagcagcaagatggagatcttcaagaacgagttctggagccccagcagcgaggccaaggccggcgagggccacagaagaaccatgagccaggacctgagacagctgagcgacagccagagaaccagcacctacgacaacgtgcccagcctgcccggcagccccggcgaggaggccagcgccctgagcagccaggcctgcgacagcaagggcgacaccctggccagccccaacagcgagaccggccccggcaagaagaacagcggcgaggaggagatcgacagcctgcagagaatggtgcaggagctgagaaaggagatcgagacccagaagcagatgtacgaggagcagatcaagaacctggagaaggagaactacgacgtgtgggccaaggtggtgagactgaacgaggagctggagaaggagaagaagaagagcgccgccctggagatcagcctgagaaacatggagagaagcagagaggacgtggagaagagaaacaaggccctggaggaggaggtgaaggagttcgtgaagagcatgaaggagcccaagaccgaggcctag

SEQ ID NO: 64700 - protein, 366 aa, Artificial Sequence
  derived and/or modified sequence
MMNSSMSSGSGSLRTSEKRSLYVRALFDYDRTRDSCLPSQGLSFSYGDILHVINASDDEWWQARLVTPHGESEQIGVIPSKKRVEKKERARLKTVKFHARTGMIESNRSIKTKRKKSFRLSRKFPFYKSKENMAQESSIQEQGVTSNTSDSESSSKGQEDAILSYEPVTRQEIHYARPVIILGPMKDRVNDDLISEFPHKFGSCVPHTTRPRRDNEVDGQDYHFVVSREQMEKDIQDNKFIEAGQFNDNLYGTSIQSVRAVAERGKHCILDVSGNAIKRLQQAQLYPIAIFIKPKSIEALMEMNRRQTYEQANKIYDKAMKLEQEFGEYFTAIVQGDSLEEIYNKIKQIIEDQSGHYIWVPSPEKL

SEQ ID NO: 64701 - DNA, 1101 bp, Artificial Sequence
  derived and/or modified sequence
atgatgaactcatccatgtcgtctggaagtggaagtctgcgcacaagtgagaagcggtctctgtacgtgagggctctgttcgattacgacaggaccagagattcctgcctaccatcacagggcctgtctttttcttatggcgacatacttcacgtcatcaatgcatccgacgatgagtggtggcaagcccgactcgtgactcctcatggagagtcagaacaaatcggagtgatcccatccaagaaaagggttgaaaagaaagaacgcgccaggttaaaaactgtgaagttccatgcccggacgggcatgatagaatccaaccggtcgatcaagactaagaggaagaagtcttttcgattaagccgcaagtttcccttctacaaatctaaagagaacatggcccaggaaagctctatacaggaacagggagtgacatccaatacttccgacagtgagtcctcgtccaaagggcaggaagatgcgatcctcagctatgagcccgttacacggcaggagattcactatgcccgcccagtgatcatactgggccccatgaaagaccgcgtgaacgacgatcttataagtgaatttccacacaagtttggaagttgcgtgccacacactacacgacctagaagagacaacgaagtggacggacaggactatcatttcgtggtctctcgagagcagatggagaaagatatccaggacaataaatttatcgaggcgggacaatttaatgacaatctgtatggaacctccatccagtctgtgagggccgtggcggaacggggtaagcactgcatcctagatgtatccggcaacgcaattaagaggctgcagcaggcccagctttatcctattgccattttcatcaaaccgaagagcattgaggctcttatggagatgaatcgccgccaaacctacgagcaggccaacaagatctacgacaaggcgatgaaactggaacaggagttcggggaatatttcacagcaatcgtccagggagattccctggaagagatctacaataagattaaacaaattatcgaagatcagtcgggccactacatctgggtgccctcccccgagaagttgtag

SEQ ID NO: 64702 - DNA, 1101 bp, Artificial Sequence
  derived and/or modified sequence
atgatgaacagctccatgagcagcggcagcggcagcctgcggaccagcgagaagaggagcctgtatgtgcgggccctgtttgattatgacaggacccgggacagctgcctgcccagccagggcctgtccttctcctatggagacatcctgcacgtgatcaatgccagtgatgatgagtggtggcaggcccggctggtgacccctcatggagagagcgagcagattggagtcatccccagcaagaagagggtggagaagaaggagcgggcccggctgaagacagtgaagttccacgccaggacaggcatgattgagagcaacagaagcatcaagaccaagaggaagaagagcttccggctgagcaggaagttccccttctacaagagcaaagaaaacatggcccaggagagcagcatccaggagcagggcgtgaccagcaacaccagtgacagcgagagcagcagcaagggccaggaggatgccatcctgtcctatgagcctgtgacccggcaggagatccactacgcccggcctgtgatcatcctgggccccatgaaggacagagtgaatgatgacctgatcagcgagttcccccacaagtttggcagctgtgtgccccacaccacccggccccggcgggacaatgaggtggatggccaggactaccactttgtggtgtcccgggagcagatggagaaggacatccaggacaacaagttcattgaagctggccagttcaatgacaacctgtatggcaccagcatccagagcgtgcgggctgtggccgagcggggcaagcactgcatcctggatgtgtctggaaatgccatcaagaggctgcagcaggcccagctgtaccccatcgccatcttcatcaagcccaagagcattgaggccctgatggagatgaacagacggcagacctatgagcaggccaacaagatctatgacaaggccatgaagctggagcaggagtttggagagtacttcaccgccatcgtgcagggcgacagcctggaggagatctacaacaagatcaagcagatcatcgaggaccagagcggccactacatctgggtgcccagccctgagaagctgtag

SEQ ID NO: 64703 - DNA, 1101 bp, Artificial Sequence
  derived and/or modified sequence
atgatgaacagcagcatgagcagcggcagcggcagcctgcggacctcggagaagagatccctgtatgtgagggccttgtttgattacgataggacaagggattcctgtctgcccagccagggactatccttcagctatggagacatcttacatgtgatcaacgcttctgacgacgagtggtggcaggcccggttggtgacccctcacggcgagagcgaacagatcggggtgatcccatctaagaaaagagtggaaaagaaggagcgcgcccggctgaagactgtgaagtttcacgcgagaaccggaatgattgagagtaaccgcagcatcaagaccaagagaaagaaatcttttaggctatctagaaagtttccattttataaatcaaaggaaaacatggcgcaggaatcttctatccaggaacagggtgtgacatcaaataccagcgattccgaatcgagttcaaaaggccaggaagatgctattctgtcttacgagcccgtgacaagacaggagatccactacgcaagaccggtgattattctgggcccgatgaaagacagggtcaacgatgatctgatctctgaattccctcataagtttgggagctgtgtaccacacacaacaaggcctaggagagacaacgaagtggatggacaggattatcactttgtagtcagccgtgagcagatggaaaaagacattcaagacaacaaattcatcgaagccggtcagtttaacgataacctgtacggtacatccatccaatctgtcagagccgtggcggagaggggaaaacattgtattctggatgtttccgggaacgccattaaaaggctgcagcaggcccagttgtatcccatcgcaatcttcattaaacccaaatctatcgaggcactaatggaaatgaatagacgacaaacatacgagcaggctaataaaatctatgataaggcaatgaaactggaacaggaattcggcgaatactttactgccatcgttcagggcgattcgctggaggaaatttacaacaaaattaagcagatcatcgaggaccagagcggccactacatctgggtcccatctcctgaaaaactttag

SEQ ID NO: 64704 - DNA, 1101 bp, Artificial Sequence
  derived and/or modified sequence
atgatgaatagttctatgtcatcaggatccggaagtctgcgcacatcagaaaaaaggtctctgtacgttcgggctctgttcgattacgataggactcgggacagctgtctcccctcccagggattgtccttttcctatggggatatcttgcatgtgattaatgcatctgacgatgaatggtggcaggccaggctggtcactccgcatggcgagtcagagcagattggggtcattccaagcaaaaaaagagttgagaaaaaggagagggcaaggttgaagaccgtgaaatttcacgctcgtacaggtatgattgaatcaaatcggtctataaagaccaaacgcaaaaagtcatttcgattatccaggaaattcccattttacaagagtaaggagaacatggcacaggagagcagcattcaggagcagggagtgacatccaacacttcagatagcgaatcatcaagcaaggggcaagaggatgcgatcctcagctatgaacccgtaacccgacaggagatacattacgctcgccctgtaataatactgggacctatgaaagatcgcgtcaacgacgatctgatctctgagtttccccataagtttggcagctgcgtgcctcacaccaccaggcccagaagagataacgaggtggatgggcaggattaccatttcgtggtgtcaagggagcagatggaaaaagatatacaggataacaaattcattgaggccggacaattcaatgataatctctacggcacatctatacagagcgtgcgagcggtggccgagaggggcaagcattgcatcctggatgtgagcgggaacgccatcaaacgcctccagcaggctcagctgtaccctatcgccatcttcatcaagcccaagtcaattgaggccctaatggaaatgaatcgcagacagacgtacgaacaggctaacaagatatacgacaaagctatgaaactggagcaagaatttggagaatactttactgccatagtccagggggacagcctcgaggaaatctacaacaaaatcaaacagatcatagaggatcagtctggacattatatctgggtgccctcccctgaaaagctgtag

SEQ ID NO: 64705 - DNA, 1101 bp, Artificial Sequence
  derived and/or modified sequence
atgatgaacagcagcatgagcagcggcagcggcagcctgagaaccagcgagaagagaagcctgtacgtgagagccctgttcgactacgacagaaccagagacagctgcctgcccagccagggcctgagcttcagctacggcgacatcctgcacgtgatcaacgccagcgacgacgagtggtggcaggccagactggtgaccccccacggcgagagcgagcagatcggcgtgatccccagcaagaagagagtggagaagaaggagagagccagactgaagaccgtgaagttccacgccagaaccggcatgatcgagagcaacagaagcatcaagaccaagagaaagaagagcttcagactgagcagaaagttccccttctacaagagcaaggagaacatggcccaggagagcagcatccaggagcagggcgtgaccagcaacaccagcgacagcgagagcagcagcaagggccaggaggacgccatcctgagctacgagcccgtgaccagacaggagatccactacgccagacccgtgatcatcctgggccccatgaaggacagagtgaacgacgacctgatcagcgagttcccccacaagttcggcagctgcgtgccccacaccaccagacccagaagagacaacgaggtggacggccaggactaccacttcgtggtgagcagagagcagatggagaaggacatccaggacaacaagttcatcgaggccggccagttcaacgacaacctgtacggcaccagcatccagagcgtgagagccgtggccgagagaggcaagcactgcatcctggacgtgagcggcaacgccatcaagagactgcagcaggcccagctgtaccccatcgccatcttcatcaagcccaagagcatcgaggccctgatggagatgaacagaagacagacctacgagcaggccaacaagatctacgacaaggccatgaagctggagcaggagttcggcgagtacttcaccgccatcgtgcagggcgacagcctggaggagatctacaacaagatcaagcagatcatcgaggaccagagcggccactacatctgggtgcccagccccgagaagctgtag

SEQ ID NO: 64706 - protein, 1201 aa, Artificial Sequence
  derived and/or modified sequence
MNFEGLDPGLAEYAPAMHSALDPVLDAHLNPSLLQNVELDPEGVALEALPVQESVHIMEGVYSELHSVVAEVGVPVSVSHFDLHEEMLWVGSHGGHATSFFGPALERYSSFQVNGSDDIRQIQSLENGILFLTKNNLKYMARGGLIIFDYLLDENEDMHSLLLTDSSTLLVGGLQNHIIEIDLNTVQETQKYAVETPGVTIMRQTNRFFFCGHTSGKVSLRDLRTFKVEHEFDAFSGSLSDFDVHGNLLAACGFSSRLTGLACDRFLKVYDLRMMRAITPLQVHVDPAFLRFIPTYTSRLAIISQSGQCQFCEPTGLANPADIFHVNPVGPLLMTFDVSASKQALAFGDSEGCVHLWTDSPEPSFNPYSRETEFALPCLVDSLPPLDWSQDLLPLSLIPVPLTTDTLLSDWPAANSAPAPRRAPPVDAEILRTMKKVGFIGYAPNPRTRLRNQIPYRLKESDSEFDSFSQVTESPVGREEEPHLHMVSKKYRKVTIKYSKLGLEDFDFKHYNKTLFAGLEPHIPNAYCNCMIQVLYFLEPVRCLIQNHLCQKEFCLACELGFLFHMLDLSRGDPCQGNNFLRAFRTIPEASALGLILADSDEASGKGNLARLIQRWNRFILTQLHQDMQELEIPQAYRGAGGSFCSSGDSVIGQLFSCEMENCSLCRCGSETVRASSTLLFTLSYPDGSKSDKTGKNYDFAQVLKRSICLDQNTQAWCDTCEKYQPTIQTRNIRHLPDILVINCEVNSSKEADFWRMQAEVAFKMAVKKHGGEISKNKEFALADWKELGSPEGVLVCPSIEELKNVWLPFSIRMKMTKNKGLDVCNWTDGDEMQWGPARAEEEHGVYVYDLMATVVHILDSRTGGSLVAHIKVGETYHQRKEGVTHQQWYLFNDFLIEPIDKHEAVQFDMNWKVPAILYYVKRNLNSRYNLNIKNPIEASVLLAEASLARKQRKTHTTFIPLMLNEMPQIGDLVGLDAEFVTLNEEEAELRSDGTKSTIKPSQMSVARITCVRGQGPNEGIPFIDDYISTQEQVVDYLTQYSGIKPGDLDAKISSKHLTTLKSTYLKLRFLIDIGVKFVGHGLQKDFRVINLMVPKDQVLDTVYLFHMPRKRMISLRFLAWYFLDLKIQGETHDSIEDARTALQLYRKYLELSKNGTEPESFHKVLKGLYEKGRKMDWKVPEPEGQTSPKNAAVFSSVLAL

SEQ ID NO: 64707 - DNA, 3606 bp, Artificial Sequence
  derived and/or modified sequence
atgaatttcgaggggttagacccaggccttgctgaatacgcacccgccatgcacagcgcactcgaccctgtgctagatgctcacttgaatccttctctccttcagaacgttgagctggaccccgagggggtggcgctggaggccctgcctgtgcaggagtcggtccatatcatggagggtgtgtacagcgaattgcattccgtggttgctgaagtgggagtgcctgtgagcgtgagccactttgacctccatgaggagatgctctgggtgggatcacacggtggacatgcaactagttttttcggccctgcacttgagcggtattcgagctttcaggtcaatggcagtgacgacatccgccagatccaatccttagagaacgggattttattccttactaagaacaatctcaagtacatggcacggggaggacttataattttcgattacctcttggacgagaacgaagacatgcattcgctgttgctgaccgactcttcaaccttacttgtgggcgggctccagaaccacatcatcgagattgacctcaatactgtgcaggagacccagaagtacgcagttgaaacacccggcgtcactatcatgaggcaaaccaatcggttcttcttttgcggccatacgtcaggaaaagtctccctcagagatctcagaaccttcaaggtggaacacgagtttgatgcattctctgggtctctgtctgacttcgacgtgcatgggaacctgctggctgcatgcgggttttcctcccgtcttactggactagcctgtgaccgctttctgaaggtgtatgatctgagaatgatgagagcgatcaccccgctccaggtgcacgtggatcctgcttttctgaggtttatcccaacatacacaagtcgtctcgccattatcagccagtcgggccaatgtcagttttgcgaaccaaccggactggcgaaccccgccgacatatttcacgtgaacccagtcgggcccttgttgatgacatttgacgtgtcagcctctaagcaagcccttgctttcggcgattcagagggctgtgtgcatctctggaccgacagtcccgagccgagcttcaatccatacagccgggagacggagtttgctctgccatgccttgtggactcgctgcccccacttgactggtctcaggacttgctgccgctctcccttataccagtgccactcacgaccgacacgttgctcagcgattggccagccgcaaatagtgcccctgcccccaggcgcgcgcccccagtggatgccgagattctccgcacaatgaagaaggtaggttttatcgggtacgcccccaaccctcgcactagactaagaaatcagatcccttatcgtctgaaggagtccgacagtgagttcgattctttttcacaggttacggagtcccctgtcggccgcgaggaagagccgcatcttcacatggtatcgaagaagtatcgcaaggtgacgattaaatattccaaattagggctggaggatttcgacttcaagcactacaacaaaacactgtttgctggcctggagccacatattcctaatgcctattgcaattgtatgatccaggttctttactttctcgaacctgtgaggtgtttgattcagaaccatctatgtcaaaaggaattttgtctggcttgtgagctggggttcctgtttcatatgctggacctgtcacgaggagacccatgccaaggcaacaacttcctgcgtgctttccgcactatccctgaagcaagtgcgctgggattgattttagccgattccgacgaggcctccggaaagggaaaccttgccagactcatccagcggtggaaccgcttcattctgactcagctccaccaggatatgcaggaactggagatcccgcaggcctacaggggtgctggtggatctttctgtagttctggcgacagtgttatcggccagctgttctcctgcgaaatggaaaattgcagcctctgtaggtgcggctcagagacagtccgcgcctcctccactttgctatttacattgtcgtacccggacgggagtaaaagcgataagaccggcaagaactacgatttcgctcaagtcctaaagcggagtatctgtctcgaccaaaatactcaggcctggtgcgatacttgcgaaaagtaccagcctaccattcagactaggaacatcaggcacctgcccgatattctcgtcatcaactgtgaagtgaactcgtcgaaggaagctgacttttggcgtatgcaggctgaggtcgcattcaagatggcggttaagaagcacgggggggagataagcaagaacaaagaattcgccctggctgactggaaagagctaggctcacctgaaggcgttttggtttgtcccagcattgaggagttaaaaaatgtgtggctgccctttagcattagaatgaaaatgaccaagaacaagggactggacgtatgtaactggacggatggtgacgagatgcaatgggggcccgcacgagcagaggaggagcacggtgtgtacgtgtacgacctgatggccacagttgtccatatcctggacagccggaccggaggtagcctggtcgcccacattaaggtaggtgagacctatcatcagcggaaagaaggagtgacacaccagcagtggtacctgtttaacgatttcctgatcgagccaattgacaagcacgaggccgttcagtttgatatgaattggaaggtgcctgccatactgtattacgtgaaaaggaatctgaattctagatacaacttaaatatcaagaaccccattgaagcatccgtgctcctggccgaagcctcactggctagaaaacagaggaaaactcacacaacgtttattcccctgatgttgaatgaaatgccccagatcggcgacttagtgggcctggacgccgagtttgtcaccttgaatgaagaagaggcagagttacggagtgacggaaccaaatccactatcaagccctcacagatgtccgtagccaggatcacatgcgtgcgcgggcaaggcccaaatgaaggaataccttttatcgacgactatatatccacacaggaacaggtcgtcgattacctaacacagtattccgggatcaagccaggggatttggatgccaagatttctagcaaacacttaactacattaaaaagcacctacttgaaactgcgctttcttattgacatcggggtaaagtttgtgggccacgggctacaaaaggacttccgagtgattaatcttatggtgcccaaagaccaggtgttggacactgtatacctcttccatatgcctcgcaaacgcatgataagtctcaggtttctcgcatggtatttcttggatctgaaaatacagggcgagactcatgacagtatagaggacgccaggactgcactacagctctatcgtaagtatctcgaactgtccaaaaatgggactgagcctgaatcctttcacaaggtgctgaaaggcttgtatgaaaaaggcagaaaaatggactggaaggtccccgagcctgaggggcagacctcgccgaaaaacgccgccgtgttttccagtgttctggctctgtag

SEQ ID NO: 64708 - DNA, 3606 bp, Artificial Sequence
  derived and/or modified sequence
atgaactttgagggcctggaccccggcctggccgagtatgccccagccatgcacagcgccctggaccctgtgctggatgcccacctgaaccccagcctgctgcagaatgtggagctggaccctgagggcgtggccctggaggccctgcctgtgcaggagagcgtgcacatcatggagggcgtgtacagcgagctgcacagcgtggtggccgaggtgggcgtgcctgtgtctgtgagccactttgacctgcacgaggagatgctgtgggtgggcagccatggaggccacgccaccagcttctttggacctgccctggagcgctacagcagcttccaggtgaatggaagtgatgacatccggcagatccagagcctggagaatggcatcctcttcctgaccaagaacaacctgaagtacatggcccggggcggcctcatcatctttgactacctgctggatgaaaatgaagacatgcacagcctgctgctgacagacagcagcaccctgctggtgggcggcctgcagaaccacatcattgaaattgacctgaacacagtgcaggagacccagaagtatgctgtggagaccccaggagtgaccatcatgaggcagaccaaccgcttcttcttctgtggccacaccagcggcaaggtgtccctgcgggacctgcggaccttcaaggtggagcacgagtttgatgccttcagcggcagcctgagtgactttgatgtgcacggcaacctgctggccgcctgtggcttcagcagccggctgaccggcctggcctgtgaccgcttcctgaaggtgtatgacctgaggatgatgagggccatcacccccctgcaggtgcacgtggaccctgccttcctgcgcttcatccccacctacaccagccggctggccatcatcagccagagcggccagtgccagttctgtgagcccaccggcctggccaacccagctgacatcttccacgtgaaccctgtgggccccctgctgatgacctttgatgtgtctgccagcaagcaggccctggcctttggagacagcgagggctgtgtgcacctgtggacagacagccctgagcccagcttcaacccctacagccgggagacagaatttgccctgccctgcctggtggacagcctgccccccctggactggagccaggacctgctgcccctgagcctcatccctgtgcccctgaccacagacaccctgctgagtgactggccagctgccaacagcgccccagccccccggcgggcccctcctgtggatgctgagatcctgcggaccatgaagaaggtgggcttcatcggctacgcccccaaccccaggacccggctgaggaaccagatcccctaccgcctgaaggagagtgacagcgagtttgacagcttcagccaggtgacagagagccctgtgggccgggaggaggagccccacctgcacatggtgtccaagaagtacaggaaggtgaccatcaagtacagcaagctgggcctggaggactttgacttcaagcactacaacaagaccctgtttgctggcctggagccccacatccccaatgcctactgcaactgcatgatccaggtgctgtacttcctggagcctgtgcgctgcctgatccagaaccacctgtgccagaaggagttctgcctggcctgtgagctgggcttcctgttccacatgctggacctgagcagaggagacccctgccagggcaacaacttcctgcgggccttccgcaccatccctgaggccagcgccctgggcctcatcctggccgacagtgatgaggccagcggcaagggcaacctggcccggctcatccagcgctggaaccgcttcatcctgacccagctgcaccaggacatgcaggagctggagatcccccaggcctacagaggagctgggggcagcttctgcagcagcggggacagcgtcatcggccagctgttcagctgtgagatggagaactgcagcctgtgccgctgtggcagcgagaccgtgcgggccagcagcaccctgctcttcaccctgagctacccagatggcagcaagagtgacaagacaggcaagaactatgactttgcccaggtgctgaagaggagcatctgcctggaccagaacacccaggcctggtgtgacacctgtgagaagtaccagcccaccatccagaccaggaacatccgccacctgcctgacatcctggtgatcaactgtgaggtgaacagcagcaaggaggccgacttctggaggatgcaggccgaggtggccttcaagatggctgtgaagaagcacggcggggagatcagcaagaacaaggagtttgccctggccgactggaaggagctgggcagccctgagggcgtgctggtgtgccccagcattgaggagctgaagaatgtgtggctgcccttcagcatccgcatgaagatgaccaagaacaagggcctggatgtgtgcaactggacagatggagatgagatgcagtggggccctgcccgggcagaggaggagcacggcgtgtatgtgtatgacctgatggccaccgtggtgcacatcctggacagcaggactggaggcagcctggtggcccacatcaaggtgggggagacctaccaccagaggaaggagggcgtgacccaccagcagtggtacctgttcaatgacttcctgattgagcccatcgacaagcatgaagctgtgcagtttgacatgaactggaaggtgcctgccatcctgtactacgtgaagaggaacctgaacagccgctacaacctgaacatcaagaaccccatcgaggcctctgtgctgctggccgaggccagcctggccaggaagcagaggaagacccacaccaccttcatccccctgatgctgaatgagatgccccagatcggggacctggtgggcctggatgctgagtttgtgaccctgaatgaggaggaggccgagctgcggagtgatggcaccaagagcaccatcaagcccagccagatgtctgtggcccgcatcacctgtgtgcggggccagggccccaatgaaggcatccccttcattgatgactacatcagcacccaggagcaggtggtggactacctgacccagtacagcggcatcaagccaggggacctggatgccaagatcagcagcaagcacctgaccaccctgaagagcacctacctgaagctgcgcttcctgattgacatcggcgtgaagtttgtgggccacggcctgcagaaggacttccgggtcatcaacctgatggtgcccaaggaccaggtgctggacacagtgtacctgttccacatgcccaggaagaggatgatcagcctgcgcttcctggcctggtacttcctggacctgaagatccagggcgagacccatgacagcattgaagatgccaggacagccctgcagctgtacaggaagtacctggagctgagcaagaatggaacagagcctgagagcttccacaaggtgctgaagggcctgtatgagaagggcaggaagatggactggaaggtgcctgagcctgagggccagaccagccccaagaatgctgctgtgttcagctctgtgctggccctgtag

SEQ ID NO: 64709 - DNA, 3606 bp, Artificial Sequence
  derived and/or modified sequence
atgaacttcgagggcctggaccccggcctggccgagtacgcccccgcaatgcacagcgcactggacccggtgctggacgctcatctcaacccttcattgctgcagaacgtcgaacttgatccagaaggagtagcccttgaagcacttccagtgcaggagagtgtccatatcatggagggtgtgtattctgaacttcatagcgtggttgccgaggtaggagtgcctgtcagcgtgagccatttcgatctgcacgaggagatgctctgggttggatctcacggggggcatgccacaagcttctttggccctgctctggagaggtactcatcctttcaggtcaacgggtctgacgatatccgtcagatccagtccttggagaacggcatactcttcttaactaaaaataatctcaaatacatggcccgcggcggcctcattatctttgactatctgttggacgaaaatgaggatatgcactctttgctcttgaccgattcatctaccttgttggtgggaggactccagaaccatatcattgaaatcgatctcaacacggttcaggagacccaaaagtatgccgtcgagacccccggtgttacaatcatgaggcagaccaatagattcttcttttgtgggcacacctccggcaaggttagcttgcgtgacctgagaacattcaaggttgagcacgaatttgatgctttttccgggtcgctcagtgacttcgatgtacacggaaatctccttgctgcctgcggctttagttcccgactgactggactagcctgtgacaggtttctcaaagtatacgatctgagaatgatgcgcgccatcacccctcttcaggtacacgtggacccagcatttctgcgattcatcccaacctacacctcaagactggcgatcatcagtcaatctgggcaatgccaattttgtgagccgactgggctagctaacccagctgacatatttcacgtcaacccagtgggccctctcctgatgaccttcgatgtaagcgccagcaaacaggctctcgcctttggggactctgaggggtgcgtccacctgtggaccgatagccccgaaccctcttttaacccgtattcccgcgaaaccgaatttgccctgccgtgcctagtggactctttgcctcccctcgactggagtcaagatctactcccactctcattgattccagtaccattgacaaccgatactctgctttccgactggcctgcagctaattccgcccctgccccccggcgggcaccgccagtagacgccgagatcctgcggaccatgaaaaaagttggcttcattggatatgctccaaatccacgcacacggctgcggaaccagattccctaccggctaaaggagtctgactccgaattcgacagcttctcccaggtgacagagtctcctgtgggaagggaggaagagccacatctacatatggtaagtaagaaatacagaaaggtcaccattaagtatagtaaactgggactggaagacttcgacttcaaacattacaacaaaaccttatttgctgggcttgagccacatatcccaaacgcctattgcaattgcatgatccaggttctgtacttcctggagcctgttcgctgcctcatccagaaccacctctgccaaaaagagttctgtctggcatgcgaactggggttcctgttccatatgctggatctctcacgaggcgatccgtgtcagggaaacaattttctcagagccttcagaacaatccctgaagcttcagcccttggactcattctggcagactccgatgaggctagtggcaaagggaacttggcaaggcttatccaacgctggaacaggttcatcctgacacagctccaccaagatatgcaagaactggagattccgcaggcctacagaggcgccggaggcagcttttgctcttctggcgacagcgtcattggacaacttttttcctgcgagatggagaattgctcattgtgtcggtgtgggtcggagaccgtccgcgccagttctacgctactgttcaccctctcatacccggatgggagcaaatcagacaagacaggcaagaactacgacttcgctcaagttctgaaacggtcaatttgcctagaccagaatactcaagcctggtgtgacacatgcgagaaatatcagcccacaatccagacccggaatatccgacatctccctgatatcctggtcatcaattgcgaggtaaatagctcgaaagaggctgatttttggcgcatgcaggctgaggtggcctttaagatggccgtcaagaagcatggcggggagatatctaagaataaggagttcgcgctagccgactggaaggagcttggcagccccgagggagtgttggtgtgccctagcatagaagaattgaaaaatgtatggctacctttcagtatccggatgaaaatgacgaaaaacaagggcctcgacgtttgcaattggactgatggtgacgagatgcagtggggcccagctagggctgaagaagaacatggagtgtatgtctacgatttaatggccaccgtggtgcacatcctggactctagaaccggtgggtcactagtggcgcacatcaaagtgggtgagacataccatcagcggaaggagggtgtcacacaccagcaatggtatctctttaacgactttctcatcgagccgatcgacaagcacgaggctgtacaattcgacatgaactggaaagtccctgctatcctgtactacgtgaagcgcaatctcaactccaggtataacctaaatataaagaatcccatcgaggcctctgtgctactggccgaggccagcctggcgcgaaaacagagaaagactcataccaccttcatccccctcatgctaaatgagatgccccagatcggcgatttggtgggacttgatgccgaatttgttactcttaatgaggaggaagctgagctccggtcagatgggactaaatctacgatcaaacctagccagatgtctgtagcccgcattacatgtgtgcgggggcaaggacccaacgagggaatcccattcattgacgattatatttccacccaagaacaggtagtggactacctcactcagtactctggtattaagcccggagaccttgatgctaagatcagttcaaaacatctcacaaccctgaagtcaacatacttgaaactcagattccttatcgacatcggagtgaaatttgtggggcatgggctgcaaaaagattttcgcgttattaatctgatggtccctaaggatcaagtacttgacacggtgtacttattccacatgccaaggaaacgtatgatcagcttgagattcctggcctggtacttcctcgacctgaagatccagggcgagacgcacgatagtatcgaggacgcccggactgccctgcagttgtaccgaaagtatctcgagttgagcaaaaatggcactgagcccgaatcatttcataaggtcctgaagggactttacgagaagggcagaaaaatggattggaaagtcccagagccagagggacaaaccagtcccaagaatgcagccgttttctcttcagtcttggccttgtag

SEQ ID NO: 64710 - DNA, 4537 bp, Artificial Sequence
  derived and/or modified sequence
cttggcgccgtagtggttaggttgagccctaggcgtgggggagaactggggaaactggaatttcccgcggagctgacagcgcttgcgctccccctactcgttctaattccacgcgctccaaaatatccgccatggagaaatcttggccaggatgtccattctaggcccatcggtgctgtcttgctgaaggttgggtcaggcatctaaagggactgtggtaagggagggtgtgacacaggtgtaagctgccatcgtcatcatgaactttgagggtctggaccctggactggcagaatatgccccagccatgcattctgccctggaccctgtcttggatgcccacctgaacccaagtctgctacagaatgtggagctggacccagagggagtggccttggaggctcttcccgtccaggaatcagtgcacataatggaaggtgtctactctgaattgcacagcgtggtggctgaagtgggtgtacctgtttccgtctcccactttgacttgcacgaggagatgctgtgggtggggagccacgggggccatgccacttcattttttggcccagccttggagcgctactcatcctttcaagtcaatggcagtgatgatattcggcagatccagagcctggagaatggtatcctttttctcaccaagaacaacctcaagtatatggcccgtgggggcctcattatatttgattacctgctggatgagaatgaggatatgcacagtctcctactgactgacagcagcactctactcgttggtgggctgcagaatcacataatagagattgatcttaacactgtccaggagactcagaagtatgcagtagagacgcctggagtcaccatcatgagacagacaaatcgcttcttcttctgcggccacacgtctggcaaggtttccctgagagacctccgtacttttaaggtggaacatgagtttgatgccttctcaggaagtctgtcagactttgatgtgcatggcaacctgctagctgcctgtggcttctccagccgcctcactggcctggcctgcgaccgtttcctcaaggtgtatgatttgcgcatgatgcgtgccatcacaccacttcaagtacatgtggatcctgccttcttgcgcttcattcctacatatacttctcgtcttgctatcatctctcagtcagggcagtgccaattctgtgaacccacaggcctggccaacccagccgatatctttcatgtgaatcctgtggggcctctgctaatgacatttgatgtgtcagccagcaagcaggctctggcctttggggattctgagggctgtgtgcacctctggactgattccccggagccttccttcaacccctactcccgtgagactgagtttgctttgccgtgtctcgtggactcactgcctcctctggactggagccaggacctgctgcctctttccctcatccctgtcccactcaccactgacacacttctctctgattggcctgctgccaactctgctccagctcccaggcgagcaccacccgtggatgcagagattctgcgcaccatgaagaaggtgggcttcattggctatgcgcccaatccccgcaccaggctgcgcaatcagataccctacagactcaaggagtcagacagtgaatttgacagcttcagccaggtcactgagtcaccagtaggacgagaagaggaaccacatctccacatggtttctaagaaataccgcaaggtgaccatcaaatattccaagctagggctggaggactttgacttcaaacactacaataagaccttgtttgctggattagagccccacattcccaacgcctactgtaactgcatgatccaggtgctctatttcctggagcctgtacgctgtctaattcaaaaccacctttgccagaaggagttctgtctggcatgtgagctgggcttcctgtttcacatgttggacctctctcgtggtgacccttgccagggcaataattttcttcgggcattccgtactattcctgaggcctcagccctcggtctaatcctggctgactcagatgaggcctcaggcaagggcaatctggccaggctcattcagaggtggaatcgcttcattctcactcaactgcatcaagatatgcaggagctggaaataccacaggcttatcgaggtgctggaggcagcttttgctcatcgggggactctgttattgggcagctcttcagctgtgagatggagaactgcagcctctgccgctgtggcagtgagaccgtgcgagcctcatccactctgcttttcacactctcctaccctgatggtagcaaaagtgataaaactgggaagaactatgactttgctcaggtgctgaagcgaagcatctgcctggaccagaatacacaggcctggtgtgacacctgtgaaaagtaccagcccacgattcagacccgcaacatccgccatctgccagatattcttgtcatcaattgtgaggtgaacagctcaaaagaggctgatttctggagaatgcaggctgaggttgccttcaagatggcagtaaagaaacacggtggggaaatctccaagaacaaggaatttgctttggctgattggaaggaactagggagtccagagggtgtgctggtgtgtccctccattgaggagttgaagaacgtctggcttcctttctccattcgcatgaagatgaccaaaaacaaagggctggatgtttgcaattggactgatggggatgagatgcagtggggcccagccagggcagaggaggagcatggtgtctatgtgtatgacctgatggctactgtggtacacatcctggactcacgcacagggggcagcctggtggctcacatcaaagttggagagacctaccaccagcgcaaggagggcgttactcaccagcagtggtatctgttcaatgactttcttattgaacctattgataagcatgaagctgtgcagtttgacatgaattggaaagtacctgcaatcctttattatgtcaaacggaatctcaattccagatacaacctgaacatcaagaaccctattgaggcaagtgtcttgctggctgaagcctcgctggcacggaagcagcggaaaacacatactacctttattccactgatgctgaatgagatgccacagattggggacctggtgggtctggatgctgagtttgtcacccttaatgaggaggaagcagagttacgcagtgatggtaccaagtctaccattaaaccaagccagatgtcagtagccaggattacctgtgttcggggccagggacccaatgagggtatccccttcattgatgactacatctctacccaggagcaggtggtggattacttgactcaatactcgggtataaagcctggtgacctcgatgccaaaatttcctccaagcacctaacaactctcaagtctacctacttaaagcttcgttttctcattgacattggagtcaagtttgtgggtcatggcctgcagaaggacttccgggtcatcaacctgatggtgcccaaggaccaagtccttgacactgtctacctgttccatatgccccgaaaacgaatgatttccctgcgattccttgcttggtactttctggacctgaagattcaaggggaaacccatgacagtattgaggatgcccgcacagcccttcagctgtaccgaaagtatctggagctaagcaaaaatggcactgagcctgagtctttccacaaggtgctcaagggtctttatgagaagggcagaaagatggactggaaggtgcctgagcctgagggccaaacaagtcccaagaatgcagctgtcttctcctcagtgctggcgctctgactacccttcccaaagaaccacggccctctccctttactgttctatagccccagaactgggagatggcttcctaagttggctataccttgtccacttccagtactggacgtgctcagggtctagggtcacagatggtgctattaattgaactggaacacagcagaattgttgcaaaggttctaggagccagattcattccttcttcattctttgcaaaacagtggtacagacatggagtctagaattgacccagatggaaagtaattggtattcttaatatcctgggtgactaatatccaggcagagaagctcctggaaccataactgtaagttcctagctggctagggattgaagtcctggacagtgacagaggataccacagtagttcaagacttagcacaagtcaccaactgcttcagggatacctggaggggccagcaagtagagtgttggtggcccaagcaaaccagtgttgccaataccattgccaaaagggcctttggatcctggacaaagcttggctgccggcttcatttattcctgctgatggctgagaagcatctgtcttccatcccacttgcctgtcccaagttttgttccattttttaaaaatttgttgtaaactgcatgttttataaaataaaaataaaatatcgtttgttatttatctc

SEQ ID NO: 64711 - DNA, 3606 bp, Artificial Sequence
  derived and/or modified sequence
atgaatttcgaaggtttggatcccggactcgccgaatacgctcctgccatgcacagtgctctggacccggtgctagatgcccacctaaatcccagcctgctgcagaacgttgagctggatccagagggcgtggctctggaagccctaccggtgcaggaatctgtgcacataatggaaggagtgtactccgagcttcactctgtcgtggcagaagttggggtcccagtgtctgtgagccatttcgacctgcatgaagagatgctctgggtagggtctcatgggggacacgccacaagcttcttcggacccgcactggaacggtattcaagctttcaggtcaacgggtcggatgatattcgccagattcaaagcctagagaacggtattctgtttctgacaaaaaacaacctgaagtatatggctaggggcggacttattattttcgactatctgcttgatgagaacgaggacatgcattccctgctgctaacagacagctccacccttctcgtgggcggtctgcaaaaccatattatcgagattgacctgaacactgtacaggaaacacaaaagtatgcagtggagacacctggagtcaccatcatgagacagaccaaccggtttttcttttgtggccacacgagtggaaaagtaagtctgcgagaccttagaaccttcaaagttgaacatgagtttgacgctttttcgggttctctgtcagactttgatgtccatgggaacctcctggccgcttgtggcttctcctctcggctcaccggactagcttgtgacagatttctgaaggtttacgacttgaggatgatgcgggctatcacgccactccaggtacatgtggaccccgctttccttcgcttcatcccgacctatacttcgcgcctggctattatctcccaatcaggacagtgccagttttgcgagccaaccgggctagccaatccggctgacatatttcacgttaatcctgttggacctctactgatgactttcgatgtgtccgcctctaaacaggccctggcgttcggggacagcgaagggtgcgtgcacttgtggacggattcgccggagccttcattcaacccttattctcgcgaaactgaattcgctttgccctgcctggtggatagcctgccccctctcgattggtcccaggatctgctcccactgagtttaatcccagttccactcaccacagacacactcctttcggattggcctgctgccaactcggctccagccccacgtcgtgcccctcccgtcgatgcagagattttgagaacaatgaagaaggttgggttcatcggctatgcccctaacccacgtactcggctgagaaatcagattccttaccgccttaaggaaagcgattctgaattcgacagcttcagccaggtcaccgagagtcctgttgggagggaagaggagccccacctgcatatggtcagcaaaaaataccgaaaggtgacgatcaagtactccaaactgggccttgaagattttgatttcaagcactataataagaccttattcgcaggtctcgaacctcatattcctaatgcctactgcaattgcatgattcaagttctttactttctggaacctgtgaggtgtcttatccagaaccacctttgccagaaggagttttgcctggcatgtgagttagggtttctttttcatatgctcgacctcagcagaggggatccgtgccagggtaataacttcttaagagcgtttagaaccattcccgaagcgtctgccctagggttgatcttggctgacagcgacgaggctagtgggaaggggaacctcgccagactgatccagagatggaaccgcttcatcctcacccagctgcaccaagatatgcaggagcttgagatcccacaggcctacagaggggcagggggttctttttgcagctcaggggattcggttattgggcagctgttcagctgcgagatggaaaattgcagcctgtgccggtgcggatcggaaacagtgagagcctccagcacactcctcttcacgctcagctatcctgatggatccaaatccgataaaactgggaagaactacgatttcgcgcaggtgcttaagagatcaatctgtttagaccaaaacacacaggcctggtgtgacacatgtgagaagtaccagccaactatccagactcgtaacatcaggcacttgccagacatcctggtgataaactgcgaggtgaattccagcaaggaggccgacttctggcggatgcaggcagaagtcgccttcaaaatggccgtgaagaagcacggcggagagatcagcaaaaacaaagagtttgccttggccgactggaaagaactggggtccccagagggtgtgctagtgtgtccttcaatcgaagagttgaaaaatgtgtggctgccattctctatccggatgaagatgaccaagaacaagggactcgatgtttgcaactggacagacggagatgagatgcaatgggggcctgccagggcagaagaggagcacggcgtgtacgtgtatgacttaatggctactgttgtgcacattctagacagccgcactggaggctcactggtggctcacataaaagtgggcgaaacctatcaccagcgtaaagagggagtgacgcatcagcaatggtacctttttaacgatttccttatcgagccaatcgataagcatgaagcagtccaattcgacatgaattggaaggtccctgcgatcctctattatgtgaaaaggaatctgaacagccgatataacctcaacattaagaatccaattgaggcatccgtgctcctagccgaggccagcctggccagaaaacagagaaagacacatacaacgttcatccctctcatgctgaacgaaatgcctcagattggcgaccttgtggggctggatgctgagttcgtcacacttaacgaagaagaggccgagttacgcagcgacgggacaaaaagcactataaagccatctcaaatgagcgtagctcggattacgtgcgttcgcggacaggggcctaatgagggaataccgtttatagacgattatattagcactcaggagcaagtcgtggattaccttactcaatactctggaatcaagcccggagatcttgatgcaaaaatctcctctaagcatctcaccactctgaaatctacataccttaagttacgttttctaatcgatatcggggtcaaattcgtgggacatggtctccagaaagacttccgcgtaatcaatctgatggttcctaaggaccaagttctggacacagtatatttattccacatgcccaggaagcgcatgatttccctgaggttcttggcctggtattttctggatctgaagatccagggtgaaacccacgatagcattgaggatgctagaacagccctccaactgtaccgcaaatacctcgagttaagcaagaacgggacggaacccgagtcttttcacaaggttcttaaggggttatacgagaagggaaggaaaatggactggaaagtcccagagccagagggccagacatcacctaagaacgcagcagtctttagttcagtgttggcgctttag

SEQ ID NO: 64712 - DNA, 3606 bp, Artificial Sequence
  derived and/or modified sequence
atgaacttcgagggcctggaccccggcctggccgagtacgcccccgccatgcacagcgccctggaccccgtgctggacgcccacctgaaccccagcctgctgcagaacgtggagctggaccccgagggcgtggccctggaggccctgcccgtgcaggagagcgtgcacatcatggagggcgtgtacagcgagctgcacagcgtggtggccgaggtgggcgtgcccgtgagcgtgagccacttcgacctgcacgaggagatgctgtgggtgggcagccacggcggccacgccaccagcttcttcggccccgccctggagagatacagcagcttccaggtgaacggcagcgacgacatcagacagatccagagcctggagaacggcatcctgttcctgaccaagaacaacctgaagtacatggccagaggcggcctgatcatcttcgactacctgctggacgagaacgaggacatgcacagcctgctgctgaccgacagcagcaccctgctggtgggcggcctgcagaaccacatcatcgagatcgacctgaacaccgtgcaggagacccagaagtacgccgtggagacccccggcgtgaccatcatgagacagaccaacagattcttcttctgcggccacaccagcggcaaggtgagcctgagagacctgagaaccttcaaggtggagcacgagttcgacgccttcagcggcagcctgagcgacttcgacgtgcacggcaacctgctggccgcctgcggcttcagcagcagactgaccggcctggcctgcgacagattcctgaaggtgtacgacctgagaatgatgagagccatcacccccctgcaggtgcacgtggaccccgccttcctgagattcatccccacctacaccagcagactggccatcatcagccagagcggccagtgccagttctgcgagcccaccggcctggccaaccccgccgacatcttccacgtgaaccccgtgggccccctgctgatgaccttcgacgtgagcgccagcaagcaggccctggccttcggcgacagcgagggctgcgtgcacctgtggaccgacagccccgagcccagcttcaacccctacagcagagagaccgagttcgccctgccctgcctggtggacagcctgccccccctggactggagccaggacctgctgcccctgagcctgatccccgtgcccctgaccaccgacaccctgctgagcgactggcccgccgccaacagcgcccccgcccccagaagagccccccccgtggacgccgagatcctgagaaccatgaagaaggtgggcttcatcggctacgcccccaaccccagaaccagactgagaaaccagatcccctacagactgaaggagagcgacagcgagttcgacagcttcagccaggtgaccgagagccccgtgggcagagaggaggagccccacctgcacatggtgagcaagaagtacagaaaggtgaccatcaagtacagcaagctgggcctggaggacttcgacttcaagcactacaacaagaccctgttcgccggcctggagccccacatccccaacgcctactgcaactgcatgatccaggtgctgtacttcctggagcccgtgagatgcctgatccagaaccacctgtgccagaaggagttctgcctggcctgcgagctgggcttcctgttccacatgctggacctgagcagaggcgacccctgccagggcaacaacttcctgagagccttcagaaccatccccgaggccagcgccctgggcctgatcctggccgacagcgacgaggccagcggcaagggcaacctggccagactgatccagagatggaacagattcatcctgacccagctgcaccaggacatgcaggagctggagatcccccaggcctacagaggcgccggcggcagcttctgcagcagcggcgacagcgtgatcggccagctgttcagctgcgagatggagaactgcagcctgtgcagatgcggcagcgagaccgtgagagccagcagcaccctgctgttcaccctgagctaccccgacggcagcaagagcgacaagaccggcaagaactacgacttcgcccaggtgctgaagagaagcatctgcctggaccagaacacccaggcctggtgcgacacctgcgagaagtaccagcccaccatccagaccagaaacatcagacacctgcccgacatcctggtgatcaactgcgaggtgaacagcagcaaggaggccgacttctggagaatgcaggccgaggtggccttcaagatggccgtgaagaagcacggcggcgagatcagcaagaacaaggagttcgccctggccgactggaaggagctgggcagccccgagggcgtgctggtgtgccccagcatcgaggagctgaagaacgtgtggctgcccttcagcatcagaatgaagatgaccaagaacaagggcctggacgtgtgcaactggaccgacggcgacgagatgcagtggggccccgccagagccgaggaggagcacggcgtgtacgtgtacgacctgatggccaccgtggtgcacatcctggacagcagaaccggcggcagcctggtggcccacatcaaggtgggcgagacctaccaccagagaaaggagggcgtgacccaccagcagtggtacctgttcaacgacttcctgatcgagcccatcgacaagcacgaggccgtgcagttcgacatgaactggaaggtgcccgccatcctgtactacgtgaagagaaacctgaacagcagatacaacctgaacatcaagaaccccatcgaggccagcgtgctgctggccgaggccagcctggccagaaagcagagaaagacccacaccaccttcatccccctgatgctgaacgagatgccccagatcggcgacctggtgggcctggacgccgagttcgtgaccctgaacgaggaggaggccgagctgagaagcgacggcaccaagagcaccatcaagcccagccagatgagcgtggccagaatcacctgcgtgagaggccagggccccaacgagggcatccccttcatcgacgactacatcagcacccaggagcaggtggtggactacctgacccagtacagcggcatcaagcccggcgacctggacgccaagatcagcagcaagcacctgaccaccctgaagagcacctacctgaagctgagattcctgatcgacatcggcgtgaagttcgtgggccacggcctgcagaaggacttcagagtgatcaacctgatggtgcccaaggaccaggtgctggacaccgtgtacctgttccacatgcccagaaagagaatgatcagcctgagattcctggcctggtacttcctggacctgaagatccagggcgagacccacgacagcatcgaggacgccagaaccgccctgcagctgtacagaaagtacctggagctgagcaagaacggcaccgagcccgagagcttccacaaggtgctgaagggcctgtacgagaagggcagaaagatggactggaaggtgcccgagcccgagggccagaccagccccaagaacgccgccgtgttcagcagcgtgctggccctgtag

SEQ ID NO: 64713 - protein, 189 aa, Artificial Sequence [sequence omitted]

SEQ ID NO: 64714 - protein, 783 aa, Artificial Sequence [sequence omitted]

SEQ ID NO: 64715 - protein, 783 aa, Artificial Sequence
  derived and/or modified sequence
MRELVNIPLVHILTLVAFSGTEKLPKAPVITTPLETVDALVEEVATFMCAVESYPQPEISWTRNKILIKLFDTRYSIRENGQLLTILSVEDSDDGIYCCTANNGVGGAVESCGALQVKMKPKITRPPINVKIIEGLKAVLPCTTMGNPKPSVSWIKGDSPLRENSRIAVLESGSLRIHNVQKEDAGQYRCVAKNSLGTAYSKVVKLEVEEESEPEQDTKVFARILRAPESHNVTFGSFVTLHCTATGIPVPTITWIENGNAVSSGSIQESVKDRVIDSRLQLFITKPGLYTCIATNKHGEKFSTAKAAATISIAAWKKYCLAVKELFCAKEWLVMEEKTHRGLYRSEMHLLSVPECSKLPSMHWDPTACARLPHLAFPPMTSSKPSVDIPNLPSSSSSSFSVSPTYSMTVIISIMSSFAIFVLLTITTLYCCRRRKQWKNKKRESAAVTLTTLPSELLLDRLHPNPMYQRMPLLLNPKLLSLEYPRNNIEYVRDIGEGAFGRVFQARAPGLLPYEPFTMVAVKMLKEEASADMQADFQREAALMAEFDNPNIVKLLGVCAVGKPMCLLFEYMAYGDLNEFLRSMSPHTVCSLSHSDLSMRAQVSSPGPPPLSCAEQLCIARQVAAGMAYLSERKFVHRDLATRNCLVGENMVVKIADFGLSRNIYSADYYKANENDAIPIRWMPPESIFYNRYTTESDVWAYGVVLWEIFSYGLQPYYGMAHEEVIYYVRDGNILSCPENCPVELYNLMRLCWSKLPADRPSFTSIHRILERMCERAEGTVSV

SEQ ID NO: 64716 - DNA, 2352 bp, Artificial Sequence
  derived and/or modified sequence
atgagggaactggtcaatatccccctggtccatatcctgacactcgtggcattttccggaactgagaaactgcccaaggctccagtgattacaacgcctctggagacagtagacgcattagtcgaggaggtcgccaccttcatgtgcgcggtcgagagctatccacagccagagatttcttggacgcggaataagattctgatcaagctcttcgatacacgctatagtataagggagaatggacagctgctgacaatactgtcagttgaagactctgatgatggcatttactgttgcacagccaacaacggagtcggaggcgctgtggagtcttgcggcgccttgcaggttaagatgaaacccaagatcacccgcccccccataaatgttaagattatcgagggactcaaagcggtgttgccatgcacgacgatgggcaatcctaaaccctctgtttcatggattaaaggagattccccgcttagggagaactcacggatcgccgtactggagtctgggtcactaagaattcacaacgtgcagaaagaagacgctggccagtacagatgtgtcgctaagaacagtcttggaacggcatattccaaagttgtgaaactcgaggttgaagaagaaagtgaaccggaacaagacacaaaggtgttcgctcggatactcagggcacctgaatcccacaatgtgacatttggttccttcgttacactgcactgtacagcaacagggatcccagttcctacaatcacctggattgagaatggcaatgcagtgagcagcggttcaattcaggagtctgtgaaggacagggtgatcgactccagacttcagctgtttatcactaaacccgggttatacacatgtatagctaccaataagcatggcgagaagttttccaccgccaaagccgctgctaccatcagcatagccgattttcgtgagtattgtcttgccgttaaggaactattctgcgcaaaagaatggctggtcatggaagaaaaaactcacagaggactgtatagaagcgaaatgcatctgctctctgtaccggagtgctcaaaactgcccagtatgcattgggatcccaccgcatgcgccaggcttccacacctagcattccctcccatgacctcatcaaagccgtccgtcgatatacctaacctcccctccagctcctcatcgtccttctctgtgtcacccacctactccatgactgtgattatctcaatcatgtccagcttcgccatatttgtgctgctcactataactaccctttactgctgcagacgccggaagcagtggaaaaataagaaacgcgagagcgctgccgtgactctcaccacactgcctagtgaactgttactcgaccgattgcatcccaatccaatgtatcaacgaatgcccctcctcttaaatcctaagctcctatcactggagtatccccggaacaacatcgagtatgttagggacattggtgagggggctttcggtagggtgttccaagccagagcacccgggcttctgccttatgagcctttcacaatggtcgcagtcaagatgcttaaggaagaagcttccgcagacatgcaggccgactttcagagggaagcggccctcatggcagaatttgataatcctaacattgttaagctcctgggtgtatgcgccgtcgggaagccgatgtgtcttctgtttgagtacatggcctacggagatttgaacgaattcctcaggtccatgagccctcataccgtgtgtagcttgtcacactctgacttatctatgagggctcaggtgtcttcgcccgggcccccccccttgtcttgtgctgaacagctatgtattgcgaggcaggtcgcggctgggatggcatatctgtccgaaagaaaatttgttcaccgcgatctggccacaaggaattgccttgttggggagaacatggtcgtgaagatcgctgattttggactgtccagaaatatttatagcgcagattactacaaagctaatgaaaacgacgccatccctatccgctggatgccccctgaatccatcttttacaatcggtacaccacagagagtgatgtgtgggcttacggcgtggtcctctgggaaattttttcttacggtctgcaaccctactacgggatggctcatgaagaagtcatctactacgtccgagacggaaatattctcagttgcccagaaaattgccccgttgagttatacaatctcatgaggctctgctggtccaagcttcccgcagataggcccagctttacatctatacacaggatcctggaaagaatgtgcgagcgggccgagggaactgtcagtgtgtag

SEQ ID NO: 64717 - DNA, 2352 bp, Artificial Sequence
  derived and/or modified sequence
atgcgcgagttagtcaatattcctctagtccacatattaacacttgtggctttctcgggcactgagaaactccccaaggcaccggtcataacaacgcctttggagacagttgatgccctcgtggaagaggttgcaacgtttatgtgcgcggtggaatcttaccctcagccggagattagctggacaaggaataagatcttgataaagttgtttgatacaaggtactccataagagagaacggccagttgctgaccatcctgtccgtagaagactctgatgatggcatttactgttgcaccgccaacaatggtgtcggtggcgccgtggaaagttgcggagcattgcaggtgaaaatgaagcccaaaatcaccaggcctccgattaatgtaaagattatcgagggtctgaaggccgtgctgccttgtacaacaatgggtaacccaaaaccatcagtgtcctggatcaaaggagacagcccactcagggaaaactctcgaatcgccgtactagaaagcggtagcctgcggattcacaacgttcaaaaggaagacgccgggcaatacagatgtgtcgccaagaatagcttgggtactgcctactccaaggttgtgaagctcgaggtagaagaggagtccgaacccgaacaggatactaaggtgttcgcgaggatactgcgggctcccgagtctcacaatgtgactttcgggagttttgtgacattacactgtacggctactggcatacccgtccccacgattacctggattgagaatgggaacgcagtgagcagtgggtctattcaggagtctgtgaaggatcgggttatcgactcccgactccaactctttattacgaaacccggtctttatacctgtattgccaccaacaaacatggagagaagttctctaccgccaaagccgccgccactataagcatagctgcctggaaaaagtactgtctggccgttaaggagttattctgcgctaaagaatggcttgtaatggaggaaaagacccaccgcggcctctatcgcagcgagatgcatctgttgtccgtcccagaatgttccaagctgcccagtatgcactgggatcccacagcttgtgctcgcttgcctcatctcgccttccccccaatgaccagctccaaacccagtgtcgatatccccaatctgccctcaagcagtagcagctcattctctgtatcacctacctattctatgacggtgatcatcagtatcatgtctagcttcgccatttttgtgctgttaaccattaccaccctgtattgttgtcgtagacgcaagcagtggaagaacaaaaaaagagagagcgccgctgtgacactgacgactctgccgtctgaactcctcctggaccggctgcaccccaaccctatgtatcagcgcatgccattgctactgaaccccaaactcctgagcctggaatacccaaggaataacatcgaatacgtcagagatataggggaaggagcctttggacgggtcttccaggcccgcgctcccggactcctgccatatgagcccttcacaatggtggccgtgaaaatgctcaaggaggaggccagcgccgacatgcaggcagattttcaaagagaagccgcactgatggcagagtttgataacccgaatattgtcaagttgttgggtgtttgcgcagtagggaagcctatgtgtcttctcttcgaatatatggcctatggggacctgaatgaattcctgaggtcaatgagtcctcacacagtctgtagcctaagccactccgatctatcgatgcgcgctcaggtcagctctccgggcccgccgcctctaagctgcgctgaacagctgtgcattgctaggcaagtggcggctggcatggcctacttatccgaacgcaagttcgttcatagggatcttgctactcgtaattgtctggtgggagagaacatggtggttaaaatcgccgatttcgggctgtcccgtaatatctacagcgccgattattacaaagcaaacgaaaacgacgccatccccataaggtggatgcctcctgagtctatattctacaatagatatacaaccgaaagcgatgtgtgggcctatggagtagttctttgggaaattttctcatatgggttgcaaccttactacggaatggctcatgaggaagtgatttattacgtgagggatggtaacattctgtcttgtccagaaaactgcccagtagagttatataacctcatgaggctttgctggagtaagcttcccgccgaccggccgtcttttacgagtatccaccgcatcctggagagaatgtgcgaacgcgctgagggcacagtatccgtgtag

SEQ ID NO: 64718 - DNA, 2352 bp, Artificial Sequence
  derived and/or modified sequence
atgagggagctggtgaacatccccctggtgcacatcctgaccctggtggccttctctggaacagagaagctgcccaaggcccctgtgatcaccacccccctggagaccgtggatgccctggtggaggaggtggccaccttcatgtgtgctgtggagagctacccccagcctgagatctcctggaccaggaacaagatcctgatcaagctgtttgacacccgctacagcatcagagaaaatggccagctgctgaccatcctgtctgtggaggacagtgatgatggcatctactgctgcacagccaacaatggagtgggcggcgctgtggagagctgtggggccctgcaggtgaagatgaagcccaagatcacccggccccccatcaacgtgaagatcatcgagggcctgaaggctgtgctgccctgcaccaccatgggcaaccccaagcccagcgtgtcctggatcaagggggacagccccctgcgggagaacagcagaattgctgtgctggagagcggcagcctgcgcatccacaacgtgcagaaggaggatgctggccagtaccgctgtgtggccaagaacagcctgggcacagcctacagcaaggtggtgaagctggaggtggaggaggagagcgagcctgagcaggacaccaaggtgtttgcccgcatcctgcgggcccctgagagccacaacgtgaccttcggcagctttgtgaccctgcactgcacagccaccggcatccctgtgcccaccatcacctggattgaaaatggaaatgctgtgagcagcggcagcatccaggagagcgtgaaggacagagtcatcgacagccggctgcagctgttcatcaccaagccaggcctgtacacctgcatcgccaccaacaagcacggggagaagttcagcacagccaaggccgccgccaccatcagcattgctgacttccgggagtactgcctggccgtgaaggagctgttctgtgccaaggagtggctggtgatggaggagaagacccaccggggcctgtacagaagtgagatgcacctgctgtctgtgcctgaatgttccaagctgcccagcatgcactgggaccccacagcctgtgcccggctgccccacctggccttcccccccatgaccagcagcaagcccagcgtggacatccccaacctgcccagcagcagcagcagcagcttctctgtgagccccacctacagcatgaccgtcatcatcagcatcatgagcagctttgccatctttgtgctgctgaccatcaccaccctgtactgctgcagaagaaggaagcagtggaagaacaagaagcgggagagcgctgctgtgaccctgaccaccctgcccagcgagctgctgctggaccggctgcaccccaaccccatgtaccagaggatgcccctgctgctgaaccccaagctgctgagcctggagtaccccaggaacaacattgaatatgtgcgggacattggagagggcgccttcggccgggtcttccaggcccgggcccctggcctgctgccctatgagcccttcaccatggtggccgtgaagatgctgaaggaggaggccagcgctgacatgcaggccgacttccagcgggaggccgccctgatggccgagtttgacaaccccaacatcgtgaagctgctgggcgtgtgtgctgtgggcaagcccatgtgcctgctgtttgagtacatggcctacggggacctgaatgagttcctgcgctccatgagcccccacacagtgtgcagcctgagccacagcgacctgtccatgagggcccaggtgagcagccctggccccccacccctgagctgtgccgagcagctgtgcatcgcccggcaggtggccgccggcatggcctacctgtctgagaggaagtttgtgcaccgggacctggccaccaggaactgcctggtgggggagaacatggtggtgaagattgctgactttggcctgagcaggaacatctacagcgctgactactacaaggccaatgaaaatgatgccatccccatccgctggatgcctcctgagagcatcttctacaaccgctacaccacagaaagtgatgtgtgggcctacggcgtggtgctgtgggagatcttctcctatggcctgcagccctactacggcatggcccacgaggaggtgatctactacgtgagagatggcaacatcctgagctgcccagagaactgccctgtggagctgtacaacctgatgaggctgtgctggagcaagctgcctgctgaccggcccagcttcaccagcatccaccgcatcctggagaggatgtgtgaaagagctgagggcaccgtgtctgtgtag

SEQ ID NO: 64719 - DNA, 2352 bp, Artificial Sequence
  derived and/or modified sequence
atgagggagctggtgaacatccccctggtgcacatcctgaccctggtggccttctctggaacagagaagctgcccaaggcccctgtgatcaccacccccctggagaccgtggatgccctggtggaggaggtggccaccttcatgtgtgctgtggagagctacccccagcctgagatctcctggaccaggaacaagatcctgatcaagctgtttgacacccgctacagcatcagagaaaatggccagctgctgaccatcctgtctgtggaggacagtgatgatggcatctactgctgcacagccaacaatggagtgggcggcgctgtggagagctgtggggccctgcaggtgaagatgaagcccaagatcacccggccccccatcaacgtgaagatcatcgagggcctgaaggctgtgctgccctgcaccaccatgggcaaccccaagcccagcgtgtcctggatcaagggggacagccccctgcgggagaacagcagaattgctgtgctggagagcggcagcctgcgcatccacaacgtgcagaaggaggatgctggccagtaccgctgtgtggccaagaacagcctgggcacagcctacagcaaggtggtgaagctggaggtggaggaggagagcgagcctgagcaggacaccaaggtgtttgcccgcatcctgcgggcccctgagagccacaacgtgaccttcggcagctttgtgaccctgcactgcacagccaccggcatccctgtgcccaccatcacctggattgaaaatggaaatgctgtgagcagcggcagcatccaggagagcgtgaaggacagagtcatcgacagccggctgcagctgttcatcaccaagccaggcctgtacacctgcatcgccaccaacaagcacggggagaagttcagcacagccaaggccgccgccaccatcagcattgctgcctggaagaagtactgcctggccgtgaaggagctgttctgtgccaaggagtggctggtgatggaggagaagacccaccggggcctgtacagaagtgagatgcacctgctgtctgtgcctgaatgttccaagctgcccagcatgcactgggaccccacagcctgtgcccggctgccccacctggccttcccccccatgaccagcagcaagcccagcgtggacatccccaacctgcccagcagcagcagcagcagcttctctgtgagccccacctacagcatgaccgtcatcatcagcatcatgagcagctttgccatctttgtgctgctgaccatcaccaccctgtactgctgcagaagaaggaagcagtggaagaacaagaagcgggagagcgctgctgtgaccctgaccaccctgcccagcgagctgctgctggaccggctgcaccccaaccccatgtaccagaggatgcccctgctgctgaaccccaagctgctgagcctggagtaccccaggaacaacattgaatatgtgcgggacattggagagggcgccttcggccgggtcttccaggcccgggcccctggcctgctgccctatgagcccttcaccatggtggccgtgaagatgctgaaggaggaggccagcgctgacatgcaggccgacttccagcgggaggccgccctgatggccgagtttgacaaccccaacatcgtgaagctgctgggcgtgtgtgctgtgggcaagcccatgtgcctgctgtttgagtacatggcctacggggacctgaatgagttcctgcgctccatgagcccccacacagtgtgcagcctgagccacagcgacctgtccatgagggcccaggtgagcagccctggccccccacccctgagctgtgccgagcagctgtgcatcgcccggcaggtggccgccggcatggcctacctgtctgagaggaagtttgtgcaccgggacctggccaccaggaactgcctggtgggggagaacatggtggtgaagattgctgactttggcctgagcaggaacatctacagcgctgactactacaaggccaatgaaaatgatgccatccccatccgctggatgcctcctgagagcatcttctacaaccgctacaccacagaaagtgatgtgtgggcctacggcgtggtgctgtgggagatcttctcctatggcctgcagccctactacggcatggcccacgaggaggtgatctactacgtgagagatggcaacatcctgagctgcccagagaactgccctgtggagctgtacaacctgatgaggctgtgctggagcaagctgcctgctgaccggcccagcttcaccagcatccaccgcatcctggagaggatgtgtgaaagagctgagggcaccgtgtctgtgtag

SEQ ID NO: 64720 - DNA, 1696 bp, Artificial Sequence
  derived and/or modified sequence
gtggagctgctgacacaaacagtcattagcagacaacccttttgcaacaaagtatgctttaaaatgtaaactgtggagccattttccttgcgttgtccagaaggaacttcgtcctgcgtgagcctggattaatcatgagagagctcgtcaacattccactggtacatattcttactctggttgccttcagcggaactgagaaacttccaaaagctcctgtcatcaccactcctcttgaaacagtggatgccttagttgaagaagtggctactttcatgtgtgcagtggaatcctacccccagcctgagatttcctggactagaaataaaattctcattaaactctttgacacccggtacagcatccgggagaatgggcagctcctcaccatcctgagtgtggaagacagtgatgatggcatttactgctgcacggccaacaatggtgtgggaggagctgtggagagttgtggagccctgcaagtgaagatgaaacctaaaataactcgtcctcccataaatgtgaaaataatagagggattaaaagcagtcctaccatgtactacaatgggtaatcccaaaccatcagtgtcttggataaagggagacagccctctcagggaaaattcccgaattgcagttcttgaatctgggagcttgaggattcataacgtacaaaaggaagatgcaggacagtatcgatgtgtggcaaaaaacagcctcgggacagcatattccaaagtggtgaagctggaagttgaggaagaaagtgaacccgaacaagatactaaagtttttgccaggatcctgcgggctcctgaatcccacaatgtcacctttggctcctttgtgaccctgcactgtacagcaacaggcattcctgtccccaccatcacctggattgaaaacggaaatgctgtttcttctgggtccattcaagagagtgtgaaagaccgagtgattgactcaagactgcagctgtttatcaccaagccaggactctacacatgcatagctaccaataagcatggggagaagttcagtactgccaaggctgcagccaccatcagcatagcagattttagagagtactgcttggcagtaaaggagctcttctgcgcaaaagaatggctggtaatggaagagaagacccacagaggactctacagatccgagatgcatttgctgtccgtgccagaatgcagcaagcttcccagcatgcattgggaccccacggcctgtgccagactgccacatctagagaatcagcagcagtaaccctcaccacactgccttctgagctcttactagatagacttcatcccaaccccatgtaccagaggatgccgctccttctgaaccccaaattgctcagcctggagtatccaaggaataacattgaatatgtgagagacatcggagagggagcgtttggaagggtgtttcaagcaagggcaccaggcttacttccctatgaacctttcactatggtggcagtaaagatgctcaaagaagaagcctcggcagatatgcaagcggactttcagagggaggcagccctcatggcagaatttgacaaccctaacattgtgaagctattaggtatgaaaatacaagtgaggatatgtatttcatcagaaaacagaggctttccaagtttttctccccttgttcgtgctttttccttttctccttga

SEQ ID NO: 64721 - DNA, 2496 bp, Artificial Sequence
  derived and/or modified sequence
gtggagctgctgacacaaacagtcattagcagacaacccttttgcaacaaagtatgctttaaaatgtaaactgtggagccattttccttgcgttgtccagaaggaacttcgtcctgcgtgagcctggattaatcatgagagagctcgtcaacattccactggtacatattcttactctggttgccttcagcggaactgagaaacttccaaaagctcctgtcatcaccactcctcttgaaacagtggatgccttagttgaagaagtggctactttcatgtgtgcagtggaatcctacccccagcctgagatttcctggactagaaataaaattctcattaaactctttgacacccggtacagcatccgggagaatgggcagctcctcaccatcctgagtgtggaagacagtgatgatggcatttactgctgcacggccaacaatggtgtgggaggagctgtggagagttgtggagccctgcaagtgaagatgaaacctaaaataactcgtcctcccataaatgtgaaaataatagagggattaaaagcagtcctaccatgtactacaatgggtaatcccaaaccatcagtgtcttggataaagggagacagccctctcagggaaaattcccgaattgcagttcttgaatctgggagcttgaggattcataacgtacaaaaggaagatgcaggacagtatcgatgtgtggcaaaaaacagcctcgggacagcatattccaaagtggtgaagctggaagttgaggaagaaagtgaacccgaacaagatactaaagtttttgccaggatcctgcgggctcctgaatcccacaatgtcacctttggctcctttgtgaccctgcactgtacagcaacaggcattcctgtccccaccatcacctggattgaaaacggaaatgctgtttcttctgggtccattcaagagagtgtgaaagaccgagtgattgactcaagactgcagctgtttatcaccaagccaggactctacacatgcatagctaccaataagcatggggagaagttcagtactgccaaggctgcagccaccatcagcatagcagattttagagagtactgcttggcagtaaaggagctcttctgcgcaaaagaatggctggtaatggaagagaagacccacagaggactctacagatccgagatgcatttgctgtccgtgccagaatgcagcaagcttcccagcatgcattgggaccccacggcctgtgccagactgccacatctagcattcccaccaatgacgtcctcaaagccaagtgtggacattccaaatctgccttcctcctcctcttcttccttctctgtctcacctacatactccatgactgtaataatctccatcatgtccagctttgcaatatttgtgcttcttaccataactactctctattgctgccgaagaagaaaacaatggaaaaataagaaaagagaatcagcagcagtaaccctcaccacactgccttctgagctcttactagatagacttcatcccaaccccatgtaccagaggatgccgctccttctgaaccccaaattgctcagcctggagtatccaaggaataacattgaatatgtgagagacatcggagagggagcgtttggaagggtgtttcaagcaagggcaccaggcttacttccctatgaacctttcactatggtggcagtaaagatgctcaaagaagaagcctcggcagatatgcaagcggactttcagagggaggcagccctcatggcagaatttgacaaccctaacattgtgaagctattaggagtgtgtgctgtcgggaagccaatgtgcctgctctttgaatacatggcctatggtgacctcaatgagttcctccgcagcatgtcccctcacaccgtgtgcagcctcagtcacagtgacttgtctatgagggctcaggtctccagccctgggcccccacccctctcctgtgctgagcagctttgcattgccaggcaggtggcagctggcatggcttacctctcagaacgtaagtttgttcaccgagatttagccaccaggaactgcctggtgggcgagaacatggtggtgaaaattgccgactttggcctctccaggaacatctactcagcagactactacaaagctaatgaaaacgacgctatccctatccgttggatgccaccagagtccattttttataaccgctacactacagagtctgatgtgtgggcctatggcgtggtcctctgggagatcttctcctatggcctgcagccctactatgggatggcccatgaggaggtcatttactacgtgcgagatggcaacatcctctcctgccctgagaactgccccgtggagctgtacaatctcatgcgtctatgttggagcaagctgcctgcagacagacccagtttcaccagtattcaccgaattctggaacgcatgtgtgagagggcagagggaactgtgagtgtctaaggttgaagac

SEQ ID NO: 64722 - DNA, 2496 bp, Artificial Sequence
  derived and/or modified sequence
gtggagctgctgacacaaacagtcattagcagacaacccttttgcaacaaagtatgctttaaaatgtaaactgtggagccattttccttgcgttgtccagaaggaacttcgtcctgcgtgagcctggattaatcatgagagagctcgtcaacattccactggtacatattcttactctggttgccttcagcggaactgagaaacttccaaaagctcctgtcatcaccactcctcttgaaacagtggatgccttagttgaagaagtggctactttcatgtgtgcagtggaatcctacccccagcctgagatttcctggactagaaataaaattctcattaaactctttgacacccggtacagcatccgggagaatgggcagctcctcaccatcctgagtgtggaagacagtgatgatggcatttactgctgcacggccaacaatggtgtgggaggagctgtggagagttgtggagccctgcaagtgaagatgaaacctaaaataactcgtcctcccataaatgtgaaaataatagagggattaaaagcagtcctaccatgtactacaatgggtaatcccaaaccatcagtgtcttggataaagggagacagccctctcagggaaaattcccgaattgcagttcttgaatctgggagcttgaggattcataacgtacaaaaggaagatgcaggacagtatcgatgtgtggcaaaaaacagcctcgggacagcatattccaaagtggtgaagctggaagttgaggaagaaagtgaacccgaacaagatactaaagtttttgccaggatcctgcgggctcctgaatcccacaatgtcacctttggctcctttgtgaccctgcactgtacagcaacaggcattcctgtccccaccatcacctggattgaaaacggaaatgctgtttcttctgggtccattcaagagagtgtgaaagaccgagtgattgactcaagactgcagctgtttatcaccaagccaggactctacacatgcatagctaccaataagcatggggagaagttcagtactgccaaggctgcagccaccatcagcatagcagcctggaaaaagtactgcttggcagtaaaggagctcttctgcgcaaaagaatggctggtaatggaagagaagacccacagaggactctacagatccgagatgcatttgctgtccgtgccagaatgcagcaagcttcccagcatgcattgggaccccacggcctgtgccagactgccacatctagcattcccaccaatgacgtcctcaaagccaagtgtggacattccaaatctgccttcctcctcctcttcttccttctctgtctcacctacatactccatgactgtaataatctccatcatgtccagctttgcaatatttgtgcttcttaccataactactctctattgctgccgaagaagaaaacaatggaaaaataagaaaagagaatcagcagcagtaaccctcaccacactgccttctgagctcttactagatagacttcatcccaaccccatgtaccagaggatgccgctccttctgaaccccaaattgctcagcctggagtatccaaggaataacattgaatatgtgagagacatcggagagggagcgtttggaagggtgtttcaagcaagggcaccaggcttacttccctatgaacctttcactatggtggcagtaaagatgctcaaagaagaagcctcggcagatatgcaagcggactttcagagggaggcagccctcatggcagaatttgacaaccctaacattgtgaagctattaggagtgtgtgctgtcgggaagccaatgtgcctgctctttgaatacatggcctatggtgacctcaatgagttcctccgcagcatgtcccctcacaccgtgtgcagcctcagtcacagtgacttgtctatgagggctcaggtctccagccctgggcccccacccctctcctgtgctgagcagctttgcattgccaggcaggtggcagctggcatggcttacctctcagaacgtaagtttgttcaccgagatttagccaccaggaactgcctggtgggcgagaacatggtggtgaaaattgccgactttggcctctccaggaacatctactcagcagactactacaaagctaatgaaaacgacgctatccctatccgttggatgccaccagagtccattttttataaccgctacactacagagtctgatgtgtgggcctatggcgtggtcctctgggagatcttctcctatggcctgcagccctactatgggatggcccatgaggaggtcatttactacgtgcgagatggcaacatcctctcctgccctgagaactgccccgtggagctgtacaatctcatgcgtctatgttggagcaagctgcctgcagacagacccagtttcaccagtattcaccgaattctggaacgcatgtgtgagagggcagagggaactgtgagtgtctaaggttgaagac

SEQ ID NO: 64723 - DNA, 2352 bp, Artificial Sequence
  derived and/or modified sequence
atgcgggagctggtgaacatccccctggtgcacatcctgaccctggtggcgttttctgggaccgagaagctgcccaaagccccagtgatcactacacctctggaaactgtggatgccctggtggaggaagtggcaaccttcatgtgtgcagtggagtcctaccctcaaccagagatatcttggacacgaaacaagatcctcatcaaattatttgatacaagatattccatcagggagaacgggcaactgctgacaatcctgagcgtggaggattccgacgatggcatttactgttgcacggccaataatggggtggggggcgccgtggagtcttgcggagccctacaggtaaagatgaagcccaaaatcacacgacctccaataaatgtgaaaataatcgagggcctcaaagctgtgctgccctgtaccactatgggaaatcctaagccaagcgtgtcttggatcaagggggatagtcctttaagggagaattccaggatcgcggtactcgagtccggatctctccgtatacataacgttcagaaagaagacgccggacaatacaggtgcgttgcaaagaatagtctcggtacagcatattcaaaagtggtcaagctggaggtggaggaagaatccgaacctgagcaggacacaaaggtgttcgcgcgcatactccgtgccccggagtcgcataatgtgacatttggatccttcgtcacactgcattgcacagccactggaatccccgttccaacaattacatggatagagaacgggaatgctgtgtcttccgggtcaattcaggagagcgttaaagacagggtgatcgactcccgcctccagctatttatcactaaacctggactgtatacttgcattgctactaacaaacacggtgagaaattcagtaccgcaaaggcggcagcaactataagtatcgccgattttagagaatactgtctggccgtgaaagaactattctgtgctaaggagtggctcgttatggaagagaagacacatcgaggactgtatcgcagcgaaatgcacctgctgtcggtgcctgagtgttctaagctgcctagtatgcactgggacccaacagcttgcgcacggctgcctcacctggcgttcccccctatgacatcgagcaagcccagcgtcgacattcccaatctcccaagtagttccagcagctccttttctgtcagtcccacatattccatgactgtgatcatcagtataatgtcatcgttcgccatcttcgtgttacttactattacgaccctgtactgctgtcggcgccgcaaacagtggaaaaacaagaaacgcgaatccgccgccgttacactgaccacccttccctctgagttgcttctcgatcgcctgcaccccaatccaatgtaccaacggatgcccctgcttctcaatccaaagctgttgagtctggaatatccgaggaacaatatcgagtacgtaagggacatcggtgaaggagcctttggccgggtatttcaggcacgggcccccgggcttctgccttacgagccttttaccatggtggcggtgaaaatgctgaaagaggaggcgagtgcggatatgcaggctgactttcagcgggaagccgctctgatggcagaattcgacaacccgaacattgtcaagctgctcggggtttgcgccgttggaaaaccgatgtgcttgctgtttgaatatatggcatacggcgacttaaacgaattcttacgctctatgagcccacacacagtgtgttccctgtcacattccgacctgtcaatgcgggcacaggtctcctccccaggcccccctccattatcgtgtgctgagcagctctgtattgccaggcaggtggcagcaggtatggcctacctgtcagagcgcaaatttgttcacagggacctggctacccggaattgtctggtgggtgaaaacatggttgtgaaaatcgccgacttcggactcagtcgtaacatctatagcgctgattattataaggccaacgagaatgacgcgatccctatcaggtggatgcctcccgaatctattttctataaccgttataccacagaatccgacgtgtgggcgtatggtgtggtgttgtgggaaatcttcagctatgggctccagccatattacggaatggcccatgaggaggtcatctattatgtaagagacggaaatatactgagctgccccgagaattgccctgttgaactctataatctgatgaggttgtgttggtccaaactgccggcagaccgtccatctttcacctccatacacaggattttggagaggatgtgcgagagggcagaggggaccgtgagcgtgtag

SEQ ID NO: 64724 - DNA, 2352 bp, Artificial Sequence
  derived and/or modified sequence
atgcgggagctggtgaacatccccctggtgcacatcctgaccctggtggcttttagtgggaccgagaagctgcctaaggcccctgtgatcactacacctcttgaaacagtggatgccctggttgaggaggtggccacgtttatgtgtgccgtcgagtcatatcctcagccagaaatctcctggacccggaataagattttgattaaattgtttgacacgagatacagcattcgagaaaatggacagctgctcacgattctgagcgttgaggatagcgacgatggcatttattgctgcaccgcaaataatggggttggaggtgccgttgagagttgtggggcccttcaggttaaaatgaaacctaagataactcgtccaccgattaacgtaaaaatcattgaaggcctaaaagccgtgctgccgtgcaccactatgggcaatcctaagccatccgtgagctggataaaaggcgattcccccctcagggaaaacagtcgaatcgctgtgctcgaaagtggctctcttcggattcataacgtgcagaaagaagacgcaggccagtaccggtgcgtcgctaagaatagcctaggtaccgcatacagcaaggtcgtgaagttagaagtagaagaggaatccgagccagagcaggacaccaaagtgtttgcacggatactgcgcgctcctgaaagtcacaatgttactttcgggtcatttgttactctgcattgcactgcaaccggcattccagtaccaaccataacttggattgaaaacggaaatgctgtctctagcgggagcatccaagagagtgtgaaagaccgagtgatcgactcccgactgcagctgttcatcaccaagcctggtctgtatacttgcattgccacaaacaaacacggtgaaaagttttcgacagctaaggccgcagcgacgatttctatcgcggcctggaagaagtattgtctggccgtgaaagaactcttctgcgcgaaagagtggttggtcatggaagagaagacccacagggggttataccgctctgagatgcatcttctgtcagtgcccgaatgctcgaagcttccttcaatgcactgggatccaacagcctgcgccaggctgcctcacctggcattcccccccatgacatcaagcaagccatccgtggacatacctaacctgccttcgtcgagttcctcatctttttcagttagcccaacatactcaatgaccgtgataatttcaatcatgagctcatttgctatttttgtacttcttacgatcacaactctgtattgctgcaggcggagaaagcagtggaaaaacaaaaaacgagaatcagctgcagtcaccttgaccacactgcctagcgagctcctcttggaccgtctacaccccaacccgatgtaccagcgcatgcctctgttgctcaatccaaaactgttgtcattggagtatccacgtaacaatatagagtacgtgagagacattggagaaggagcttttggacgggtctttcaagcaagagcacctggtcttctgccatacgaaccattcacaatggtcgccgtcaagatgctgaaggaggaggcttcggctgacatgcaggcagacttccaacgagaagctgccctgatggctgagtttgataatcccaacatagtgaaactgctgggtgtctgcgcagtgggcaagcctatgtgtttgcttttcgagtatatggcgtatggggacctcaacgagttcctccgatctatgtcacctcacaccgtctgctctctgagccacagcgacctgagcatgagggcccaggtgtcctcaccgggacctcctcccttgtcttgcgctgagcagctgtgtatcgccagacaagtggccgccggaatggcttatttgtctgagaggaaatttgtgcaccgagacctggcaacccgcaattgtctggtgggtgagaatatggtggtgaagattgccgattttggactgagccgcaatatttactccgcagactattataaagcgaacgagaacgatgccattcctatccgatggatgccgccagagtccatcttttacaaccgttacactacggaatctgacgtctgggcatatggggtggtgctttgggagattttcagttacgggctgcaaccttactacggaatggcccatgaggaggtgatatactacgtcagggatgggaatattctctcctgtccggagaactgcccggtggaactgtataacttgatgcgcctttgttggagcaagctgcccgccgatcggcctagcttcacctcaatccataggatacttgagcggatgtgcgagagggcagagggtacagtgagcgtgtag

SEQ ID NO: 64725 - DNA, 2352 bp, Artificial Sequence
  derived and/or modified sequence
atgcgagagttagtgaacatccctctggtccatatattgactctggtggcttttagtggaaccgagaaactgcccaaggccccagtcatcaccacccctctcgagaccgtggacgctctggttgaagaggtggcaaccttcatgtgtgccgttgaatcctacccccaacccgagatctcctggaccaggaataagatcttgattaagctcttcgacaccagatattcaatccgcgaaaacggccagctgctgaccatcttatccgtggaggacagtgacgatgggatctactgttgtaccgctaacaacggagtgggcggagctgtggagtcgtgcggggctctgcaggtgaagatgaagccgaagatcacccggcctccaatcaatgtcaagatcattgaggggctgaaagcagtgcttccatgcactactatggggaaccccaagccatcggtgtcctggataaaaggcgattctcccctgcgggagaattcacgaatagccgtgcttgagagcggctcactcaggatacacaatgtgcagaaggaagatgctggacagtacaggtgcgtggccaaaaactccctcggtactgcttacagcaaggtggtgaaacttgaagttgaggaagaaagtgagcccgaacaggacactaaagtattcgctaggattctgcgagctccagagtcccacaatgtcacctttggcagtttcgttactctgcattgcacggctaccggcattcctgtccccacaattacctggatcgagaacggcaacgccgtatcctcaggtagcatacaggaaagcgtgaaggaccgggtcatagactcaagattgcaacttttcataaccaaaccaggattatacacatgcattgcaacaaataagcacggcgagaagttttctactgctaaagccgctgccaccatctcgatcgcagatttccgagagtattgccttgccgtgaaggaattgttttgcgccaaagaatggttagtgatggaggaaaagacacataggggactttaccgctcagaaatgcacctgctgtcagtcccggagtgttctaaactgccgtccatgcattgggatcccacagcctgtgcccgtctcccccacctcgcttttcctcccatgacatcatcaaagccttcggtcgatattccgaatctaccctcctcctcatcctcatcttttagcgtgtctcctacctactccatgaccgtaatcatcagcatcatgagtagtttcgctattttcgtgctgctgacaatcactaccctatattgttgcaggcggcgaaaacagtggaagaataagaagagggagtccgccgcagtgactttgactaccctaccaagtgagttgttgctcgaccggcttcatcctaatcccatgtaccagcggatgccactgttactcaatccaaaactcctgtcactggagtatcctagaaataatatagagtacgtcagagacatcggcgagggtgcctttggccgtgtgtttcaggccagggcaccagggcttctgccttacgaaccatttacgatggttgccgtcaagatgttgaaggaggaggcctccgcggatatgcaggcggactttcagcgcgaagccgcactgatggctgagtttgataatcccaatatagttaaactgctcggggtctgcgccgttgggaaaccgatgtgcctgctgtttgagtatatggcctatggagacctgaatgagtttctgcgctcaatgagcccgcatacggtgtgctctctgtcccattcagatctgtccatgcgcgcacaggtctcgtcccctggacctcctcccctgtcgtgtgcggagcaattgtgtatcgctagacaggtggccgctggcatggcttacctcagcgaacggaagttcgtgcaccgcgacctggccacacgcaactgtctggtgggcgaaaatatggttgtgaaaatcgcagacttcggactgagtcgcaatatctattcagccgactactacaaagccaacgaaaacgatgcaattcccatcaggtggatgcccccagagagcatattctacaatcgctacacaactgaatccgatgtctgggcgtacggggtcgtgctctgggagatcttctcctacggactccagccctactatgggatggcgcacgaagaagtgatttactatgtgcgagacgggaatattctctcttgtccagagaactgccctgtcgaattatacaacctcatgcggctgtgttggtcaaagttaccagccgatcgtccgagttttacttctatccaccgcattttagaaaggatgtgtgagcgagccgagggtacagtgagcgtctag

SEQ ID NO: 64726 - DNA, 2352 bp, Artificial Sequence
  derived and/or modified sequence
atgcgggaactggttaatatccccctggtacacatcttgacgctggtcgcgttcagcggaacagaaaaactgcccaaggcccctgtcataacaacaccgttggagactgtggatgcacttgtagaggaagttgccacctttatgtgcgctgtggagagctatccccagcccgaaatttcgtggacacggaataagatattaatcaaattgtttgacacgcggtacagtattcgggaaaatggccagctactgacgattctgagcgtcgaagattcagatgacgggatatactgctgcactgcgaataacggagtcggcggagctgtcgagtcatgtggcgcactgcaagttaagatgaaacctaagattacaagaccacctattaacgtgaagataattgaggggttgaaggccgtcctcccttgtacaacgatgggcaatcctaaacccagtgtttcgtggattaagggagactcgcccctcagagagaattccagaattgcagtcctggagagcggatccttgaggattcataacgtacaaaaggaggacgccggtcaatacagatgtgttgccaaaaatagtctgggcaccgcctacagcaaggtggtgaaactcgaggtcgaagaggagtccgaacctgagcaggatactaaggtgtttgcgcgaatcctgagagcacctgagagccacaacgtcactttcggcagttttgtaacgttacactgcaccgctacaggtattccagttcctacgattacctggatcgaaaacggaaacgccgtctcttcagggagtatccaggaaagcgttaaagatcgcgtcattgattctaggctgcagctgtttataaccaagcctgggctatatacatgcatagccactaacaagcatggggaaaaattctctactgccaaggccgctgcaacaatttcaatcgccgcttggaagaagtattgcttggccgtcaaggaactgttctgcgccaaggagtggctggttatggaagagaagacacatcggggtctctacaggagcgagatgcatcttctctctgtgcccgagtgtagcaagctaccatccatgcactgggaccccacagcttgcgctcggctgccacatctggctttcccacccatgacttcctctaaaccctcagtcgatataccaaacctcccaagctcctccagttcttccttttctgtgtcgcccacgtactcaatgaccgtgattatctccattatgagctctttcgccatctttgtcctcctaaccatcacgaccctctattgttgtcgaaggcgaaaacagtggaaaaataaaaagcgggagagtgccgcagtcacattaactaccctcccatcagagctgctgctggatagacttcaccccaatccaatgtaccagcgcatgccgctactgttgaaccccaaactcctgtctttagagtatccccgaaataacattgaatacgtccgcgacataggcgagggagctttcgggcgagtcttccaagccagagcaccgggtcttctgccttacgaacctttcactatggtggctgtaaagatgcttaaggaggaggcctccgctgacatgcaggccgatttccagagagaggccgctctgatggctgagttcgataaccccaatatcgttaaactgctgggcgtgtgtgcggtgggcaagcccatgtgcctgctctttgagtatatggcttacggtgacctcaacgagtttcttaggtctatgtcccctcacacagtgtgtagcttgagccactctgacctgtccatgcgggcacaggtgtcatcccccggaccacccccactcagctgcgcagagcagctctgtatcgctaggcaggtggctgcgggtatggcctacctgtccgagaggaagttcgtacaccgcgacctggctacacgcaactgcttagtgggagagaacatggtagtgaaaatcgctgattttggacttagcaggaacatttactcagcggattactataaggccaatgagaatgatgccatccctatcagatggatgccacccgagagcattttctataatcgctacacaacagaaagtgatgtgtgggcttatggggtggtgttatgggaaatctttagttacggactgcagccatactatggaatggctcacgaagaggtgatttattatgtccgcgatggaaacattctttcttgccccgagaattgccctgtggagctgtataatttgatgcgtctttgctggagtaaattgccagctgatcgtccatcctttacatctatacatcgaattctcgaacgcatgtgcgaaagagcagaagggacggtcagtgtgtag

SEQ ID NO: 64727 - DNA, 2352 bp, Artificial Sequence
  derived and/or modified sequence
atgagagagctggtgaacatccccctggtgcacatcctgaccctggtggccttcagcggcaccgagaagctgcccaaggcccccgtgatcaccacccccctggagaccgtggacgccctggtggaggaggtggccaccttcatgtgcgccgtggagagctacccccagcccgagatcagctggaccagaaacaagatcctgatcaagctgttcgacaccagatacagcatcagagagaacggccagctgctgaccatcctgagcgtggaggacagcgacgacggcatctactgctgcaccgccaacaacggcgtgggcggcgccgtggagagctgcggcgccctgcaggtgaagatgaagcccaagatcaccagaccccccatcaacgtgaagatcatcgagggcctgaaggccgtgctgccctgcaccaccatgggcaaccccaagcccagcgtgagctggatcaagggcgacagccccctgagagagaacagcagaatcgccgtgctggagagcggcagcctgagaatccacaacgtgcagaaggaggacgccggccagtacagatgcgtggccaagaacagcctgggcaccgcctacagcaaggtggtgaagctggaggtggaggaggagagcgagcccgagcaggacaccaaggtgttcgccagaatcctgagagcccccgagagccacaacgtgaccttcggcagcttcgtgaccctgcactgcaccgccaccggcatccccgtgcccaccatcacctggatcgagaacggcaacgccgtgagcagcggcagcatccaggagagcgtgaaggacagagtgatcgacagcagactgcagctgttcatcaccaagcccggcctgtacacctgcatcgccaccaacaagcacggcgagaagttcagcaccgccaaggccgccgccaccatcagcatcgccgacttcagagagtactgcctggccgtgaaggagctgttctgcgccaaggagtggctggtgatggaggagaagacccacagaggcctgtacagaagcgagatgcacctgctgagcgtgcccgagtgcagcaagctgcccagcatgcactgggaccccaccgcctgcgccagactgccccacctggccttcccccccatgaccagcagcaagcccagcgtggacatccccaacctgcccagcagcagcagcagcagcttcagcgtgagccccacctacagcatgaccgtgatcatcagcatcatgagcagcttcgccatcttcgtgctgctgaccatcaccaccctgtactgctgcagaagaagaaagcagtggaagaacaagaagagagagagcgccgccgtgaccctgaccaccctgcccagcgagctgctgctggacagactgcaccccaaccccatgtaccagagaatgcccctgctgctgaaccccaagctgctgagcctggagtaccccagaaacaacatcgagtacgtgagagacatcggcgagggcgccttcggcagagtgttccaggccagagcccccggcctgctgccctacgagcccttcaccatggtggccgtgaagatgctgaaggaggaggccagcgccgacatgcaggccgacttccagagagaggccgccctgatggccgagttcgacaaccccaacatcgtgaagctgctgggcgtgtgcgccgtgggcaagcccatgtgcctgctgttcgagtacatggcctacggcgacctgaacgagttcctgagaagcatgagcccccacaccgtgtgcagcctgagccacagcgacctgagcatgagagcccaggtgagcagccccggccccccccccctgagctgcgccgagcagctgtgcatcgccagacaggtggccgccggcatggcctacctgagcgagagaaagttcgtgcacagagacctggccaccagaaactgcctggtgggcgagaacatggtggtgaagatcgccgacttcggcctgagcagaaacatctacagcgccgactactacaaggccaacgagaacgacgccatccccatcagatggatgccccccgagagcatcttctacaacagatacaccaccgagagcgacgtgtgggcctacggcgtggtgctgtgggagatcttcagctacggcctgcagccctactacggcatggcccacgaggaggtgatctactacgtgagagacggcaacatcctgagctgccccgagaactgccccgtggagctgtacaacctgatgagactgtgctggagcaagctgcccgccgacagacccagcttcaccagcatccacagaatcctggagagaatgtgcgagagagccgagggcaccgtgagcgtgtag

SEQ ID NO: 64728 - DNA, 2352 bp, Artificial Sequence
  derived and/or modified sequence
atgagagagctggtgaacatccccctggtgcacatcctgaccctggtggccttcagcggcaccgagaagctgcccaaggcccccgtgatcaccacccccctggagaccgtggacgccctggtggaggaggtggccaccttcatgtgcgccgtggagagctacccccagcccgagatcagctggaccagaaacaagatcctgatcaagctgttcgacaccagatacagcatcagagagaacggccagctgctgaccatcctgagcgtggaggacagcgacgacggcatctactgctgcaccgccaacaacggcgtgggcggcgccgtggagagctgcggcgccctgcaggtgaagatgaagcccaagatcaccagaccccccatcaacgtgaagatcatcgagggcctgaaggccgtgctgccctgcaccaccatgggcaaccccaagcccagcgtgagctggatcaagggcgacagccccctgagagagaacagcagaatcgccgtgctggagagcggcagcctgagaatccacaacgtgcagaaggaggacgccggccagtacagatgcgtggccaagaacagcctgggcaccgcctacagcaaggtggtgaagctggaggtggaggaggagagcgagcccgagcaggacaccaaggtgttcgccagaatcctgagagcccccgagagccacaacgtgaccttcggcagcttcgtgaccctgcactgcaccgccaccggcatccccgtgcccaccatcacctggatcgagaacggcaacgccgtgagcagcggcagcatccaggagagcgtgaaggacagagtgatcgacagcagactgcagctgttcatcaccaagcccggcctgtacacctgcatcgccaccaacaagcacggcgagaagttcagcaccgccaaggccgccgccaccatcagcatcgccgcctggaagaagtactgcctggccgtgaaggagctgttctgcgccaaggagtggctggtgatggaggagaagacccacagaggcctgtacagaagcgagatgcacctgctgagcgtgcccgagtgcagcaagctgcccagcatgcactgggaccccaccgcctgcgccagactgccccacctggccttcccccccatgaccagcagcaagcccagcgtggacatccccaacctgcccagcagcagcagcagcagcttcagcgtgagccccacctacagcatgaccgtgatcatcagcatcatgagcagcttcgccatcttcgtgctgctgaccatcaccaccctgtactgctgcagaagaagaaagcagtggaagaacaagaagagagagagcgccgccgtgaccctgaccaccctgcccagcgagctgctgctggacagactgcaccccaaccccatgtaccagagaatgcccctgctgctgaaccccaagctgctgagcctggagtaccccagaaacaacatcgagtacgtgagagacatcggcgagggcgccttcggcagagtgttccaggccagagcccccggcctgctgccctacgagcccttcaccatggtggccgtgaagatgctgaaggaggaggccagcgccgacatgcaggccgacttccagagagaggccgccctgatggccgagttcgacaaccccaacatcgtgaagctgctgggcgtgtgcgccgtgggcaagcccatgtgcctgctgttcgagtacatggcctacggcgacctgaacgagttcctgagaagcatgagcccccacaccgtgtgcagcctgagccacagcgacctgagcatgagagcccaggtgagcagccccggccccccccccctgagctgcgccgagcagctgtgcatcgccagacaggtggccgccggcatggcctacctgagcgagagaaagttcgtgcacagagacctggccaccagaaactgcctggtgggcgagaacatggtggtgaagatcgccgacttcggcctgagcagaaacatctacagcgccgactactacaaggccaacgagaacgacgccatccccatcagatggatgccccccgagagcatcttctacaacagatacaccaccgagagcgacgtgtgggcctacggcgtggtgctgtgggagatcttcagctacggcctgcagccctactacggcatggcccacgaggaggtgatctactacgtgagagacggcaacatcctgagctgccccgagaactgccccgtggagctgtacaacctgatgagactgtgctggagcaagctgcccgccgacagacccagcttcaccagcatccacagaatcctggagagaatgtgcgagagagccgagggcaccgtgagcgtgtag

SEQ ID NO: 64729 - DNA, 351 bp, Artificial Sequence
  derived and/or modified sequence
atgaaacccaaaataacccgaccaccaatcaacgtcaaaatcatcgagggcctcaaggcagtcctaccctgcaccactatgggtaaccccaagcctagcgtttcttggattaaaggggatagccctttgagggagaactcccgcattgcggtactggagagtggctctctccggattcacaatgtccagaaggaggacgccggccaataccgttgcgttgccaagaactcattggggactgcctacagcaaagtcgttaagctggaggtcgaaggcgccaaaggtatccatacgcaattcgttgcttccgcactgcagctgcgcagcttcttgtcatgcccacagatctag

SEQ ID NO: 64730 - DNA, 351 bp, Artificial Sequence
  derived and/or modified sequence
atgaagccaaaaataacaagacccccaattaacgtgaagattattgaagggctgaaagccgtactgccatgcacgacgatgggaaatcctaaaccttccgtctcttggataaaaggagactcacctttaagggagaactctcgaatagctgtcctcgagtccggaagtctgagaattcacaatgtgcaaaaagaagatgccgggcagtaccgttgcgtggcaaagaatagcctcggcacagcttattccaaagtggtgaaattggaggtcgaaggcgccaagggtattcacacacagttcgtcgcttccgctctccaattaaggtcctttctttcatgtccacagatctag

SEQ ID NO: 64731 - DNA, 351 bp, Artificial Sequence
  derived and/or modified sequence
atgaagcccaagatcacccggccccccatcaacgtgaagatcatcgagggcctgaaggctgtgctgccctgcaccaccatgggcaaccccaagcccagcgtgtcctggatcaagggggacagccccctgcgggagaacagcagaattgctgtgctggagagcggcagcctgcgcatccacaacgtgcagaaggaggatgctggccagtaccgctgtgtggccaagaacagcctgggcacagcctacagcaaggtggtgaagctggaggtggagggcgccaagggcatccacacccagtttgtggccagcgccctgcagctgcgctccttcctgagctgcccccagatctag

SEQ ID NO: 64732 - DNA, 435 bp, Artificial Sequence
  derived and/or modified sequence
aatggtgtgggaggagctgtggagagttgtggagccctgcaagtgaagatgaaacctaaaataactcgtcctcccataaatgtgaaaataatagagggattaaaagcagtcctaccatgtactacaatgggtaatcccaaaccatcagtgtcttggataaagggagacagccctctcagggaaaattcccgaattgcagttcttgaatctgggagcttgaggattcataacgtacaaaaggaagatgcaggacagtatcgatgtgtggcaaaaaacagcctcgggacagcatattccaaagtggtgaagctggaagttgagggtgctaaaggcattcacacccagtttgtggcttctgccctccagctaagatcgttccttagctgtccccaaatatgagaatgaatatacaatgataaaacaaaaataaatcaa

SEQ ID NO: 64733 - DNA, 839 bp, Artificial Sequence
  derived and/or modified sequence
gtggagctgctgacacaaacagtcattagcagacaacccttttgcaacaaagtatgctttaaaatgtaaactgtggagccattttccttgcgttgtccagaaggaacttcgtcctgcgtgagcctggattaatcatgagagagctcgtcaacattccactggtacatattcttactctggttgccttcagcggaactgagaaacttccaaaagctcctgtcatcaccactcctcttgaaacagtggatgccttagttgaagaagtggctactttcatgtgtgcagtggaatcctacccccagcctgagatttcctggactagaaataaaattctcattaaactctttgacacccggtacagcatccgggagaatgggcagctcctcaccatcctgagtgtggaagacagtgatgatggcatttactgctgcacggccaacaatggtgtgggaggagctgtggagagttgtggagccctgcaagtgaagatgaaacctaaaataactcgtcctcccataaatgtgaaaataatagagggattaaaagcagtcctaccatgtactacaatgggtaatcccaaaccatcagtgtcttggataaagggagacagccctctcagggaaaattcccgaattgcagttcttgaatctgggagcttgaggattcataacgtacaaaaggaagatgcaggacagtatcgatgtgtggcaaaaaacagcctcgggacagcatattccaaagtggtgaagctggaagttgagggtgctaaaggcattcacacccagtttgtggcttctgccctccagctaagatcgttccttagctgtccccaaatatga

SEQ ID NO: 64734 - DNA, 351 bp, Artificial Sequence
  derived and/or modified sequence
atgaagcccaagatcacccggccccccatcaacgtgaagatcatcgaaggtttgaaggcagtgctgccgtgtaccacgatgggcaacccaaagccaagtgtgtcctggattaagggggactcgccactgagagaaaactctcgcattgccgtgcttgaaagtggcagtcttaggatccataacgtgcaaaaagaagatgctggacaatacaggtgtgtggccaagaattcactaggcaccgcatactcaaaagtggtgaagctcgaggttgaaggcgcaaagggaattcacacacagttcgtggccagtgccttacagctacgatccttcttgtcatgccctcagatatag

SEQ ID NO: 64735 - DNA, 351 bp, Artificial Sequence
  derived and/or modified sequence
atgaagcccaagatcacccggccccccatcaacgtgaagatcatcgaagggctcaaggcggttctaccttgcaccaccatgggtaacccaaagccttccgtctcttggatcaagggcgattctcccctgcgggagaattcgcgcatcgcagtccttgaaagcggctcattgcgtattcataacgttcagaaggaagatgctggccagtacagatgtgtcgctaagaatagcttaggcaccgcctacagtaaggtggtcaagttagaggtggaaggtgccaaaggaattcacacgcagtttgtcgcctccgctctgcaacttcgcagctttctgtcatgtccccagatctag

SEQ ID NO: 64736 - DNA, 351 bp, Artificial Sequence
  derived and/or modified sequence
atgaaacctaagatcaccagaccaccaattaatgtgaaaatcattgagggcctgaaggctgtgcttccttgcaccactatggggaatccaaaaccaagtgttagttggatcaagggagattctcctctacgcgagaatagccgtatcgcagtgctcgagtccggatccctgcggatccacaacgtgcagaaagaggatgctgggcagtacagatgcgtggctaaaaatagtttgggaaccgcctattcaaaggttgtaaaactggaagtggagggagccaagggcatccatacacagtttgtcgctagcgcactgcagctgcgctccttcctgtcgtgcccacaaatctag

SEQ ID NO: 64737 - DNA, 351 bp, Artificial Sequence
  derived and/or modified sequence
atgaagcctaagataactcgccctcccatcaatgttaagataatcgaaggcctgaaggcagtgctgccatgtaccactatgggcaatcccaagccatcagtgtcatggattaagggcgatagtcctctccgcgaaaatagtcgtatcgctgtgctcgagagcggttcactgcgaatccacaacgtacaaaaagaggatgcaggacagtatagatgcgtggcaaagaattctctggggacagcttacagcaaggttgtcaaattggaggttgagggtgctaaaggaattcatacccagttcgtggccagcgcattgcaactcagatctttcctgtcctgcccccagatatag

SEQ ID NO: 64738 - DNA, 351 bp, Artificial Sequence
  derived and/or modified sequence
atgaagcccaagatcaccagaccccccatcaacgtgaagatcatcgagggcctgaaggccgtgctgccctgcaccaccatgggcaaccccaagcccagcgtgagctggatcaagggcgacagccccctgagagagaacagcagaatcgccgtgctggagagcggcagcctgagaatccacaacgtgcagaaggaggacgccggccagtacagatgcgtggccaagaacagcctgggcaccgcctacagcaaggtggtgaagctggaggtggagggcgccaagggcatccacacccagttcgtggccagcgccctgcagctgagaagcttcctgagctgcccccagatctag

SEQ ID NO: 64739 - protein, 341 aa, Artificial Sequence
  derived and/or modified sequence
MSQHNCSKDGPTSQPRLRTLPPAGDSQERSDSPEICHYEKSFHKHSATPNYTHCGLFGDPHLRTFTDRFQTCKVQGAWPLIDNNYLNVQVTNTPVLPGSAATATSKLTIIFKNFQECVDQKVYQAEMDELPAAFVDGSKNGGDKHGANSLKITEKVSGQHVEIQAKYIGTTIVVRQVGRYLTFAVRMPEEVVNAVEDWDSQGLYLCLRGCPLNQQIDFQAFHTNAEGTGARRLAAASPAPTAPETFPYETAVAKCKEKLPVEDLYYQACVFDLLTTGDVNFTLAAYYALEDVKMLHSNKDKLHLYDRTRDLPGRAAAGLPLAPRPLLGALVPLLALLPVFC

SEQ ID NO: 64740 - protein, 458 aa, Artificial Sequence
  derived and/or modified sequence
MGGLGPRRAGTSRERLVVTGRAGWMGMGRGAGRSALGFWPTLAFLLCSFPAATSPCKILKCNSEFWSATSGSHAPASDDTPEFCAALRSYALCTRRTARTCRGDLAYHSAVHGIEDLMSQHNCSKDGPTSQPRLRTLPPAGDSQERSDSPEICHYEKSFHKHSATPNYTHCGLFGDPHLRTFTDRFQTCKVQGAWPLIDNNYLNVQVTNTPVLPGSAATATSKLTIIFKNFQECVDQKVYQAEMDELPAAFVDGSKNGGDKHGANSLKITEKVSGQHVEIQAKYIGTTIVVRQVGRYLTFAVRMPEEVVNAVEDWDSQGLYLCLRGCPLNQQIDFQAFHTNAEGTGARRLAAASPAPTAPETFPYETAVAKCKEKLPVEDLYYQACVFDLLTTGDVNFTLAAYYALEDVKMLHSNKDKLHLYDRTRDLPGRAAAGLPLAPRPLLGALVPLLALLPVFC

SEQ ID NO: 64741 - DNA, 1377 bp, Artificial Sequence
  derived and/or modified sequence
atgggtggattggggcctcgccgggcaggcacgagtcgagagcgattagtagtcacagggcgtgcgggatggatgggcatgggcagaggagctggtaggagcgctctgggattttggcccactctggcttttctgctgtgttcttttcctgccgccacaagcccctgtaagatactgaagtgcaacagcgaattctggtcagccacttccggtagccatgcacctgctagcgacgatacccccgagttttgtgccgcattaagaagctacgcgttgtgtaccagacgaactgcccggacatgccgcggagacctggcctaccactcggcagtgcatggcatcgaggatctcatgtcccagcataattgcagcaaggatggtcccacctctcagccacgtctgcgcacacttccacccgccggggacagtcaggagaggagtgacagcccagagatttgccattacgagaaatccttccacaagcactccgccactcctaactacacacactgtggactctttggagacccccatctacgcactttcacagaccgcttccaaacctgcaaggtgcaaggcgcctggccgctgatcgataacaactatctgaatgtccaggtcaccaataccccagtgcttcccggcagcgcagccaccgctacctccaagctcactatcattttcaagaatttccaagaatgcgtggaccaaaaggtctaccaagccgaaatggatgagttaccagctgcttttgtggatggctcaaaaaatggcggcgataaacacggagccaacagtctaaagattactgaaaaagtcagcggccaacacgtggagatacaggccaagtatatcggcactaccattgtggtgaggcaggtgggtcgatacctgaccttcgcagtgagaatgccagaggaagtggtaaacgccgttgaggactgggacagccaaggcctgtacctctgccttcgcggatgccctctgaatcagcagatagattttcaggcgttccatacaaatgcggaagggactggcgcccgacggctggcggctgcctcaccggcacctacagcccccgaaacgtttccttacgaaacagctgtggcgaagtgcaaggaaaaactgcccgtggaggacctgtattaccaggcatgtgtgtttgatctcctgactactggtgatgttaacttcacgcttgcggcatattatgctctggaggacgtgaaaatgttgcacagtaataaggacaagctgcacttgtatgataggacacgggacctgccaggacgggccgccgcaggcctcccacttgcccctagacccctgcttggagcactggtgcccctccttgcactgctgcccgtgttttgttag

SEQ ID NO: 64742 - DNA, 1377 bp, Artificial Sequence
  derived and/or modified sequence
atgggcggcctgggccccaggagagctggcaccagccgggagcggctggtggtgacaggccgggccggctggatgggcatgggcagaggagctggccgcagcgccctgggcttctggcccaccctggccttcctgctgtgcagcttccctgctgccaccagcccctgcaagatcctgaagtgcaacagcgagttctggagcgccaccagcggcagccacgccccagccagtgatgacaccccagagttctgtgccgccctgcggagctatgccctgtgcaccaggagaacagcccggacctgccgcggggacctggcctaccacagcgctgtgcacggcatcgaggacctgatgagccagcacaactgcagcaaggatggccccaccagccagccccggctgcggaccctgcccccagctggggacagccaggagaggagtgacagccctgagatctgccactatgagaagagcttccacaagcacagcgccacccccaactacacccactgcggcctgtttggagacccccacctgcggaccttcacagaccgcttccagacctgcaaggtgcagggcgcctggcccctgattgacaacaactacctgaatgtgcaggtgaccaacacccctgtgctgcccggcagcgctgccacagccaccagcaagctgaccatcatcttcaagaacttccaggagtgtgtggaccagaaggtgtaccaggccgagatggatgagctgcctgctgcctttgtggatggcagcaagaatggaggagacaagcacggggccaacagcctgaagatcacagagaaggtgtctggccagcacgtggagatccaggccaagtacatcggcaccaccatcgtggtgcggcaggtgggccgctacctgacctttgctgtgaggatgcctgaggaggtggtgaatgctgtggaggactgggacagccagggcctgtacctgtgcctgcggggctgccccctgaaccagcagattgacttccaggccttccacaccaatgctgagggcactggagcccggcggctggccgccgccagccctgcccccacagcccctgagaccttcccctatgaaacagctgtggccaagtgcaaggagaagctgcctgtggaggacctgtactaccaggcctgtgtgtttgacctgctgaccactggagatgtgaacttcaccctggccgcctactatgccctggaggatgtgaagatgctgcacagcaacaaggacaagctgcacctgtatgacaggacccgggacctgcccggccgggctgctgctggcctgcccctggccccccggcccctgctgggcgccctggtgcccctgctggccctgctgcctgtgttctgctag

SEQ ID NO: 64743 - DNA, 1377 bp, Artificial Sequence
  derived and/or modified sequence
atgggcggcctgggcccccggcgggccggcaccagccgggagcggctggttgtcactgggcgggcaggctggatgggcatgggtcggggcgctggacggtcagcactcggtttctggccgacactggcttttctgttgtgttcattcccagctgccaccagcccatgtaagatcttgaagtgtaacagcgaattctggagtgccacctctggctcacacgccccagctagcgacgatacacctgaattctgcgccgctctccggagctatgcactctgtacgcggaggacagcccgaacatgccggggagatctcgcctatcattcagcagtccatggcatcgaggatcttatgagccaacacaattgctcaaaggatgggcccaccagccagccccgccttcggactttgccccctgctggagattcccaggagcggtcagactccccagagatctgtcattatgaaaagagcttccacaaacacagcgccactcccaactacacccattgcggcctctttggcgacccacatctgaggacctttacagatcgtttccaaacttgcaaagtgcaaggagcatggccgttgattgataacaactatctaaacgttcaggtgaccaatacacccgtgctcccaggaagcgcagccactgccactagcaagctgacaattattttcaagaattttcaggagtgtgtcgatcagaaggtctaccaggctgagatggacgagttacctgccgcgttcgtcgatggaagcaagaacggtggcgacaagcacggtgcgaattctctcaaaataacagaaaaggtgtccggccagcatgtggaaatccaggctaagtatatcggcacaacaattgtcgtgcgtcaggtgggcaggtatctgacttttgccgtcaggatgccagaggaggtcgtcaacgccgtggaggactgggatagtcaaggactctatctgtgccttcgcgggtgccctctgaatcaacaaattgactttcaggccttccacacaaatgcagaggggactggcgccaggcgtttagccgccgcgagccccgctccaaccgcacccgaaacttttccgtacgaaaccgccgtggctaagtgcaaggagaagctgccagtggaggacctctactatcaggcttgcgtgtttgacttgttgactaccggagacgtgaatttcacactcgctgcctactatgcactcgaagacgtgaagatgctgcattctaacaaagacaaattgcacctgtatgatagaacacgtgatttgcctggtagagcagccgccggcctacctctagcaccacggccacttctcggggcacttgttcccttacttgcattattgccagtgttctgctag

SEQ ID NO: 64744 - DNA, 1377 bp, Artificial Sequence
  derived and/or modified sequence
atgggcggtctgggcccacggagggccggaacaagtcgcgagaggcttgtcgttaccggaagagctgggtggatgggaatgggacgtggtgctgggcgatcagccctaggcttttggcccacactcgcctttctcctctgttcctttccggcagctacaagcccatgtaaaatcctgaaatgcaacagcgagttttggtcagctacctccggatcacacgcccctgccagcgatgacacccccgagttctgtgcagccttgaggtcttacgcactgtgtacgagaagaacagccaggacctgtcgaggcgatttggcttatcattcagctgtgcatggaatagaagacctcatgagtcagcataattgcagtaaggatgggccaacatctcagcctcgcttgcggacacttccaccagccggagactcccaggagcggagcgattcccccgagatctgccactatgaaaagagctttcataagcacagtgcgactcctaattatacgcattgtgggctgttcggggaccctcatcttcgcaccttcaccgatcgctttcagacctgcaaggtccagggagcatggcccttgatcgacaataactatctgaacgttcaagtgacaaatacacctgtgctaccaggaagtgccgctaccgcaacttctaagctcaccatcatttttaaaaatttccaggaatgtgtggaccagaaagtctatcaggccgagatggatgagctgccagcagcctttgtagatgggtccaagaacggaggtgataaacatggagcaaattctttgaaaatcaccgagaaagtgagcggccagcacgttgaaatccaggccaaatacatcgggacaactatcgtggtgcgccaggtggggagatatctaacgttcgccgtcagaatgcctgaggaggtggtaaacgctgtagaggattgggactcgcagggattatacttgtgtctgaggggctgccccttgaatcagcagattgactttcaagccttccatactaacgctgaaggcaccggagctcgccgtctggcagcggcttcccctgcacccaccgctcctgagacattcccctatgaaacagcagtagccaaatgtaaggagaagcttcctgttgaggacttatattaccaagcgtgtgtttttgatctcctgacaaccggggatgtgaatttcacccttgccgcttactacgctcttgaggatgtgaagatgttgcatagcaataaggacaaactgcatctctatgatcgcactagagacctgccaggtcgtgcagctgccggtctgcctctcgctcctagacctctcttaggcgcacttgtgcccctccttgcactgctgcccgtcttctgctag

SEQ ID NO: 64745 - DNA, 1664 bp, Artificial Sequence
  derived and/or modified sequence
aaggttaggcccgcaggccctcagcacgggggcgcagccggggcaagtcttcaggaagcagcgaggtgcttgaagggggtgctggaggcaggccaaacccagtcaggatgggtggcctggggccacgacgggcgggaacctcgagggagaggctagtggtaacaggccgagctggatggatgggtatggggagaggggcaggacgttcagccctgggattctggccgaccctcgccttccttctctgcagcttccccgcagccacctccccgtgcaagatcctcaagtgcaactctgagttctggagcgccacgtcgggcagccacgccccagcctcagacgacacccccgagttctgtgcagccttgcgcagctacgccctgtgcacgcggcggacggcccgcacctgccggggtgacctggcctaccactcggccgtccatggcatagaggacctcatgagccagcacaactgctccaaggatggccccacctcgcagccacgcctgcgcacgctcccaccggccggagacagccaggagcgctcggacagccccgagatctgccattacgagaagagctttcacaagcactcggccacccccaactacacgcactgtggcctcttcggggacccacacctcaggactttcaccgaccgcttccagacctgcaaggtgcagggcgcctggccgctcatcgacaataattacctgaacgtgcaggtcaccaacacgcctgtgctgcccggctcagcggccactgccaccagcaagctcaccatcatcttcaagaacttccaggagtgtgtggaccagaaggtgtaccaggctgagatggacgagctcccggccgccttcgtggatggctctaagaacggtggggacaagcacggggccaacagcctgaagatcactgagaaggtgtcaggccagcacgtggagatccaggccaagtacatcggcaccaccatcgtggtgcgccaggtgggccgctacctgacctttgccgtccgcatgccagaggaagtggtcaatgctgtggaggactgggacagccagggtctctacctctgcctgcggggctgccccctcaaccagcagatcgacttccaggccttccacaccaatgctgagggcaccggtgcccgcaggctggcagccgccagccctgcacccacagcccccgagaccttcccatacgagacagccgtggccaagtgcaaggagaagctgccggtggaggacctgtactaccaggcctgcgtcttcgacctcctcaccacgggcgacgtgaacttcacactggccgcctactacgcgttggaggatgtcaagatgctccactccaacaaagacaaactgcacctgtatgataggactcgggacctgccaggcagggcggctgcggggctgcccctggccccccggcccctcctgggcgccctcgtcccgctcctggccctgctccctgtgttctgctagacgcgtagatgtggagggaggcgcgggctccgtcctctcggcttccccatgtgtgggctgggaccgcccacggggtgcagatctcctggcgtgtccaccatggccccgcagaacgccagggaccgcctgctgccaagggctcaggcacggacccctccccttctagtgcacgtgacaagg

SEQ ID NO: 64746 - DNA, 1377 bp, Artificial Sequence
  derived and/or modified sequence
atgggcggcctgggccccagaagagccggcaccagcagagagagactggtggtgaccggcagagccggctggatgggcatgggcagaggcgccggcagaagcgccctgggcttctggcccaccctggccttcctgctgtgcagcttccccgccgccaccagcccctgcaagatcctgaagtgcaacagcgagttctggagcgccaccagcggcagccacgcccccgccagcgacgacacccccgagttctgcgccgccctgagaagctacgccctgtgcaccagaagaaccgccagaacctgcagaggcgacctggcctaccacagcgccgtgcacggcatcgaggacctgatgagccagcacaactgcagcaaggacggccccaccagccagcccagactgagaaccctgccccccgccggcgacagccaggagagaagcgacagccccgagatctgccactacgagaagagcttccacaagcacagcgccacccccaactacacccactgcggcctgttcggcgacccccacctgagaaccttcaccgacagattccagacctgcaaggtgcagggcgcctggcccctgatcgacaacaactacctgaacgtgcaggtgaccaacacccccgtgctgcccggcagcgccgccaccgccaccagcaagctgaccatcatcttcaagaacttccaggagtgcgtggaccagaaggtgtaccaggccgagatggacgagctgcccgccgccttcgtggacggcagcaagaacggcggcgacaagcacggcgccaacagcctgaagatcaccgagaaggtgagcggccagcacgtggagatccaggccaagtacatcggcaccaccatcgtggtgagacaggtgggcagatacctgaccttcgccgtgagaatgcccgaggaggtggtgaacgccgtggaggactgggacagccagggcctgtacctgtgcctgagaggctgccccctgaaccagcagatcgacttccaggccttccacaccaacgccgagggcaccggcgccagaagactggccgccgccagccccgcccccaccgcccccgagaccttcccctacgagaccgccgtggccaagtgcaaggagaagctgcccgtggaggacctgtactaccaggcctgcgtgttcgacctgctgaccaccggcgacgtgaacttcaccctggccgcctactacgccctggaggacgtgaagatgctgcacagcaacaaggacaagctgcacctgtacgacagaaccagagacctgcccggcagagccgccgccggcctgcccctggcccccagacccctgctgggcgccctggtgcccctgctggccctgctgcccgtgttctgctag

SEQ ID NO: 64747 - protein, 456 aa, Artificial Sequence
  derived and/or modified sequence
MMVGDGTTSVTLLAAEFLKQVKPYVEEGLHPQIIIRAFRTATQLAVNKIKEIAVTVKKADKVEQRKLLEKCAMTALSSKLISQQKAFFAKMVVDAVMMLDDLLQLKMIGIKKVQGGALEDSQLVAGVAFKKTFSYAGFEMQPKKYHNPKIALLNVELELKAEKDNAEIRVHTVEDYQAIVDAEWNILYDKLEKIHHSGAKVVLSKLPIGDVATQYFADRDMFCAGRVPEEDLKRTMMACGGSIQTSVNALSADVLGRCQVFEETQIGGERYNFFTGCPKAKTCTFILRGGAEQFMEETERSLHDAIMIVRRAIKNDSVVAGGGAIEMELSKYLRDYSRTIPGKQQLLIGAYAKALEIIPRQLCDNAGFDATNILNKLRARHAQGGTWYGVDINNEDIADNFEAFVWEPAMVRINALTAASEAACLIVSVDETIKNPRSTVDAPTAAGRGRGRGRPH

SEQ ID NO: 64748 - DNA, 1332 bp, Artificial Sequence
  derived and/or modified sequence
atggccgagttcctgaagcaggtgaagccctacgtggaggagggcctgcacccccagatcatcatcagagccttcagaaccgccacccagctggccgtgaacaagatcaaggagatcgccgtgaccgtgaagaaggccgacaaggtggagcagagaaagctgctggagaagtgcgccatgaccgccctgagcagcaagctgatcagccagcagaaggccttcttcgccaagatggtggtggacgccgtgatgatgctggacgacctgctgcagctgaagatgatcggcatcaagaaggtgcagggcggcgccctggaggacagccagctggtggccggcgtggccttcaagaagaccttcagctacgccggcttcgagatgcagcccaagaagtaccacaaccccaagatcgccctgctgaacgtggagctggagctgaaggccgagaaggacaacgccgagatcagagtgcacaccgtggaggactaccaggccatcgtggacgccgagtggaacatcctgtacgacaagctggagaagatccaccacagcggcgccaaggtggtgctgagcaagctgcccatcggcgacgtggccacccagtacttcgccgacagagacatgttctgcgccggcagagtgcccgaggaggacctgaagagaaccatgatggcctgcggcggcagcatccagaccagcgtgaacgccctgagcgccgacgtgctgggcagatgccaggtgttcgaggagacccagatcggcggcgagagatacaacttcttcaccggctgccccaaggccaagacctgcaccttcatcctgagaggcggcgccgagcagttcatggaggagaccgagagaagcctgcacgacgccatcatgatcgtgagaagagccatcaagaacgacagcgtggtggccggcggcggcgccatcgagatggagctgagcaagtacctgagagactacagcagaaccatccccggcaagcagcagctgctgatcggcgcctacgccaaggccctggagatcatccccagacagctgtgcgacaacgccggcttcgacgccaccaacatcctgaacaagctgagagccagacacgcccagggcggcacctggtacggcgtggacatcaacaacgaggacatcgccgacaacttcgaggccttcgtgtgggagcccgccatggtgagaatcaacgccctgaccgccgccagcgaggccgcctgcctgatcgtgagcgtggacgagaccatcaagaaccccagaagcaccgtggacgcccccaccgccgccggcagaggcagaggcagaggcagaccccactag

SEQ ID NO: 64749 - DNA, 1248 bp, Artificial Sequence
  derived and/or modified sequence
atgtggagaaaggtgtacacccccagaagcagcttcgagctgagcgcccagccccccagctgggagcagagaaagctgctggagaagtgcgccatgaccgccctgagcagcaagctgatcagccagcagaaggccttcttcgccaagatggtggtggacgccgtgatgatgctggacgacctgctgcagctgaagatgatcggcatcaagaaggtgcagggcggcgccctggaggacagccagctggtggccggcgtggccttcaagaagaccttcagctacgccggcttcgagatgcagcccaagaagtaccacaaccccaagatcgccctgctgaacgtggagctggagctgaaggccgagaaggacaacgccgagatcagagtgcacaccgtggaggactaccaggccatcgtggacgccgagtggaacatcctgtacgacaagctggagaagatccaccacagcggcgccaaggtggtgctgagcaagctgcccatcggcgacgtggccacccagtacttcgccgacagagacatgttctgcgccggcagagtgcccgaggaggacctgaagagaaccatgatggcctgcggcggcagcatccagaccagcgtgaacgccctgagcgccgacgtgctgggcagatgccaggtgttcgaggagacccagatcggcggcgagagatacaacttcttcaccggctgccccaaggccaagacctgcaccttcatcctgagaggcggcgccgagcagttcatggaggagaccgagagaagcctgcacgacgccatcatgatcgtgagaagagccatcaagaacgacagcgtggtggccggcggcggcgccatcgagatggagctgagcaagtacctgagagactacagcagaaccatccccggcaagcagcagctgctgatcggcgcctacgccaaggccctggagatcatccccagacagctgtgcgacaacgccggcttcgacgccaccaacatcctgaacaagctgagagccagacacgcccagggcggcacctggtacggcgtggacatcaacaacgaggacatcgccgacaacttcgaggccttcgtgtgggagcccgccatggtgagaatcaacgccctgaccgccgccagcgaggccgcctgcctgatcgtgagcgtggacgagaccatcaagaaccccagaagcaccgtggacgcccccaccgccgccggcagaggcagaggcagaggcagaccccactag

SEQ ID NO: 64750 - DNA, 1371 bp, Artificial Sequence
  derived and/or modified sequence
atgatggtgggcgacggcaccaccagcgtgaccctgctggccgccgagttcctgaagcaggtgaagccctacgtggaggagggcctgcacccccagatcatcatcagagccttcagaaccgccacccagctggccgtgaacaagatcaaggagatcgccgtgaccgtgaagaaggccgacaaggtggagcagagaaagctgctggagaagtgcgccatgaccgccctgagcagcaagctgatcagccagcagaaggccttcttcgccaagatggtggtggacgccgtgatgatgctggacgacctgctgcagctgaagatgatcggcatcaagaaggtgcagggcggcgccctggaggacagccagctggtggccggcgtggccttcaagaagaccttcagctacgccggcttcgagatgcagcccaagaagtaccacaaccccaagatcgccctgctgaacgtggagctggagctgaaggccgagaaggacaacgccgagatcagagtgcacaccgtggaggactaccaggccatcgtggacgccgagtggaacatcctgtacgacaagctggagaagatccaccacagcggcgccaaggtggtgctgagcaagctgcccatcggcgacgtggccacccagtacttcgccgacagagacatgttctgcgccggcagagtgcccgaggaggacctgaagagaaccatgatggcctgcggcggcagcatccagaccagcgtgaacgccctgagcgccgacgtgctgggcagatgccaggtgttcgaggagacccagatcggcggcgagagatacaacttcttcaccggctgccccaaggccaagacctgcaccttcatcctgagaggcggcgccgagcagttcatggaggagaccgagagaagcctgcacgacgccatcatgatcgtgagaagagccatcaagaacgacagcgtggtggccggcggcggcgccatcgagatggagctgagcaagtacctgagagactacagcagaaccatccccggcaagcagcagctgctgatcggcgcctacgccaaggccctggagatcatccccagacagctgtgcgacaacgccggcttcgacgccaccaacatcctgaacaagctgagagccagacacgcccagggcggcacctggtacggcgtggacatcaacaacgaggacatcgccgacaacttcgaggccttcgtgtgggagcccgccatggtgagaatcaacgccctgaccgccgccagcgaggccgcctgcctgatcgtgagcgtggacgagaccatcaagaaccccagaagcaccgtggacgcccccaccgccgccggcagaggcagaggcagaggcagaccccactag

SEQ ID NO: 64751 - DNA, 1332 bp, Artificial Sequence
  derived and/or modified sequence
atggcagagtttttaaaacaagttaagccttatgtcgaagagggtctccatccacagataatcattcgcgcctttcggacagccacccaacttgctgttaataagattaaagagatcgcagtgactgtgaagaaagccgacaaggtggagcagcgtaagctgcttgaaaagtgcgctatgactgcactttccagcaaactaataagccagcagaaggcattcttcgccaaaatggtcgtcgacgcggtcatgatgcttgacgacctactgcagctgaaaatgattggtattaagaaggtgcagggtggtgccctggaggatagtcagctggtggcaggtgtcgcgttcaaaaaaaccttcagttacgcgggcttcgagatgcagccgaagaaataccataatccaaaaatagctcttttaaatgtcgagttggagctcaaggccgaaaaggacaacgctgagatcagagtacatacggtggaggattatcaggccattgtcgacgccgagtggaatattctgtacgataaactggagaagattcaccactcgggagcaaaggtcgtgctaagtaagcttccaataggcgatgtagcaacccagtattttgccgatagggatatgttctgtgcaggccgagtccctgaagaagaccttaaaaggaccatgatggcctgcggcgggtccatacagacatccgtcaacgcactgagtgctgatgtgctgggcagatgtcaggtgttcgaggagacacagatcggcggggaacggtacaatttctttaccggttgtccaaaagccaagacctgtacgtttatcctgagggggggagccgagcaatttatggaggagaccgaacgctccctacatgatgccataatgatcgtgcgccgcgctatcaagaacgacagcgtggtagcgggcgggggcgcaatcgaaatggaactgtccaagtacctgagggattacagcaggaccatccccggcaagcagcagttgctgatcggtgcctatgctaaagccttggaaattattccccgacagctatgcgacaacgccggctttgacgcaaccaatatcctcaacaagctcagggccaggcatgcccagggcgggacatggtacggagtcgacataaataatgaggatatcgcagataacttcgaggccttcgtctgggaacctgcaatggttaggattaacgccctgactgccgcgagcgaagccgcttgcctgattgtgtcggtcgacgaaaccatcaagaacccacgtagtacagtcgacgccccgactgctgctgggcggggaagagggagggggaggccacactag

SEQ ID NO: 64752 - DNA, 1248 bp, Artificial Sequence
  derived and/or modified sequence
atgtggaggaaggtgtacacacctcggtccagcttcgagctctcagcccagccaccaagttgggagcagagaaaattattggagaaatgtgccatgaccgctctgtcaagcaaacttatcagccagcagaaagcattcttcgccaagatggtggtcgacgccgtgatgatgcttgacgacctcctgcagttgaagatgatcggtatcaaaaaagtccagggtggagctctagaagattcccaactggtagcaggagtggcatttaagaaaacattttcctacgcagggtttgagatgcagccaaaaaaataccacaatcccaagatcgccttattaaacgtggagttagagctgaaggccgaaaaggataatgccgagattcgggttcacacagtcgaagactaccaggccatagtggacgctgagtggaacatattatacgataagctggaaaagatccatcactccggtgccaaagtggtgctaagcaaactgcccatcggtgatgttgctacccagtactttgctgaccgcgacatgttttgcgcaggccgcgtgccagaagaagacttgaagcgtacaatgatggcctgcggagggagtatccagacctccgtgaatgcattaagtgcagacgtccttgggcgctgtcaggtgttcgaggaaacgcagatcgggggcgagagatacaatttcttcaccggatgtccaaaggcaaagacctgtacattcatactaagagggggggccgagcaatttatggaggagactgaacggtctctgcatgatgctatcatgatagtgagacgcgcgatcaaaaatgatagcgtggtggcagggggaggcgccatcgaaatggaactgtcaaagtatctgagggattactcaagaacgattcctggaaaacagcagctcctgattggggcatatgcaaaagccctcgaaatcatacctaggcagctctgcgacaatgcgggcttcgatgcaaccaatatcctgaacaaattaagggctcgacacgcacaaggcggcacgtggtacggggtggatatcaataatgaggatatcgcagataatttcgaagctttcgtgtgggagcccgcaatggtcagaattaatgctctcacggccgcctccgaagctgcctgtcttattgttagcgtggacgagactatcaagaacccccgaagcaccgtggacgctcccacggccgctggccggggaaggggtcggggcaggccccattag

SEQ ID NO: 64753 - DNA, 1371 bp, Artificial Sequence
  derived and/or modified sequence
atgatggtaggcgatggcaccactagtgtgactctgctggccgcagagtttcttaagcaggtgaagccctacgtggaggagggccttcatcctcagataataatccgagcttttcgcaccgcgactcagctcgccgttaacaaaatcaaggagatcgccgtcactgtgaagaaggcggacaaggtcgaacagcggaagctccttgagaagtgcgccatgacggcgctgtcctctaagctcatcagccagcagaaggcttttttcgccaagatggtcgttgatgctgtcatgatgctggatgatctgttacagttaaaaatgattggaataaaaaaggtgcagggtggtgctcttgaagattcgcagctggtggccggagtggcctttaagaagactttttcatatgcaggtttcgagatgcagccaaagaagtaccataatcctaaaatcgcgttactgaacgtggagttggaactgaaggccgagaaagataacgcggagatcagggtccatactgtggaggactaccaggctattgtggacgccgagtggaatatcctctatgataagctggaaaaaattcaccatagcggggctaaggtggtactgtctaaattacctatcggcgacgtcgctactcaatattttgcagatcgtgatatgttctgtgcagggcgagtgccagaggaggatctgaaacgaacaatgatggcctgcggtgggagcattcagacaagtgttaacgcgctttctgccgacgtgttgggtcggtgccaggtgttcgaagaaacccagataggcggtgagcgctataatttcttcacaggctgccccaaagctaagacctgtacatttatactgaggggaggagcagagcagtttatggaggaaactgaaaggtctctccacgacgcgataatgatcgtgcgtagagccattaagaacgatagtgtcgtggccgggggaggagccattgaaatggaactgagtaaatatttgcgggactactctcgcaccattcctggaaaacaacagcttctgataggtgcgtatgcgaaggcactcgaaataattcccagacagttgtgtgacaatgcaggcttcgatgcaacgaacatcctgaacaagctcagagcacgccatgctcaaggcggcacatggtacggcgtggatataaataacgaggacattgcggataactttgaggcatttgtgtgggaacccgcgatggtcagaatcaatgccctcactgctgcatccgaggctgcctgcctcattgtctccgtcgacgaaacaatcaaaaatccccggtcgacagttgacgctcctacggcggcaggccgcggaaggggtaggggacgcccccattag

SEQ ID NO: 64754 - DNA, 1332 bp, Artificial Sequence
  derived and/or modified sequence
atggccgagttcctgaagcaggtgaagccctacgtggaggagggcctgcacccccagatcatcatccgggccttcagaacagccacccagctggccgtgaacaagatcaaggagattgctgtgacagtgaagaaggctgacaaggtggagcagaggaagctgctggagaagtgtgccatgacagccctgagcagcaagctgatcagccagcagaaggccttctttgccaagatggtggtggatgctgtgatgatgctggatgacctgctgcagctgaagatgattggcatcaagaaggtgcagggcggggccctggaggacagccagctggtggccggcgtggccttcaagaagaccttctcctatgccggctttgagatgcagcccaagaagtaccacaaccccaagatcgccctgctgaatgtggagctggagctgaaggccgagaaggacaatgctgagatccgggtgcacacagtggaggactaccaggccatcgtggatgctgagtggaacatcctgtatgacaagctggagaagatccaccacagcggggccaaggtggtgctgagcaagctgcccatcggagatgtggccacccagtactttgctgaccgggacatgttctgtgccggccgggtgcctgaggaggacctgaagaggaccatgatggcctgtggcggcagcatccagacctctgtgaatgccctgtctgcagatgtgctgggccgctgccaggtgtttgaggagacccagattggaggagagcgctacaacttcttcaccggctgccccaaggccaagacctgcaccttcatcctgcggggcggcgctgagcagttcatggaggagacagagaggagcctgcatgatgccatcatgattgtgagaagagccatcaagaatgacagcgtggtggccggcggcggggccatcgagatggagctgagcaagtacctgcgggactacagcaggaccatccctgggaagcagcagctgctgattggagcctatgccaaggccctggagatcatcccccggcagctgtgtgacaatgccggctttgatgccaccaacatcctgaacaagctgcgggcccggcatgcccagggcggcacctggtatggagtggacatcaacaatgaagatattgctgacaactttgaggcctttgtgtgggagcccgccatggtgcgcatcaatgccctgacagctgccagcgaggccgcctgcctgattgtgtctgtggatgagaccatcaagaaccccaggagcacagtggatgcccccacagctgctggccggggccggggccggggccggccccactag

SEQ ID NO: 64755 - DNA, 1248 bp, Artificial Sequence
  derived and/or modified sequence
atgtggaggaaggtgtacacccccaggagcagctttgagctgagcgcccagccccccagctgggagcagaggaagctgctggagaagtgtgccatgacagccctgagcagcaagctgatcagccagcagaaggccttctttgccaagatggtggtggatgctgtgatgatgctggatgacctgctgcagctgaagatgattggcatcaagaaggtgcagggcggggccctggaggacagccagctggtggccggcgtggccttcaagaagaccttctcctatgccggctttgagatgcagcccaagaagtaccacaaccccaagatcgccctgctgaatgtggagctggagctgaaggccgagaaggacaatgctgagatccgggtgcacacagtggaggactaccaggccatcgtggatgctgagtggaacatcctgtatgacaagctggagaagatccaccacagcggggccaaggtggtgctgagcaagctgcccatcggagatgtggccacccagtactttgctgaccgggacatgttctgtgccggccgggtgcctgaggaggacctgaagaggaccatgatggcctgtggcggcagcatccagacctctgtgaatgccctgtctgcagatgtgctgggccgctgccaggtgtttgaggagacccagattggaggagagcgctacaacttcttcaccggctgccccaaggccaagacctgcaccttcatcctgcggggcggcgctgagcagttcatggaggagacagagaggagcctgcatgatgccatcatgattgtgagaagagccatcaagaatgacagcgtggtggccggcggcggggccatcgagatggagctgagcaagtacctgcgggactacagcaggaccatccctgggaagcagcagctgctgattggagcctatgccaaggccctggagatcatcccccggcagctgtgtgacaatgccggctttgatgccaccaacatcctgaacaagctgcgggcccggcatgcccagggcggcacctggtatggagtggacatcaacaatgaagatattgctgacaactttgaggcctttgtgtgggagcccgccatggtgcgcatcaatgccctgacagctgccagcgaggccgcctgcctgattgtgtctgtggatgagaccatcaagaaccccaggagcacagtggatgcccccacagctgctggccggggccggggccggggccggccccactag

SEQ ID NO: 64756 - DNA, 1371 bp, Artificial Sequence
  derived and/or modified sequence
atgatggtgggagatggcaccacctctgtgaccctgctggccgctgagttcctgaagcaggtgaagccctacgtggaggagggcctgcacccccagatcatcatccgggccttcagaacagccacccagctggccgtgaacaagatcaaggagattgctgtgacagtgaagaaggctgacaaggtggagcagaggaagctgctggagaagtgtgccatgacagccctgagcagcaagctgatcagccagcagaaggccttctttgccaagatggtggtggatgctgtgatgatgctggatgacctgctgcagctgaagatgattggcatcaagaaggtgcagggcggggccctggaggacagccagctggtggccggcgtggccttcaagaagaccttctcctatgccggctttgagatgcagcccaagaagtaccacaaccccaagatcgccctgctgaatgtggagctggagctgaaggccgagaaggacaatgctgagatccgggtgcacacagtggaggactaccaggccatcgtggatgctgagtggaacatcctgtatgacaagctggagaagatccaccacagcggggccaaggtggtgctgagcaagctgcccatcggagatgtggccacccagtactttgctgaccgggacatgttctgtgccggccgggtgcctgaggaggacctgaagaggaccatgatggcctgtggcggcagcatccagacctctgtgaatgccctgtctgcagatgtgctgggccgctgccaggtgtttgaggagacccagatcggcggggagcgctacaacttcttcaccggctgccccaaggccaagacctgcaccttcatcctgcggggcggcgctgagcagttcatggaggagacagagaggagcctgcatgatgccatcatgattgtgcggcgggccatcaagaatgattctgtggtggccggcggcggggccatcgagatggagctgagcaagtacctgcgggactacagcaggaccatccctgggaagcagcagctgctgattggagcctatgccaaggccctggagatcatcccccggcagctgtgtgacaatgccggctttgatgccaccaacatcctgaacaagctgcgggcccggcatgcccagggcggcacctggtacggcgtggacatcaacaatgaagatattgctgacaactttgaggcctttgtgtgggagcccgccatggtgcgcatcaatgccctgacagctgccagcgaggccgcctgcctgattgtgtctgtggatgagaccatcaagaaccccaggagcacagtggatgcccccacagctgctggccggggccggggccggggccggccccactag

SEQ ID NO: 64757 - DNA, 1332 bp, Artificial Sequence
  derived and/or modified sequence
atggccgagttcctgaagcaggtgaagccctacgtggaggagggcttgcacccccagattataattcgggccttccgcacagccacacagctcgcggttaacaagataaaggagatcgcagtgacagtaaaaaaagccgacaaggtggagcagcgaaaactcttggaaaagtgcgcaatgaccgcactatcctcaaaactgatatcccagcagaaagcgttttttgctaaaatggttgtggatgcggtaatgatgctagacgacctgctgcagctaaagatgatcggcataaagaaggtccagggaggggccttggaagactcacagcttgtagccggggtggctttcaagaaaacgttctcctatgctggttttgagatgcagcctaagaagtaccataatcctaagatagcattacttaacgtggagctggagttaaaagccgagaaggataacgccgagatccgggtgcatacagttgaagattaccaggccattgtagacgctgaatggaatatcctctatgacaagttggagaagattcatcatagcggtgccaaggtggtactgagcaaactcccaatcggagatgtagccacccagtattttgcggacagagatatgttttgtgctgggcgtgtgcctgaggaagacctgaaacgcaccatgatggcttgcgggggaagcatccagactagtgttaatgccttatcagctgatgtcctgggccggtgtcaggtgtttgaggaaacgcagataggaggcgaacgctataactttttcaccgggtgtccaaaggcaaagacttgtacttttatactgcgcgggggggctgaacagttcatggaggagactgaaaggtctctccacgacgctatcatgattgtaaggcgggccattaaaaacgacagcgtggtcgcaggcggcggtgccatcgaaatggagctctccaagtacctgcgggactacagccgcacaataccaggaaagcagcagctcctaatcggcgcctatgctaaggcgctcgaaattattccacggcagctttgtgacaacgcaggctttgacgcaaccaatatcctaaataaactgagggccaggcacgcccagggcggtacatggtacggagtcgatattaataatgaagacatagcagacaactttgaagcttttgtgtgggaacctgcaatggtacgcatcaatgcccttacagctgcctctgaagccgcttgtctgatcgtcagcgtggatgagaccatcaagaacccgagaagcaccgtggacgcgcctactgccgcaggccgtgggagagggcgagggcggccccactag

SEQ ID NO: 64758 - DNA, 1248 bp, Artificial Sequence
  derived and/or modified sequence
atgtggcggaaggtgtacaccccccggagcagcttcgagctgagcgcacagcctccatcttgggaacaacgtaagctgctggagaagtgtgcaatgactgcgcttagctcgaaattaattagtcagcagaaggcctttttcgcaaagatggtagtcgatgcagttatgatgctggatgacctgttacaattgaagatgatcggaataaagaaagtgcagggaggtgccctggaagactcccagctagtcgccggtgtggctttcaagaaaactttcagttacgccggtttcgagatgcaacctaagaagtaccacaatcctaagatcgctttgctcaacgttgagctggagctcaaggccgagaaagacaatgctgagatccgggtccacactgtcgaggactaccaagccatcgtcgacgctgagtggaacatcctctatgataaactcgaaaaaatccaccatagcggcgctaaggtagtgctgtcgaagctccctattggagacgtggcaacccagtacttcgccgacagggacatgttctgtgccggccgggtgcccgaggaggacctgaaacggactatgatggcttgtggggggagcattcagacatccgtgaacgccctttcggctgacgtattgggcaggtgtcaagtgtttgaagaaacacagattgggggagaacggtacaacttctttacagggtgccctaaggcaaaaacgtgtactttcatcttgagaggtggagcggaacagtttatggaggaaactgagcgcagtctccatgacgcaataatgattgtgcggagagctattaagaatgacagtgtagtcgccggcgggggtgcaatcgagatggaactatctaagtatttgagagattactcaaggacgatccctggaaagcagcaactgcttattggagcgtatgcaaaggccttggagattattccccgccaactgtgcgataatgcgggtttcgacgccaccaatattttgaataaacttagagctcgccatgcccagggcggcacatggtatggagtggacatcaataacgaggatatcgcggacaacttcgaagcgttcgtatgggagccagccatggtccgcataaacgcactgaccgctgcctcggaagccgcctgcttgattgtgtctgtggacgagaccattaaaaatccaaggtctaccgtggacgccccaaccgcggcggggcggggacgcggacgcggtcgacctcattag

SEQ ID NO: 64759 - DNA, 1371 bp, Artificial Sequence
  derived and/or modified sequence
atgatggtgggcgacggcaccaccagcgtgaccctgctggccgccgaatttcttaagcaggtgaagccgtatgtggaggagggattgcaccctcagatcatcatccgtgcattcaggaccgcgacccagctcgcagtgaataaaattaaagaaatcgctgtgacagtgaaaaaagccgacaaagtcgagcagcggaaactcctggagaaatgcgcaatgaccgccttatcttctaagctgatctctcagcagaaagcatttttcgcaaaaatggtggtggacgccgtaatgatgctggatgacctcttgcagttgaagatgatcggcattaagaaagtacaaggcggcgcactggaagacagtcagctggtggctggagtggcgtttaagaagacgttctcctatgcgggctttgagatgcaacccaaaaagtaccataaccctaagatcgcattactcaacgtagagctggaactgaaagctgaaaaagacaacgccgagattcgtgtccatactgtggaggactaccaagccatcgtggacgccgagtggaatattctgtacgataagctcgaaaagatccaccattccggtgcaaaagttgtacttagcaaattaccaatcggagatgtcgccacacagtactttgccgacagggacatgttctgtgccggtagagtacccgaagaggacctgaagagaacaatgatggcctgtggcggctctatccagaccagcgtcaacgcactctcggccgatgttctggggcggtgtcaggtgttcgaggaaactcaaatcggcggagagcgttataacttcttcacagggtgtccaaaggccaagacttgtactttcattttgcgcgggggggcagagcagtttatggaggaaaccgagcgctctcttcacgacgcaattatgatcgtgcgaagagctattaagaatgattccgtagtggcaggcggaggcgccattgagatggagctgtcaaagtacctccgggactacagcaggacgatccctggaaaacagcagctgcttatcggagcctatgcaaaagccctggagatcattccaaggcaactctgcgacaatgcagggtttgatgccaccaatatccttaacaagctgcgggcccgacacgctcagggcggaacctggtacggagtggacattaacaacgaggacatagcggacaattttgaagcgtttgtgtgggaacctgccatggttcggatcaacgccctgactgccgcttccgaggccgcatgccttattgtctctgttgatgagactattaaaaaccccaggagcactgtagatgcccccacagccgctggacgtggccggggcagaggccgtccccactag

SEQ ID NO: 64760 - DNA, 1332 bp, Artificial Sequence
  derived and/or modified sequence
atggccgaattcctgaaacaggtgaaaccgtacgttgaagaaggactgcacccacagatcattattcgggcatttcggacggccacccagctagctgtgaataaaataaaggagattgcagtgaccgtgaagaaggccgacaaagtcgagcagcgcaaattgctcgagaaatgtgccatgaccgcgctcagttctaaacttatctcgcagcagaaggctttcttcgctaagatggttgtggacgcagtgatgatgctggacgatctattgcagctgaagatgatcggaatcaagaaagtccaaggcggtgccctcgaggattcacagcttgtagcgggtgttgcctttaaaaagactttttcatacgcagggttcgagatgcagcccaagaagtaccacaaccccaaaattgccctgcttaacgtagaactggaactgaaggcagagaaagataacgccgagattcgggtccatacggtcgaagactatcaagcaattgtggacgccgagtggaacattttgtacgataagctggagaagatacatcacagcggagctaaggtagtgttatccaagctgccaattggagacgtcgcaacacaatattttgctgaccgcgacatgttttgcgcgggtcgagttcctgaagaggatttgaaaaggacaatgatggcctgcggcggtagcattcagactagcgtcaatgctctgtcagccgatgtgctgggtcgctgtcaggtgttcgaagagactcagatcggcggagaaagatataattttttcacagggtgccctaaggctaagacatgcacatttatcctccgaggaggcgctgagcagttcatggaagagaccgaacggtccttacacgacgccattatgattgttcggagggcgatcaagaacgatagtgtcgtcgcaggcggtggagccatcgagatggagctgtcgaaatacctgcgcgactactctcggacgattccgggaaaacagcaactactcatcggtgcctacgccaaggccttggaaataatccctcgccagttgtgcgacaacgcaggctttgatgcaactaacattttgaacaaattaagggcccgacacgcgcagggcggtacgtggtacggcgtggacatcaacaacgaagatatcgcagacaatttcgaggcgttcgtgtgggagcccgctatggtgcggatcaacgccctaacagctgcatctgaagctgcctgtctgatcgtatctgttgatgagactattaaaaaccctcggtcaactgtggatgcaccaaccgctgctggcagggggcgaggcaggggtcggcctcattag

SEQ ID NO: 64761 - DNA, 1248 bp, Artificial Sequence
  derived and/or modified sequence
atgtggcggaaggtctacacacccagatctagttttgagctatccgcgcagcctccgtcatgggaacagcgtaagctgctggaaaaatgcgcaatgactgccctatcttccaagctgattagtcagcaaaaggcttttttcgccaagatggtggtggatgcggtgatgatgctggacgacctgctgcagttaaaaatgattgggattaaaaaagttcagggtggagctttggaagacagccagcttgtcgctggtgtcgctttcaaaaagacattttcctacgcaggctttgaaatgcaacctaagaagtatcataatccaaagattgcgctgctgaacgttgagttggaactgaaggctgaaaaagataacgcggagatcagggtgcatacagtcgaggactatcaggctattgtcgatgccgaatggaacattctctatgacaagctggagaagattcaccactctggcgctaaagtcgtcttgagcaagctgcccattggtgatgtggccacccaatactttgccgaccgcgatatgttttgcgccggaagggtgcctgaagaggacctgaagcgaacaatgatggcctgcgggggtagcattcagacatccgtcaatgccttaagtgcggatgttctgggcaggtgccaggtgttcgaggaaactcagattggcggtgaaaggtacaactttttcacaggatgccccaaggccaagacgtgtactttcattctgcggggaggagccgaacagtttatggaggaaacggagcggagtttgcacgatgcaattatgatagtccggagggctatcaagaacgactccgtggtcgccggtggcggagctatcgagatggagctgtctaaatacctgagagactactcaaggacaatccctggtaaacaacagcttttaattggcgcatatgctaaggccctggagattatacctagacagctgtgcgacaatgccggttttgacgcgacgaacattctgaataaacttagagcaaggcacgcacaaggtggtacttggtacggtgtggacattaacaacgaggacatagccgacaacttcgaggctttcgtgtgggagcctgctatggtccgaatcaacgctcttaccgctgctagcgaagcggcttgcctcattgtaagcgtggacgagaccattaagaatccaaggagtactgtagacgcgccaactgccgctggtcgcggaagaggccgtggccgacctcactag

SEQ ID NO: 64762 - DNA, 1371 bp, Artificial Sequence
  derived and/or modified sequence
atgatggtgggagatggaacaacaagcgtgactctgctggctgcagagtttttgaagcaggtgaagccttacgttgaggagggattgcaccctcaaatcattattcgcgctttccgcactgctacccaactcgccgtcaacaaaataaaggagatcgcagttactgtgaagaaggctgataaggtcgagcagcgtaaactgctcgagaaatgtgctatgaccgccttatcctctaaactcatttctcagcaaaaggcttttttcgccaaaatggtggttgacgctgtgatgatgctggatgacctgttgcagttgaagatgatcggcatcaagaaagtacagggcggagcgctcgaagactcccaactggttgccggagtcgcttttaaaaagactttttcttatgcaggattcgaaatgcaacccaagaaataccacaaccctaagatcgccctgcttaatgtggaactggagcttaaggccgagaaggataacgcggagataagggtgcacacagttgaagattatcaggccattgtggacgcagaatggaacattctgtatgacaagctcgaaaaaattcaccactcaggggctaaggtggtcttgtccaagctgcccattggggacgtggccacacaatactttgctgaccgcgacatgttttgcgccggacgtgtgccggaggaagatctcaagagaacaatgatggcttgcggaggctcaatccagacttccgtgaacgcactgtcagccgacgtgctaggtcggtgtcaagtcttcgaagagacccagatcggaggggaaagatataacttttttaccgggtgtcctaaagcgaaaacctgcaccttcatcctccggggaggcgcagagcaattcatggaagagacggaaaggtccttgcacgacgctattatgattgtgcgcagggccattaaaaacgattcggttgtggcgggtggaggcgctatagaaatggaactctctaagtatctccgggactactcacgcaccatccccggaaagcagcagcttctcatcggtgcctacgcgaaagctctggagattattcccaggcagctgtgcgacaatgcgggatttgatgcaactaacattctcaacaagcttcgcgctcgtcacgcccaaggtggcacctggtacggagtagacatcaacaatgaggatatagctgataactttgaagcgtttgtctgggagcctgccatggtgcgaattaatgctctgacagccgcaagcgaggctgcctgtctgattgtatctgtggatgagacaattaagaatcctaggtcgacagtggatgcacctaccgctgcgggtagagggcgtggaagagggaggcctcactag

SEQ ID NO: 64763 - DNA, 1696 bp, Artificial Sequence
  derived and/or modified sequence
ttgtgggttgctgggcggcccggtctcggagaagaggggagagtggcgggccgctgaataagcttccaaaatgatgcccacaccagttatcctattgaaagaggggactgatagctcccaaggcatcccccagcttgtgagtaacatcagtgcctgccaggtgattgctgaggctgtaagaactaccctgggtccccgtggcatggacaagcttattgtagatggcagagtttctgaagcaggtgaaaccctatgtggaggaaggtttacacccccagatcatcattcgagctttccgcacagccacccagctggcagttaacaagatcaaagagattgctgtgaccgtgaagaaggcagataaagtggagcagaggaagctgctggaaaagtgtgccatgaccgctctgagctccaagctgatctcccagcagaaagctttctttgctaagatggtggtggatgcagtgatgatgctcgatgatttgctgcagcttaaaatgattggaatcaagaaggtacagggtggagccctcgaggattctcagctggtagctggtgttgcattcaagaagactttctcttacgctgggtttgaaatgcaacccaaaaagtaccacaatcccaagattgcccttttgaatgtcgagctcgagttgaaagctgagaaagacaatgctgagataagagtccacacagttgaggattatcaggcaattgttgatgctgagtggaacattctctatgacaagttagagaagatccatcattctggagccaaagttgtcttgtccaaactccccattggggatgtggccacccagtactttgctgacagggacatgttctgtgctggccgagtacctgaggaggatctgaagaggacaatgatggcctgtggaggctcaatccagaccagtgtgaatgctctgtcagcagatgtgctgggtcgatgccaggtgtttgaagagacccagattggaggcgagaggtacaatttttttactggctgccccaaggccaagacatgcaccttcattctccgtggcggcgccgagcagtttatggaggagacagagcggtccctgcatgatgccatcatgatcgtcaggagggccatcaagaatgattcagtggtggctggtggcggggccattgagatggaactctccaagtacctgcgggattactcaaggactattccaggaaaacagcagctgttgattggggcatatgccaaggccttggagattatcccacgccagctgtgtgacaatgctggctttgatgccacaaacattctcaacaagctgcgggctcggcatgcccaggggggtacatggtatggagtagacatcaacaacgaggacattgctgacaactttgaagctttcgtgtgggagccagctatggtgcggatcaatgcgctgacagcagcctctgaggctgcgtgcctgatcgtgtctgtagatgaaaccatcaagaacccccgctcgactgtggatgctcccacagcagcaggccggggccgtggtcgtggccgcccccactgagaggcaccccacccatcacatggctggctggctgctgggtgcacttaccctccttggcttggttacttcattttacaaggaaggggtagtaattggcccactctcttcttactggaggctatttaaataaaatgtaagacttc

SEQ ID NO: 64764 - DNA, 1674 bp, Artificial Sequence
  derived and/or modified sequence
atagagtagcggaagtggtccgttctcttcctctcccggcccaagcttctgggtatttctattgcgcgaggcattgtgggttgctgggcggcccggtctcggagaagaggggagagtggcgggccgctgaataagcttccaaaatgatggtgggtgatggcaccacctcagtgaccttgctggctgcagagtttctgaagcaggtgaaaccctatgtggaggaaggtttacacccccagatcatcattcgagctttccgcacagccacccagctggcagttaacaagatcaaagagattgctgtgaccgtgaagaaggcagataaagtggagcagaggaagctgctggaaaagtgtgccatgaccgctctgagctccaagctgatctcccagcagaaagctttctttgctaagatggtggtggatgcagtgatgatgctcgatgatttgctgcagcttaaaatgattggaatcaagaaggtacagggtggagccctcgaggattctcagctggtagctggtgttgcattcaagaagactttctcttacgctgggtttgaaatgcaacccaaaaagtaccacaatcccaagattgcccttttgaatgtcgagctcgagttgaaagctgagaaagacaatgctgagataagagtccacacagttgaggattatcaggcaattgttgatgctgagtggaacattctctatgacaagttagagaagatccatcattctggagccaaagttgtcttgtccaaactccccattggggatgtggccacccagtactttgctgacagggacatgttctgtgctggccgagtacctgaggaggatctgaagaggacaatgatggcctgtggaggctcaatccagaccagtgtgaatgctctgtcagcagatgtgctgggtcgatgccaggtgtttgaagagacccagattggaggcgagaggtacaatttttttactggctgccccaaggccaagacatgcaccttcattctccgtggcggcgccgagcagtttatggaggagacagagcggtccctgcatgatgccatcatgatcgtcaggagggccatcaagaatgattcagtggtggctggtggcggggccattgagatggaactctccaagtacctgcgggattactcaaggactattccaggaaaacagcagctgttgattggggcatatgccaaggccttggagattatcccacgccagctgtgtgacaatgctggctttgatgccacaaacattctcaacaagctgcgggctcggcatgcccaggggggtacatggtatggagtagacatcaacaacgaggacattgctgacaactttgaagctttcgtgtgggagccagctatggtgcggatcaatgcgctgacagcagcctctgaggctgcgtgcctgatcgtgtctgtagatgaaaccatcaagaacccccgctcgactgtggatgctcccacagcagcaggccggggccgtggtcgtggccgcccccactgagaggcaccccacccatcacatggctggctggctgctgggtgcacttaccctccttggcttggttacttcattttacaaggaaggggtagtaattggcccactctcttcttactggaggctatttaaataaaatgtaagacttcagataactttgtaaatt

SEQ ID NO: 64765 - protein, 339 aa, Artificial Sequence
  derived and/or modified sequence
MMDSQLVAGVAFKKTFSYAGFEMQPKKYHNPKIALLNVELELKAEKDNAEIRVHTVEDYQAIVDAEWNILYDKLEKIHHSGAKVVLSKLPIGDVATQYFADRDMFCAGRVPEEDLKRTMMACGGSIQTSVNALSADVLGRCQVFEETQIGGERYNFFTGCPKAKTCTFILRGGAEQFMEETERSLHDAIMIVRRAIKNDSVVAGGGAIEMELSKYLRDYSRTIPGKQQLLIGAYAKALEIIPRQLCDNAGFDATNILNKLRARHAQGGTWYGVDINNEDIADNFEAFVWEPAMVRINALTAASEAACLIVSVDETIKNPRSTVDAPTAAGRGRGRGRPH

SEQ ID NO: 64766 - protein, 434 aa, Artificial Sequence
  derived and/or modified sequence
MGMGRGAGRSALGFWPTLAFLLCSFPAATSPCKILKCNSEFWSATSGSHAPASDDTPEFCAALRSYALCTRRTARTCRGDLAYHSAVHGIEDLMSQHNCSKDGPTSQPRLRTLPPAGDSQERSDSPEICHYEKSFHKHSATPNYTHCGLFGDPHLRTFTDRFQTCKVQGAWPLIDNNYLNVQVTNTPVLPGSAATATSKLTIIFKNFQECVDQKVYQAEMDELPAAFVDGSKNGGDKHGANSLKITEKVSGQHVEIQAKYIGTTIVVRQVGRYLTFAVRMPEEVVNAVEDWDSQGLYLCLRGCPLNQQIDFQAFHTNAEGTGARRLAAASPAPTAPETFPYETAVAKCKEKLPVEDLYYQACVFDLLTTGDVNFTLAAYYALEDVKMLHSNKDKLHLYDRTRDLPGRAAAGLPLAPRPLLGALVPLLALLPVFC

SEQ ID NO: 64767 - DNA, 1305 bp, Artificial Sequence
  derived and/or modified sequence
atggggatgggcagaggcgctggcagatcggctcttggattctggcctacgctcgcgtttctgttgtgtagttttcccgcagcgacatccccgtgcaagattctcaagtgtaatagcgagttttggagcgcgacctccggctcccatgcacctgctagtgatgacacaccagaattctgcgctgctctgagatcctatgcactctgtactcgaagaaccgcgcggacttgtaggggtgacctggcatatcactctgccgttcatggtatagaagacctgatgagccagcacaattgttccaaagacggacctacaagccagcccaggttgaggacactcccccctgcaggcgattctcaggaaaggagcgacagccccgagatctgccactatgagaagtcttttcacaagcatagcgcaactcccaactatacccattgcggtttattcggagatcctcacctgaggaccttcacagatcggtttcagacctgcaaggtccagggcgcttggccactgattgataataactatctgaatgttcaggtgacaaacactccggtgctacccggttcagcagccacggcaacctcaaagttgacaattatctttaagaacttccaagaatgcgtcgaccagaaagtttaccaggcagagatggacgagctaccagctgccttcgttgatggatcgaagaacggaggagataagcatggcgcaaatagtttgaaaatcactgagaaggtgtcaggacagcacgtggagatccaagccaaatacataggtacaaccatcgtcgtgagacaagtcggtaggtaccttactttcgcagtccgcatgccggaggaagtggtcaatgccgtcgaggattgggactcccaggggctgtacttgtgcctgagaggctgtccattgaatcagcaaatcgacttccaagccttccatactaatgccgaggggacaggcgcacgacggctggcggcagcgtccccagccccaactgccccagagactttcccatatgaaaccgcagtggcgaaatgcaaggaaaaactacccgttgaagacctatattaccaggcctgcgttttcgacctcctgacaactggagatgtgaattttactcttgccgcctattacgccctcgaagacgttaagatgctgcacagcaacaaggacaagttgcacctgtacgacaggactagagatctgcccggacgcgccgctgccggcctccctctcgccccacggccgctgctgggcgcactggtgcctctattagcgcttctgcccgtgttttgttag

SEQ ID NO: 64768 - DNA, 1305 bp, Artificial Sequence
  derived and/or modified sequence
atgggcatggggaggggagctgggagaagtgccctcggattctggccaaccttagcattcctcctatgttccttcccagcagctacaagcccatgcaaaattcttaagtgcaattctgaattctggtctgctaccagcggctcccacgctcctgcttctgatgacacccccgaattctgcgccgccttacgctcctacgctctgtgcaccaggagaaccgccaggacatgcaggggagatctggcctaccactctgcagtgcacggaatcgaggacctcatgtcgcagcataattgctccaaagatggtcccaccagccaaccccggcttcgtacactcccccccgccggcgactcacaagagaggagcgattcccccgaaatttgccactatgaaaagtccttccataaacactccgcgacccctaattatacccactgtggattatttggggaccctcatctgcgcactttcacggaccgcttccagacttgcaaggtccagggggcctggcctctcattgataataactacctaaacgttcaggtgacgaacacacccgttttgcccggaagcgccgcaaccgcaacctccaaactgaccataattttcaagaacttccaggagtgcgttgatcagaaagtatatcaggccgaaatggacgaactccccgcagccttcgtggacgggagcaagaatggcggcgacaagcatggagctaatagcctgaagattactgagaaggttagcggccagcacgtcgagatccaggccaagtacatcggcactaccatcgtcgtgaggcaagtgggccgctacctcacctttgctgtccggatgccagaggaagtcgtgaatgcagtggaagattgggactctcaaggcttgtacttgtgcttgcgcggatgtccgctgaatcagcagatcgattttcaggctttccacacaaacgccgagggaaccggagccaggcggctggcagcggctagcccggcgcccacggcgccagagactttcccatacgagactgcagtggccaagtgtaaggagaagttgcccgttgaagatctgtactaccaggcctgcgtctttgatctgctcacaacaggggatgtgaatttcactcttgctgcttattatgccctggaggatgtgaagatgttgcactctaataaggataagctgcacctgtacgatcgcaccagggaccttccaggaagagctgcggctggtttgcctctagctcccaggccactcctgggcgccctggtgccgctgctggccctgcttcccgtgttctgctag

SEQ ID NO: 64769 - DNA, 1026 bp, Artificial Sequence
  derived and/or modified sequence
atgtcacaacacaactgttccaaggacggacctaccagccagcctcgcttgcggaccctccctccagcaggcgattctcaggagcggtctgactcccctgagatatgccactatgaaaagagcttccataagcacagcgcgacccccaattatacccactgcggcctgttcggggatccccacctcaggacattcactgaccggtttcagacatgtaaagtgcagggcgcatggcccctaatcgataacaactacctgaacgttcaggtcactaacactccagtactgccaggcagcgctgccaccgctacatctaagctgacaataatattcaaaaatttccaggaatgcgtcgatcagaaggtataccaagctgaaatggacgaactgccggcagcatttgtagatggctccaaaaacgggggcgacaagcatggcgcaaactctcttaaaattacagagaaggttagcggtcagcatgtcgagatccaggcgaagtatattggtactactatcgttgttcgtcaggtaggccggtatctgactttcgccgtcaggatgcccgaagaggtggtgaatgccgtggaggattgggactcgcaagggctgtacctctgccttcgtggatgccccctcaatcagcagatcgatttccaggccttccataccaacgcagaaggcaccggtgcccggaggcttgccgccgcaagcccagccccaaccgcgccagaaacattcccctacgaaacagccgtcgccaagtgtaaagaaaagcttcccgtagaggatctctattatcaagcttgcgtgtttgatcttctgactacgggcgatgtcaacttcacactggcggcctactatgcactggaagatgtaaagatgctccactccaacaaggataagttgcacttgtacgataggaccagggatctgcccggtcgggccgctgctgggctgcctttggcccctaggcctctgttaggagctttggtcccactgttggccttgctgccggtgttctgctag

SEQ ID NO: 64770 - DNA, 1305 bp, Artificial Sequence
  derived and/or modified sequence
atgggcatgggaagaggcgccgggcggtcagcccttggattttggccgaccctggcatttctgctgtgcagctttcccgcggctactagtccttgcaagatcttgaagtgcaactctgagttttggagtgcgacaagtggctctcacgcccccgcttcagatgacaccccagagttctgcgccgcactgcgctcctatgcgctatgtacgaggcggactgccagaacttgtaggggggacctggcgtatcatagcgcagtgcacggcatcgaagacctcatgagtcagcataattgtagcaaagatggtcctacgtcccagccgcgactgcgcacgctcccaccggccggggactctcaggaacgatctgattctcccgagatctgtcattatgagaaatcttttcacaaacatagtgccactcccaactatacccactgcggcctgttcggcgacccccatctcaggacgtttaccgaccggtttcagacctgcaaggtacagggtgcgtggcccctgatcgacaacaactacctcaacgtccaggtgactaatacacctgtattgcccgggtccgctgctacagcgactagcaaactgaccattatatttaagaacttccaggagtgtgtcgatcaaaaggtttaccaggccgagatggatgagctgcctgctgccttcgtggatggcagtaagaacggaggggacaagcacggcgcaaactccttgaagatcacggaaaaggttagcgggcagcacgtcgaaatacaggcaaagtatatcggaaccacgatcgtggtgagacaagtgggacggtacttaaccttcgccgtaaggatgcccgaggaagtcgtgaacgccgtagaggattgggactcacagggactgtacctctgcctgagaggctgccccctgaatcagcaaatcgattttcaggcgtttcacacgaatgccgaaggcacaggtgcaagacgattagccgctgcctctccagcacctaccgcccctgagacttttccatatgagactgcagtggcaaagtgtaaggaaaaacttcccgtggaggacctctattatcaagcctgcgtgtttgatctcctcacaacaggcgatgtgaacttcacgctggccgcctattatgccctggaagatgtaaaaatgcttcacagcaacaaggacaagttgcacctgtacgacaggactcgcgatttacccggcagggcagccgcaggcctcccattagcaccacgtcccctgcttggagccctggtacccttactggcactgttgccggtgttttgttag

SEQ ID NO: 64771 - DNA, 1305 bp, Artificial Sequence
  derived and/or modified sequence
atgggcatgggcagaggagctggccgcagcgccctgggcttctggcccaccctggccttcctgctgtgcagcttccctgctgccaccagcccctgcaagatcctgaagtgcaacagcgagttctggagcgccaccagcggcagccacgccccagccagtgatgacaccccagagttctgtgccgccctgcggagctatgccctgtgcaccaggagaacagcccggacctgccgcggggacctggcctaccacagcgctgtgcacggcatcgaggacctgatgagccagcacaactgcagcaaggatggccccaccagccagccccggctgcggaccctgcccccagctggggacagccaggagaggagtgacagccctgagatctgccactatgagaagagcttccacaagcacagcgccacccccaactacacccactgcggcctgtttggagacccccacctgcggaccttcacagaccgcttccagacctgcaaggtgcagggcgcctggcccctgattgacaacaactacctgaatgtgcaggtgaccaacacccctgtgctgcccggcagcgctgccacagccaccagcaagctgaccatcatcttcaagaacttccaggagtgtgtggaccagaaggtgtaccaggccgagatggatgagctgcctgctgcctttgtggatggcagcaagaatggaggagacaagcacggggccaacagcctgaagatcacagagaaggtgtctggccagcacgtggagatccaggccaagtacatcggcaccaccatcgtggtgcggcaggtgggccgctacctgacctttgctgtgaggatgcctgaggaggtggtgaatgctgtggaggactgggacagccagggcctgtacctgtgcctgcggggctgccccctgaaccagcagattgacttccaggccttccacaccaatgctgagggcactggagcccggcggctggccgccgccagccctgcccccacagcccctgagaccttcccctatgaaacagctgtggccaagtgcaaggagaagctgcctgtggaggacctgtactaccaggcctgtgtgtttgacctgctgaccactggagatgtgaacttcaccctggccgcctactatgccctggaggatgtgaagatgctgcacagcaacaaggacaagctgcacctgtatgacaggacccgggacctgcccggccgggctgctgctggcctgcccctggccccccggcccctgctgggcgccctggtgcccctgctggccctgctgcctgtgttctgctag

SEQ ID NO: 64772 - DNA, 1026 bp, Artificial Sequence
  derived and/or modified sequence
atgagccagcacaactgcagcaaggatggccccaccagccagccccggctgcggaccctgcccccagctggggacagccaggagaggagtgacagccctgagatctgccactatgagaagagcttccacaagcacagcgccacccccaactacacccactgcggcctgtttggagacccccacctgcggaccttcacagaccgcttccagacctgcaaggtgcagggcgcctggcccctgattgacaacaactacctgaatgtgcaggtgaccaacacccctgtgctgcccggcagcgctgccacagccaccagcaagctgaccatcatcttcaagaacttccaggagtgtgtggaccagaaggtgtaccaggccgagatggatgagctgcctgctgcctttgtggatggcagcaagaatggaggagacaagcatggagccaacagcctgaagatcacagagaaggtgtctggccagcacgtggagatccaggccaagtacatcggcaccaccatcgtggtgcggcaggtgggccgctacctgacctttgctgtgaggatgcctgaggaggtggtgaatgctgtggaggactgggacagccagggcctgtacctgtgcctgcggggctgccccctgaaccagcagattgacttccaggccttccacaccaatgctgagggcaccggggcccggcggctggccgccgccagccctgcccccacagcccctgagaccttcccctatgaaacagctgtggccaagtgcaaggagaagctgcctgtggaggacctgtactaccaggcctgtgtgtttgacctgctgaccactggagatgtgaacttcaccctggccgcctactatgccctggaggatgtgaagatgctgcacagcaacaaggacaagctgcacctgtatgacaggacccgggacctgcccggccgggctgctgctggcctgcccctggccccccggcccctgctgggcgccctggtgcccctgctggccctgctgcccgtcttctgctag

SEQ ID NO: 64773 - DNA, 1305 bp, Artificial Sequence
  derived and/or modified sequence
atgggcatgggccggggcgccggccggagcgccctgggcttctggccaactctcgcatttctcttatgttccttccctgcagctacatccccgtgcaagattttaaagtgtaattcagagttctggtcagctacatcgggatcacatgcaccagccagtgatgacacacctgaattttgtgcagcattaaggtcgtacgccctctgtacacgcaggacagcccgaacctgtcggggggatctggcctaccattctgctgtccacggaatcgaggatttgatgagtcaacacaattgtagcaaggacggaccaacaagccagccaaggctgaggactctgcctccagccggcgacagtcaggagcgctctgactcccctgaaatttgccattacgaaaaatcttttcacaagcactctgctacacctaactatacccattgcgggctcttcggcgacccgcacctgcgcacttttacggacaggtttcagacttgcaaggtacagggggcctggcccctcattgataataattatctgaatgtccaggtaacaaacacccctgtgttgcctggctctgccgcaacagctacatctaaactaacaatcatcttcaagaattttcaggagtgtgttgatcagaaagtatatcaggctgaaatggacgaattgccagccgcttttgttgacggctccaagaacggcggagataaacacggagccaacagcttaaaaatcaccgagaaggtatctggacagcacgtggaaatccaggcgaagtatatcggcactacgatcgtagtgcgtcaggtgggcaggtacttgacgttcgccgtacggatgccggaggaggtagtaaatgccgttgaggactgggactcccagggactatatctttgcctgagaggttgtcccctcaaccaacagattgatttccaggcctttcacacgaatgctgaaggaacgggcgcccgcagactggctgcggcctctcctgctcctactgcacccgagacgtttccctatgaaacagccgtagccaagtgcaaagagaagctgcctgtggaagatctgtactaccaggcatgcgtattcgaccttctgaccactggcgacgttaacttcaccctggcagcatactatgcactcgaagatgtgaaaatgttacattcaaacaaagacaagttgcatctgtacgatcggacaagggatcttcctggtagagctgctgccggtctgcccctggctccaaggcctctgctgggggcgctggtgccactgctcgcgctgttgcccgtgttttgctag

SEQ ID NO: 64774 - DNA, 1305 bp, Artificial Sequence
  derived and/or modified sequence
atgggcatgggccggggcgccggccggagcgccctgggcttctggccaactctcgcctttttactttgttcatttcctgctgccacctcaccttgtaaaatcctaaagtgtaacagcgaattctggtccgcaactagcggctcgcacgcccctgcctcggatgatacccctgagttctgcgctgcacttagatcatatgctctctgcacccgtagaaccgctagaacatgtcgcggagacttggcttatcacagtgcagtgcatggaatcgaagacctgatgtcacaacataactgtagcaaggatggcccaaccagccagcccagactaagaactctgcccccagcaggtgattcgcaggaacggtcagactcccccgagatatgtcattatgagaaaagctttcacaagcactcagcaactccgaattacactcactgcgggctgttcggagacccacacctgagaacctttacagatcggttccagacgtgcaaggtgcagggcgcgtggcccctgatagacaataactatctcaacgtgcaagtgaccaataccccagtgctccctggatccgctgccacagccactagcaaacttaccataatctttaagaactttcaagaatgcgtggatcaaaaggtttaccaggccgaaatggacgaactgccagccgctttcgtggatggctctaagaatgggggcgacaagcatggagccaactctttaaaaatcactgagaaggtctccgggcagcatgtggagatacaggctaagtacatcggaacaaccattgtggtgcgccaagtgggacggtacctcacttttgcggtgcgcatgcccgaggaggtggtcaacgcggtcgaagattgggacagccaggggctctacctgtgtctgaggggttgcccgctcaaccagcagatcgattttcaggcgtttcacactaatgcagagggaacgggtgcccgccgactggcggcagccagcccagcccctaccgcacccgagacttttccttatgagaccgcggtggccaagtgcaaagagaaacttcctgtggaggatctgtattaccaggcatgcgtttttgacctgcttaccactggagatgtcaacttcacactggcagcatattatgcgctcgaagacgtcaaaatgctccatagcaacaaggataaactacatctctacgacagaacacgcgatttgcccgggcgagctgccgctggactgccccttgctccccgtccgctgctcggagcattggtacctctgcttgcactgctgcccgttttttgttag

SEQ ID NO: 64775 - DNA, 1026 bp, Artificial Sequence
  derived and/or modified sequence
atgagccagcacaactgcagcaaggacggccccaccagccagccccggctaaggaccctgcccccggccggagattcgcaggagcgaagcgactcccctgaaatctgccactacgaaaagagtttccataagcatagtgctacacccaattacacgcactgtggtttgttcggagacccacacttacgaaccttcactgacaggttccaaacttgtaaggttcagggagcatggccgttgatcgacaataactacttgaatgtgcaggttacaaacacacccgtacttccgggcagcgcggctactgctacatccaagctgaccatcatttttaagaattttcaagaatgcgttgatcaaaaggtgtatcaggctgagatggacgaactgcctgccgcttttgtagacggaagcaagaatggtggcgacaagcatggtgcaaattccctaaaaattaccgagaaagtgtccggacagcacgtggagattcaagcaaagtacatagggaccacaattgtcgtgaggcaggtgggacggtacctgacattcgcagtgcgaatgcccgaggaagtggtcaacgctgtggaggactgggacagtcaaggtctgtacctgtgcctgagaggttgcccgctcaaccagcaaatcgactttcaggcctttcacaccaacgccgagggaactggcgccaggaggctggccgctgcctctccagctccaacagccccggagacctttccttatgagaccgcggtggcgaaatgcaaggagaagctcccagtggaagacctctattaccaagcatgcgtgtttgatctgctgactactggagatgttaactttaccttggccgcctattatgccctcgaagatgtaaaaatgctgcattcaaataaggacaaactacatctctacgatagaacacgcgacctcccggggagggccgccgccggactccccctagccccccgccccctcttaggtgccctggtgcccctcctggcacttcttccggtgttttgctag

SEQ ID NO: 64776 - DNA, 1305 bp, Artificial Sequence
  derived and/or modified sequence
atgggcatgggccggggcgccggccggagcgccctgggcttctggcctaccctggccttcctcctgtgcagctttcctgctgctacaagcccctgcaagatcttgaaatgtaactccgagttctggtctgccacgtctggcagccacgccccggcttctgacgatacaccagagttctgcgcggccctgcggtcatatgccctctgcacccgccgcaccgctcggacatgcagaggagaccttgcctatcattccgcagtccatggcatcgaagatttaatgagccagcataactgctccaaagacggacccaccagccagcctcgtttaaggactcttcctccagctggggattcccaggagcgctccgacagtcccgaaatatgtcattacgagaagagtttccataagcactctgcaaccccgaattacacacactgtgggctgtttggggatcctcatctcaggactttcactgataggttccagacatgtaaggtacagggagcctggcccctgattgataacaattatctgaatgtgcaggtgacgaacacacctgtgttgccaggtagtgctgccaccgccacatcaaagctgacaattatcttcaaaaatttccaggaatgtgtggatcaaaaagtgtatcaggctgaaatggacgaactcccggccgccttcgtggacggcagtaagaatggtggcgacaaacatggagcaaactctctcaagattacggagaaggttagtgggcagcacgtggagatccaggcaaaatatataggaacaacaatagtagtgcgccaggtggggcgatatctcacctttgctgttagaatgcccgaggaggtagtgaatgccgtggaggactgggatagccaaggcctttacctctgtctacggggttgtcctctgaatcaacaaattgactttcaagcgttccatacaaacgcagaagggacgggagcccgcaggctggcagctgcctctcccgctccgaccgcacccgagacatttccctatgagactgccgtggccaagtgtaaagaaaagctccctgtggaagatctctattaccaggcttgcgtgtttgatctacttacaacaggggatgtcaattttacgctggctgcctactatgctttagaggatgtgaagatgcttcactcaaacaaagacaaactacacctctatgataggactagggacctgcccgggcgtgcagccgcgggtctgcctctggcccctaggccccttcttggcgctttagtgccactgctcgctctcttgccggtcttctgctag

SEQ ID NO: 64777 - DNA, 1305 bp, Artificial Sequence
  derived and/or modified sequence
atggggatgggccgtggggcaggccgttccgcacttggattttggcccacgttggctttcttactgtgctctttccccgcagccactagcccctgcaagattctgaagtgtaactccgagttctggtctgcaactagcggctcacatgcacccgctagcgacgacacaccagaattctgtgccgctttaaggtcttatgctctatgtaccaggcgcacggcgaggacatgtcgcggagatcttgcttatcacagcgcagtccacggcatcgaagaccttatgtcccagcacaattgctcaaaagacggaccgactagccagcctcgcttgcgcacattgccgccagccggtgacagccaggaacgaagtgattcccctgagatatgccactacgagaaatccttccacaagcacagcgccacccctaactacactcactgcggcctattcggtgatccgcacttgcgtacgttcaccgatcggttccagacctgcaaagtgcagggagcttggcctcttatcgacaataactatctcaacgtccaagtcactaatacacctgtattacccggttctgccgcaacagcaactagtaagctgaccatcatttttaagaacttccaggagtgtgtggaccaaaaggtatatcaggcagagatggatgagctgcctgcagcttttgtggacggcagcaagaatggaggagacaagcacggggctaacagtcttaaaataactgaaaaagtttctggccagcacgtggagatacaggctaaatatatcgggaccactattgtggtgcgtcaagtgggcaggtacctgacatttgctgtacgtatgccggaggaggttgtcaacgctgtcgaggactgggattcccagggactgtatctctgcctgagaggttgccccctgaatcagcaaatcgacttccaagcatttcatactaacgccgaagggacgggtgcgaggaggctagccgctgccagtcctgccccaacagctcccgaaacattcccatacgaaactgctgtggccaagtgcaaggaaaagttgccagtggaggatttgtactatcaagcatgtgtctttgacctgctaaccaccggagacgttaattttacgctggccgcatattacgccctggaggacgtaaagatgttgcactctaacaaagacaagcttcacctctatgaccgtactcgagacctgcctggacgcgcagcagcgggacttcccttggcccctcgcccactactcggcgctctcgtgcctttgctggccttgcttcctgtgttttgttag

SEQ ID NO: 64778 - DNA, 1305 bp, Artificial Sequence
  derived and/or modified sequence
atgggcatgggcagaggagccggacggagtgccctcggcttctggcctaccctcgcctttctgctgtgtagttttcctgccgcaacttcgccgtgcaagattctcaagtgcaattcagaattttggagcgcaacaagcggttcacatgcacccgcatctgacgatacgcccgaattttgcgcagccttacggtcgtacgctctgtgtaccagacgtacggctcggacttgcagaggcgatcttgcttatcactcagccgtccacggcattgaggaccttatgagtcagcacaactgttcaaaggacggccctactagccaacctcggctgagaaccctgccacctgctggggattctcaggaaagaagtgactcccccgagatctgccattatgaaaaatctttccacaaacacagcgctacaccgaactatacccattgcggccttttcggagacccccatctacgcacttttactgatcgtttccaaacctgtaaagtccagggggcttggccgcttatcgataataattacctcaacgtccaagtgacaaacacccctgtgctgcccggaagcgccgcaaccgctacatctaaactgaccattatatttaagaacttccaggaatgcgttgaccaaaaggtgtatcaagccgagatggatgagttgcctgccgctttcgtcgatggctctaagaacggcggtgacaaacacggcgctaatagcctaaaaattacagaaaaggtttcaggtcagcacgtggaaatccaggcaaaatacattggaacaaccatcgtagttcgacaggtcggcagatacctcaccttcgcagtaagaatgcccgaagaggttgtcaacgcagttgaggattgggatagccaggggctgtacctctgcttgcggggatgtccacttaaccagcaaatcgattttcaagctttccatacaaatgcggagggcaccggcgcacgaagactggccgcagcgagcccagcccctacggcacctgagaccttcccctacgagacagccgtggccaagtgcaaggagaagcttcccgtggaggacctctattatcaagcctgtgtattcgatctactgaccaccggcgacgtgaatttcaccttagctgcatactacgcactcgaggatgtcaagatgttacactcaaataaagacaagctgcatttgtacgatcgtactcgcgatctgcctggacgcgcagccgcaggcctccccttagccccacggcctctgctgggtgcgctggtgcccctgctggccctccttccggtgttctgctag

SEQ ID NO: 64779 - DNA, 1026 bp, Artificial Sequence
  derived and/or modified sequence
atgtcacagcacaactgctccaaggatgggcctacaagccagcctagactgcgcaccctgccacccgctggagattcccaggagcgcagtgactcacctgagatctgtcactatgaaaagtctttccataaacattcagcaacaccaaattatacacactgcggccttttcggagaccctcacctgcggacattcaccgatagatttcaaacttgtaaagttcagggggcttggcccctgattgataacaactacctcaatgtgcaggttacaaatacccctgtgcttccagggtcggccgcaaccgccactagtaaactcacaatcattttcaaaaacttccaggagtgcgtcgatcagaaggtgtaccaggcagagatggatgaactgcccgctgcgttcgtggatggtagcaagaacggcggtgataaacacggtgcgaatagtctaaagataacagagaaagttagcgggcagcacgtcgaaatccaagccaaatacattggcacaacgatcgtggtgagacaggtgggacggtatctgaccttcgcagtccggatgccagaagaggtggtgaacgcagtcgaagactgggattctcagggcttatatctttgcctcagaggctgccctctcaaccagcaaattgacttccaggccttccacactaatgcagagggcacaggtgctcgacgactcgcagccgctagcccagccccaaccgctccagagacctttccttacgaaacagctgtggcaaagtgcaaagagaagctgccggtggaggatttgtattaccaagcgtgtgtattcgacctgttgactaccggtgatgttaacttcaccctcgccgcatactatgcactcgaggacgtcaagatgcttcacagtaacaaagacaagttgcatttgtatgaccggaccagggatttgccagggagagctgccgctggcctgcctctagctccaagacctctgttgggcgcactcgtgcccttgctggccctgctgccggtcttttgttag

SEQ ID NO: 64780 - DNA, 1305 bp, Artificial Sequence
  derived and/or modified sequence
atgggaatgggcagaggcgcagggcgaagtgcactgggcttttggcctaccttagcgttcctgttgtgttcattccccgctgctacaagtccatgcaagatcctgaagtgcaacagtgagttctggagtgccaccagcggatctcacgcgcctgccagcgatgatacgccagagttttgtgccgcactaaggagttacgcactttgtacaaggcggaccgcgagaacttgccgaggagatctcgcttatcattcagcggtacacggcatcgaggatctaatgagtcaacacaactgctctaaggatggcccaacctcccagcctcgtctgaggacattaccacccgctggcgattcccaggagcgatcggactctcccgagatttgccactatgagaagagttttcacaagcattcagcaacccccaactacacccattgtggtttattcggtgaccctcacttacgcaccttcaccgacaggttccaaacatgcaaagtgcagggcgcttggccactgattgataacaactatctgaacgtgcaagtgaccaatactccagttcttcctggcagtgctgccaccgctacctctaaactgaccatcattttcaaaaactttcaggaatgtgtggaccaaaaggtttaccaggctgagatggacgagctgcccgcagccttcgtggatggctctaaaaacggcggagacaaacacggagccaatagcctgaagataaccgagaaagtttctggacaacacgttgaaatccaagctaaatacatcggaaccacaatcgtagtacgccaggtggggagatatctgacttttgcggtgagaatgccggaagaagtggtaaacgccgtcgaggattgggactcccagggactgtacttgtgcctccgcggttgccctctcaaccagcaaattgactttcaggcattccacacaaacgcagaaggcacaggagctagacggctggcggctgccagccccgctcccacagcaccagaaacatttccctatgaaacagcagtcgctaaatgcaaggagaagttgcccgttgaagacctatactaccaggcctgcgtatttgatctgctgacgactggagacgtaaacttcaccctggccgcatattacgctctagaggacgtgaagatgctgcatagcaataaggataagttacatctgtacgatcgtactagagacctgccgggtagagcagcagccggattgccactcgccccacggcctcttctcggcgcactggtgcccctgctggccctgctgcctgtgttctgctag

SEQ ID NO: 64781 - DNA, 3038 bp, Artificial Sequence
  derived and/or modified sequence
cgcccgcggccgaggtggacggagcctcccggctcgctgctcccgccggcggagcgaggctgccctttcttcgcagcgtgatttattttcttctttttttctgaactcttcttccagggagaggctagtggtaacaggccgagctggatggatgggtatggggagaggggcaggacgttcagccctgggattctggccgaccctcgccttccttctctgcagcttccccgcagccacctccccgtgcaagatcctcaagtgcaactctgagttctggagcgccacgtcgggcagccacgccccagcctcagacgacacccccgagttctgtgcagccttgcgcagctacgccctgtgcacgcggcggacggcccgcacctgccggggtgacctggcctaccactcggccgtccatggcatagaggacctcatgagccagcacaactgctccaaggatggccccacctcgcagccacgcctgcgcacgctcccaccggccggagacagccaggagcgctcggacagccccgagatctgccattacgagaagagctttcacaagcactcggccacccccaactacacgcactgtggcctcttcggggacccacacctcaggactttcaccgaccgcttccagacctgcaaggtgcagggcgcctggccgctcatcgacaataattacctgaacgtgcaggtcaccaacacgcctgtgctgcccggctcagcggccactgccaccagcaagctcaccatcatcttcaagaacttccaggagtgtgtggaccagaaggtgtaccaggctgagatggacgagctcccggccgccttcgtggatggctctaagaacggtggggacaagcacggggccaacagcctgaagatcactgagaaggtgtcaggccagcacgtggagatccaggccaagtacatcggcaccaccatcgtggtgcgccaggtgggccgctacctgacctttgccgtccgcatgccagaggaagtggtcaatgctgtggaggactgggacagccagggtctctacctctgcctgcggggctgccccctcaaccagcagatcgacttccaggccttccacaccaatgctgagggcaccggtgcccgcaggctggcagccgccagccctgcacccacagcccccgagaccttcccatacgagacagccgtggccaagtgcaaggagaagctgccggtggaggacctgtactaccaggcctgcgtcttcgacctcctcaccacgggcgacgtgaacttcacactggccgcctactacgcgttggaggatgtcaagatgctccactccaacaaagacaaactgcacctgtatgataggactcgggacctgccaggcagggcggctgcggggctgcccctggccccccggcccctcctgggcgccctcgtcccgctcctggccctgctccctgtgttctgctagacgcgtagatgtggagggaggcgcgggctccgtcctctcggcttccccatgtgtgggctgggaccgcccacggggtgcagatctcctggcgtgtccaccatggccccgcagaacgccagggaccgcctgctgccaagggctcaggcacggacccctccccttctagtgcacgtgacaaggttgtggtgactggtgccatgatgtttgacagtagagctgtgtgagagggagagcagctcccctcgccccgcccctgcagtgtgaatgtgtgaaacatcccctcaggctgaagccccccacccccaccagagacacactgggaaccgtcagagtcagctccttccccctcgcaatgcactgaaaggcccggccgactgctgctcgccgatccgtggggccccctgtgcccgccacacgcacgcacacactcttacacgagagcacactcgatccccctaggccagcggggacaccccagccacacagggaggcatccttggggcttggccccaggcagggcaaccccggggcgctgcttggcaccttagcagactgctggaaccttttggccagtaggtcgtgcccgcctggtgccttctggcctgtggcctccctgcccatgttcacctggctgctgtgggtaccagtgcaggtcccggttttcaggcacctgctcagctgcccgtctctggcctgggcccctgccccttccaccctgtgcttagaaagtcgaagtgcttggttctaaatgtctaaacagagaagagatccttgacttctgttcctctctctcctgcagatgcaagagctcctgggcaggggtgcctgggccccagggtgtggcaggagacccagtggatggggccagctggcctgccctgatcctctgcttcctcctcacaaccccaagagcccccagcccggtccatccacgtctggagtctggggagaggagcagggtcttaggactctcagctctgagcatccctggcagggtcttcaacctctaatctcttcccttaagccctgtggccacacagccaggagagacttgccgctggctcccgcctcatttcagcccagggtgctcatccaggggcccagaacagtcccacctgtgctgctgtgcccacagcacaaagccaggcttcactcccaaaagtgcagccaggccctggagggtgatcctgccagcagccctacagctccacaccctacccacccatcggcagcccctctgctgttccccagggacctctcatacactggccaggaggctgcagaacgtgtgtctccccctccctccaagaggtcctgctccctctgccagaaccgtgtgtgggcgggtgggagggcgctcggggcccggcccctccctctccctgctggttttagttggtccctatgttggaagtaaaaagtgaagcactttattttggttgtgtttgctcacgttctgcttggaagtggggacccctcactgcgtccacgtgtctgcgacctgtgtggagtgtcaccgcgtgtacatactgtaaattatttattaatggctaaatgcaagtaaagtttggtttttttgtta

SEQ ID NO: 64782 - DNA, 3172 bp, Artificial Sequence
  derived and/or modified sequence
agacctagacaactcggaagtgggtttttcagcctcctgcaccggtgtcgcgtctgagtgcgactgatgagccagggggcgtcggtggaagcttgggggagaggctagtggtaacaggccgagctggatggatgggtatggggagaggggcaggacgttcagccctgggattctggccgaccctcgccttccttctctgcagcttccccgcagctattaaaagaagcccaggaagtttctgcgcagcgttggagatgaggagactgtggaatttgatgtcgtggaaggagagaagggtgcagaagccgctaatgtaactgggcccggggaggtgcccgtgaagggcagctgttatgcccccaacctacccacctccccgtgcaagatcctcaagtgcaactctgagttctggagcgccacgtcgggcagccacgccccagcctcagacgacacccccgagttctgtgcagccttgcgcagctacgccctgtgcacgcggcggacggcccgcacctgccggggtgacctggcctaccactcggccgtccatggcatagaggacctcatgagccagcacaactgctccaaggatggccccacctcgcagccacgcctgcgcacgctcccaccggccggagacagccaggagcgctcggacagccccgagatctgccattacgagaagagctttcacaagcactcggccacccccaactacacgcactgtggcctcttcggggacccacacctcaggactttcaccgaccgcttccagacctgcaaggtgcagggcgcctggccgctcatcgacaataattacctgaacgtgcaggtcaccaacacgcctgtgctgcccggctcagcggccactgccaccagcaagctcaccatcatcttcaagaacttccaggagtgtgtggaccagaaggtgtaccaggctgagatggacgagctcccggccgccttcgtggatggctctaagaacggtggggacaagcacggggccaacagcctgaagatcactgagaaggtgtcaggccagcacgtggagatccaggccaagtacatcggcaccaccatcgtggtgcgccaggtgggccgctacctgacctttgccgtccgcatgccagaggaagtggtcaatgctgtggaggactgggacagccagggtctctacctctgcctgcggggctgccccctcaaccagcagatcgacttccaggccttccacaccaatgctgagggcaccggtgcccgcaggctggcagccgccagccctgcacccacagcccccgagaccttcccatacgagacagccgtggccaagtgcaaggagaagctgccggtggaggacctgtactaccaggcctgcgtcttcgacctcctcaccacgggcgacgtgaacttcacactggccgcctactacgcgttggaggatgtcaagatgctccactccaacaaagacaaactgcacctgtatgataggactcgggacctgccaggcagggcggctgcggggctgcccctggccccccggcccctcctgggcgccctcgtcccgctcctggccctgctccctgtgttctgctagacgcgtagatgtggagggaggcgcgggctccgtcctctcggcttccccatgtgtgggctgggaccgcccacggggtgcagatctcctggcgtgtccaccatggccccgcagaacgccagggaccgcctgctgccaagggctcaggcacggacccctccccttctagtgcacgtgacaaggttgtggtgactggtgccatgatgtttgacagtagagctgtgtgagagggagagcagctcccctcgccccgcccctgcagtgtgaatgtgtgaaacatcccctcaggctgaagccccccacccccaccagagacacactgggaaccgtcagagtcagctccttccccctcgcaatgcactgaaaggcccggccgactgctgctcgccgatccgtggggccccctgtgcccgccacacgcacgcacacactcttacacgagagcacactcgatccccctaggccagcggggacaccccagccacacagggaggcatccttggggcttggccccaggcagggcaaccccggggcgctgcttggcaccttagcagactgctggaaccttttggccagtaggtcgtgcccgcctggtgccttctggcctgtggcctccctgcccatgttcacctggctgctgtgggtaccagtgcaggtcccggttttcaggcacctgctcagctgcccgtctctggcctgggcccctgccccttccaccctgtgcttagaaagtcgaagtgcttggttctaaatgtctaaacagagaagagatccttgacttctgttcctctctctcctgcagatgcaagagctcctgggcaggggtgcctgggccccagggtgtggcaggagacccagtggatggggccagctggcctgccctgatcctctgcttcctcctcacaaccccaagagcccccagcccggtccatccacgtctggagtctggggagaggagcagggtcttaggactctcagctctgagcatccctggcagggtcttcaacctctaatctcttcccttaagccctgtggccacacagccaggagagacttgccgctggctcccgcctcatttcagcccagggtgctcatccaggggcccagaacagtcccacctgtgctgctgtgcccacagcacaaagccaggcttcactcccaaaagtgcagccaggccctggagggtgatcctgccagcagccctacagctccacaccctacccacccatcggcagcccctctgctgttccccagggacctctcatacactggccaggaggctgcagaacgtgtgtctccccctccctccaagaggtcctgctccctctgccagaaccgtgtgtgggcgggtgggagggcgctcggggcccggcccctccctctccctgctggttttagttggtccctatgttggaagtaaaaagtgaagcactttattttggttgtgtttgctcacgttctgcttggaagtggggacccctcactgcgtccacgtgtctgcgacctgtgtggagtgtcaccgcgtgtacatactgtaaattatttattaatggctaaatgcaagtaaagtttggtttttttgtt

SEQ ID NO: 64783 - DNA, 1305 bp, Artificial Sequence
  derived and/or modified sequence
atgggcatgggcagaggcgccggcagaagcgccctgggcttctggcccaccctggccttcctgctgtgcagcttccccgccgccaccagcccctgcaagatcctgaagtgcaacagcgagttctggagcgccaccagcggcagccacgcccccgccagcgacgacacccccgagttctgcgccgccctgagaagctacgccctgtgcaccagaagaaccgccagaacctgcagaggcgacctggcctaccacagcgccgtgcacggcatcgaggacctgatgagccagcacaactgcagcaaggacggccccaccagccagcccagactgagaaccctgccccccgccggcgacagccaggagagaagcgacagccccgagatctgccactacgagaagagcttccacaagcacagcgccacccccaactacacccactgcggcctgttcggcgacccccacctgagaaccttcaccgacagattccagacctgcaaggtgcagggcgcctggcccctgatcgacaacaactacctgaacgtgcaggtgaccaacacccccgtgctgcccggcagcgccgccaccgccaccagcaagctgaccatcatcttcaagaacttccaggagtgcgtggaccagaaggtgtaccaggccgagatggacgagctgcccgccgccttcgtggacggcagcaagaacggcggcgacaagcacggcgccaacagcctgaagatcaccgagaaggtgagcggccagcacgtggagatccaggccaagtacatcggcaccaccatcgtggtgagacaggtgggcagatacctgaccttcgccgtgagaatgcccgaggaggtggtgaacgccgtggaggactgggacagccagggcctgtacctgtgcctgagaggctgccccctgaaccagcagatcgacttccaggccttccacaccaacgccgagggcaccggcgccagaagactggccgccgccagccccgcccccaccgcccccgagaccttcccctacgagaccgccgtggccaagtgcaaggagaagctgcccgtggaggacctgtactaccaggcctgcgtgttcgacctgctgaccaccggcgacgtgaacttcaccctggccgcctactacgccctggaggacgtgaagatgctgcacagcaacaaggacaagctgcacctgtacgacagaaccagagacctgcccggcagagccgccgccggcctgcccctggcccccagacccctgctgggcgccctggtgcccctgctggccctgctgcccgtgttctgctag

SEQ ID NO: 64784 - DNA, 1026 bp, Artificial Sequence
  derived and/or modified sequence
atgagccagcacaactgcagcaaggacggccccaccagccagcccagactgagaaccctgccccccgccggcgacagccaggagagaagcgacagccccgagatctgccactacgagaagagcttccacaagcacagcgccacccccaactacacccactgcggcctgttcggcgacccccacctgagaaccttcaccgacagattccagacctgcaaggtgcagggcgcctggcccctgatcgacaacaactacctgaacgtgcaggtgaccaacacccccgtgctgcccggcagcgccgccaccgccaccagcaagctgaccatcatcttcaagaacttccaggagtgcgtggaccagaaggtgtaccaggccgagatggacgagctgcccgccgccttcgtggacggcagcaagaacggcggcgacaagcacggcgccaacagcctgaagatcaccgagaaggtgagcggccagcacgtggagatccaggccaagtacatcggcaccaccatcgtggtgagacaggtgggcagatacctgaccttcgccgtgagaatgcccgaggaggtggtgaacgccgtggaggactgggacagccagggcctgtacctgtgcctgagaggctgccccctgaaccagcagatcgacttccaggccttccacaccaacgccgagggcaccggcgccagaagactggccgccgccagccccgcccccaccgcccccgagaccttcccctacgagaccgccgtggccaagtgcaaggagaagctgcccgtggaggacctgtactaccaggcctgcgtgttcgacctgctgaccaccggcgacgtgaacttcaccctggccgcctactacgccctggaggacgtgaagatgctgcacagcaacaaggacaagctgcacctgtacgacagaaccagagacctgcccggcagagccgccgccggcctgcccctggcccccagacccctgctgggcgccctggtgcccctgctggccctgctgcccgtgttctgctag

SEQ ID NO: 64785 - protein, 702 aa, Artificial Sequence
  derived and/or modified sequence
MSRFPAVAGRAPRRQEEGERSRDLQEERLSAVCIADREEKGCTSQEGGTTPTFPIQKQRKKIIQAETAIKYMTDGCLLKHILGDPNLTKFSVIILDEAHERTLTTDILFGLLKKLFQEKSPNRKEHLKVVVMSATMELAKLSAFFGNCPIFDIPGRLYPVREKFCNLIGPRDRENTAYIQAIVKVTMDIHLNEMAGDILVFLTGQFEIEKSCELLFQMAESVDYDYDVQDTTLDGLLILPCYGSMTTDQQRRIFLPPPPGIRKCVISTNISATSLTIDGIRYVVDGGFVKQLNHNPRLGLDILEVVPISKSEALQRSGRAGRTSSGKCFRIYSKDFWNQCMPDHVIPEIKRTSLTSVVLTLKCLAIHDVIRFPYLDPPNERLILEALKQLYQCDAIDRSGHVTRLGLSMVEFPLPPHLTCAVIKAASLDCEDLLLPIAAMLSVENVFIRPVDPEYQKEAEQRHRELAAKAGGFNDFATLAVIFEQCKSSGAPASWCQKHWIHWRCLFSAFRVEAQLRELIRKLKQQSDFPKETFEGPKHEVLRRCLCAGYFKNVARRSVGRTFCTMDGRGSPVHIHPSSALHEQETKLEWIIFHEVLVTTKVYARIVCPIRYEWVRDLLPKLHEFNAHDLSSVARREVREDARRRWTNKENVKQLKDGISKDVLKKMQRRNDDKSISDARARFLERKQQRTQDHSDTRKETG

SEQ ID NO: 64786 - DNA, 2109 bp, Artificial Sequence
  derived and/or modified sequence
atgagtcgcttccctgctgtggccggacgagcgccgcggagacaggaagagggggaaagatcccgcgatctgcaagaggagcgcttgagcgccgtgtgcatcgctgaccgggaagagaaaggctgcacgtcccaagaggggggaaccaccccaacgttcccaatccaaaaacagcgtaaaaaaattatccaggctgaaacagccattaagtacatgaccgacggttgtctgctcaagcacattcttggcgacccaaacttgaccaaattcagcgtcatcattctggatgaggcacatgaacggaccttgaccaccgacattctttttggactactaaaaaagctgttccaggagaaaagccctaacagaaaggagcatctaaaggtggtcgtgatgagcgccaccatggagctcgccaaattaagcgccttcttcggcaactgccccattttcgacattcctggaagactttatcccgttcgggagaaattctgtaatctgatcggacctcgcgatcgggaaaacaccgcctatattcaggctatagttaaggtgacaatggatatacatctgaacgaaatggccggagacatactggtgttccttactggacagttcgaaatcgaaaagtcatgcgaactgctgttccagatggccgaatccgtcgactatgattatgatgttcaggacacaaccctcgacggtttactcatcctgccttgttacggaagcatgactacagatcagcagagacgtatctttcttccccctccccccggtataaggaaatgcgtgatttcaactaatatatcagcaacatccttaaccatcgacggcattcgatacgtggtcgatgggggtttcgttaagcaactaaatcacaatccgaggctgggcctcgacatcctggaggtcgtcccaattagtaaaagtgaagccttacagcggtcaggacgcgctggccggacaagcagcggcaaatgttttcgcatttactcgaaggatttctggaaccagtgcatgccagatcatgtcattccggagatcaaacgcacctccttgacctcagtggtgctgacactgaaatgcttagctatccatgacgttatcagatttccatacctcgacccaccgaacgagcgtcttatcctggaagcattgaagcagctgtaccagtgtgacgctattgacaggagcgggcacgtcacaaggctgggcctcagtatggtggaattcccacttccaccccatctgacctgcgccgtcatcaaggctgcgagtctcgactgtgaagacttgcttctgcctatcgcggcgatgctctcggtagagaacgtattcatcaggccagtcgatcctgaataccagaaggaggctgagcagcggcatagggagttggctgcaaaggctgggggttttaatgactttgccacactggccgtaattttcgaacagtgtaaaagttccggagcgcctgccagctggtgccagaagcactggatacattggagatgtctgttcagcgcatttcgtgtggaggcccagctgcgggaactgattcgcaagctaaaacaacaaagtgactttcctaaagaaacctttgaggggccaaagcacgaagttctgcgccggtgcctctgcgctggatattttaagaacgtggcaagaagatccgtgggtcgaaccttctgcactatggatggaagagggtctcccgtgcacatccatccttccagcgcattgcacgagcaagagaccaaactagagtggatcatatttcatgaggtgctggtcacaaccaaggtttatgcacgaattgtctgcccaatcagatatgagtgggtgagagatctcctgcccaagctgcatgaattcaacgcccatgatctgtcttctgttgccaggcgcgaagtcagagaggacgccagacggcgctggacaaataaggagaatgtaaaacaactgaaagacggcatctctaaagacgtgcttaaaaagatgcaacgaaggaacgacgacaaatcaatttcagacgcaagggcccggttcctggaacggaaacaacagaggacgcaggaccactccgacacaagaaaggaaaccggctag

SEQ ID NO: 64787 - DNA, 2109 bp, Artificial Sequence
  derived and/or modified sequence
atgagccgcttccctgctgtggccggccgggccccccggcggcaggaggagggggagaggagccgggacctgcaggaggagcggctgtctgctgtgtgcatcgctgaccgggaggagaagggctgcaccagccaggagggcggcaccacccccaccttccccatccagaagcagaggaagaagatcatccaggccgagacagccatcaagtacatgacagatggctgcctgctgaagcacatcctgggggaccccaacctgaccaagttcagcgtcatcatcctggatgaggcccacgagaggaccctgaccacagacatcctgtttggcctgctgaagaagctgttccaggagaagagccccaacaggaaggagcacctgaaggtggtggtgatgtctgccaccatggagctggccaagctgagcgccttctttggaaactgccccatctttgacatccctggccgcctgtaccctgtgcgggagaagttctgcaacctgattggcccccgggaccgggagaacacagcctacatccaggccatcgtgaaggtgaccatggacatccacctgaatgagatggccggggacatcctggtgttcctgaccggccagtttgaaattgagaagagctgtgagctgctcttccagatggccgagagcgtggactatgactatgatgtgcaggacaccaccctggatggcctgctgatcctgccctgctacggctccatgaccacagaccagcagaggcgcatcttcctgcccccacctcctggcatcagaaaatgtgtgatcagcaccaacatcagcgccaccagcctgaccattgatggcatccgctacgtggtggatggcggctttgtgaagcagctgaaccacaacccccggctgggcctggacatcctggaggtggtgcccatcagcaagtctgaggccctgcagaggagcggccgggccggccgcaccagcagcggcaagtgcttccgcatctacagcaaggacttctggaaccagtgcatgccagaccacgtgattcctgagatcaagaggaccagcctgacctctgtggtgctgaccctgaagtgcctggccatccatgatgtgatccgcttcccctacctggaccccccaaatgaaagactcatcctggaggccctgaagcagctgtaccagtgtgatgccatcgacagaagtggccacgtgacccggctgggcctgtccatggtggagttccccctgcccccccacctgacctgtgctgtgatcaaggccgccagcctggactgtgaggacctgctgctgcccatcgccgccatgctgtctgtggagaatgtgttcatccggcctgtggaccctgagtaccagaaggaggccgagcagaggcaccgggagctggccgccaaggccggcggcttcaatgactttgccaccctggccgtcatctttgagcagtgcaagagcagcggggccccagcctcctggtgccagaagcactggatccactggcgctgcctcttcagcgccttccgggtggaggcccagctgcgggagctgatcaggaagctgaagcagcagagcgacttccccaaggagacctttgagggccccaagcatgaggtgctgcggcgctgcctgtgtgccggctacttcaagaatgtggcccggcgctctgtgggccgcaccttctgcaccatggatggccggggcagccctgtgcacatccaccccagcagcgccctgcacgagcaggagaccaagctggagtggatcatcttccacgaggtgctggtgaccaccaaggtgtatgcccgcatcgtgtgccccatccgctatgagtgggtgcgggacctgctgcccaagctgcacgagttcaatgcccatgacctgagctctgtggcccggcgggaggtgcgggaggatgcccggcggcgctggaccaacaaggaaaatgtgaagcagctgaaggatggcatcagcaaggatgtgctgaagaagatgcagaggagaaatgatgacaagagcatcagtgatgcccgggcccgcttcctggagaggaagcagcagaggacccaggaccacagcgacaccaggaaggagactggatag

SEQ ID NO: 64788 - DNA, 2109 bp, Artificial Sequence
  derived and/or modified sequence
atgagccggttccccgccgtggccggccgggccccccggcggcaggaagagggcgaaaggtcacgcgatctccaggaggagcgactttcagctgtctgcattgccgacagagaggaaaagggctgtacctcacaagaaggaggtaccacccctaccttccccatccagaaacagcgaaagaagatcatacaggctgagaccgcgatcaaatacatgacggatggctgtctccttaagcacattctcggcgacccgaacttaactaagttcagtgttattatcctcgatgaggcccatgaacgcacacttaccaccgacattctgtttggtcttttgaagaaactcttccaagaaaaatctccaaataggaaagagcacctgaaggtggttgtcatgtcagctactatggagctggcaaagctgtcagctttctttgggaattgtcccattttcgatatccctggaaggctttatccagtccgtgagaagttctgtaacctgataggcccacgggaccgcgagaacaccgcttacatccaggccattgtcaaagtcacaatggatattcacctaaacgaaatggctggagatatccttgttttcctcaccggccagtttgagattgaaaagtcttgtgaactgctcttccagatggcggagtctgtggactatgattacgacgtacaggatactactttagatggactactcatccttccatgttacgggtcaatgacgacggaccagcagagaaggatatttctgccaccgcccccaggaattcgcaaatgtgttatctccacgaatatctcagcaacaagcttaacgatcgacgggatccgctatgtggtggatggagggtttgtgaaacagttgaaccacaatcccagactggggctggatattttggaggtcgtgcctatctcgaaaagcgaggccctccagagaagcggtcgcgccggcaggacttcatctgggaaatgttttagaatatatagcaaagatttttggaaccagtgtatgccagatcacgtgattccggagataaagaggacctctctgaccagtgtggtgctgacgttgaaatgtctggccatccacgacgtaattagattcccatatctcgatcccccgaatgaaaggctgatcctggaggccctaaagcaactctatcaatgtgacgccatcgaccgtagcggccatgtgactcggctagggcttagcatggtggagtttccccttccaccccacttgacctgcgccgtcataaaggctgccagcttggattgtgaggatctgctgctgcctatcgctgccatgctctctgtggaaaacgtgtttattcgaccagtggacccggagtaccagaaggaggcagagcagcgacatcgcgaattagccgctaaggctgggggattcaatgattttgcgaccctggcagtgatcttcgaacaatgtaaatcatccggagcaccagcctcctggtgccagaaacattggattcattggcgctgcttgttttccgcatttagggtggaagcgcagttgagggagctgatcaggaaactgaaacagcaaagtgactttcccaaggaaactttcgagggaccaaagcatgaagtcctgaggcggtgtctttgcgctggatactttaagaacgttgcgcgccgttcagtgggcaggactttttgcacaatggacggccgcgggagcccggttcatatccacccttcatccgctctacacgagcaggagaccaagctagaatggattatttttcacgaagtgctggtcacaaccaaggtttacgctaggatcgtatgcccaataagatatgaatgggtgcgcgatctgctgcccaaactgcacgagttcaacgcgcacgacctgtcttctgtggccagacgcgaggtcagggaagatgcccgtcggagatggacaaataaggagaatgtgaaacagctgaaggacggcatcagcaaggacgtccttaagaagatgcagagacggaacgatgataagtctatcagtgatgctcgagcaaggttcctggaacggaaacagcagcgtactcaggaccattctgacactcggaaagagaccggctag

SEQ ID NO: 64789 - DNA, 2109 bp, Artificial Sequence
  derived and/or modified sequence
atgtctagatttccggctgtggcaggccgagcccctcgtcgacaggaagagggtgaaagatccagagatctgcaagaggagagactgagtgccgtgtgcatcgcagacagggaggagaaaggttgcacctcccaggaaggtggcactaccccaacattccccatccagaaacaacggaagaagattattcaggccgagactgctatcaagtacatgaccgatggctgcttactaaagcatatcctaggggatccgaacctgacaaaattcagcgtgatcattttggacgaagctcatgagaggactcttactactgacattttgttcgggctgctgaaaaagctctttcaagagaagtcaccgaatcgtaaggaacacttaaaggttgtggtgatgtccgcaactatggaactcgccaagctctccgctttctttggcaactgtcctatttttgacatccccggaaggctgtaccccgtgcgtgaaaagttctgcaaccttattgggcctcgggatagggaaaataccgcctacatccaggccatcgttaaagtcacaatggatatccacctaaacgagatggcaggggatatcctcgtcttccttacaggacagttcgagatcgagaaaagctgtgagttactatttcagatggccgaatctgtagactatgattatgacgtgcaggacaccacgctggatggactcttaattcttccctgctatggcagtatgacaaccgaccagcagcggagaattttcctgcccccacctccgggtatccggaagtgcgttatcagcaccaatatctccgctacaagcttgactatcgatggaattcgttacgtcgtggacggcggttttgtcaagcagctgaaccataacccacgcctaggtctggacatcctggaagtcgtgcctatttccaagagcgaagccctgcagcgatctggaagggcaggcagaacttcaagcgggaagtgcttccgaatctactccaaggacttttggaaccaatgcatgcccgatcacgttatcccagagattaagcgcacttccttgacttccgtggtgctaacgttgaaatgtctcgccatccacgacgtgatccgctttccataccttgaccccccaaatgagaggttaattctggaggctctgaagcagctgtatcagtgtgacgctattgatcgtagtggtcacgtcactcggctgggcctgtccatggtagagttcccattgccaccgcacctcacctgtgcagttattaaagccgcatcacttgactgcgaagacctgctgctgcctatagcggctatgctcagcgtcgagaatgtttttattcggccagtagacccggaataccaaaaggaggccgagcagcggcaccgagaactagccgcaaaggccggaggattcaatgatttcgcgaccctggcggtaattttcgaacaatgtaagtcttctggggcaccagcatcatggtgtcagaaacattggatccattggcgctgcctcttctcagcgtttagggtggaagctcagctccgcgagctcatcagaaaactcaagcaacagagcgacttccccaaagaaacttttgaggggcctaagcacgaggtactgcgccgatgcttatgcgcaggatacttcaaaaacgtggccagacggtcagtgggcagaacattttgcaccatggatggtaggggcagtcccgtccacattcacccctcatcagccctgcatgaacaggaaacgaagttggaatggatcatcttccatgaggtcctcgtcactaccaaggtgtatgctcgcattgtttgccccattagatatgaatgggtgagagatctcctgcctaaactgcatgagtttaacgcccacgacttgtcttctgtggcacgcagggaagtgcgagaagatgccaggaggcgatggacaaataaagaaaacgttaaacagttgaaagatggtatttcaaaagatgtacttaaaaagatgcagaggagaaacgatgataagtcaatttcagacgccagagcgaggttcctggagcggaaacagcagcggactcaggaccacagtgataccaggaaagaaaccggatag

SEQ ID NO: 64790 - DNA, 2109 bp, Artificial Sequence
  derived and/or modified sequence
atgagcagattccccgccgtggccggcagagcccccagaagacaggaggagggcgagagaagcagagacctgcaggaggagagactgagcgccgtgtgcatcgccgacagagaggagaagggctgcaccagccaggagggcggcaccacccccaccttccccatccagaagcagagaaagaagatcatccaggccgagaccgccatcaagtacatgaccgacggctgcctgctgaagcacatcctgggcgaccccaacctgaccaagttcagcgtgatcatcctggacgaggcccacgagagaaccctgaccaccgacatcctgttcggcctgctgaagaagctgttccaggagaagagccccaacagaaaggagcacctgaaggtggtggtgatgagcgccaccatggagctggccaagctgagcgccttcttcggcaactgccccatcttcgacatccccggcagactgtaccccgtgagagagaagttctgcaacctgatcggccccagagacagagagaacaccgcctacatccaggccatcgtgaaggtgaccatggacatccacctgaacgagatggccggcgacatcctggtgttcctgaccggccagttcgagatcgagaagagctgcgagctgctgttccagatggccgagagcgtggactacgactacgacgtgcaggacaccaccctggacggcctgctgatcctgccctgctacggcagcatgaccaccgaccagcagagaagaatcttcctgccccccccccccggcatcagaaagtgcgtgatcagcaccaacatcagcgccaccagcctgaccatcgacggcatcagatacgtggtggacggcggcttcgtgaagcagctgaaccacaaccccagactgggcctggacatcctggaggtggtgcccatcagcaagagcgaggccctgcagagaagcggcagagccggcagaaccagcagcggcaagtgcttcagaatctacagcaaggacttctggaaccagtgcatgcccgaccacgtgatccccgagatcaagagaaccagcctgaccagcgtggtgctgaccctgaagtgcctggccatccacgacgtgatcagattcccctacctggacccccccaacgagagactgatcctggaggccctgaagcagctgtaccagtgcgacgccatcgacagaagcggccacgtgaccagactgggcctgagcatggtggagttccccctgcccccccacctgacctgcgccgtgatcaaggccgccagcctggactgcgaggacctgctgctgcccatcgccgccatgctgagcgtggagaacgtgttcatcagacccgtggaccccgagtaccagaaggaggccgagcagagacacagagagctggccgccaaggccggcggcttcaacgacttcgccaccctggccgtgatcttcgagcagtgcaagagcagcggcgcccccgccagctggtgccagaagcactggatccactggagatgcctgttcagcgccttcagagtggaggcccagctgagagagctgatcagaaagctgaagcagcagagcgacttccccaaggagaccttcgagggccccaagcacgaggtgctgagaagatgcctgtgcgccggctacttcaagaacgtggccagaagaagcgtgggcagaaccttctgcaccatggacggcagaggcagccccgtgcacatccaccccagcagcgccctgcacgagcaggagaccaagctggagtggatcatcttccacgaggtgctggtgaccaccaaggtgtacgccagaatcgtgtgccccatcagatacgagtgggtgagagacctgctgcccaagctgcacgagttcaacgcccacgacctgagcagcgtggccagaagagaggtgagagaggacgccagaagaagatggaccaacaaggagaacgtgaagcagctgaaggacggcatcagcaaggacgtgctgaagaagatgcagagaagaaacgacgacaagagcatcagcgacgccagagccagattcctggagagaaagcagcagagaacccaggaccacagcgacaccagaaaggagaccggctag

SEQ ID NO: 64791 - DNA, 3435 bp, Artificial Sequence
  derived and/or modified sequence
ccacgtcatcgagcagctccccctccccttgctacaagtcgcacgcgcggaagtaaacacctctacgtcatcagggcgcgtcctcgtctttcccctcccatctcctcagatcggtggacgtgctcgcctccactcggggccaggtctatgtcccggtttcccgcagtcgcgggcagggcgccaaggcggcaggaggagggtgagcggtcaagagacctccaggaagagcggctctcggctgtttgcatcgccgatagagaagagaaaggatgcacgtcccaggagggaggaactactccaacttttcctattcagaaacaaagaaaaaagattattcaagctgagacagcaatcaaatatatgactgatggatgtttactgaaacatattctgggagacccaaatcttaccaaattcagtgtcattattttggatgaagcccatgaaagaactctaactacagatatcttatttggtttattgaagaagctatttcaggagaagtctcctaataggaaggagcatttaaaagtggtggtaatgtcagcaactatggaattagccaagctctctgcattctttggaaattgtccaatatttgatatacctggaaggctttatccagtcagagagaaattctgcaatttgattggtccacgagacagagaaaatactgcgtatattcaagcgattgtgaaagtcaccatggatatccatttgaatgaaatggctggagacatcttggtttttctgactggccagtttgaaatagaaaaaagttgtgagttactttttcagatggcagagtctgttgattatgattatgatgttcaagataccaccctcgatggcttgttaatattgccgtgttatggatcaatgacaacagatcaacagaggaggatatttttgccaccaccacctggaattagaaaatgtgtcatatccaccaatatttctgcaacgtctttgacaatagatggaatcagatatgtggtagatggtggcttcgtgaagcagttaaatcacaaccccagattagggttggacatcctggaggtggttccaatttcaaagagcgaggcattacagcgaagtggccgagctggcaggacttcttcaggaaaatgctttcggatctatagtaaagatttttggaaccagtgtatgcctgaccatgtgatccctgaaattaagagaactagtttgacatctgtagttctgaccttaaagtgccttgccatacacgatgtcataaggtttccctatttggatccacctaatgagagacttattttagaagctcttaaacaactttaccagtgtgatgctattgacaggagtggccatgtcaccagattgggtttgtctatggtggagtttcctttgcctccacatctgacatgtgcagtaataaaagctgcttccctggattgtgaagatctactacttccaatagcagcaatgttgtctgtggaaaacgtcttcattagacctgttgatccagagtaccagaaggaagcagaacagagacatcgagaattggcagctaaagctggaggatttaatgactttgcaactttagctgtcatctttgaacaatgcaaatcaagtggagctccagcttcatggtgccaaaaacactggattcattggaggtgcttattttctgcatttcgtgtggaagctcaacttcgagaactaatcaggaagcttaaacagcaaagtgatttcccaaaagagacctttgaaggccctaaacatgaagtactacgaagatgtctttgtgcgggctatttcaaaaatgtagctcgaagatctgttgggagaacgttttgcacaatggatggtcgtggaagcccagttcacattcatccttcctcagcacttcatgaacaggaaaccaaacttgaatggatcatttttcatgaggtattggttaccaccaaagtctacgcaagaattgtatgcccaatccgttatgaatgggtaagagacttgttacccaagttgcatgaatttaatgcacatgatttgagcagtgtggcccgacgtgaagtgagagaagatgcaagaaggagatggacaaataaggaaaatgtaaagcagctaaaggatggaatatcgaaagacgtcttaaagaaaatgcaaagaagaaatgatgacaaatccatatctgatgcacgggctcgtttccttgagagaaagcagcagaggacccaggaccacagtgacacacgaaaggaaacaggctaaggtggtgaaccctccaattcaggaagtgggaaaaggagccaggaaatgtgcttctactttgccagttatttcagacagcactaccaagaggaggtggtcagcacttgttattggcctatgaactaaaagcaaatcaaagctcataaatcaaagctcatcagttcccataaatgcagttgtcaaagaaaagatttggttgccatagtcataagcaatgatacatgaaaccaatgaaagacagtacatgtaataatattttcctcagtacaattttgctggccttaactggtatcaaacgctgtcattgagatgttttcaaagaacattgagttgtatttaatcagcgtgtactccatttgcattgaagcattaaaaattatttttcttaaaatctctttaaggccttcttgttgctgttagaatagtgctatatatcaggtatgtgaccatttatttcagaaggctgaacataagaggtttctactcagcaatacttagatgtctaactgtttaattgctacagagctttatagatatttagagaaaagacttaatcaattagtaaataaaattgcctatggcaggattctttcttgaattaatattaatccttaaattgatttttctgggattatacaaattcctttttatataaaagtatattgtttaaaacagtagctatagccattaaccaaaggacagatgatatatatatatatgatatatatatatatataagttcttttttagctgtacctacgtacttatatcagcaccatgtatgtaggtgtgatagtactttcaaacagcgcctccacctggcctactctgttatttccacctgtttgggtagggccatttaacttccattatgccaaacttgggatgggattttcgaagcagacaacactatttcatcgtgtttcaaattggaaccttgaggctagttagtatcacactcaggccacactcagcacttgcccactcttgtttactgccttgtattctagttatttgtgtatttgtctccctcactagattatacgctccttgtgggcagggactgtgtcttttttcatctttgtatctttcatgcacctagcatagtgctttgcacatagtagtcactcagtgtttgttaaataaagctattagtgtcattaaaattcaaaagacagt

SEQ ID NO: 64792 - protein, 115 aa, Artificial Sequence
  derived and/or modified sequence
MAPSKLAVVVALVASLLLLTTSNTKLGLFVLGQAAPGAYPPRAPPPHQIVDLAKDCGGACDVRCGAHSRKNICTRACLKCCGVCRCVPAGTAGNQQTCGKCYTDWTTHGNKTKCP

SEQ ID NO: 64793 - DNA, 741 bp, Artificial Sequence
  derived and/or modified sequence
atgagcggcgccggcgaggccctggcccccggccccgtgggcccccagagagtggccgaggccggcggcggccagctgggcagcaccgcccagggcaagtgcgacaaggacaacaccgagaaggacatcacccaggccaccaacagccacttcacccacggcgagatgcaggaccagagcatctggggcaaccccagcgacggcgagctgatcagaacccagccccagagactgccccagctgcagaccagcgcccaggtgcccagcggcgaggagatcggcaagatcaagaacggccacaccggcctgagcaacggcaacggcatccaccacggcgccaagcacggcagcgccgacaacagaaagctgagcgcccccgtgagccagaagatgcacagaaagatccagagcagcctgagcgtgaacagcgacatcagcaagaagagcaaggtgaacgccgtgttcagccagaagaccggcagcagccccgaggactgctgcgtgcactgcatcctggcctgcctgttctgcgagttcctgaccctgtgcaacatcgtgctgggccaggccagctgcggcatctgcaccagcgaggcctgctgctgctgctgcggcgacgagatgggcgacgactgcaactgcccctgcgacatggactgcggcatcatggacgcctgctgcgagagcagcgactgcctggagatctgcatggagtgctgcggcatctgcttccccagctag

SEQ ID NO: 64794 - DNA, 741 bp, Artificial Sequence
  derived and/or modified sequence
atgtctggcgctggtgaggcgcttgcacctggtcccgtgggtccacagcgagtcgccgaggctgggggaggacagctcgggtctacagctcaggggaaatgcgataaagacaacacagaaaaggatattacacaggcaactaattcacactttacacatggagaaatgcaggatcagagcatatggggaaacccctccgacggtgagttgatcaggactcaaccccaacggctgcctcagctgcagacatcagcccaagtgccatctggagaagaaatcgggaagatcaagaacggacataccgggctttcaaacggcaacgggatccaccatggcgcgaagcatggcagcgccgataaccgaaaactttccgccccagtctctcagaagatgcaccgtaaaattcaaagtagcctttccgtcaattctgacatttccaagaagtccaaggtgaacgctgtcttcagccagaaaactgggtcaagccccgaagattgctgcgtacactgcattctggcctgtctgttctgtgaattcctgaccctatgtaacatcgtgctggggcaggccagttgtgggatctgtacttccgaggcctgctgctgttgttgtggtgatgagatgggagatgactgtaactgcccatgtgatatggactgcgggattatggacgcttgctgtgagagttccgattgtctggagatctgcatggagtgttgtggtatttgttttcctagctag

SEQ ID NO: 64795 - DNA, 741 bp, Artificial Sequence
  derived and/or modified sequence
atgtctggggccggggaggccctggcccctggccctgtgggcccccagagggtggccgaggccggcggcggccagctgggcagcacagcccagggcaaatgtgacaaggacaacacagagaaggacatcacccaggccaccaacagccacttcacccatggagagatgcaggaccagagcatctggggcaaccccagtgatggagagctgatccgcacccagccccagaggctgccccagctgcagaccagcgcccaggtgcccagcggggaggagatcggcaagatcaagaatggccacacaggcctgagcaatggaaatggcatccaccacggggccaagcacggcagcgctgacaacaggaagctgagcgcccctgtgtcccagaagatgcacaggaagatccagagcagcctgtctgtgaacagcgacatcagcaagaagagcaaggtgaatgctgtgttcagccagaagacaggcagcagccctgaggactgctgcgtgcactgcatcctggcctgcctcttctgtgagttcctgaccctgtgcaacatcgtgctgggccaggccagctgtggcatctgcaccagcgaggcctgctgctgctgctgcggagatgagatgggagatgactgcaactgcccctgtgacatggactgtggcatcatggatgcctgctgtgagagcagtgactgcctggagatctgcatggagtgctgcggcatctgcttccccagctag

SEQ ID NO: 64796 - DNA, 741 bp, Artificial Sequence
  derived and/or modified sequence
atgagcggcgccggcgaggccctggcccccggccccgtgggcccccaaagggtcgccgaagctggcggaggacagctgggatccaccgcccagggcaagtgcgacaaagacaacacggaaaaagacatcacacaggctaccaatagccacttcacccacggagagatgcaagatcaaagcatttgggggaatcccagcgacggcgagttgatcaggacacagccacagcgcttaccacagctccagacatcagctcaagtgccgtctggcgaagaaatcggcaaaatcaagaatggccacaccgggctctccaacggaaatggcattcatcacggtgctaaacacggcagtgcagataataggaagctgtccgcgcctgtgagtcagaaaatgcatcgcaagatacagtctagcctttcagtcaattctgacataagcaagaagtccaaagttaacgcagtgttttctcaaaagactggtagctcgcccgaggactgttgtgtgcactgcatcctcgcctgcttattctgtgagttccttaccctgtgcaacatagtgcttggtcaagcttcgtgcggtatctgtacctcggaggcatgttgttgctgttgcggggatgaaatgggagatgattgcaattgtccgtgtgacatggattgtggcataatggacgcatgctgcgaaagttctgactgtcttgaaatctgtatggagtgctgcggaatatgctttcccagctag

SEQ ID NO: 64797 - DNA, 741 bp, Artificial Sequence
  derived and/or modified sequence
atgagcggcgcaggggaggcgctcgctcccggacccgttggcccacagcgggtggccgaagccggaggaggacagctagggagcacggcccaaggtaagtgtgacaaagacaacacagagaaagatattacccaggccactaacagccactttacacacggcgaaatgcaagaccagtctatctggggtaacccctcagacggagagctcatccggactcagccacagagactgccccagctccagaccagcgcccaagtgccaagcggcgaggagatcggcaagatcaaaaatgggcacaccgggctctcaaatgggaacggcattcaccacggcgctaagcacggtagtgccgataacagaaagctgagcgcacccgtcagccagaagatgcatagaaaaatccaatcctctctctctgtaaatagtgacatatcaaagaagtccaaagtgaacgccgtcttcagccaaaagactggctcatctcccgaagattgctgcgtccactgcatcttggcttgtctcttttgtgagtttcttacactctgcaacattgtgctcggtcaggcctcttgtggcatatgtaccagtgaggcgtgctgctgctgctgtggggatgaaatgggtgacgattgcaattgtccttgtgatatggactgtgggattatggacgcctgttgcgagagctctgactgtctagaaatttgtatggagtgctgcggaatctgcttcccatcttag

SEQ ID NO: 64798 - DNA, 110 bp, Artificial Sequence
  derived and/or modified sequence
gctggagcctcggtggccatgcttcttgccccttgggcctccccccagcccctcctccccttcctgcacccgtacccccgtggtctttgaataaagtctgagtgggcggc

SEQ ID NO: 64799 - DNA, 125 bp, Artificial Sequence
  derived and/or modified sequence
tgataataggctggagcctcggtggccatgcttcttgccccttgggcctccccccagcccctcctccccttcctgcacccgtacccccgtggtctttgaataaagtctgagtgggcggctctaga

SEQ ID NO: 64800 - DNA, 119 bp, Artificial Sequence
  derived and/or modified sequence
tgataataggctggagcctcggtggccatgcttcttgccccttgggcctccccccagcccctcctccccttcctgcacccgtacccccgtggtctttgaataaagtctgagtgggcggc

SEQ ID NO: 64801 - protein, 308 aa, Artificial Sequence
  derived and/or modified sequence
MDEQTGRLRLDTYCMSAKQIWAWSKCSGRLWDEHMKWMEGWTDRWTDGWMDGWMDEWSPTPALRSYGGGLSQQTFIFTDGEDEALARHTGNVVITNCSAAHSRQALSCKMAVEYDRFIESGRKWFCHVDDDNYVNLRALLRLLASYPHTRDVYVGKPSLDRPIQAMERVSENKVRPVHFWFATGGAGFCISRGLALKMSPWASGGHFMNTAERIRLPDDCTIGYIVEALLGVPLIRSGLFHSHLENLQQVPTSELHEQVTLSYGMFENKRNAVHVKGPFSVEADPSRFRSIHCHLYPDTPWCPRTAIF

SEQ ID NO: 64802 - DNA, 94 bp, Artificial Sequence
  derived and/or modified sequence
agataagtggatgaacagatggacagatggatggatggatggatggatggatggatgcctggaagaaagaagaatggatagtaagctgggtata

SEQ ID NO: 64803 - DNA, 75 bp, Artificial Sequence
  derived and/or modified sequence
agggagaccgaaagaacaataacagacgatggatggatggatgggtggatggatggttggatggacggctggtag

SEQ ID NO: 64804 - DNA, 75 bp, Artificial Sequence
  derived and/or modified sequence
cgagagacagaacggaccattaccgatgatggatggatggatggttggatggacggctggatggatggctggtag

SEQ ID NO: 64805 - DNA, 927 bp, Artificial Sequence
  derived and/or modified sequence
atggacgaacagaccggaagactgcggctcgatacttactgcatgtctgcaaaacagatttgggcttggtcaaaatgtagtggccgcttgtgggatgagcacatgaaatggatggaggggtggaccgaccgttggactgatgggtggatggacggctggatggatgagtggtctcccacccctgcgttgaggtcttacggcggggggctttcacagcagacttttatttttaccgatggagaagatgaggcactggcaagacatacaggcaatgtggtcattaccaactgtagtgcggcccacagccgacaggcactgagttgtaagatggccgtcgagtatgatcggttcatcgaatccggacgtaaatggttttgccatgttgacgacgacaactacgtgaatttgagagccctcttgcggctgctcgcaagttatccccacacacgagacgtttacgttggcaaaccctctctggaccgaccgatacaagctatggagagagtatcagaaaacaaagtgcgtcccgtgcacttttggtttgccactggcggcgccgggttttgtatctctaggggcctggcattgaagatgtctccctgggcaagtggaggtcattttatgaatacagccgagagaatccggctgccggacgactgcactatcgggtatattgtggaggcactactgggggtgcccctcattcgatccggtctgtttcattcacatctggaaaacctccagcaggtgcccacttccgaattgcacgagcaggttactctttcatacggaatgttcgagaataagcgcaacgcagttcatgtgaaaggaccattcagcgtcgaagccgatccaagtaggttccgctctatacattgccatctgtaccctgataccccgtggtgcccacggaccgccattttttag

SEQ ID NO: 64806 - DNA, 927 bp, Artificial Sequence
  derived and/or modified sequence
atggatgagcagacaggccgcctgcggctggacacctactgcatgtctgccaagcagatctgggcctggagcaaatgttctggccgcctgtgggatgagcacatgaagtggatggagggctggacagaccgctggacagatggctggatggatggctggatggatgagtggagccccaccccagccctgcggagctatggaggcggcctgagccagcagaccttcatcttcacagatggagaagatgaggccctggcccggcacactggaaatgtggtgatcaccaactgcagcgctgcccacagccggcaggccctgagctgcaagatggctgtggagtatgaccgcttcatcgagagcggcaggaagtggttctgccacgtggatgatgacaactacgtgaacctgcgggccctgctgcggctgctggccagctacccccacaccagagatgtgtatgtgggcaagcccagcctggaccggcccatccaggccatggagcgggtgtctgagaacaaggtgcggcctgtgcacttctggtttgccactggaggagctggcttctgcatcagccggggcctggccctgaagatgagcccctgggccagcggcggccacttcatgaacacagctgagcgcatccggctgcctgatgactgcaccatcggctacatcgtggaggccctgctgggcgtgcccctcatccgcagcggcctcttccacagccacctggagaacctgcagcaggtgcccaccagcgagctgcacgagcaggtgaccctgtcctatggcatgtttgagaacaagagaaatgctgtgcacgtgaagggccccttctctgtggaggccgaccccagccgcttccgcagcatccactgccacctgtacccagacaccccctggtgccccaggacagccatcttctag

SEQ ID NO: 64807 - DNA, 2268 bp, Artificial Sequence
  derived and/or modified sequence
agactaagctgcaacactggcagagcctcccaaggaagggaggagggaggacagaggccaaggcggctcctggccaccctcgcagcttcctccctccctggccacaaggacccaaagctcagagggatggatgaacagacaggaaggctcaggctggacacgtattgtatgagtgccaagcagatctgggcatggagcaaatgctcaggaaggctgtgggatgagcacatgaaatggatggaaggatggacggacagatggacagatggatggatggatggatggatggatgagtggagcccaacaccagctctcaggtcctacggaggtggcctctctcagcagacgttcatcttcactgacggggaagatgaggccctggccaggcacacgggcaacgtggtcatcacaaactgctcggccgcccacagccgccaggcgctgtcctgcaagatggccgtggagtatgaccgcttcatcgagtccggcaggaagtggttctgccacgtggacgatgacaactacgtcaacctgcgggccctgctgcggctgctggccagctacccgcacacgcgggacgtctacgtcggcaagcccagcctggacaggcccatccaggccatggagcgggtcagcgagaacaaggtgcgtcctgtccacttctggtttgccacgggcggcgctggcttctgcatcagccgtgggctggctctgaagatgagcccgtgggccagcgggggtcacttcatgaatacggctgagcggatccggctgcctgatgactgcaccatcggctacatcgtggaggccctgctgggtgtgcccctcatccgcagcggcctcttccactcccacctggagaacctgcagcaggtgcccacctcggagctccacgagcaggtgacgctgagctacggtatgtttgaaaacaagcggaacgccgtccacgtgaaggggcccttctcggtggaggccgacccatccaggttccgctccatccactgccacctgtacccggacacaccctggtgtccccgcactgccatcttctagtggccatggctgagacccaatccctgggcgcccctggtatccaaagggcccagggaccctgttgcgctgccctggcctcggcattcgaggctcccctagggccgtgcctgtgcgtgtgcgtgtgcgtgtgtgtgtgtgtgtactgcatgcccacccgggtagcaggctgctgggcagttctgctctgtggaggggcgggcaccagcgccacttatgtgcctctgctccgagggccagtgggctgcagggcctgcttggaggaaggatttgtgtgtcggaggccactccgagggcaattctgttaggatttttggatctttctacagctacggggctccgggctactttgcagggatgcgatgcgtaggtgcctttctcttcctgctgaccacaagctctgtgctgggggtacctgtgccctgaagtcctggcccctgtgtcatagccccaagtacgactcactgagccatgctcattgcaggggaggctgggtctgggggtgcgtgacccaatccccttcctcctggcctggacgctgtggcttaagagtaacagcagccaccgcccagttccagtggccccacgaagcccccagtggctggctgtccagctgggcaaacagtggcacccctcccagctcttctgagtggggagtcttccaggcctcctcagaggtcttccctttgcctccccaggacagggtgagtcagagctcagcatttaatctcctctccaaagtagagagcaagtcgcccacagtgggcgtgtctgtaaatattgtgacagtatttttttactgtgctgttttttttgaaaggggatgggtaaaaagtagggtgttcttgttttttgcttgggagggtgggggtgggggagggtcttattttatcttatcttttctgtggatcagaaaaaacagaagccaaactcggggtcatctttgtttttaaagctgaagtgggactgtctggcactctgtgtatttatgcgttccagcatctggaacctcccatccctgccctcctcctgtgtagctgccacctccccgctgggcccagcatggctcacctgtcccgtgggctgtgtttcttgttgtttttctctttgcaaagacatagctaggaaagcgaatgataagggaaaagttctcagggaattgaagtgttgttgctatggtgacgtccttttgctgtgaataaaggtgctctttgcagc

SEQ ID NO: 64808 - DNA, 927 bp, Artificial Sequence
  derived and/or modified sequence
atggacgagcagaccggccggctgcggctggacacctactgcatgagcgccaagcagatatgggcgtggagcaaatgtagcggccggctctgggatgagcatatgaagtggatggaaggatggaccgatcgatggacagacggttggatggatggctggatggatgaatggtccccaactcccgctttacggtcgtacggagggggcctgagccagcagactttcattttcactgacggagaagacgaagctttggcccggcacacggggaatgtggtcattacaaactgcagcgcagcccacagccgccaagctttatcgtgtaagatggcggtggagtatgatcgttttatcgagtcaggccgcaagtggttctgccacgtcgatgacgacaattacgtgaacttgcgcgctctgctgcgcctcctagcaagttatcctcacaccagggatgtctacgttggaaagccaagcttagaccggcccattcaggctatggaaagggtcagcgagaacaaagtgagacccgtgcatttttggttcgccactggaggggcaggcttctgcatatcccggggccttgcattgaagatgtccccttgggctagtggaggtcatttcatgaatacagctgaaaggatcagactgccagacgattgcactattgggtacatcgtagaggccctccttggcgtccctctaatccggtcagggctgttccattcacatctggagaacctgcagcaggtgccaacctcagagctgcacgagcaggtcaccctgagctacggcatgttcgagaacaaacgcaacgccgttcacgtcaaggggccatttagtgttgaagcggacccctcaaggttcaggtctatacactgccacctttatccggatacaccatggtgcccccgtaccgccatcttctag

SEQ ID NO: 64809 - DNA, 927 bp, Artificial Sequence
  derived and/or modified sequence
atggatgagcagacgggaagactacgcctggatacatattgcatgagcgcaaaacagatttgggcatggtccaagtgctctggacgtttgtgggatgaacacatgaagtggatggaagggtggacagaccgatggactgatggatggatggacgggtggatggacgaatggtctcctaccccggctctgcggagttacggcggagggctgtcccaacagacatttatttttactgacggagaagatgaagccttggccaggcacaccggaaatgtagtgattacgaattgctctgctgcacactcccgacaggccttatcctgtaaaatggcggtggagtatgatagattcattgaaagtggccgtaagtggttttgtcacgtagacgacgataactacgtcaacctcagagctctactgcggctgttagcttcctaccctcacacccgagacgtatatgtggggaaaccttcgctggacaggcctatccaggccatggaaagagtgtctgaaaataaagtccggcctgtccacttttggttcgccaccggcggagccggattctgtatttcccggggtctggctctgaaaatgtctccgtgggctagcggcggacactttatgaacactgcagagcggattaggctgcctgacgactgtacaatcggctatatcgtggaggcactgctcggggtgcctctcattcgcagcgggttgtttcactcccacttagaaaacctgcagcaagtccctacaagcgaacttcatgaacaggtgacgttgagctatggcatgtttgaaaacaagagaaatgcagttcatgtgaaggggcctttcagcgtggaagccgacccctccaggtttcggtccatccactgccatctgtatccagataccccttggtgtcctcggacagccattttctag

SEQ ID NO: 64810 - DNA, 927 bp, Artificial Sequence
  derived and/or modified sequence
atggacgagcagaccggcagactgagactggacacctactgcatgagcgccaagcagatctgggcctggagcaagtgcagcggcagactgtgggacgagcacatgaagtggatggagggctggaccgacagatggaccgacggctggatggacggctggatggacgagtggagccccacccccgccctgagaagctacggcggcggcctgagccagcagaccttcatcttcaccgacggcgaggacgaggccctggccagacacaccggcaacgtggtgatcaccaactgcagcgccgcccacagcagacaggccctgagctgcaagatggccgtggagtacgacagattcatcgagagcggcagaaagtggttctgccacgtggacgacgacaactacgtgaacctgagagccctgctgagactgctggccagctacccccacaccagagacgtgtacgtgggcaagcccagcctggacagacccatccaggccatggagagagtgagcgagaacaaggtgagacccgtgcacttctggttcgccaccggcggcgccggcttctgcatcagcagaggcctggccctgaagatgagcccctgggccagcggcggccacttcatgaacaccgccgagagaatcagactgcccgacgactgcaccatcggctacatcgtggaggccctgctgggcgtgcccctgatcagaagcggcctgttccacagccacctggagaacctgcagcaggtgcccaccagcgagctgcacgagcaggtgaccctgagctacggcatgttcgagaacaagagaaacgccgtgcacgtgaagggccccttcagcgtggaggccgaccccagcagattcagaagcatccactgccacctgtaccccgacaccccctggtgccccagaaccgccatcttctag

SEQ ID NO: 64811 - protein, 494 aa, Artificial Sequence
  derived and/or modified sequence
MLYFSLFWAARPLQRCGQLVRMAIRAQHSNAAQTQTGEANRGWTGQESLSDSDPEMWELLQREKDRQCRGLELIASENFCSRAALEALGSCLNNKYSEGYPGKRYYGGAEVVDEIELLCQRRALEAFDLDPAQWGVNVQPYSGSPANLAVYTALLQPHDRIMGLDLPDGGHLTHGYMSDVKRISATSIFFESMPYKLNLALTARLFRPRLIIAGTSAYARLIDYARMREVCDEVKAHLLADMAHISGLVAAKVIPSPFKHADIVTTTTHKTLRGARSGLIFYRKGVKAVDPKTGREIPYTFEDRINFAVFPSLQGGPHNHAIAAVAVALKQACTPMFREYSLQVLKNARAMADALLERGYSLVSGGTDNHLVLVDLRPKGLDGARAERVLELVSITANKNTCPGDRSAITPGGLRLGAPALTSRQFREDDFRRVVDFIDEGVNIGLEVKSKTAKLQDFKSFLLKDSETSQRLANLRQRVEQFARAFPMPGFDEH

SEQ ID NO: 64812 - DNA, 1485 bp, Artificial Sequence
  derived and/or modified sequence
atgctgtacttttccctgttttgggccgctcgaccgctccaacgctgcggtcagcttgtgcggatggcaatccgggcccaacattctaatgccgcacagacacagaccggagaagcaaatcgtgggtggaccggtcaggagtcactctcagacagtgaccccgaaatgtgggaattgcttcagagagagaaagaccgacagtgtagaggcctggagcttattgcttcggagaatttttgctcccgcgctgccctggaggctcttgggtcttgtcttaacaacaaatattcagaggggtacccaggtaagcggtactacggtggggctgaggtagtggacgagattgagctgctgtgtcagagacgagccctggaagcattcgacctggatccagcccaatggggagtgaacgtacagccttactctgggtcccccgccaacctggctgtgtatacagcccttctccaacctcatgaccggatcatgggattagacttgccagatggcggtcacctgacccatggttacatgtctgacgtcaaaagaatatctgcaacttccatcttcttcgaaagtatgccatacaaacttaacttagcactcactgcaagattgttccggccgagactcattatagcagggactagtgcatacgctcgactgatcgattacgcccgaatgagagaggtgtgcgatgaagttaaagcacatctactggccgacatggcacacatcagcggactggttgctgccaaagtgatacccagccccttcaaacacgcggacattgtgactactacaacacacaaaacgcttcggggggcgcgctctggacttattttctatcgaaagggagtgaaggctgtggacccaaaaacaggaagagagatcccgtacacatttgaagatcggatcaactttgcagtctttcccagcctccagggcggaccccacaaccacgctatcgcagctgttgcagtggccctgaagcaggcttgcacccccatgtttcgtgagtactctttacaggtgcttaagaacgcccgggcaatggccgatgcactacttgagagagggtactctctggtgtccgggggcacagataaccatctagtgctagtggatctccgcccaaaggggcttgatggtgcccgggccgaacgggtgttagagttagtgtcaatcacagcaaacaagaacacatgtccaggagaccggagcgctatcacaccaggcggattgcggctgggggcacccgccctgacatcgcggcagttcagggaggatgactttcggcgggtcgtcgatttcattgatgagggggtgaacattggcctggaggtcaagtccaagaccgcgaagctccaggatttcaaaagtttcctgctaaaggattccgagacctcccagagactggctaatctgagacagagagtggagcagtttgccagggccttccctatgcctggttttgacgagcattag

SEQ ID NO: 64813 - DNA, 1485 bp, Artificial Sequence
  derived and/or modified sequence
atgctgtacttcagcctcttctgggccgcccggcccctgcagagatgtggccagctggtgaggatggccatccgggcccagcacagcaatgctgcccagacccagacaggagaggccaacagaggctggacaggccaggagagcctgagtgacagcgaccctgagatgtgggagctgctgcagcgggagaaggaccggcagtgccggggcctggagctgattgccagcgagaacttctgcagcagagctgccctggaggccctgggcagctgcctgaacaacaagtacagcgagggctacccaggcaagcgctactacggcggcgctgaggtggtggatgaaattgagctgctgtgccagaggcgggccctggaggcctttgacctggaccctgcccagtggggcgtgaatgtgcagccctacagcggcagccctgccaacctggccgtgtacacagccctgctgcagccccatgaccgcatcatgggcctggacctgcctgatggcggccacctgacccacggctacatgtctgatgtgaagaggatcagcgccaccagcatcttctttgagagcatgccctacaagctgaacctggccctgacagcccggctcttccggcccaggctcatcatcgccggcaccagcgcctatgcccggctgattgattatgccaggatgagggaggtgtgtgatgaggtgaaggcccacctgctggccgacatggcccacatcagcggcctggtggccgccaaggtgatccccagccccttcaagcatgctgacatcgtgaccaccaccacccacaagaccctgcggggggcccggagcggcctcatcttctacaggaagggcgtgaaggctgtggaccccaagacaggccgggagatcccctacacctttgaggaccgcatcaactttgctgtgttccccagcctgcagggcggcccccacaaccacgccatcgctgctgtggccgtggccctgaagcaggcctgcacccccatgttccgggagtacagcctgcaggtgctgaagaatgcccgggccatggctgatgccctgctggagcggggctacagcctggtgtctgggggcacagacaaccacctggtgctggtggacctgcggcccaagggcctggatggagcccgggcagagcgggtgctggagctggtgtccatcacagccaacaagaacacctgccctggggacagaagtgccatcaccccaggcggcctgcggctgggcgccccagccctgaccagccggcagttccgggaggatgacttccggcgggtggtggacttcattgatgaaggagtgaacatcggcctggaggtgaagagcaagacagccaagctgcaggacttcaagagcttcctgctgaaggacagcgagaccagccagaggctggccaacctgcggcagagggtggagcagtttgcccgggccttccccatgcctggctttgatgagcactag

SEQ ID NO: 64814 - DNA, 1485 bp, Artificial Sequence
  derived and/or modified sequence
atgctgtacttcagcctgttctgggccgcccggcccctgcagcggtgcggccagctcgtgcgcatggccatccgtgcccagcattctaacgccgcacagactcagaccggtgaggcaaaccgaggctggaccgggcaggagagcctgtccgattctgatccggaaatgtgggagcttcttcaaagggagaaagacagacagtgccgagggctggagctcattgcatcagagaacttctgctcgcgggcggccctggaagctctcggatcatgcttgaataacaagtactccgaggggtacccagggaaaagatactatggaggcgctgaggtggtcgacgagatcgagctcctgtgccagcggagagctctggaagcattcgatttagacccggcacagtggggcgttaacgtgcagccttactccggaagtcctgccaacctggccgtgtatacggccctgctgcagcctcacgacagaattatgggtctggatctccccgacggcggccatctgacacacggctatatgtctgatgtaaagcggatctctgcaaccagtatattttttgaatcaatgccctataagttgaaccttgcattgactgcccgcctgtttaggcctcggttgattattgccggaacctccgcctacgctagacttattgattatgcccgcatgcgagaggtgtgcgacgaggtaaaagcacatctgctggctgacatggcgcatattagtggcctggtggctgcaaaggtgattccgtcccctttcaagcatgcagacattgtgacgaccactacccacaaaacactgcgaggcgctcggtccggactgattttctatcgtaagggcgtcaaggccgtggaccccaagaccggacgcgagattccctatactttcgaggacaggatcaatttcgccgtgttcccctcgctgcaagggggaccccacaaccatgccattgccgcagtggccgtggctttgaaacaagcatgtaccccaatgttccgtgaatactccctgcaggtgcttaagaatgcgagagcaatggctgacgccctgctcgaacggggctattcactggtttcaggggggacagacaaccatttggttctagtggatctccggccaaaggggctggacggtgcccgtgccgagcgggttctcgaattagtgtctatcactgcgaataaaaatacttgtccaggggaccgctccgctatcacacctggcgggctcaggttaggagctcctgccctgacgtcaagacagttcagggaagatgacttccgcagggtggtggacttcatcgatgagggtgtcaatatcggactggaagtgaagtcaaagacagctaagttgcaggacttcaagtcttttcttctgaaagatagcgagacttcacagagattagctaatctcaggcagagagtggagcaatttgcaagagcattccctatgccagggtttgacgaacactag

SEQ ID NO: 64815 - DNA, 1485 bp, Artificial Sequence
  derived and/or modified sequence
atgctgtatttttcgctgttttgggctgccaggccactgcagcggtgtgggcagctggtgcggatggcaatacgagcgcaacatagcaacgccgcacaaacccagaccggagaggccaaccgcggttggactgggcaagaatcattgagcgatagcgaccctgaaatgtgggagctactgcaacgggaaaaggatcgtcaatgtcggggactggagctgatcgcctcagagaacttttgtagtcgcgctgcgctggaagccctggggtcctgcctgaataataagtatagtgaaggttatcccggaaagcgctattatggtggagccgaagtagtggatgagattgaactactctgccaaagacgggctctggaggccttcgacctcgaccccgcacaatggggtgtcaatgttcagccctactccggttctcctgcaaaccttgccgtgtataccgcactgctgcaacctcacgataggattatggggctggatctgccagacggtgggcacctcacccacgggtacatgagcgatgtgaaaaggattagcgccacatccattttcttcgagtctatgccgtacaagctgaatctggcccttacggcgcgactgtttagacccagacttattatagccggaacgagtgcgtacgcgaggctgatcgattacgccagaatgcgagaggtatgtgatgaggtcaaggctcacctcctggcagatatggcgcacatttctgggttggtggccgctaaggtgatcccctcaccctttaagcacgccgatatcgtgactacgactacccacaaaaccttgcgcggagccagatctggcctgattttctataggaaaggtgtgaaagccgtagatccaaagaccgggcgagagatcccctatacttttgaagatcgtataaacttcgccgttttcccctctctgcaaggagggccacacaatcacgccatcgctgcagtggccgtggcactgaagcaggcctgtacacctatgttcagagagtactccctccaggtgctgaaaaatgcccgagctatggctgatgcgctgctggaacgaggatacagtctcgtatccggcggaaccgataatcacctcgttctcgtggatcttaggcctaaagggttggatggagccagagctgagcgagtcctcgaattggtgagcattacagccaacaagaacacatgtcctggagatcgatcagcgatcacccctgggggtttgaggctcggagccccagcactaacatcacggcagtttcgggaagacgattttcggagagtggtcgatttcatcgacgagggtgttaatattggtctggaggtgaagtctaagacagccaagctccaggacttcaagagcttcctccttaaggactctgaaacaagccaacgcttagccaacttgcgccagcgcgtcgaacagtttgcacgcgcatttcctatgcctggattcgacgaacactag

SEQ ID NO: 64816 - DNA, 1918 bp, Artificial Sequence
  derived and/or modified sequence
cttcttccgacagcttgctgccctagaccagagttggtggctggacctcctgcgacttccgagttgcgatgctgtacttctctttgttttgggcggctcggcctctgcagagatgtgggcagctggtcaggatggccattcgggctcagcacagcaacgcagcccagactcagactggggaagcaaacaggggctggacaggccaggagagcctgtcggacagtgatcctgagatgtgggagttgctgcagagggagaaggacaggcagtgtcgtggcctggagctcattgcctcagagaacttctgcagccgagctgcgctggaggccctggggtcctgtctgaacaacaagtactcggagggttatcctggcaagagatactatgggggagcagaggtggtggatgaaattgagctgctgtgccagcgccgggccttggaagcctttgacctggatcctgcacagtggggagtcaatgtccagccctactccgggtccccagccaacctggccgtctacacagcccttctgcaacctcacgaccggatcatggggctggacctgcccgatgggggccatctcacccacggctacatgtctgacgtcaagcggatatcagccacgtccatcttcttcgagtctatgccctataagctcaacctggcactgactgctcgacttttccggccacggctcatcatagctggcaccagcgcctatgctcgcctcattgactacgcccgcatgagagaggtgtgtgatgaagtcaaagcacacctgctggcagacatggcccacatcagtggcctggtggctgccaaggtgattccctcgcctttcaagcacgcggacatcgtcaccaccactactcacaagactcttcgaggggccaggtcagggctcatcttctaccggaaaggggtgaaggctgtggaccccaagactggccgggagatcccttacacatttgaggaccgaatcaactttgccgtgttcccatccctgcaggggggcccccacaatcatgccattgctgcagtagctgtggccctaaagcaggcctgcacccccatgttccgggagtactccctgcaggttctgaagaatgctcgggccatggcagatgccctgctagagcgaggctactcactggtatcaggtggtactgacaaccacctggtgctggtggacctgcggcccaagggcctggatggagctcgggctgagcgggtgctagagcttgtatccatcactgccaacaagaacacctgtcctggagaccgaagtgccatcacaccgggcggcctgcggcttggggccccagccttaacttctcgacagttccgtgaggatgacttccggagagttgtggactttatagatgaaggggtcaacattggcttagaggtgaagagcaagactgccaagctccaggatttcaaatccttcctgcttaaggactcagaaacaagtcagcgtctggccaacctcaggcaacgggtggagcagtttgccagggccttccccatgcctggttttgatgagcattgaaggcacctgggaaatgaggcccacagactcaaagttactctccttccccctacctgggccagtgaaatagaaagcctttctattttttggtgcgggagggaagacctctcacttagggcaagagccaggtatagtctcccttcccagaatttgtaactgagaagatcttttctttttcctttttttggtaacaagacttagaaggagggcccaggcactttctgtttgaacccctgtcatgatcacagtgtcagagacgcgtcctctttcttggggaagttgaggagtgcccttcagagccagtagcaggcaggggtgggtaggcaccctccttcctgtttttatctaataaaatgctaacctgc

SEQ ID NO: 64817 - DNA, 1485 bp, Artificial Sequence
  derived and/or modified sequence
atgctgtacttcagcctgttctgggccgccagacccctgcagagatgcggccagctggtgagaatggccatcagagcccagcacagcaacgccgcccagacccagaccggcgaggccaacagaggctggaccggccaggagagcctgagcgacagcgaccccgagatgtgggagctgctgcagagagagaaggacagacagtgcagaggcctggagctgatcgccagcgagaacttctgcagcagagccgccctggaggccctgggcagctgcctgaacaacaagtacagcgagggctaccccggcaagagatactacggcggcgccgaggtggtggacgagatcgagctgctgtgccagagaagagccctggaggccttcgacctggaccccgcccagtggggcgtgaacgtgcagccctacagcggcagccccgccaacctggccgtgtacaccgccctgctgcagccccacgacagaatcatgggcctggacctgcccgacggcggccacctgacccacggctacatgagcgacgtgaagagaatcagcgccaccagcatcttcttcgagagcatgccctacaagctgaacctggccctgaccgccagactgttcagacccagactgatcatcgccggcaccagcgcctacgccagactgatcgactacgccagaatgagagaggtgtgcgacgaggtgaaggcccacctgctggccgacatggcccacatcagcggcctggtggccgccaaggtgatccccagccccttcaagcacgccgacatcgtgaccaccaccacccacaagaccctgagaggcgccagaagcggcctgatcttctacagaaagggcgtgaaggccgtggaccccaagaccggcagagagatcccctacaccttcgaggacagaatcaacttcgccgtgttccccagcctgcagggcggcccccacaaccacgccatcgccgccgtggccgtggccctgaagcaggcctgcacccccatgttcagagagtacagcctgcaggtgctgaagaacgccagagccatggccgacgccctgctggagagaggctacagcctggtgagcggcggcaccgacaaccacctggtgctggtggacctgagacccaagggcctggacggcgccagagccgagagagtgctggagctggtgagcatcaccgccaacaagaacacctgccccggcgacagaagcgccatcacccccggcggcctgagactgggcgcccccgccctgaccagcagacagttcagagaggacgacttcagaagagtggtggacttcatcgacgagggcgtgaacatcggcctggaggtgaagagcaagaccgccaagctgcaggacttcaagagcttcctgctgaaggacagcgagaccagccagagactggccaacctgagacagagagtggagcagttcgccagagccttccccatgcccggcttcgacgagcactag

SEQ ID NO: 64818 - protein, 483 aa, Artificial Sequence
  derived and/or modified sequence
MAIRAQHSNAAQTQTGEANRGWTGQESLSDSDPEMWELLQREKDRQCRGLELIASENFCSRAALEALGSCLNNKYSEGYPGKRYYGGAEVVDEIELLCQRRALEAFDLDPAQWGVNVQPYSGSPANLAVYTALLQPHDRIMGLDLPDGGHLTHGYMSDVKRISATSIFFESMPYKLNPKTGLIDYNQLALTARLFRPRLIIAGTSAYARLIDYARMREVCDEVKAHLLADMAHISGLVAAKVIPSPFKHADIVTTTTHKTLRGARSGLIFYRKGVKAVDPKTGREIPYTFEDRINFAVFPSLQGGPHNHAIAAVAVALKQACTPMFREYSLQVLKNARAMADALLERGYSLVSGGTDNHLVLVDLRPKGLDGARAERVLELVSITANKNTCPGDRSAITPGGLRLGAPALTSRQFREDDFRRVVDFIDEGVNIGLEVKSKTAKLQDFKSFLLKDSETSQRLANLRQRVEQFARAFPMPGFDEH

SEQ ID NO: 64819 - DNA, 1452 bp, Artificial Sequence
  derived and/or modified sequence
atggccatccgcgctcagcattccaacgccgcccagacacagaccggtgaggcaaatcgtggatggaccggccaggaaagcctctctgacagtgaccctgagatgtgggagttattgcagcgggagaaggacaggcagtgccgaggcctcgaattgattgcatctgagaatttctgcagcagagctgctctggaggccctcggctcttgcctcaacaacaaatatagcgagggctaccccggcaagcgatattatggcggggccgaggtcgtcgatgagatcgaactcctgtgtcagagaagagcgctggaagcattcgatctggacccagcgcaatggggcgtaaatgtgcagccttacagtggttccccagccaacttggccgtctacacagcattgcttcaacctcacgaccggatcatgggcttggatctgcccgatggcggacatctgacccatggctatatgagcgacgtaaagcgtatctccgcaacctctatattctttgagagtatgccctacaaacttaatcctaagactgggcttatagactataatcagctcgctctgacagccaggctgtttcgccctcgcctcattatcgcaggtacttcggcctacgccaggttgattgattacgcacggatgagagaggtgtgcgatgaggtgaaagcgcatctgctcgcagatatggcacatattagtggactggtggcagcaaaggtgattcctagccccttcaaacacgcagacatcgtcaccactacaacccataagactcttaggggggctcgctcgggactaatattttatcgcaagggcgtgaaagccgtcgatccgaaaacagggagagaaatcccatacacgtttgaggacagaattaattttgccgtatttccgtccctacaaggcggcccacacaaccacgctatcgcagccgtggcggtagccttaaagcaggcgtgtacgccaatgttccgagaatactctttgcaggtgctgaaaaacgctagagcgatggcagacgctttgttagagcgcggctactcccttgtcagtggggggacagataatcatcttgttctagttgatttacggccaaaggggctggacggtgccagagccgagcgcgtgctcgaacttgtgtccattaccgctaataaaaatacgtgcccaggtgacagatcagcaattacgcctgggggcttacgcctcggagcccctgcgctgaccagtagacagttcagggaagacgactttagacgagtggttgactttattgacgaaggggtgaatatcggactggaggtgaaatcaaaaacagctaaactgcaggactttaagtccttcctccttaaagatagcgagacatctcaacgcctggcaaacttgaggcagcgggtagagcaatttgcacgtgcgttccccatgccggggttcgacgagcactag

SEQ ID NO: 64820 - DNA, 1452 bp, Artificial Sequence
  derived and/or modified sequence
atggcaattcgggcccagcattccaatgccgcccaaactcagacaggggaagcgaatcggggatggactggccaggagtctttaagtgattctgaccccgagatgtgggagctgctgcagagagagaaggacagacaatgcaggggcctcgaactgattgcctccgagaacttctgctctcgggctgctctggaagcgttgggttcttgtttaaataacaagtatagcgagggatacccaggcaagaggtattatggcggtgccgaagtggtcgatgaaatcgaacttttatgtcagcgcagagctttagaggccttcgatttggaccccgctcagtggggcgttaacgtccagccttactccggaagtcctgccaacctcgcggtttacaccgcgctactgcagccgcacgacagaatcatggggctagaccttccagacgggggacacctaacccacggttacatgtcagacgtaaaaaggatttcagcaacttccatcttctttgagagcatgccctacaaactcaacccaaagaccggacttatcgattacaaccagttagctctcaccgcacgactgtttcgcccacgcctcataatcgcgggcacttccgcttacgcaaggctgatcgattacgctagaatgcgtgaggtgtgtgatgaagttaaggcacaccttctggctgacatggcccacatttccgggcttgtggcagccaaggtcatcccatccccattcaagcatgcagatatagttacaaccaccacccataagaccctcaggggcgctcggagcggcctgattttttataggaagggcgtgaaagcggttgatcctaagactggcagggagattccatatacctttgaggatcggattaactttgcggtgtttccctccttacagggaggtccacataaccatgccatcgccgctgtcgcagtcgcacttaagcaagcctgtactcctatgtttagagagtactcgctgcaagtgctgaagaatgccagggctatggccgacgcactgcttgaaaggggatattctttggtctcaggcgggaccgataatcatctggtgttagtcgacctccggccaaagggattagatggcgcaagagcagagagggtgctagaactggtgtccatcaccgctaacaagaatacatgccctggggatcgctccgccataacaccagggggtctgcgtcttggcgcccctgcactgacatctcgacaatttcgggaagatgattttcgccgggtcgtggatttcatagatgagggcgtcaacatcggattggaggtgaagagtaaaacagctaagctgcaggattttaaatcatttcttttgaaggatagcgagacttctcagagactggccaacctgagacagagggtggagcagtttgcccgtgcctttccgatgcccggatttgacgagcactag

SEQ ID NO: 64821 - DNA, 1452 bp, Artificial Sequence
  derived and/or modified sequence
atggctatcagagcccaacactccaacgcggcccagacacaaacaggggaagccaacagaggatggacagggcaggagtccctctccgatagcgacccagagatgtgggaactactgcaaagggagaaagaccgacagtgccgcgggctcgagttgattgcaagtgagaatttttgctctcgggccgctctagaggcactgggttcatgccttaacaataagtacagtgaaggctatcctggtaagcgatactatgggggtgctgaagtcgtggacgagatagagctgctttgtcaaaggagggctctcgaagccttcgacctcgaccccgcgcaatggggggtgaatgttcagccttactccggtagtcccgcgaaccttgcagtttataccgccctgcttcagcctcacgatcggatcatgggtttagacctgcccgacggaggacatttgacacatggatacatgtctgacgttaaacggatttcggccacgtctatattctttgaatcaatgccctataagctcaatcccaagaccggtctaatcgattacaaccagctggccctgaccgctcgactgtttaggcctcgtctcatcattgccggaactagcgcctacgcaaggctaatcgactatgctcggatgagggaagtgtgtgacgaggtaaaggctcatctgttggctgatatggcgcatatcagtggtttggtcgctgccaaggtcatcccctcccccttcaagcacgctgatatcgtgactaccacaactcacaaaactctcaggggtgcgcggtcgggcctgatattctaccggaagggcgtcaaggccgtagatcctaagaccggacgggagatcccgtacaccttcgaggacagaatcaacttcgccgtgtttccatctttgcaaggtgggccacacaaccacgcaatcgcagccgtggccgttgcacttaaacaggcctgcaccccgatgtttcgggaatattctttacaggtcctgaagaatgctagggctatggccgacgctctgctggagaggggatactccctggtgtccgggggaacagacaaccacctggtgctagtggatttaaggcccaaggggctggatggcgcccgggccgagcgtgtgctggaattagtgtctataacagccaataagaacacatgcccaggagacaggtccgccataactcccggtggtcttcgcctcggcgcgcctgccctgacaagtaggcagttccgagaagacgactttaggcgagtggttgattttatcgacgagggagtcaacattgggctggaggtgaaaagcaaaactgccaagctgcaagactttaagagcttcttactgaaagatagtgaaacttctcaacgactagccaatctgcggcagcgcgtcgaacagttcgcaagggctttccccatgcctggttttgatgaacactag

SEQ ID NO: 64822 - DNA, 1452 bp, Artificial Sequence
  derived and/or modified sequence
atggccatccgggcccagcacagcaatgctgcccagacccagacaggagaggccaacagaggctggacaggccaggagagcctgagtgacagcgaccctgagatgtgggagctgctgcagcgggagaaggaccggcagtgccggggcctggagctgattgccagcgagaacttctgcagccgggccgccctggaggccctgggcagctgcctgaacaacaagtacagcgagggctacccaggcaagcgctactatggaggagctgaggtggtggatgaaattgagctgctgtgccagaggcgggccctggaggcctttgacctggaccctgcccagtggggcgtgaatgtgcagccctacagcggcagccctgccaacctggccgtgtacacagccctgctgcagccccatgaccgcatcatgggcctggacctgcctgatggcggccacctgacccacggctacatgtctgatgtgaagaggatcagcgccaccagcatcttctttgagagcatgccctacaagctgaaccccaagacaggcctgattgactacaaccagctggccctgacagcccggctcttccggcccaggctcatcatcgccggcaccagcgcctatgcccggctgattgattatgccaggatgagggaggtgtgtgatgaggtgaaggcccacctgctggccgacatggcccacatcagcggcctggtggccgccaaggtgatccccagccccttcaagcacgccgacatcgtgaccaccaccacccacaagaccctgcggggggcccggagcggcctcatcttctacagaaaaggagtgaaggctgtggaccccaagacaggccgggagatcccctacacctttgaagatcgcatcaactttgctgtgttccccagcctgcagggcggcccccacaaccacgccatcgctgctgtggccgtggccctgaagcaggcctgcacccccatgttccgggagtacagcctgcaggtgctgaagaatgcccgggccatggctgatgccctgctggagcggggctacagcctggtgtctgggggcacagacaaccacctggtgctggtggacctgcggcccaagggcctggatggagcccgggcagagcgggtgctggagctggtgtccatcacagccaacaagaacacctgccctggggacagaagtgccatcacccctgggggcctgcggctgggcgccccagccctgaccagccggcagttcagagaagatgacttcagaagagtggtggacttcattgatgagggcgtgaacatcggcctggaggtgaagagcaagacagccaagctgcaggacttcaagagcttcctgctgaaggacagcgagaccagccagaggctggccaacctgcggcagagggtggagcagtttgcccgggccttccccatgcctggctttgatgagcactag

SEQ ID NO: 64823 - DNA, 1452 bp, Artificial Sequence
  derived and/or modified sequence
atggccatccgggcccagcacagcaacgccgcccagacccagaccggagaggccaatcgcggttggacgggacaagaatccctgtctgactccgatccagaaatgtgggaattacttcaaagggaaaaggaccggcagtgccggggattggagctcattgcatctgagaatttttgctcaagggctgctctagaggctttaggttcttgcttaaacaataaatattctgagggctatcccggtaagcgctattatggcggggcagaagtcgtcgacgagattgagctcctgtgtcaacgtagagccttagaggctttcgatctggacccagctcaatggggagtcaatgttcaaccctattctgggtcacccgccaatctggctgtgtacaccgccttgttacagccacatgatcggatcatgggactcgatctgccggatggcggacacctgacgcatggctatatgtccgatgtgaaacgcatatccgctacgagcattttttttgagagtatgccatacaagctcaatccaaagactgggctcatagactataatcagctggcgctgactgcacgactttttaggccccggctgattattgctgggacttccgcatacgcacggctgattgattacgcacgcatgcgcgaggtctgcgatgaggtcaaggcgcatctgcttgctgacatggctcacatctcgggcctggtggctgctaaagtgatcccctcccccttcaagcatgccgacatagtgaccacaaccactcataaaacgcttaggggggcacgtagcggactgatcttctatagaaagggcgtgaaagccgtggacccaaaaactggcagagagattccatacacattcgaggatagaataaactttgcggtgtttccttctcttcagggggggcctcataatcacgccatcgccgccgttgctgttgcgctcaaacaagcctgcacaccaatgtttagagagtactcactgcaggtactcaagaacgccagagccatggcagatgccctgttggaaaggggatactcactggtgagtggaggtacagacaatcacctggtgttggttgacctcaggcccaaaggactcgatggcgcgagggctgaacgagtactagaattggtctccatcaccgccaataagaatacttgccccggtgaccgctcagccattacgccaggcggtctccggctcggcgcgccagcactgaccagtcgtcagtttagggaggatgacttcaggcgcgtcgtcgatttcattgacgagggggtgaatatagggttagaggttaagagcaaaactgctaagcttcaggatttcaaaagtttcctgctcaaggatagcgagacgtcacagcgtctcgccaaccttcggcagagagtcgaacaattcgcgcgcgcgtttcccatgcctggtttcgacgaacattag

SEQ ID NO: 64824 - DNA, 1452 bp, Artificial Sequence
  derived and/or modified sequence
atggccatccgggcccagcacagcaacgccgcccagacccagaccggggaggccaatcgtgggtggaccggacaggagagcctcagcgattctgatcccgagatgtgggaactgttgcagagagaaaaggatcggcagtgtagagggttggagctgattgccagcgaaaacttttgttcgcgggccgccctggaagcgctgggatcatgtctcaacaataagtacagcgagggctacccaggcaaaagatattacggcggtgcggaggtagtggatgagatcgagctcctgtgtcaacgccgagctctcgaagcatttgatctggatccagcgcaatggggagtgaacgtgcaaccatacagtggatctccagctaatcttgcggtgtacacagctcttctccagccacatgatcgcataatggggcttgatctgcccgacgggggacacctgacacatgggtatatgagcgacgtaaagcgaatcagcgcgacaagcatctttttcgagtcaatgccatataagcttaaccccaaaacgggactgatcgactataatcagctggctctaacagcgaggctcttccgaccccgacttattatagcgggtacatcagcctacgcacgtctgatcgactacgcgcggatgagggaggtgtgcgacgaagtcaaggcgcacctgctggcagacatggcacatatatccgggctagtggctgctaaagtgatccccagtccctttaaacacgctgatatcgtgaccactacaacgcacaagaccctgcgcggagccagatcagggcttatattctacagaaagggggtgaaagcagttgatcctaaaaccggacgcgaaataccttatacattcgaggatagaatcaactttgctgtatttcccagtctgcaaggaggcccccataaccatgctattgccgcagtggcagttgctctcaagcaggcctgcactcctatgttcagagagtacagtttgcaggtcctgaagaacgcgagagctatggcggacgccctgctggagcgcggctacagcctggtttctgggggcacggacaatcatctcgtcctggtggacctgagaccgaagggcctggatggggcccgggcagaacgagtcctggaacttgtctccataacagccaacaaaaacacctgcccgggtgatagaagtgccattactcccggcggcctccgactgggtgcgcctgccctgactagcaggcagtttcgagaggatgattttagaagagtcgttgacttcattgatgagggtgtcaatatagggctggaggtcaaaagtaaaaccgctaaactccaggattttaaaagcttccttctgaaagactccgaaacgtcacaaagattagctaacctccgccagcgggtggaacagtttgcacgggctttcccgatgcctggctttgatgagcactag

SEQ ID NO: 64825 - DNA, 1452 bp, Artificial Sequence
  derived and/or modified sequence
atggccatccgggcccagcacagcaacgccgcccagacccagaccggcgaggccaatcggggatggactgggcaggagtctttaagcgatagcgatcccgagatgtgggaattactgcaaagagaaaaagatcgtcagtgccgcggccttgagctgatcgcctctgagaatttttgtagccgggccgctctggaggccctgggtagttgcctgaacaataaatatagcgaggggtaccccgggaaacggtactacggcggggcggaggtagtcgacgagatcgaactactgtgtcagcgccgcgccctggaagcttttgatttggatcccgctcaatggggcgtgaacgtgcagccttacagcgggtcccctgcaaacttggccgtctacacggctctgctccagcctcacgacagaatcatggggctcgatctcccagatgggggccacctcacacacggttatatgagcgatgtgaaaaggattagtgctacctccatcttcttcgagtcaatgccatacaaactcaacccaaagacaggacttattgattataaccagctggccctgaccgcacgcctatttagacctagactaattatagccggtacatctgcatacgccaggttgattgactatgccaggatgcgagaagtctgcgacgaagtaaaagcacacctgctcgctgacatggctcacatatctggtcttgtagcggcgaaggtgatcccaagccccttcaagcacgccgacatcgtgaccacgacaacccacaaaacgctgcggggcgcccgaagtggattgatattctaccggaagggcgttaaagcagttgatcccaagaccggtcgggagataccctacacttttgaagaccggattaatttcgccgtgttccccagcctgcaggggggaccccacaatcacgccattgctgcggtcgctgtagcgcttaagcaagcctgtactcctatgtttagagaatacagcttgcaggtcctgaagaacgcgagagccatggctgatgctttgctggaacgaggttacagcctcgtctcaggcggaactgataatcatctagtgttggttgatttgcgcccaaaaggcctggacggtgccagagccgaacgggtactcgaacttgtctctatcacggccaataaaaacacgtgtcctggcgaccgcagcgctattactccaggcggacttcgactgggcgctcccgcccttacgtctcgccagtttcgcgaagacgacttccgcagggtggtggatttcatagacgagggggtcaacattggcctcgaggtgaagtccaagactgcaaagcttcaggattttaaatccttcctcctcaaggacagtgaaacgagccagcggctggcaaacctgaggcagcgggtggagcagtttgcaagagcttttcccatgcccggctttgatgagcactag

SEQ ID NO: 64826 - DNA, 1452 bp, Artificial Sequence
  derived and/or modified sequence
atggctatccgggcacagcactcaaacgcagcacagacccagaccggcgaggctaatcgcggatggacaggtcaggagtccttgtcagattctgatccagaaatgtgggaactgctgcaacgggaaaaggacagacaatgtcggggactagaactcattgcttctgagaatttctgcagcagagcagccctcgaggccctgggctcttgtctcaataataagtactcggagggttatcccggaaaaaggtattacggtggagctgaggtagtggacgaaatcgaactgctgtgtcagcgcagggctctggaagcattcgacttggaccccgcacaatggggcgttaacgtgcagccttacagcggatcgcccgcaaaccttgcggtatacactgcgttacttcaaccgcatgatagaatcatgggtctagacctgcccgacggaggccacctgacacatgggtacatgtccgatgtaaagaggataagcgcaacctccattttttttgagtcaatgccctataagctgaatcccaagacaggtttgatagattataatcagctcgctttaaccgcccgtctgtttaggcctcggctgataatcgctggcacatcggcctatgcgaggctgatcgactatgcgaggatgagagaggtttgcgatgaggtcaaagctcacttgctggcagacatggcccacatctcgggactcgtggccgctaaggtgatcccctccccattcaaacacgcagacatcgtgactaccaccacccacaagacgttgcgaggcgcaagatccggtttaatcttttatcgcaagggagttaaagcggtggaccccaaaaccggccgtgaaataccatataccttcgaggaccggatcaatttcgcagtgttcccttcactgcaaggcggtccacacaatcatgcaattgccgcagtggctgtggcgctgaagcaggcctgtacccctatgttcagagagtactctctccaagtcttaaagaacgccagagccatggcagatgcattactggagaggggctactcgctggtgtccgggggtaccgacaaccatctggtcctcgtggatctgcgaccgaagggtctggatggagcgagagccgaaagagtgctcgagctggtgagcattacagccaacaagaatacatgcccaggggaccgctctgcaatcactcccggaggactacggctgggtgcaccagctctgacctcacggcagtttagggaagacgatttcagaagagtggtcgacttcattgacgagggtgtcaacattggactggaggttaaaagtaagaccgccaagctgcaggatttcaagagcttcttgctgaaggattctgaaacatcccagcgcctggcgaaccttaggcagagagtcgaacagtttgccagagctttccccatgcctggctttgatgagcactag

SEQ ID NO: 64827 - DNA, 1452 bp, Artificial Sequence
  derived and/or modified sequence
atggccattcgcgctcaacatagcaacgccgctcaaacacagacaggcgaagctaaccgaggctggaccggccaggagtcactgtccgactcggatccagagatgtgggaacttctgcagagagaaaaggaccgccaatgcagagggttagagcttatcgccagcgaaaatttttgcagtagggccgctttggaggcactgggcagctgcctcaacaacaaatatagcgagggatatccagggaaaaggtactatggcggagctgaggtggttgacgagattgagcttctatgtcaacgcagggcccttgaagcattcgacctcgacccagcgcagtggggcgtgaacgtacagccatattccggtagcccagcaaatctggcggtttatactgccctgctccagccacatgaccgtattatggggttagatttgccagatgggggacaccttacccacgggtatatgtcagatgtcaagaggatatccgcaaccagtatattctttgaaagcatgccttataagctcaacccaaagaccggactcatcgactacaaccagcttgcgctgacagccagactttttcgcccaaggctaattattgctggaaccagtgcttatgcaagattgatcgattacgcccgtatgcgggaagtctgcgacgaggtcaaagcccatctcctggccgatatggcacatatctctggactggtggctgcaaaagtcattcctagccccttcaagcacgcggatatcgttacaacgaccacccacaagacactgaggggagccaggagcggccttatcttctacagaaaaggtgtgaaggcggtcgacccgaaaaccggacgcgagattccttacaccttcgaagaccgtatcaattttgcagtgttccctagtcttcagggtggaccacacaatcacgccattgctgctgtagcagtcgccctgaaacaggcttgtacacccatgtttcgggaatactccctgcaggtgctgaagaatgcccgagccatggctgacgcgctgctggagagaggctattccctggtttccgggggaactgataaccaccttgttctggtcgacctgcggccaaagggtttggacggtgctagggccgaaagagtcctagaactggtttcaattaccgctaataagaacacttgccccggtgatagatctgccatcaccccagggggtctgcggcttggcgctcccgcactgacctctagacagttcagagaggatgactttcgtagagtggttgattttatcgacgagggagtgaatattgggctggaagtcaaatccaaaacggccaaactacaagacttcaagagctttctgctcaaagattccgagacttctcaacggctggctaacctgagacagagagtggagcagttcgccagggcgttcccaatgccaggattcgacgagcattag

SEQ ID NO: 64828 - DNA, 1452 bp, Artificial Sequence
  derived and/or modified sequence
atggctatccgagcccagcactcaaatgccgctcagactcagactggcgaagcgaacagaggctggaccggacaagaatctctctccgattccgacccggaaatgtgggagcttctacaacgggaaaaggacagacaatgcagaggcctcgagcttattgccagcgagaatttctgctcccgtgctgcccttgaagcccttgggtcttgtttgaacaataaatactctgaggggtatcccggaaaaagatattatggtggtgcagaggtcgtggacgaaatcgagctgctttgccagagaagggcccttgaagcttttgatctggatcctgcacagtggggtgtgaacgtgcagccctatagcggatcgccggcaaacctggcggtgtacacagcccttctgcagccccacgacaggattatggggctggatctccccgacgggggacacctgacacatggctatatgtctgacgtcaagagaatcagcgccacctctatcttctttgagtctatgccatacaagctcaaccccaaaacgggccttatagattacaaccagctggccctgaccgcaagactcttccgcccacgcctaatcatcgccggaacaagcgcatatgccagactgatcgactacgctcggatgcgcgaagtgtgcgatgaagttaaggcccaccttctggccgatatggcccatatctctggacttgtcgccgcaaaggtcattccctctccgtttaagcacgctgacatcgtgacgacgacaactcacaaaacgttacgcggtgcgagaagcggcctaatcttttatcgcaagggcgttaaagccgtggaccctaaaactgggagggaaattccatataccttcgaggaccggattaattttgctgtgtttcccagtctgcaaggtgggcctcacaaccacgccatcgctgccgtcgctgtggccttgaaacaggcctgcaccccaatgtttagagagtactcactgcaagtgctcaagaatgccagagccatggctgatgctctccttgaacggggttactccctggtgtccggtggaaccgacaatcatctggtcctcgtagatttgcgccctaagggcctggatggggcacgcgcagagcgcgtgcttgaattggtgagtatcacagctaacaaaaatacttgtccaggtgatcgcagtgctatcacacccggtggactgaggttaggtgcgcctgctcttactagcagacagtttcgggaagatgacttccgtcgagtggttgactttatagatgagggggttaacatagggctggaagtgaagtccaagacggccaaactgcaggacttcaagtctttcttactgaaagatagcgagaccagtcagcgcctggccaaccttcggcagcgtgtagagcagttcgccagggcctttcctatgccgggttttgacgaacactag

SEQ ID NO: 64829 - DNA, 1452 bp, Artificial Sequence
  derived and/or modified sequence
atggccatcagagcccagcacagcaacgccgcccagacccagaccggcgaggccaacagaggctggaccggccaggagagcctgagcgacagcgaccccgagatgtgggagctgctgcagagagagaaggacagacagtgcagaggcctggagctgatcgccagcgagaacttctgcagcagagccgccctggaggccctgggcagctgcctgaacaacaagtacagcgagggctaccccggcaagagatactacggcggcgccgaggtggtggacgagatcgagctgctgtgccagagaagagccctggaggccttcgacctggaccccgcccagtggggcgtgaacgtgcagccctacagcggcagccccgccaacctggccgtgtacaccgccctgctgcagccccacgacagaatcatgggcctggacctgcccgacggcggccacctgacccacggctacatgagcgacgtgaagagaatcagcgccaccagcatcttcttcgagagcatgccctacaagctgaaccccaagaccggcctgatcgactacaaccagctggccctgaccgccagactgttcagacccagactgatcatcgccggcaccagcgcctacgccagactgatcgactacgccagaatgagagaggtgtgcgacgaggtgaaggcccacctgctggccgacatggcccacatcagcggcctggtggccgccaaggtgatccccagccccttcaagcacgccgacatcgtgaccaccaccacccacaagaccctgagaggcgccagaagcggcctgatcttctacagaaagggcgtgaaggccgtggaccccaagaccggcagagagatcccctacaccttcgaggacagaatcaacttcgccgtgttccccagcctgcagggcggcccccacaaccacgccatcgccgccgtggccgtggccctgaagcaggcctgcacccccatgttcagagagtacagcctgcaggtgctgaagaacgccagagccatggccgacgccctgctggagagaggctacagcctggtgagcggcggcaccgacaaccacctggtgctggtggacctgagacccaagggcctggacggcgccagagccgagagagtgctggagctggtgagcatcaccgccaacaagaacacctgccccggcgacagaagcgccatcacccccggcggcctgagactgggcgcccccgccctgaccagcagacagttcagagaggacgacttcagaagagtggtggacttcatcgacgagggcgtgaacatcggcctggaggtgaagagcaagaccgccaagctgcaggacttcaagagcttcctgctgaaggacagcgagaccagccagagactggccaacctgagacagagagtggagcagttcgccagagccttccccatgcccggcttcgacgagcactag

SEQ ID NO: 64830 - protein, 289 aa, Artificial Sequence
  derived and/or modified sequence
MLGWCEAIARNPHRIPNNTRTPEISGDLADASQTSTLNEKSPGRSASRSSNISKASSPTTGTAPRSQSRLSVCPSTQDICRICHCEGDEESPLITPCRCTGTLRFVHQSCLHQWIKSSDTRCCELCKYDFIMETKLKPLRKWEKLQMTTSERRKIFCSVTFHVIAITCVVWSLYVLIDRTAEEIKQGNDNGVLEWPFWTKLVVVAIGFTGGLVFMYVQCKVYVQLWRRLKAYNRVIFVQNCPDTAKKLEKNFSCNVNTDIKDAVVVPVPQTGANSLPSAEGGPPEVVSV

SEQ ID NO: 64831 - protein, 141 aa, Artificial Sequence
  derived and/or modified sequence
MLGWCEAIARNPHRIPNNTRTPEISGDLADASQTSTLNEKSPGRSASRSSNISKASSPTTGTAPRSQSRLSVCPSTQDICRICHCEGDEESPLITPCRCTGTLRFVHQSCLHQWIKSSDTRCCELCKYDFIMETKLKPLRK

SEQ ID NO: 64832 - DNA, 870 bp, Artificial Sequence
  derived and/or modified sequence
atgttggggtggtgcgaagcgatagcacggaacccgcaccgtattcctaacaacactcggacccctgagatctcaggggacctcgctgatgcttcccagaccagcacactgaatgaaaagtctcctggacgatctgcctcacgcagttcaaatatcagtaaggcgtctagtccgaccacaggaactgccccgcggtcacagtccaggctctcggtgtgcccttctacacaggacatctgccggatctgtcactgtgaaggtgacgaggagtctcctctcatcaccccctgtaggtgtacagggactcttcgattcgttcaccagtcatgtctgcatcagtggattaaaagctccgatactagatgctgcgaactgtgcaagtatgactttattatggaaacgaagttaaagccacttagaaagtgggaaaaattacagatgaccactagcgaaaggaggaagattttttgcagcgtgactttccacgtgatcgctataacctgtgttgtgtggagcctttatgtcctgatcgacagaacggctgaggagattaaacagggtaatgataatggagtgcttgaatggcccttctggaccaaattggtcgtggtggccatcggtttcactggagggttagtgttcatgtacgtgcaatgcaaagtctacgttcagctgtggcgtcgactcaaggcctataacagggttattttcgtgcagaattgtccagatactgccaagaaacttgagaagaatttctcttgtaacgtgaatacagatattaaggacgccgtggtggtgcctgtaccccagactggagccaactcactacctagcgccgaaggaggtcctcctgaggtggtcagcgtgtag

SEQ ID NO: 64833 - DNA, 870 bp, Artificial Sequence
  derived and/or modified sequence
atgctgggctggtgtgaggcaattgctagaaacccccaccgtatcccgaacaatacaaggactcccgaaattagcggcgacctggctgacgcctcgcagaccagtacactgaacgagaagagtcccggtcgctctgcatcccgatcctctaatatatctaaggcaagcagcccaaccactggaacagcccctcgctcacagagtaggctttctgtgtgtccttctacacaggatatctgtcgaatatgccattgtgagggcgacgaagagtcccccttaataacaccctgtaggtgtacaggcacactgagatttgttcatcagtcatgcctccatcagtggattaaaagctcagatactcgatgttgtgaactctgcaagtatgattttataatggaaaccaagttaaagcccctgaggaaatgggaaaaactgcagatgacaacctccgagagaagaaagattttctgtagcgtcacctttcacgtgattgctattacatgtgttgtttggtcactttacgttcttattgatcgcaccgctgaagagattaagcaaggcaatgataatggcgtcctggaatggccattctggacaaaactggtggttgttgctattggctttacgggcgggttggtgtttatgtacgtccagtgtaaagtgtatgtccaactttggagacgccttaaggcttataaccgggttatctttgtgcagaattgtcctgacacagctaaaaaactggagaaaaatttttcctgtaatgttaatacagatattaaggacgccgtggtggtgccggtgccccagacaggtgcaaactcactaccttccgctgagggggggccacctgaagtggtaagcgtttag

SEQ ID NO: 64834 - DNA, 426 bp, Artificial Sequence
  derived and/or modified sequence
atgttaggctggtgcgaagccatcgcccgtaatccacatcgaatccctaataatacaagaactcctgagatctccggagacttggccgatgcaagccagacatccaccttgaatgagaaatctccagggcgcagcgcgtccaggtcttccaatatttccaaggcttccagtccgactactggcacagctcccagaagccaatcacgactgtctgtctgcccatccacccaggacatttgcaggatttgccactgcgaaggtgacgaagaaagccctttgattactccctgtcgctgcaccgggacactgagatttgtacaccaatcatgcctgcaccagtggatcaaatcaagcgatacccgctgctgtgagctttgtaaatatgatttcatcatggaaacaaaactgaaaccgcttagaaagtag

SEQ ID NO: 64835 - DNA, 870 bp, Artificial Sequence
  derived and/or modified sequence
atgctgggctggtgtgaggccatcgccaggaacccccaccgcatccccaacaacaccaggaccccagagatcagcggggacctggctgatgccagccagaccagcaccctgaatgagaagagccctggccgcagcgccagccgcagcagcaacatcagcaaggccagcagccccaccaccggcacagcccccaggagccagagccggctgtctgtgtgccccagcacccaggacatctgccgcatctgccactgtgaaggagatgaggagagccccctcatcaccccctgccgctgcaccggcaccctgcgctttgtgcaccagagctgcctgcaccagtggatcaagagcagtgacacccgctgctgtgagctgtgcaagtatgacttcatcatggagaccaagctgaagcccctgaggaagtgggagaagctgcagatgaccaccagcgagaggaggaagatcttctgcagcgtgaccttccacgtgattgccatcacctgtgtggtgtggagcctgtatgtgctgattgacagaacagctgaggagatcaagcagggcaatgacaacggggtgctggagtggcccttctggaccaagctggtggtggtggccatcggcttcaccggcggcctggtgttcatgtatgtgcagtgcaaggtgtatgtgcagctgtggaggcggctgaaggcctacaacagagtcatctttgtgcagaactgcccagacacagccaagaagctggagaagaacttcagctgcaatgtgaacacagacatcaaggatgctgtggtggtgcctgtgccccagacaggagccaacagcctgcccagcgctgagggcggccccccagaggtggtgtctgtgtag

SEQ ID NO: 64836 - DNA, 426 bp, Artificial Sequence
  derived and/or modified sequence
atgctgggctggtgtgaggccatcgccaggaacccccaccgcatccccaacaacaccaggaccccagagatcagcggggacctggctgatgccagccagaccagcaccctgaatgagaagagccctggccgcagcgccagccgcagcagcaacatcagcaaggccagcagccccaccaccggcacagcccccaggagccagagccggctgtctgtgtgccccagcacccaggacatctgccgcatctgccactgtgaaggagatgaggagagccccctcatcaccccctgccgctgcaccggcaccctgcgctttgtgcaccagagctgcctgcaccagtggatcaagagcagtgacacccgctgctgtgagctgtgcaagtatgacttcatcatggagaccaagctgaagcccctgaggaagtag

SEQ ID NO: 64837 - DNA, 5367 bp, Artificial Sequence
  derived and/or modified sequence
tattttcagaatttcagaaattgaaaagggataagaggaaggagaaaatgctgggctggtgtgaagcgatagcccgtaaccctcacagaattccaaacaacacgcgaacacccgagatctcaggggatttggctgacgcctcacaaacctccacattgaatgaaaaatccccagggcgatctgcaagtcgatcaagtaacatttcaaaagcaagcagcccaacaacagggacagctcccaggagccagtcaaggttgtctgtctgtccatccactcaggacatctgcagaatctgtcactgcgaaggggatgaagagagccccctcatcacaccctgtcgctgcactgggacactgcgctttgtccaccagtcctgcctccaccagtggataaagagctcagatacacgctgctgtgagctctgcaagtatgacttcataatggagaccaagctcaaacccctccggaagtgggagaaactacagatgaccacaagtgaaaggaggaaaatattctgctctgtcacattccacgtaatcgcgatcacctgtgtggtttggtctttgtatgtattgatagaccggacagcggaggaaatcaagcaaggcaatgacaatggtgtccttgaatggccattttggacaaaactggttgtggtagccattggcttcacaggaggtcttgtcttcatgtacgtacagtgtaaagtctatgttcagttgtggcgcaggctgaaggcctacaaccgtgtgatctttgtacaaaattgcccagacactgccaaaaaactggagaagaacttctcatgtaatgtaaacacagacatcaaagatgctgtggtagtgcctgtaccacaaacaggtgcaaattcactgccatctgcagagggtggcccccctgaagttgtatcagtctgatggaacctgttgggagtttcttcaccgaagaatatctttctagccctcagccactacaaatgacagaagtgatcttgaattatttactcccttcagctcctcctttctcctactgacacatttttcctgactttgttcaaagaggaaaggagaaaaacaaacagaccaaatgcccaggagcccatgaagtaatagcgtaaagtaaagtatgatatggaaatgtgaagtttgcaagagaatgatttccaagacaattaagaactactggggcaatgaatgcttttaggcagtaatcaaagattaaatggacccatgatactcttcttcacagtaacaggggaaaagttcaagaatacagacttgaattgcgatgtgtattacttctagggccttgtaatgttaactgtctcatctggaaataactaacatatttggttttaagcctgaaattgtctgcattatccctaagtcacattggaagtgaacttggaggatgcatattttgatatgctttgacagctaacagatttgtatggtttagtggagtctggttattttgacagatgcatgttttttttaaatagatgcaatatacatttgaagacattgatatttggaattaattacgtttgtttaagtcacgcaaaagattttcagaaaatgttcggatataattagctctgttaaatacccacagaactgttatcaggtcttatatttattttcatctggttcctctaatacagtgctgtccaatagaaacacaacagccacaaatgcaggccacagatgcaaatatttaacttcccagtagccctattttaaaaagtaaaaataaatgtttgtttgttaaaatgaattttgattttttaaaaacactatatgttatttcaacatgtcatcaatataaaaaattgattgattgattgatagtttacatctgtttcttgaaccaagttttcaaaatccagttggtaatttaaaagtacacttcaacttgaattaactatattggatagcacagccgtaaaattagagactaagcttctgctttatttaacagttgttgagtatttcaaaacagtttaattcattcttttatttcaaagtcacaaaagttagttatgatttttaaaagcattaaattaagtgtcctcattttaaagtcagatgaagttcacatctctaaagggtaaaaatccaaaagtatagaaagataaaacaatcaatctgcctatagcagagttgtgaaataaataaattgttactatgaagtacttacaataggggaataaaattacctatttttgttattaaatcaaatgtgtaaggcttatttcatccatatgaggtgtcaacttgacagatgatgagtaattatgactaagaatctagcccttacttttaaaagctgacaggatttcccttgctcagttagaaaacaaaaatattcaacagattctgtgataagtaattaatcgtttaggtttgacagttgattattgtgttctttgcatattcatgtaaaactgatgtgtgaatgacattgcagtgagctagattaacggtgattatagatacagtagcctgtcaaagaaagatgtcctacattaaaaaaggtgacttatttttgttagctgtcattatttattaacatgaaaaggcaatgatggccataagaaccaaagcatgagtatcacactgcacaaatctgggtatcacatggatgcactttgtaattatcagtgtgcttgttcttcacagatcataggaaaaagggaaaaaaaaaacaaacctttaaatgaggagaaagatggtataaatattagtagtggctgacactgagtccagatagtcttgattcctagaaataaacaaaaggtaaacaatgtcaattttgtgtgtgtgtatggcgtgtgtgtagtcatgtatatatgcggggaaaatgttaaggtattcagtcaggaaacaaaaggtttaaaactcatctttcttaaaacttgttataagcacagggaaagcaaagttgaggtaactaaactgaaccaaaaattctgtataaataaggatataagtaattaacgttttaaaaaacatgtggaccttaaacaaactgtatattaaattcctcttaaatgcccattttaaatatttaagataaatacatttatgaataacaaatctgtgggtgatttaaccatggcaccatatccaagggattaaccttaatgcaattttcctgttaattgtcctaagctttttactaatccattttccctgtgggttagtaatggcaacatgctgcttacagatattcccggggaaaaacatccagacaccagcaaacaaagaaatgttgatttctcttttgtttgctctgaaagtaaaataattatttactttaattaacatggaaaatattgtttaaattctgtacgaacctaaacaagatacgttgcagggctgatttcacagtggaggatgatcggctaaaataaagcctcatttattaagggctacacttttaacactaagaaaacatttctagaataaaaagcaaaggtaagcattattctattaatagtaaaagaggacatgggattttaaaactatacctaaattcttgcaattaacttttatgggcttggacattgttgaaatgagaaaataatataatatagcttcctggcaggttaaaagtcaacacttgattttgctattcttctgactttttgaaaccctgaagttctgaatttcaagcttttaagaagcttttcagcaatggttgtttgtttatggttcaaacatctgaaataactacctgcatttaaaatctaatgttgattattttctttttacattctgtgtggcaatggaacatttgccctttcaaacaataaaacgatttagctttgtggcagtgcttttttgtagactgactgactatacccttcaaaaagaaaaactgctctacggaatgcaaattttgaggcatgtttacctgctcgtggaagaaataaaatggaattgaaaaaaaaaggactaaaattgaagaatgaaattacagttgtgttaaaaaccttggctctttataatcatgaatcttcagtattaaaccagacattgatgctgttaatttttttaaagaactatcactcttatcgtacaggagtaaagattaaattgtaaaagaaagaaattccaattttttaaaaagtaaagcccaaaaggcaattaagcttaagtacaaaaacaaaataaaaatgaacaaaatctaaactaaagtgagcccaacaacctgagatacagcaatgtgtaacctgaaggaagataggtgtagactgaaggagtctttcaaaacaccccagcattaaatctcactctgcgctgcttctacacgtgattatagtcccagacagacgacctcatggttttttatcttgttttacaaaaggtccttgggtactctttaaaacatctattctttggcaggaaaattagctcattagaacaatgacaccattaagggacattataagggtcctggggctgaggtgggaagatttttctatctgccccatatagtttacccttccttgccttgaaaatgaatattatagaacagagtacagctcttaaaagttattagtatcattattattatagttgttatataatactttaattaagaaagatgaaaaccttttttctttcctaagtcagcccaatggtgctattttacatatcaacacagttgaaaggaagtactgttattttgggctgcagtgtttcctccacatctaaagaaagcccattttgaaactggatactgcattaaaacaaagaaggaaaaattattttaactgtgtgcagtttttgaaattaggcatttgtactattttggttttacataattctcttgcattaacaatttactgttttgtgaatcatgtgtactaaagcaaattaagaaaaagaaaataattatctgtgaaagactttgtatattaaacaagtgacgcaaaccttagttgtggtttccacaatttttgcctaacagactgatatttgtatttgcaacatccaaacacacatacattttttaagattttacaagggtctgaacatataattattttaaagcaaacctacgttgactaactcatgacatggtacaaataaataaatacacaaacagagggaaaccaatgaaaataaactatgtggactttcaaacctgctttaaaaaaagagttcaagagaaatcacaatgtaatctaaagcgggactgtctcaagaataagtcttggatatagaaaaataagcatataacagcatttttctgttcagagataatagtggattcagataattgcatggataataaacattaaaagcaagatattagaatctaagaggtttggtgatagcaaaaaacaaagctgtttcc

SEQ ID NO: 64838 - DNA, 5877 bp, Artificial Sequence
  derived and/or modified sequence
agaggaggggagaggactggggagccgagccagagccgggctgcctgccacccggctgctcgtccgctagctggggaggagcgctccacccgcaactgacaaaggatgggagaatgcccgcgccccgggatgccggccgcacgcagcctggcggccgcctgagctacttcaccctccgccggtaagtgactgcaaacatcattcattcaatcagcctcactgggagccccttctctccggctggtagtcctgggcggcttgtccctgatcccgagcggggcttggcacagcatcagccctggagggcaggcagcaggtgcctttgcctggtgggtccactggggagcgtggctggggttcgcggcgggtgctgccacccaacctgcgggcggcgggctcgcccagtaggcgcctctctggtgagaggaggcggctccagcccgcagcctggggtagttgctactattggcccccagcgcccgctctgcgcgcgcgccgtttctggcggatccccagtgcgcggcgcgctgtttacaccggcgtggtactagtcacggagccgcacccctcggaaagcgcggagtcgatgacagccacttcacaggctcacgcgctcctagtgtgggcttgaaggggacggggaccgattaccaaaggagagcgctgagtacggaagacacagggcagcctttgtcttgggtttagcgctgatgcgctcaaccctgagtcgggttcactgcaactgttgtgtccgatttcggttccctgcaaccgccctcctgggcgagagatgtcattgtgttcctgcggccagcgggactgagagctgggacttaagacgccaggagggtcctgcgctcacgggaaatgtaccccaaaagaactctgagagaatatactcaactgtcctgctgtgattaaacaagactgctgtattttaatttcagaaattgaaaagggataagaggaaggagaaaatgctgggctggtgtgaagcgatagcccgtaaccctcacagaattccaaacaacacgcgaacacccgagatctcaggggatttggctgacgcctcacaaacctccacattgaatgaaaaatccccagggcgatctgcaagtcgatcaagtaacatttcaaaagcaagcagcccaacaacagggacagctcccaggagccagtcaaggttgtctgtctgtccatccactcaggacatctgcagaatctgtcactgcgaaggggatgaagagagccccctcatcacaccctgtcgctgcactgggacactgcgctttgtccaccagtcctgcctccaccagtggataaagagctcagatacacgctgctgtgagctctgcaagtatgacttcataatggagaccaagctcaaacccctccggaagtgggagaaactacagatgaccacaagtgaaaggaggaaaatattctgctctgtcacattccacgtaatcgcgatcacctgtgtggtttggtctttgtatgtattgatagaccggacagcggaggaaatcaagcaaggcaatgacaatggtgtccttgaatggccattttggacaaaactggttgtggtagccattggcttcacaggaggtcttgtcttcatgtacgtacagtgtaaagtctatgttcagttgtggcgcaggctgaaggcctacaaccgtgtgatctttgtacaaaattgcccagacactgccaaaaaactggagaagaacttctcatgtaatgtaaacacagacatcaaagatgctgtggtagtgcctgtaccacaaacaggtgcaaattcactgccatctgcagagggtggcccccctgaagttgtatcagtctgatggaacctgttgggagtttcttcaccgaagaatatctttctagccctcagccactacaaatgacagaagtgatcttgaattatttactcccttcagctcctcctttctcctactgacacatttttcctgactttgttcaaagaggaaaggagaaaaacaaacagaccaaatgcccaggagcccatgaagtaatagcgtaaagtaaagtatgatatggaaatgtgaagtttgcaagagaatgatttccaagacaattaagaactactggggcaatgaatgcttttaggcagtaatcaaagattaaatggacccatgatactcttcttcacagtaacaggggaaaagttcaagaatacagacttgaattgcgatgtgtattacttctagggccttgtaatgttaactgtctcatctggaaataactaacatatttggttttaagcctgaaattgtctgcattatccctaagtcacattggaagtgaacttggaggatgcatattttgatatgctttgacagctaacagatttgtatggtttagtggagtctggttattttgacagatgcatgttttttttaaatagatgcaatatacatttgaagacattgatatttggaattaattacgtttgtttaagtcacgcaaaagattttcagaaaatgttcggatataattagctctgttaaatacccacagaactgttatcaggtcttatatttattttcatctggttcctctaatacagtgctgtccaatagaaacacaacagccacaaatgcaggccacagatgcaaatatttaacttcccagtagccctattttaaaaagtaaaaataaatgtttgtttgttaaaatgaattttgattttttaaaaacactatatgttatttcaacatgtcatcaatataaaaaattgattgattgattgatagtttacatctgtttcttgaaccaagttttcaaaatccagttggtaatttaaaagtacacttcaacttgaattaactatattggatagcacagccgtaaaattagagactaagcttctgctttatttaacagttgttgagtatttcaaaacagtttaattcattcttttatttcaaagtcacaaaagttagttatgatttttaaaagcattaaattaagtgtcctcattttaaagtcagatgaagttcacatctctaaagggtaaaaatccaaaagtatagaaagataaaacaatcaatctgcctatagcagagttgtgaaataaataaattgttactatgaagtacttacaataggggaataaaattacctatttttgttattaaatcaaatgtgtaaggcttatttcatccatatgaggtgtcaacttgacagatgatgagtaattatgactaagaatctagcccttacttttaaaagctgacaggatttcccttgctcagttagaaaacaaaaatattcaacagattctgtgataagtaattaatcgtttaggtttgacagttgattattgtgttctttgcatattcatgtaaaactgatgtgtgaatgacattgcagtgagctagattaacggtgattatagatacagtagcctgtcaaagaaagatgtcctacattaaaaaaggtgacttatttttgttagctgtcattatttattaacatgaaaaggcaatgatggccataagaaccaaagcatgagtatcacactgcacaaatctgggtatcacatggatgcactttgtaattatcagtgtgcttgttcttcacagatcataggaaaaagggaaaaaaaaaacaaacctttaaatgaggagaaagatggtataaatattagtagtggctgacactgagtccagatagtcttgattcctagaaataaacaaaaggtaaacaatgtcaattttgtgtgtgtgtatggcgtgtgtgtagtcatgtatatatgcggggaaaatgttaaggtattcagtcaggaaacaaaaggtttaaaactcatctttcttaaaacttgttataagcacagggaaagcaaagttgaggtaactaaactgaaccaaaaattctgtataaataaggatataagtaattaacgttttaaaaaacatgtggaccttaaacaaactgtatattaaattcctcttaaatgcccattttaaatatttaagataaatacatttatgaataacaaatctgtgggtgatttaaccatggcaccatatccaagggattaaccttaatgcaattttcctgttaattgtcctaagctttttactaatccattttccctgtgggttagtaatggcaacatgctgcttacagatattcccggggaaaaacatccagacaccagcaaacaaagaaatgttgatttctcttttgtttgctctgaaagtaaaataattatttactttaattaacatggaaaatattgtttaaattctgtacgaacctaaacaagatacgttgcagggctgatttcacagtggaggatgatcggctaaaataaagcctcatttattaagggctacacttttaacactaagaaaacatttctagaataaaaagcaaaggtaagcattattctattaatagtaaaagaggacatgggattttaaaactatacctaaattcttgcaattaacttttatgggcttggacattgttgaaatgagaaaataatataatatagcttcctggcaggttaaaagtcaacacttgattttgctattcttctgactttttgaaaccctgaagttctgaatttcaagcttttaagaagcttttcagcaatggttgtttgtttatggttcaaacatctgaaataactacctgcatttaaaatctaatgttgattattttctttttacattctgtgtggcaatggaacatttgccctttcaaacaataaaacgatttagctttgtggcagtgcttttttgtagactgactgactatacccttcaaaaagaaaaactgctctacggaatgcaaattttgaggcatgtttacctgctcgtggaagaaataaaatggaattgaaaaaaaaaggactaaaattgaagaatgaaattacagttgtgttaaaaaccttggctctttataatcatgaatcttcagtattaaaccagacattgatgctgttaatttttttaaagaactatcactcttatcgtacaggagtaaagattaaattgtaaaagaaagaaattccaattttttaaaaagtaaagcccaaaaggcaattaagcttaagtacaaaaacaaaataaaaatgaacaaaatctaaactaaagtgagcccaacaacctgagatacagcaatgtgtaacctgaaggaagataggtgtagactgaaggagtctttcaaaacaccccagcattaaatctcactctgcgctgcttctacacgtgattatagtcccagacagacgacctcatggttttttatcttgttttacaaaaggtccttgggtactctttaaaacatctattctttggcaggaaaattagctcattagaacaatgacaccattaagggacattataagggtcctggggctgaggtgggaagatttttctatctgccccatatagtttacccttccttgccttgaaaatgaatattatagaacagagtacagctcttaaaagttattagtatcattattattatagttgttatataatactttaattaagaaagatgaaaaccttttttctttcctaagtcagcccaatggtgctattttacatatcaacacagttgaaaggaagtactgttattttgggctgcagtgtttcctccacatctaaagaaagcccattttgaaactggatactgcattaaaacaaagaaggaaaaattattttaactgtgtgcagtttttgaaattaggcatttgtactattttggttttacataattctcttgcattaacaatttactgttttgtgaatcatgtgtactaaagcaaattaagaaaaagaaaataattatctgtgaaagactttgtatattaaacaagtgacgcaaacctta

SEQ ID NO: 64839 - DNA, 656 bp, Artificial Sequence
  derived and/or modified sequence
gtccgctagctggggaggagcgctccacccgcaactgacaaaggatgggagaatgcccgcgccccgggatgccggccgcacgcagcctggcggccgcctgagctacttcaccctccgccggaaatgtaccccaaaagaactctgagagaatatactcaactgtcctgctgtgattaaacaagactgctgtattttaatttcagaaattgaaaagggataagaggaaggagaaaatgctgggctggtgtgaagcgatagcccgtaaccctcacagaattccaaacaacacgcgaacacccgagatctcaggggatttggctgacgcctcacaaacctccacattgaatgaaaaatccccagggcgatctgcaagtcgatcaagtaacatttcaaaagcaagcagcccaacaacagggacagctcccaggagccagtcaaggttgtctgtctgtccatccactcaggacatctgcagaatctgtcactgcgaaggggatgaagagagccccctcatcacaccctgtcgctgcactgggacactgcgctttgtccaccagtcctgcctccaccagtggataaagagctcagatacacgctgctgtgagctctgcaagtatgacttcataatggagaccaagctcaaacccctccggaag

SEQ ID NO: 64840 - DNA, 870 bp, Artificial Sequence
  derived and/or modified sequence
atgctgggctggtgcgaggccatcgcccggaacccccaccggatcccaaataacactcgaacccccgaaatatctggggaccttgccgacgcaagccagacatcaaccttgaacgaaaaaagccccggtcggtctgcctcccggtcctcaaatattagcaaggccagttcacccaccacaggaaccgcccctcggagtcagagtcggctgtcagtgtgcccttccactcaggacatttgtcgtatttgtcattgtgagggggacgaggaatcgcccttgatcaccccttgcaggtgcacgggcaccttgagatttgtgcaccagtcgtgtctacaccagtggattaagtccagtgatacgcggtgttgcgaactttgtaagtatgactttatcatggagacgaagctcaagcccctccgaaaatgggaaaagcttcaaatgaccacaagtgagcgccggaagatcttttgctccgttacatttcacgtcatcgcaatcacttgcgtggtgtggtcactgtacgtactaatcgaccgcaccgctgaggaaatcaaacaaggaaacgataacggagttttggagtggcctttctggacaaagctcgtcgtggtggccataggattcacagggggtctggtcttcatgtacgtgcaatgcaaggtctatgtacagctgtggcggcgcctcaaagcctataatagagtcatattcgtgcaaaattgtcctgataccgccaaaaaactggagaagaattttagctgtaacgtgaacacagatataaaggacgctgtggtagtgccagtcccccagacaggcgctaactccctcccaagcgccgaggggggccctcccgaggtggtgtcagtttag

SEQ ID NO: 64841 - DNA, 870 bp, Artificial Sequence
  derived and/or modified sequence
atgctgggctggtgcgaggccatcgcccggaacccccaccggatcccaaacaacactagaacaccagaaatctccggcgatctagccgatgccagtcagacatctaccctgaatgagaaatctcccggcaggtccgcttcccgttcttcaaatatcagcaaagcatcatctcctacaacgggcaccgctcccaggagccagagcagattgtctgtttgtccctcgacccaggacatttgtcggatttgccactgtgaaggagatgaagagagccctttgattactccttgcagatgtacaggaactctgcggttcgtccatcagtcgtgtctgcatcagtggataaaatccagcgacacacggtgctgtgagctttgcaagtacgacttcattatggagacaaagctgaaaccactccgaaaatgggaaaaactgcagatgaccacttccgaacgaagaaagatattttgcagtgtcacatttcacgtgatagccattacgtgcgtggtttggtcactctatgtgctgatagacagaaccgctgaagagatcaagcagggcaacgacaatggcgtcctggagtggcccttctggactaaactggtagtcgtggccatcgggttcaccggcggcctggtgtttatgtatgtacagtgtaaagtgtatgtacaactctggcgccgactcaaagcctacaaccgcgtcatctttgtgcagaactgtcccgataccgctaaaaagctggaaaagaacttttcgtgcaacgttaatactgatattaaagacgccgtggtcgtgccggtgcctcagaccggcgccaactctctgccttcagctgagggcggaccccccgaagtcgtgagcgtttag

SEQ ID NO: 64842 - DNA, 426 bp, Artificial Sequence
  derived and/or modified sequence
atgctgggctggtgcgaggccatcgcccggaacccccaccggatcccaaacaatacaaggaccccagaaatcagtggggatctcgctgacgcgagtcagacatctactttgaacgagaaaagcccaggcagatcagcttctcgaagctctaatatatccaaggcgtcctcacccaccactggcaccgcccctcgttctcagtccagattatcggtgtgcccgagcactcaggatatttgccggatctgccattgcgagggagatgaagagagccctttgatcacaccatgcaggtgtaccgggaccctgcgctttgtgcaccaatcttgtctgcaccagtggattaagtcatccgacactcggtgctgcgaattgtgtaaatacgacttcattatggaaacaaagctaaaaccactgcgtaagtag

SEQ ID NO: 64843 - DNA, 870 bp, Artificial Sequence
  derived and/or modified sequence
atgctcgggtggtgcgaggccattgcaaggaatccccacagaatacccaacaacactcggaccccagagatatccggagatctggccgacgcttcccagacaagtactcttaacgaaaagtcaccgggaagaagcgctagtcggagctccaacatttctaaggcctctagcccgactacagggaccgcacctagaagtcagagccgcttatctgtgtgcccctccacccaggacatttgtcgcatttgtcattgtgagggtgatgaagagagtcccctcattacaccctgccgatgtaccggcacactgaggttcgtgcaccagtcctgcctgcatcaatggatcaaaagctcagacactcgatgctgcgagttatgtaagtatgatttcattatggaaacaaagctcaaaccgcttcgcaagtgggaaaaactgcagatgactactagcgaacggaggaagatcttctgctctgtgactttccacgtcattgccataacctgcgttgtttggagtctgtacgtgttgatcgatcgcacagctgaagaaattaaacagggtaatgacaatggggtgctggaatggcccttctggacgaagctggtcgtcgtggcaatcggatttactgggggacttgtgttcatgtacgtgcagtgcaaagtttatgtgcagttgtggcggcgattgaaggcctacaaccgcgtgattttcgtccaaaactgtcccgacaccgctaaaaaactcgaaaagaactttagttgtaacgtcaacacggatattaaggatgccgtggtggtaccagtaccccagacaggagctaattccctcccatccgctgagggaggacccccagaggtagttagtgtgtag

SEQ ID NO: 64844 - DNA, 870 bp, Artificial Sequence
  derived and/or modified sequence
atgctgggttggtgcgaagccattgccagaaaccctcacagaatacctaataacaccaggactccagagataagcggtgatttagctgacgcgtcccagacaagtaccctcaatgagaaatctcctgggaggagcgcgtcacgaagctcaaacattagcaaggcctcctcacccactaccggaaccgcccctagatcccagtctcgcttgagcgtgtgtcccagcacccaggatatatgtaggatttgccactgtgagggtgatgaagaaagccccttgatcactccctgcaggtgcactggcaccctgaggtttgtacatcagtcttgcttacaccaatggattaaatcttctgatacccgctgttgcgagttatgcaagtacgatttcattatggagactaaacttaagccgctgagaaagtgggaaaaactacaaatgaccacttctgaacggaggaaaatcttctgttctgtaacgttccatgtcattgccatcacctgcgtagtgtggtcgctatacgtactaatagacaggacggctgaagagatcaagcagggcaatgacaacggtgttctcgagtggccattttggactaagctggtagtggtggccatcggattcacaggtggcctcgtcttcatgtacgtgcagtgtaaggtgtacgtgcagctgtggagaagactgaaggcgtataatcgtgtgatatttgttcagaactgtccagatacagcaaaaaaactagaaaaaaacttctcgtgcaatgtgaacacagacatcaaagacgcggttgtggttcccgtaccacagacgggcgctaattccttgccgagcgctgagggcggtcctcccgaggtggtcagcgtgtag

SEQ ID NO: 64845 - DNA, 426 bp, Artificial Sequence
  derived and/or modified sequence
atgctggggtggtgcgaagctatcgccaggaacccgcacaggatcccaaataacactcgtacacctgaaatcagtggcgaccttgccgacgcctcacaaactagcactttgaacgagaaatccccaggccgatcggcgtccaggagcagcaatatttccaaggcatcctcccccacaactggcaccgcgccacgcagccagagccggctgtcagtatgcccgtctacccaggacatctgcagaatctgccactgtgaaggcgacgaagagtcacccctgataacaccctgtcggtgcaccgggaccttgagatttgtgcaccagagctgcctccaccagtggatcaaatcttcggacaccagatgttgcgagctgtgcaagtacgacttcattatggaaacgaaacttaagccgttgcgcaaatag

SEQ ID NO: 64846 - DNA, 870 bp, Artificial Sequence
  derived and/or modified sequence
atgctgggctggtgcgaggccatcgccagaaacccccacagaatccccaacaacaccagaacccccgagatcagcggcgacctggccgacgccagccagaccagcaccctgaacgagaagagccccggcagaagcgccagcagaagcagcaacatcagcaaggccagcagccccaccaccggcaccgcccccagaagccagagcagactgagcgtgtgccccagcacccaggacatctgcagaatctgccactgcgagggcgacgaggagagccccctgatcaccccctgcagatgcaccggcaccctgagattcgtgcaccagagctgcctgcaccagtggatcaagagcagcgacaccagatgctgcgagctgtgcaagtacgacttcatcatggagaccaagctgaagcccctgagaaagtgggagaagctgcagatgaccaccagcgagagaagaaagatcttctgcagcgtgaccttccacgtgatcgccatcacctgcgtggtgtggagcctgtacgtgctgatcgacagaaccgccgaggagatcaagcagggcaacgacaacggcgtgctggagtggcccttctggaccaagctggtggtggtggccatcggcttcaccggcggcctggtgttcatgtacgtgcagtgcaaggtgtacgtgcagctgtggagaagactgaaggcctacaacagagtgatcttcgtgcagaactgccccgacaccgccaagaagctggagaagaacttcagctgcaacgtgaacaccgacatcaaggacgccgtggtggtgcccgtgccccagaccggcgccaacagcctgcccagcgccgagggcggcccccccgaggtggtgagcgtgtag

SEQ ID NO: 64847 - DNA, 426 bp, Artificial Sequence
  derived and/or modified sequence
atgctgggctggtgcgaggccatcgccagaaacccccacagaatccccaacaacaccagaacccccgagatcagcggcgacctggccgacgccagccagaccagcaccctgaacgagaagagccccggcagaagcgccagcagaagcagcaacatcagcaaggccagcagccccaccaccggcaccgcccccagaagccagagcagactgagcgtgtgccccagcacccaggacatctgcagaatctgccactgcgagggcgacgaggagagccccctgatcaccccctgcagatgcaccggcaccctgagattcgtgcaccagagctgcctgcaccagtggatcaagagcagcgacaccagatgctgcgagctgtgcaagtacgacttcatcatggagaccaagctgaagcccctgagaaagtag

SEQ ID NO: 64848 - protein, 314 aa, Artificial Sequence
  derived and/or modified sequence
MPLEQRSQHCKPEEGLEAQGEALGLVGAQAPATEEQETASSSSTLVEVTLREVPAAESPSPPHSPQGASTLPTTINYTLWSQSDEGSSNEEQEGPSTFPDLETSFQVALSRKMAELVHFLLLKYRAREPFTKAEMLGSVIRNFQDFFPVIFSKASEYLQLVFGIEVVEVVRIGHLYILVTCLGLSYDGLLGDNQIVPKTGLLIIVLAIIAKEGDCAPEEKIWEELSVLEASDGREDSVFAHPRKLLTQDLVQENYLEYRQVPGSDPACYEFLWGPRALVETSYVKVLHHLLKISGGPHISYPPLHEWAFREGEE

SEQ ID NO: 64849 - DNA, 945 bp, Artificial Sequence
  derived and/or modified sequence
atgccacttgagcaacggtcccaacactgtaagcctgaggaggggctggaggcgcagggagaagctttagggctggtgggggcccaggctcctgcaaccgaggagcaagaaactgcttcaagttcttccacactggtagaagttacactaagagaggttccggcagctgaatcaccatcacctccacactcaccacagggggcatccaccctccccacgacaatcaactatacattgtggagccagtctgacgagggatccagtaacgaagaacaggaaggcccatcaacgtttccggatctggaaacctcattccaggtcgcactatctcgtaaaatggcagagcttgtgcatttcctgttgctgaaataccgggcaagagaacctttcactaaagctgaaatgttaggcagtgtgatacgcaacttccaggattttttccctgttattttttctaaggcctccgaatacctccagctggtgtttgggattgaggtggtcgaagtggtgaggatcggccacctctatatattggtgacatgcctgggactgagctacgacggccttctgggagacaaccagatcgttccaaagaccggcctgctgattattgttttagctatcattgcaaaggaaggagattgtgcgcccgaggaaaaaatttgggaggaactgtccgtgttagaggccagtgatggacgggaggattcagttttcgctcatccacgcaaactcttgacccaggacctagtccaggagaattacctggagtatcgacaggtgcccgggagtgatcccgcttgctatgagttcctgtggggccctcgtgcgctggttgagacaagctacgtgaaagtgctccaccatctgctcaaaatctccggaggtccacatatctcttaccccccccttcacgagtgggccttcagggaaggagaagaatag

SEQ ID NO: 64850 - DNA, 945 bp, Artificial Sequence
  derived and/or modified sequence
atgcctttagagcaacgcagtcagcactgtaagcccgaagaaggccttgaggctcagggtgaagctctaggcttggtgggggcccaagcccctgcaacagaggagcaagaaactgcatcaagtagtagcacccttgttgaagtcaccctcagagaagtgcctgcggctgaatcgccctcacccccgcatagcccccagggcgcaagcaccctacccacaactatcaactataccctgtggtctcagtcggatgagggcagttctaacgaagaacaggagggcccctcaacctttcccgaccttgagacatcctttcaggtcgccctctccagaaaaatggctgaactggtgcattttctactactcaagtatcgcgccagggagccctttaccaaggctgaaatgctcgggagcgttattagaaacttccaagacttttttccagtgatattttccaaggcttctgagtaccttcagctagtcttcggcatagaggtggttgaggtcgtcagaataggtcacctgtacatcctggttacatgcctcggtctctcctacgacggtctcctgggcgataatcagatagtgccaaaaactggcctcctaattattgtgctggccattatcgcaaaggaaggcgactgtgccccggaggaaaagatatgggaggagctatccgtcttggaggcctcagatggaagggaggattccgtctttgcccatcctcgtaagctgctgacacaggacttggtccaagagaattatctcgaatatcggcaggtccccgggtctgatcctgcatgctatgaattcctgtggggacctcgcgccctggtagagacgtcgtacgtgaaggtgctgcatcacctgctgaagataagtggaggacctcatatctcctatccacccctccacgaatgggcattccgtgaaggggaagagtag

SEQ ID NO: 64851 - DNA, 945 bp, Artificial Sequence
  derived and/or modified sequence
atgcctctagagcagagatcgcaacattgcaagcctgaggaaggccttgaggctcagggcgaggccctggggctggtgggcgcacaggccccagccacagaggagcaggaaacagccagctcctcttctactctggtggaggtcactttgcgggaggtccctgccgccgagtccccctcacctccacacagtccacagggtgcctcaacccttccaacaactatcaattacaccctgtggtctcaatctgatgaaggttcatctaacgaggagcaggaaggccccagcacgtttcccgatttggagacgagtttccaggtggccctgtctcgaaagatggccgagctcgtccatttcctgctgctgaaatacagggcacgcgaaccctttacgaaggcggaaatgcttggctcagtcatccgtaatttccaggatttcttccctgttattttcagtaaggcgagtgaatatcttcagctggtgtttggaatagaggtggttgaagttgtccgtatcggtcatttgtacatcctggtaacctgccttggactttcctacgatggattgcttggcgataatcagatcgtgccaaagacaggactgcttattattgtgctggcaattatcgccaaggagggcgattgcgcacctgaggagaagatctgggaggagctatccgttctcgaagcttccgacggaagagaggattccgtgtttgcacaccccaggaagcttctgactcaggaccttgtgcaggaaaactatttggagtacaggcaagtgccgggatcggacccggcctgttacgagttcctctggggtcctagagccttagttgaaacctcgtacgtgaaagttctgcaccatctactgaaaatttcaggaggaccccatatatcttacccccctctgcatgagtgggctttccgagaaggagaggagtag

SEQ ID NO: 64852 - DNA, 945 bp, Artificial Sequence
  derived and/or modified sequence
atgcccctggagcagaggagccagcactgcaagccagaggagggcctggaggcccagggcgaggccctgggcctggtgggcgcccaggccccagccacagaggagcaggagacagccagcagcagcagcaccctggtggaggtgaccctgcgggaggtgcctgctgctgagagccccagccccccccacagcccccagggcgccagcaccctgcccaccaccatcaactacaccctgtggagccagagtgatgagggcagcagcaatgaggagcaggagggccccagcaccttcccagacctggagaccagcttccaggtggccctgagcaggaagatggccgagctggtgcacttcctgctgctgaagtaccgggcccgggagcccttcaccaaggccgagatgctgggcagcgtcatccggaacttccaggacttcttccctgtgatcttcagcaaggccagcgagtacctgcagctggtgtttggcatcgaggtggtggaggtggtgcgcatcggccacctgtacatcctggtgacctgcctgggcctgtcctatgatggcctgctgggggacaaccagatcgtgcccaagacaggcctgctgatcatcgtgctggccatcatcgccaaggagggggactgtgcccctgaggagaagatctgggaggagctgtctgtgctggaggccagtgatggaagagaagattctgtgtttgcccaccccaggaagctgctgacccaggacctggtgcaggagaactacctggagtaccggcaggtgcccggcagtgaccctgcctgctatgagttcctgtggggcccccgggccctggtggagaccagctatgtgaaggtgctgcaccacctgctgaagatcagcggcggcccccacatctcctacccacccctgcacgagtgggccttccgggagggggaggagtag

SEQ ID NO: 64853 - DNA, 1664 bp, Artificial Sequence
  derived and/or modified sequence
agagaacagcgagattctcgccctgagcaacggcctgacgtcggtggagggaagcaggcgcaggctccgtgaggaggcaaggttctgaggagacaggccccggagcagcactagctcctgcccacactcctacctgctgccctgaccagagtcatcatgccacttgagcagaggagtcagcactgcaagcctgaggaaggccttgaggcccaaggagaggccctgggcttggtgggtgcgcaggctcctgctactgaggagcaggagactgcctcctcctcctctactctagtggaagtcaccctgcgggaggtgcctgctgccgagtcaccaagtcctccccacagtcctcagggagcctccaccctccccactaccatcaactatactctctggagtcaatccgatgagggctccagcaacgaagaacaggaagggccaagcacctttcctgacctggagacgagcttccaagtagcactcagtaggaagatggctgagttggttcattttctgctcctcaagtatcgagccagggagccattcacaaaggcagaaatgctggggagtgtcatcagaaatttccaggacttctttcctgtgatcttcagcaaagcctccgagtacttgcagctggtctttggcatcgaggtggtggaagtggtccgcatcggccacttgtacatccttgtcacctgcctgggcctctcctacgatggcctgctgggcgacaatcagatcgtgcccaagacaggcctcctgataatcgtcctggccataatcgcaaaagagggcgactgtgcccctgaggagaaaatctgggaggagctgagtgtgttggaggcatctgatgggagggaggacagtgtctttgcgcatcccaggaagctgctcacccaagatttggtgcaggaaaactacctggagtaccggcaggtccccggcagtgatcctgcatgctacgagttcctgtggggtccaagggccctcgttgaaaccagctatgtgaaagtcctgcaccatttgctaaagatcagtggaggacctcacatttcctacccacccctgcatgaatgggcttttagagagggggaagagtgagtctgagcacgagttgcagccagggccagtgggagggggtctgggccagtgcaccttccaaggccccatccattagtttccactgcctcgtgtgatatgaggcccattcttcactctttgaagagagcagtcagtattgttagtagtgagtttctgttctattggatgactttgagatttatctttgtttcctgttggaattgttcaaatgttccttttaacggatggttgaatgaacttcagcatccaagtttatgaatgacagtagtcacacatagtgctgtttatatagtttaggagtaagagtgttgttttttattcagattgggaaatccattccattttgtgaattgtgacaaataacagcagtggaaaaagtatgtgcttagaattgtgaaagaattagcagtaaaatacatgagataaagacctcaagaagttaaaagatacttaattcttgccttatacctcactctattctgtaaatttgaaaaaaaagcatggatacctggatatccttggcttctttgagaatttaagagaaattaaatctgaataaataa

SEQ ID NO: 64854 - DNA, 1761 bp, Artificial Sequence
  derived and/or modified sequence
agagaacagcgagattctcgccctgagcaacggcctgacgtcggtggagggaagcaggcgcaggctccgtgaggaggcaagatctcagggagttgaggaccttttcttcagagggtgactcaggtcaacacaggggcccccatgtagtcgacagacacagtggtcctaagatctaccaagcatccaggttctgaggagacaggccccggagcagcactagctcctgcccacactcctacctgctgccctgaccagagtcatcatgccacttgagcagaggagtcagcactgcaagcctgaggaaggccttgaggcccaaggagaggccctgggcttggtgggtgcgcaggctcctgctactgaggagcaggagactgcctcctcctcctctactctagtggaagtcaccctgcgggaggtgcctgctgccgagtcaccaagtcctccccacagtcctcagggagcctccaccctccccactaccatcaactatactctctggagtcaatccgatgagggctccagcaacgaagaacaggaagggccaagcacctttcctgacctggagacgagcttccaagtagcactcagtaggaagatggctgagttggttcattttctgctcctcaagtatcgagccagggagccattcacaaaggcagaaatgctggggagtgtcatcagaaatttccaggacttctttcctgtgatcttcagcaaagcctccgagtacttgcagctggtctttggcatcgaggtggtggaagtggtccgcatcggccacttgtacatccttgtcacctgcctgggcctctcctacgatggcctgctgggcgacaatcagatcgtgcccaagacaggcctcctgataatcgtcctggccataatcgcaaaagagggcgactgtgcccctgaggagaaaatctgggaggagctgagtgtgttggaggcatctgatgggagggaggacagtgtctttgcgcatcccaggaagctgctcacccaagatttggtgcaggaaaactacctggagtaccggcaggtccccggcagtgatcctgcatgctacgagttcctgtggggtccaagggccctcgttgaaaccagctatgtgaaagtcctgcaccatttgctaaagatcagtggaggacctcacatttcctacccacccctgcatgaatgggcttttagagagggggaagagtgagtctgagcacgagttgcagccagggccagtgggagggggtctgggccagtgcaccttccaaggccccatccattagtttccactgcctcgtgtgatatgaggcccattcttcactctttgaagagagcagtcagtattgttagtagtgagtttctgttctattggatgactttgagatttatctttgtttcctgttggaattgttcaaatgttccttttaacggatggttgaatgaacttcagcatccaagtttatgaatgacagtagtcacacatagtgctgtttatatagtttaggagtaagagtgttgttttttattcagattgggaaatccattccattttgtgaattgtgacaaataacagcagtggaaaaagtatgtgcttagaattgtgaaagaattagcagtaaaatacatgagataaagacctcaagaagttaaaagatacttaattcttgccttatacctcactctattctgtaaatttgaaaaaaaagcatggatacctggatatccttggcttctttgagaatttaagagaaattaaatctg

SEQ ID NO: 64855 - DNA, 1853 bp, Artificial Sequence
  derived and/or modified sequence
aagatgccgagggaggactgaggcgggcctcaccccagacagagggcccccaataatccagcgctgcctctgctgccaggcctggaccaccctgcaggggaagacttctcaggctcagtcgccaccacctcaccccgccaccccccgccgctttaaccgcagggaactctggtatctcagggagttgaggaccttttcttcagagggtgactcaggtcaacacaggggcccccatgtagtcgacagacacagtggtcctaagatctaccaagcatccaggttctgaggagacaggccccggagcagcactagctcctgcccacactcctacctgctgccctgaccagagtcatcatgccacttgagcagaggagtcagcactgcaagcctgaggaaggccttgaggcccaaggagaggccctgggcttggtgggtgcgcaggctcctgctactgaggagcaggagactgcctcctcctcctctactctagtggaagtcaccctgcgggaggtgcctgctgccgagtcaccaagtcctccccacagtcctcagggagcctccaccctccccactaccatcaactatactctctggagtcaatccgatgagggctccagcaacgaagaacaggaagggccaagcacctttcctgacctggagacgagcttccaagtagcactcagtaggaagatggctgagttggttcattttctgctcctcaagtatcgagccagggagccattcacaaaggcagaaatgctggggagtgtcatcagaaatttccaggacttctttcctgtgatcttcagcaaagcctccgagtacttgcagctggtctttggcatcgaggtggtggaagtggtccgcatcggccacttgtacatccttgtcacctgcctgggcctctcctacgatggcctgctgggcgacaatcagatcgtgcccaagacaggcctcctgataatcgtcctggccataatcgcaaaagagggcgactgtgcccctgaggagaaaatctgggaggagctgagtgtgttggaggcatctgatgggagggaggacagtgtctttgcgcatcccaggaagctgctcacccaagatttggtgcaggaaaactacctggagtaccggcaggtccccggcagtgatcctgcatgctacgagttcctgtggggtccaagggccctcgttgaaaccagctatgtgaaagtcctgcaccatttgctaaagatcagtggaggacctcacatttcctacccacccctgcatgaatgggcttttagagagggggaagagtgagtctgagcacgagttgcagccagggccagtgggagggggtctgggccagtgcaccttccaaggccccatccattagtttccactgcctcgtgtgatatgaggcccattcttcactctttgaagagagcagtcagtattgttagtagtgagtttctgttctattggatgactttgagatttatctttgtttcctgttggaattgttcaaatgttccttttaacggatggttgaatgaacttcagcatccaagtttatgaatgacagtagtcacacatagtgctgtttatatagtttaggagtaagagtgttgttttttattcagattgggaaatccattccattttgtgaattgtgacaaataacagcagtggaaaaagtatgtgcttagaattgtgaaagaattagcagtaaaatacatgagataaagacctcaagaagttaaaagatacttaattcttgccttatacctcactctattctgtaaatttgaaaaaaaagcatggatacctggatatccttggcttctttgagaatttaagagaaattaaatctg

SEQ ID NO: 64856 - DNA, 945 bp, Artificial Sequence
  derived and/or modified sequence
atgcccctggagcagcggagccagcactgcaagcccgaggagggcttggaggctcagggagaggcactaggcttggtcggagctcaagcgcccgccaccgaggaacaagaaacggcctcatcctcgagtaccctcgtggaggtgacgctcagggaagtgcctgccgccgagtcaccctctccgccccatagtccgcaaggggcaagcacccttcctacaactataaactataccctgtggagtcagtcagatgagggaagcagcaacgaagagcaggaaggcccatctacctttccagatctggaaaccagctttcaggtcgccctctcaaggaagatggccgagttagttcatttcctactgctcaagtaccgcgctcgcgaacccttcaccaaggccgaaatgttggggtccgttattcgcaacttccaagacttttttcctgtcatcttttccaaggcgtctgaataccttcagctcgtcttcggtatagaggttgtcgaggttgtaaggatcggccatctgtacattctagtgacctgtctcgggctttcctacgatggactgcttggggataaccaaatagtgcccaagactgggttactgattatagtgttagccattatcgccaaagagggggactgcgcgcctgaagagaaaatttgggaggaattgagcgttttggaggctagcgacggacgagaagactccgtgttcgcccatccaaggaagctgctcacgcaggaccttgtccaggagaactacttagagtaccgtcaagtgccgggctcggacccagcctgttacgagtttctgtggggccctcgtgctctggtcgagacctcatacgtgaaagtgttgcaccacttgctcaagataagtggagggcctcatatctcctacccgccacttcacgagtgggcatttagagagggcgaagagtag

SEQ ID NO: 64857 - DNA, 945 bp, Artificial Sequence
  derived and/or modified sequence
atgcccctggagcagcggagccagcactgcaagcccgaggagggcctcgaagctcagggcgaggctctcggattagtgggagcccaagcgcccgcaaccgaggaacaagaaactgcctcctcgtcttctactctcgtggaggtgaccttaagggaggtgcccgccgctgaatccccatcccctccccacagcccacagggggcctccacactccccacgacaattaattatacattgtggagccagtccgacgaaggttctagtaatgaagagcaggagggcccaagtacctttcccgatttggaaacgagctttcaggtggccctctcgcgtaagatggcggagctagtgcattttctgttgctcaaatatcgcgcaagagaaccattcacaaaggccgagatgttaggcagcgtgattagaaactttcaggatttcttcccagtgatttttagcaaggcctctgagtatttacagctcgtattcggcattgaggtcgtcgaagtcgtccgtatcgggcacttatacatcttggtaacatgcctgggcctaagctatgacggattgctgggcgacaatcagatcgtgcccaagactggattattgattatagttctcgctataatcgctaaggagggagattgcgccccggaagaaaagatttgggaggagctatccgtgctcgaagcatcggatggtcgcgaagatagcgtgttcgcacatcctagaaagctcttgacacaggacttggtgcaggagaattatctggagtatcgacaggtgccaggttcagatcctgcatgctacgaattcctctggggtccacgggcactcgtggagacttcctacgttaaggttctccatcacctgctcaaaatcagcggtgggccgcacatctcctacccccctttgcacgagtgggcatttcgagagggggaggagtag

SEQ ID NO: 64858 - DNA, 945 bp, Artificial Sequence
  derived and/or modified sequence
atgcccctggagcagcggagccagcactgcaagcccgaggagggcttagaggcccaaggggaagccctgggtctcgttggcgctcaggctccagcaacggaagagcaggagaccgcaagtagctcctcaaccctcgtggaagtgactctaagagaagtcccagcagccgaaagccccagcccccctcactcaccacagggtgcttccactctacccacaaccattaactacactctctggtcacaatctgatgagggaagcagcaatgaggaacaggaaggccctagcacttttccggacctggaaacaagcttccaggtggcactgagcagaaaaatggcggagctggtacacttcctgctgctcaagtatcgcgcccgagagccatttactaaagctgagatgctgggtagtgtgatccggaactttcaggatttcttccctgtaatttttagcaaagctagcgagtacctgcagctggtgttcggcatcgaggtggtggaggtggtcaggattggacatctttacatcctggttacgtgcctgggtctgtcctacgacgggttgctcggcgacaatcagatagtacccaagactgggctactaattatcgtcctggcaattattgccaaggagggagactgcgctccggaagagaagatctgggaagagctgagcgtgttggaagcgtctgatggcagagaggactccgtcttcgcccaccctcgtaaactgttaactcaggacttggttcaggaaaactatctggagtaccgccaggtccccggatcggatccagcatgctacgagttcctgtggggcccccgagcgttggtcgagacctcctatgtgaaggttctgcaccacctgttgaagatcagtggcggcccccacatttcttatccaccgctgcacgagtgggcctttagggagggagaggagtag

SEQ ID NO: 64859 - DNA, 945 bp, Artificial Sequence
  derived and/or modified sequence
atgcctctggaacaacgtagtcagcactgcaagccggaggagggtttggaggcacagggcgaagctctcggtctcgttggggcacaggccccagctacggaagagcaggagacagcctcctcaagctctacgctggttgaggtgaccctgcgcgaggtgcccgctgcagagtcaccatctcctccacatagccctcagggcgctagcacactgccaacgactatcaactatactctgtggagccaatctgacgagggctcttcgaatgaggaacaggaagggccttcaacattcccggatctcgagaccagcttccaggtagccctgtcccgcaagatggcagagcttgtgcactttctgttactgaaataccgtgccagggaaccatttacaaaggccgagatgctgggcagtgttatacgtaactttcaggatttttttccagtcatctttagtaaagcctctgagtatctgcagctggtgttcgggatcgaagtggtggaggtcgtgagaattggtcatctttacatactagttacgtgcttaggactgtcttacgacggactactgggggataatcagattgttcctaagacgggcctgctgataatcgtgctcgcgatcattgctaaagagggtgactgtgcgccagaggagaagatctgggaagagttatctgtattagaagcctccgatggacgcgaggacagcgttttcgcacatccacgtaagctgcttactcaggacctcgtccaagaaaattatctggaataccgccaggtgccgggttcggatcctgcctgctatgaattcctatggggaccccgtgccctcgttgagacaagctatgtaaaggttctacaccacctgcttaagatctccggaggcccacatatctcgtaccccccacttcatgagtgggccttccgggagggagaggaatag

SEQ ID NO: 64860 - DNA, 945 bp, Artificial Sequence
  derived and/or modified sequence
atgccactggaacagaggtcccagcactgtaagccagaggagggcctcgaagctcaaggagaggctctcgggctggtgggggctcaggccccagcaacggaagagcaagagaccgcctcttcctctagcacattagtagaggtaacactccgagaggtgcccgctgcagagtccccatccccccctcattcccctcagggcgcatctacattaccaaccaccatcaattacactctgtggtcccagagcgacgaaggtagttccaacgaggaacaggagggacccagcacgttccctgatctggaaacaagcttccaggtcgctctctcaaggaagatggcagaactggtgcactttcttttactcaaatatcgggctagggagcctttcaccaaagccgaaatgctaggaagcgtcatcagaaactttcaggatttctttccagtgatattttccaaagctagtgaatacctacagcttgtgtttggaatcgaggtggttgaggtagtgcgcattggacatctttacattttggtgacatgccttgggctgagttatgatggacttctcggagacaaccagattgttcctaagacagggctgctcatcattgtgctagcaattattgccaaagagggagattgcgcccctgaagaaaagatttgggaggagcttagcgttctggaggcttctgatggcagggaggattctgtgtttgcacaccctcggaagcttctgacacaagacttggtccaggaaaattatctggagtacagacaggtacccggttctgacccagcctgctacgagtttttatgggggcctagagccctcgtggaaacgagctatgttaaagtgctccaccatttgctcaagataagtggtgggcctcatatctcctatcctcctctccatgagtgggcctttcgggagggagaagagtag

SEQ ID NO: 64861 - DNA, 945 bp, Artificial Sequence
  derived and/or modified sequence
atgcccctggagcaaaggagccaacactgtaagcctgaagaggggcttgaggcccaaggcgaagccctcggcctggttggtgcccaagcccctgcgaccgaagagcaagagacagcatcctctagcagtacgctggtcgaggtcaccctgcgagaggtcccggctgccgagtcaccttcccctccccacagccctcagggagcctcaactctgcccacaaccattaattacacactgtggagccagtccgatgagggctcctctaatgaggagcaagagggcccttccacctttcccgatttggagacaagcttccaagtcgcactcagccgaaagatggctgaactggttcactttctcctcctcaagtatagagcccgtgaaccttttactaaggccgagatgctcggtagtgttattaggaattttcaggacttcttccccgttatttttagtaaagcctctgagtacctccagctggttttcgggatcgaggttgtcgaagttgttcgcatcggacacctttacattctggtgacttgcctcggactgtcgtacgacgggctcctcggcgacaaccagatcgtccccaagactggactcttaataatcgtccttgcaatcatagccaaagagggcgactgcgctccagaagagaagatttgggaagagctctctgtcctggaggccagtgatggaagggaggattctgtgttcgctcacccccgaaaactactgacacaggatctggtacaggaaaattatctggagtaccgtcaggtgccgggatccgatcccgcatgctacgaatttctctgggggcctagagctctcgtagagacaagctatgtgaaggtgctccatcatcttcttaagatttccggcggacctcatatctcctatccccctctgcatgagtgggcatttcgggagggggaggaatag

SEQ ID NO: 64862 - DNA, 945 bp, Artificial Sequence
  derived and/or modified sequence
atgcccctggagcagagaagccagcactgcaagcccgaggagggcctggaggcccagggcgaggccctgggcctggtgggcgcccaggcccccgccaccgaggagcaggagaccgccagcagcagcagcaccctggtggaggtgaccctgagagaggtgcccgccgccgagagccccagccccccccacagcccccagggcgccagcaccctgcccaccaccatcaactacaccctgtggagccagagcgacgagggcagcagcaacgaggagcaggagggccccagcaccttccccgacctggagaccagcttccaggtggccctgagcagaaagatggccgagctggtgcacttcctgctgctgaagtacagagccagagagcccttcaccaaggccgagatgctgggcagcgtgatcagaaacttccaggacttcttccccgtgatcttcagcaaggccagcgagtacctgcagctggtgttcggcatcgaggtggtggaggtggtgagaatcggccacctgtacatcctggtgacctgcctgggcctgagctacgacggcctgctgggcgacaaccagatcgtgcccaagaccggcctgctgatcatcgtgctggccatcatcgccaaggagggcgactgcgcccccgaggagaagatctgggaggagctgagcgtgctggaggccagcgacggcagagaggacagcgtgttcgcccaccccagaaagctgctgacccaggacctggtgcaggagaactacctggagtacagacaggtgcccggcagcgaccccgcctgctacgagttcctgtggggccccagagccctggtggagaccagctacgtgaaggtgctgcaccacctgctgaagatcagcggcggcccccacatcagctacccccccctgcacgagtgggccttcagagagggcgaggagtag

SEQ ID NO: 64863 - DNA, 1029 bp, Artificial Sequence
  derived and/or modified sequence
atgggctgccccagcagcaagctgtgcctgtacagcccctgcgccgccaccagaagagaggaggccctgaagcagcacaagaccctgagccaggagctggtgaacctgagaggcgagctggtgaccgccagcaccacctgcgagaagctggagaaggccagaaacgagctgcagaccgtgtacgaggccttcgtgcagcagcaccaggccgagaagaccgagagagagaacagactgaaggagttctacaccagagagtacgagaagctgagagacacctacatcgaggaggccgagaagtacaagatgcagctgcaggagcagttcgacaacctgaacgccgcccacgagaccagcaagctggagatcgaggccagccacagcgagaagctggagctgctgaagaaggcctacgaggccagcctgagcgagatcaagaagggccacgagatcgagaagaagagcctggaggacctgctgagcgagaagcaggagagcctggagaagcagatcaacgacctgaagagcgagaacgacgccctgaacgagaagctgaagagcgaggagcagaagagaagagccagagagaaggccaacctgaagaacccccagatcatgtacctggagcaggagctggagagcctgaaggccgtgctggagatcaagaacgagaagctgcaccagcaggacatcaagctgatgaagatggagaagctggtggacaacaacaccgccctggtggacaagctgaagagattccagcaggagaacgaggagctgaaggccagaatggacaagcacatggccatcagcagacagctgagcaccgagcaggccgtgctgcaggagagcctggagaaggagagcaaggtgaacaagagactgagcatggagaacgaggagctgctgtggaagctgcacaacggcgacctgtgcagccccaagagaagccccaccagcagcgccatccccctgcagagccccagaaacagcggcagcttccccagccccagcatcagccccagatag

SEQ ID NO: 64864 - DNA, 1248 bp, Artificial Sequence
  derived and/or modified sequence
atgaagaccccccccaagggccccagcagaaagaacctgttcaccgccctgaacgccgtggagaagagcagacagaagaaccccagaagcctgtgcatccagccccagaccgcccccgacgccctgccccccgagaagaccctggagctgacccagtacaagaccaagtgcgagaaccagagcggcttcatcctgcagctgaagcagctgctggcctgcggcaacaccaagttcgaggccctgaccgtggtgatccagcacctgctgagcgagagagaggaggccctgaagcagcacaagaccctgagccaggagctggtgaacctgagaggcgagctggtgaccgccagcaccacctgcgagaagctggagaaggccagaaacgagctgcagaccgtgtacgaggccttcgtgcagcagcaccaggccgagaagaccgagagagagaacagactgaaggagttctacaccagagagtacgagaagctgagagacacctacatcgaggaggccgagaagtacaagatgcagctgcaggagcagttcgacaacctgaacgccgcccacgagaccagcaagctggagatcgaggccagccacagcgagaagctggagctgctgaagaaggcctacgaggccagcctgagcgagatcaagaagggccacgagatcgagaagaagagcctggaggacctgctgagcgagaagcaggagagcctggagaagcagatcaacgacctgaagagcgagaacgacgccctgaacgagaagctgaagagcgaggagcagaagagaagagccagagagaaggccaacctgaagaacccccagatcatgtacctggagcaggagctggagagcctgaaggccgtgctggagatcaagaacgagaagctgcaccagcaggacatcaagctgatgaagatggagaagctggtggacaacaacaccgccctggtggacaagctgaagagattccagcaggagaacgaggagctgaaggccagaatggacaagcacatggccatcagcagacagctgagcaccgagcaggccgtgctgcaggagagcctggagaaggagagcaaggtgaacaagagactgagcatggagaacgaggagctgctgtggaagctgcacaacggcgacctgtgcagccccaagagaagccccaccagcagcgccatccccctgcagagccccagaaacagcggcagcttccccagccccagcatcagccccagatag

SEQ ID NO: 64865 - DNA, 1029 bp, Artificial Sequence
  derived and/or modified sequence
atgggttgtccgtccagtaagctgtgcttgtactccccatgcgcagctactcgcagagaagaggcgctgaaacagcacaaaaccctctctcaggagctagtaaatctgcgcggagagctggtcactgctagcaccacctgtgagaaactggagaaggccaggaatgaattacagactgtctatgaagctttcgtgcagcaacaccaggctgagaagactgagagggagaatcggctcaaggaattctatacacgagagtatgagaagcttcgcgacacctatatagaagaggctgaaaaatacaagatgcagttgcaggagcagttcgacaatctcaacgccgcacatgaaaccagcaagctcgagatcgaggcgtctcattctgaaaaattagaactgttgaaaaaagcttatgaggctagtctctccgaaatcaaaaaggggcatgaaattgagaaaaagagtttggaggatctgctatctgagaagcaagagtccttggagaaacagatcaacgaccttaaaagcgagaatgatgcactaaatgaaaaactgaagtcagaggagcagaagagacgagcacgtgagaaagccaacttgaaaaaccctcaaattatgtacctcgaacaggagctcgagtctctgaaggcagtgctggagatcaaaaatgaaaagctgcaccagcaggacatcaaactgatgaagatggagaaactggttgataataacaccgccttagttgacaaactgaaacgctttcagcaagaaaacgaggaactcaaagctcgcatggacaagcatatggctatcagccgacagctgtctacagagcaggcggtccttcaggagtcactcgaaaaagaatcaaaggtgaataaacgcttgagcatggagaatgaggaactcctgtggaaactgcataacggcgacctctgcagtcctaaaaggtctccgaccagttccgctatcccattgcagtcacccagaaatagcggctcatttccatcacccagcattagcccaaggtag

SEQ ID NO: 64866 - DNA, 1248 bp, Artificial Sequence
  derived and/or modified sequence
atgaagactccacctaagggaccgagcagaaaaaatttgtttaccgccctcaacgccgtcgagaaatccaggcagaagaacccgcgttctctctgcatccagccccagaccgcaccagacgccctgcctccagagaagactctggagttgacacaatataagaccaagtgcgaaaatcagtctgggttcatactgcagcttaagcagttattggcctgcggcaataccaaattcgaggcgcttacagtcgtgatccagcatcttttatccgagcgtgaggaggccctcaaacagcacaaaaccctttcgcaggagctggtaaaccttaggggtgagcttgtgacagcatccacaacgtgtgagaagttggaaaaggcaagaaatgagctgcagacggtgtacgaagcttttgtccagcaacaccaggctgaaaaaactgaacgagagaaccgactcaaagaattctacactcgagaatatgaaaagttgcgcgacacatacatcgaggaggcagagaagtacaaaatgcaattgcaggagcagttcgacaatctaaacgccgcccacgagacctccaaactcgagatcgaagcttcacatagcgaaaaattagaattgcttaaaaaagcctacgaggctagcctaagcgagatcaagaaggggcacgagatagaaaagaagtctttggaagacttactcagtgagaaacaggagagtctcgagaagcagattaacgacctcaagtccgagaacgatgccctgaacgagaagctaaagagcgaggaacaaaaaagacgcgcacgtgagaaagcgaacctgaagaatcctcagattatgtatttggagcaggagctggagtctctgaaggctgtcctagaaatcaagaatgaaaaactccatcagcaggacatcaagctgatgaagatggagaaactggtggacaataatacggccctagtggacaaattgaagcgcttccagcaggagaacgaggagttgaaggctcgtatggacaagcacatggcgattagccggcagctttctaccgagcaggccgtgctgcaagagtcattggaaaaagagagtaaggtgaacaaaagactgtctatggagaacgaggagctgctttggaagctgcacaatggggacctctgttctcctaagcgatcccccacgagctctgcaataccactccaatcaccgagaaattccggctcattcccttcccctagcatttccccccgctag

SEQ ID NO: 64867 - DNA, 1029 bp, Artificial Sequence
  derived and/or modified sequence
atgggctgccccagcagcaagctgtgcctgtacagcccctgtgccgccacccggcgggaggaggccctgaagcagcacaagaccctgagccaggagctggtgaacctgcggggggagctggtgacagccagcaccacctgtgagaagctggagaaggccagaaatgagctgcagacagtgtatgaggcctttgtgcagcagcaccaggccgagaagacagagcgggagaaccggctgaaggagttctacacccgggagtatgagaagctgcgggacacctacatcgaggaggccgagaagtacaagatgcagctgcaggagcagtttgacaacctgaatgctgcccacgagaccagcaagctggagattgaggccagccacagcgagaagctggagctgctgaagaaggcctatgaggccagcctgtctgagatcaagaagggccatgaaattgagaagaagagcctggaggacctgctgtctgagaagcaggagagcctggagaagcagatcaatgacctgaagtcagaaaatgatgccctgaatgagaagctgaagtctgaggagcagaagaggcgggcccgggagaaggccaacctgaagaacccccagatcatgtacctggagcaggagctggagagcctgaaggctgtgctggagatcaagaatgagaagctgcaccagcaggacatcaagctgatgaagatggagaagctggtggacaacaacacagccctggtggacaagctgaagcgcttccagcaggagaatgaggagctgaaggccaggatggacaagcacatggccatcagccggcagctgagcacagagcaggccgtgctgcaggagagcctggagaaggagagcaaggtgaacaagaggctgtccatggagaatgaggagctgctgtggaagctgcacaacggggacctgtgcagccccaagaggagccccaccagcagcgccatccccctgcagagccccagaaattctggcagcttccccagccccagcatcagccccaggtag

SEQ ID NO: 64868 - DNA, 1248 bp, Artificial Sequence
  derived and/or modified sequence
atgaagaccccacccaagggccccagcaggaagaacctcttcaccgccctgaatgctgtggagaagagccggcagaagaaccccaggagcctgtgcatccagccccagacagccccagatgccctgcccccagagaagaccctggagctgacccagtacaagaccaagtgtgagaaccagagcggcttcatcctgcagctgaagcagctgctggcctgtggcaacaccaagtttgaggccctgactgtggtgatccagcacctgctgtctgagcgggaggaggccctgaagcagcacaagaccctgagccaggagctggtgaacctgcggggggagctggtgacagccagcaccacctgtgagaagctggagaaggccagaaatgagctgcagacagtgtatgaggcctttgtgcagcagcaccaggccgagaagacagaaagagaaaatcggctgaaggagttctacacccgggagtatgagaagctgcgggacacctacatcgaggaggccgagaagtacaagatgcagctgcaggagcagtttgacaacctgaatgctgcccacgagaccagcaagctggagattgaggccagccacagcgagaagctggagctgctgaagaaggcctatgaggccagcctgtctgagatcaagaagggccacgagattgagaagaagagcctggaggacctgctgtctgagaagcaggagagcctggagaagcagatcaatgacctgaagtcagaaaatgatgccctgaatgagaagctgaagtctgaggagcagaagagaagagcccgggagaaggccaacctgaagaacccccagatcatgtacctggagcaggagctggagagcctgaaggctgtgctggagatcaagaatgagaagctgcaccagcaggacatcaagctgatgaagatggagaagctggtggacaacaacacagccctggtggacaagctgaagcgcttccagcaggagaatgaggagctgaaggccaggatggacaagcacatggccatcagccggcagctgagcacagagcaggccgtgctgcaggagagcctggagaaggagagcaaggtgaacaagaggctgtccatggagaatgaggagctgctgtggaagctgcacaatggagacctgtgcagccccaagaggagccccaccagcagcgccatccccctgcagagccccaggaacagcggcagcttccccagccccagcatcagccccaggtag

SEQ ID NO: 64869 - DNA, 3160 bp, Artificial Sequence
  derived and/or modified sequence
atgggctgccccagcagcaaactgtgcctctattctccatgtgcagcaacaaggcgggaggaagcactgaaacaacacaaaaccctatctcaagaacttgttaacctccggggagagctagtcactgcttcaaccacctgtgagaaattagaaaaagccaggaatgagttacaaacagtgtatgaagcattcgtccagcagcaccaggctgaaaaaacagaacgagagaatcggcttaaagagttttacaccagggagtatgaaaagcttcgggacacttacattgaagaagcagagaagtacaaaatgcaattgcaagagcagtttgacaacttaaatgctgcgcatgaaacctctaagttggaaattgaagctagccactcagagaaacttgaattgctaaagaaggcctatgaagcctccctttcagaaattaagaaaggccatgaaatagaaaagaaatcgcttgaagatttactttctgagaagcaggaatcgctagagaagcaaatcaatgatctgaagagtgaaaatgatgctttaaatgaaaaattgaaatcagaagaacaaaaaagaagagcaagagaaaaagcaaatttgaaaaatcctcagatcatgtatctagaacaggagttagaaagcctgaaagctgtgttagagatcaagaatgagaaactgcatcaacaggacatcaagttaatgaaaatggagaaactggtggacaacaacacagcattggttgacaaattgaagcgtttccagcaggagaatgaagaattgaaagctcggatggacaagcacatggcaatctcaaggcagctttccacggagcaggctgttctgcaagagtcgctggagaaggagtcgaaagtcaacaagcgactctctatggaaaacgaggagcttctgtggaaactgcacaatggggacctgtgtagccccaagagatcccccacatcctccgccatccctttgcagtcaccaaggaattcgggctccttccctagccccagcatttcacccagatgacacctccccaaagtccacagactctctgaaagcattttgatgcaggtctgcaggactgaccccaaggaggaacgtgggcacaagaggtatatcagcacacgtgtgatcaccgtagggtaactggagcgtcaccaccggcggaatcgcagcttctgagactggaactctggaggaagacttttgcctccgtccaaaagattcctccaaaaaaagatttaaaaaaagatttcggcatcgacacggacgttgttgcacaaagcacttaaagaacgagagcatcttgttcattgcctttttcacctaagcatagggggaaaaactctcagggccctattaagatttataacctttgtaatgttcttcaccacagacaccttcttgtgagttttcagtctgactgtgggggtggggggtgtgaatgaaatggatgtcacagagtgtcatgtgtctgatgcagcctcctctgctgtgtattaaatgtcaaaatctgaatatatctggatatgtactaatcaaataataatcaatcaatcagcatatacatttcagccaaagccatagaagaaaaagcaatagttgcttgaattatgatcatctaccaccaactctgctcagccctgtaacagggtagggagagggtataacaggaagagctttgacttgtccctgtctatacattctctgtatcttttgggggtaacttcttggcagtttttcagtgttcagccatgtcagttgaaactagatttttctgtagattttttacttacccatgtgagcctaacactatcctgtaattcattttctcaggctatgtgtaaatgtagaaccctaatttttctataaaaaaacaaactaactaactaactgtgtaaagaaagaaaaagggaagtaccaatgggtttttccaccttatttttacctttgatctacccttgcagatttaacctgtcttcttccctcccattattctcattttccttttacctttctccaccatccagagccacaaaagcaaaccttctacctcctacctacttttctctgggacaaggataaaggaatatgattttccagagccccagagccagctcatcttccaggtgctgaaaccactttccaaataaactaaagcctggatttgatattacaaattttgggaaatcttagaataaagaacgagaacaaggaagtcattggctagtataattaagaaaggtaggattcagtgcttaccgatgatgcagtacttgatagaagaaaacagtctgggaggatagcgctcatttttcagttaccctttaaggagtccctttgtctttgggaaagtagcagaatggtccgcttctttcccatgagtggaaaatgtggcttgtccaactctcctccaggttgcatttcagtttctttccaaaacttattacctcccctaatcctgagactttggaaaaggtggaaggaagaactgttgctttatctccccctccctgcatgtgtcaacattgtgatgtcagtatttactaatctacattcagtggctgtacaaataacagctgtagtaagaagagattcaggatgctagaggtgaatatttgggtcatttacatgtacactacatagcaagttgatactcatgttgcatgttcttttaaattagtgattttgtgtcttaagtctttaacttccaatacttcatcatgtatgtaaccttccatgtttgcttctgataaatggaaatgtaggttcactgccacttcatgagatatctctgctcacgcttccaagttgttctcaatgacattagccaaagttgggtttgccattcatcccctaggcatggtaaatcttgtgttgttccctgctgtcctccgtattacgtgaccggcaaataaatctcatagcagttaatataaaacatctttggaggatgggagagaacaggagggaagatgggaaacaaaatagagaattcttaagattttgtttaaaccaaatgtttcatgtagaatgcaaaatgttggcacgtcaaaaatatgaatgtgtagacaactgtagttgtgctcagtttgtagtgatgggaagtgtattttactctgatcaaataaataatgctggaatactcaagaattgc

SEQ ID NO: 64870 - DNA, 1029 bp, Artificial Sequence
  derived and/or modified sequence
atgggctgccccagcagcaagctgtgcctgtacagcccctgcgccgctactcggcgcgaggaggcactgaaacaacacaagactctcagtcaggagctggttaatttgcggggagaattggtgaccgcttcaaccacttgcgaaaagctggagaaagcacgcaatgagttgcagacagtgtacgaagccttcgtgcagcaacatcaggcagaaaagactgagagggagaatcgcctgaaggagttttatacacgtgagtacgaaaaacttagggacacatacatcgaggaggccgagaagtataaaatgcagctgcaggaacagttcgacaacctcaatgctgcgcacgaaacttctaagctcgagatcgaggcttctcatagcgagaaactggagctccttaagaaggcctatgaggctagcttgtccgagattaaaaaggggcacgagattgaaaaaaaatctctggaagatttgctcagcgagaagcaggaaagtttagagaagcaaatcaacgatttaaaatctgaaaatgatgcactaaatgaaaaactgaaatccgaggaacagaagaggagggcccgagagaaggctaatttaaagaaccctcagatcatgtatctggagcaggaactggagagccttaaggctgttttagaaattaagaacgagaagctgcaccagcaggatattaagctcatgaagatggaaaagttagtggacaacaacactgctttagtggataaactgaagcgctttcagcaggaaaatgaagagctgaaggcccgtatggataagcacatggccatttcccgccagctctccaccgagcaggcagtgctccaagaatctcttgagaaggagtcaaaggtgaataagcgcctttcaatggagaacgaagaactactgtggaaacttcataacggggacctgtgtagtccaaaacgcagcccaacctcatccgctattccactccaatcgcccaggaactctggcagtttcccctctccctccatatcacctaggtag

SEQ ID NO: 64871 - DNA, 1248 bp, Artificial Sequence
  derived and/or modified sequence
atgaagaccccccccaagggccccagccggaagaacctgttcaccgccttaaacgccgtcgaaaagagccggcaaaagaaccctaggagtctgtgcatacagccacagaccgcccctgatgctctgcccccggagaagacactcgagttgacccagtacaaaactaaatgcgagaaccaaagcggtttcatcttgcagctgaagcagttactggcctgcgggaacacaaaattcgaggctctcactgtggtcatccagcacttgctgtccgagcgggaggaggccttaaaacagcacaagacccttagtcaggagctggtcaaccttaggggggagctggtcactgctagcactacttgcgaaaagctcgagaaggccagaaacgaactgcagaccgtctatgaggcatttgtgcaacagcaccaagccgagaaaacagaaagggagaatcgcctgaaggagttctatacacgagagtatgagaagttaagagacacgtacattgaagaagctgagaagtacaagatgcagttgcaagagcagtttgacaatttgaatgccgcccacgaaacttctaaactggaaatcgaagccagtcactccgaaaaactggaactgctgaagaaggcctatgaagctagtctctctgaaattaaaaaaggacatgagatagagaagaagtccctcgaagacctgctgtcagagaagcaagaatccctggaaaaacagatcaatgatctgaaaagtgagaatgatgcccttaatgaaaaactgaagagcgaggaacagaaacgccgggccagggaaaaggcgaatctgaagaacccccagattatgtacctggaacaagaactggaaagtctcaaagccgtgctggagataaaaaatgagaagctgcatcagcaggacataaaactcatgaaaatggaaaagttggtggataacaacacggcactggtagacaagcttaaaagattccagcaggagaacgaagaactgaaggcccgtatggataagcatatggcaatctctaggcagctgagcaccgaacaggccgtgctgcaggagtccttggagaaagaaagcaaggtgaacaagagactctcgatggagaacgaggagttactgtggaagctgcataacggcgacctgtgttcacccaagcggtctccaacatcatcagccattcccctgcagagtccacggaatagtggtagctttccctccccctcgatatcccctcggtag

SEQ ID NO: 64872 - DNA, 1029 bp, Artificial Sequence
  derived and/or modified sequence
atgggatgtcctagctctaagctctgcctctatagcccttgtgctgccacgcgccgagaggaggcgctgaagcaacacaagaccctgagccaggagctcgttaatctccggggtgaattagtgaccgcctctacgacatgtgagaaactcgagaaagccagaaatgaactgcagaccgtctacgaggcatttgtgcaacagcaccaggccgagaagaccgagcgcgagaacaggctgaaagagttttatacaagggagtatgagaaactccgagatacgtatatagaagaggctgagaaatacaaaatgcagctacaggagcagttcgacaatcttaacgccgcacacgaaacgagtaaattagagattgaagcttcacacagcgagaaactggagctgctgaaaaaagcttatgaggcatccctctccgagatcaaaaaaggacacgaaattgagaagaagagcttagaagaccttcttagtgagaaacaagagagcttggaaaagcagataaacgacctgaaaagcgaaaacgatgccctgaacgaaaagctgaagtcagaggagcagaaaagacgggcacgggagaaagcgaatctgaagaatccccagattatgtacctggaacaggagcttgagtccctaaaagcagtcctcgaaattaaaaacgaaaaactgcaccagcaggatataaaattgatgaaaatggagaagctcgtcgataataacacagcgttggtggacaaacttaaaagattccagcaggagaatgaggagttgaaggctcgaatggacaagcacatggctattagtcggcagctgtccaccgagcaagccgtcttgcaagagagtctggagaaggaatcaaaagtcaacaagcgtctctctatggaaaacgaggaattgttatggaagctgcataatggggacctgtgctctcccaaaaggtcccccaccagctccgcaattcctctccagagtcccagaaactcggggtctttcccatcaccaagcatctccccccgatag

SEQ ID NO: 64873 - DNA, 1248 bp, Artificial Sequence
  derived and/or modified sequence
atgaagacccccccaaaagggccttcccggaaaaatctgttcactgccttgaacgccgtggaaaaatccaggcaaaaaaaccctagatcactatgtatccagcctcaaactgctcccgatgcgcttcctcccgagaaaactctagagctcacccaatataaaaccaagtgcgagaatcagtctggctttatcctgcagctcaaacagctgctcgcatgtggtaacactaaattcgaagccctcaccgtagttatacagcatctgctgtcagagagggaggaggcactcaaacagcataagacgttaagccaagaactggtcaaccttcgcggagaactagtgactgcctcaactacctgcgagaaactagagaaggcccgaaatgaactgcagacagtgtatgaggcctttgttcagcaacaccaggctgagaaaaccgaacgcgagaaccgcctgaaagagttctacaccagggagtacgagaaactgcgcgacacgtacatagaggaagcagagaaatataagatgcagctgcaggaacaatttgacaatttgaacgccgctcatgagacctccaagttggagatcgaggcctcgcatagtgagaagctggagctcttgaaaaaagcctatgaagcgtccctcagcgaaatcaaaaagggccacgagatcgaaaagaaatccctggaagatctcctgagcgagaaacaggagagtctggagaaacagattaacgacttgaagagtgagaatgatgcactgaatgaaaagctcaagtccgaagagcagaaacgtagggctagagaaaaagcgaatctgaagaacccccagataatgtacctcgaacaagaactggagtctctgaaggcggtactggagataaagaacgagaagcttcaccagcaagacataaagctcatgaaaatggagaagctggtggataataatactgctctggtggataagctcaagcgcttccaacaagagaatgaggagctgaaagcacgtatggacaagcacatggcaatttcccggcagctaagcactgagcaagctgtgctgcaggaatccctggagaaggaaagtaaggtaaataagcgtctatcgatggaaaacgaagagctgctctggaaactgcataatggggatctgtgtagtcctaagcgctcgcccacttcctccgcaattcccttacagagccccaggaattcgggatcattcccgtcgccaagtatttccccccgatag

SEQ ID NO: 64874 - protein, 446 aa, Artificial Sequence
  derived and/or modified sequence
MLLPQLCWLPLLAGLLPPVPAQKFSALTFLRVDQDKDKDCSLDCAGSPQKPLCASDGRTFLSRCEFQRAKCKDPQLEIAYRGNCKDVSRCVAERKYTQEQARKEFQQVFIPECNDDGTYSQVQCHSYTGYCWCVTPNGRPISGTAVAHKTPRCPGSVNEKLPQREGTGKTDDAAAPALETQPQGDEEDIASRYPTLWTEQVKSRQNKTNKNSVSSCDQEHQSALEEAKQPKNDNVVIPECAHGGLYKPVQCHPSTGYCWCVLVDTGRPIPGTSTRYEQPKCDNTARAHPAKARDLYKGRQLQGCPGAKKHEFLTSVLDALSTDMVHAASDPSSSSGRLSEPDPSHTLEERVVHWYFKLLDKNSSGDIGKKEIKPFKRFLRKKSKPKKCVKKFVEYCDVNNDKSISVQELMGCLGVAKEDGKADTKKRHTPRGHAESTSNRQPRKQG

SEQ ID NO: 64875 - DNA, 1341 bp, Artificial Sequence
  derived and/or modified sequence
atgctgctgccccagctgtgctggctgcccctgctggccggcctgctgccccccgtgcccgcccagaagttcagcgccctgaccttcctgagagtggaccaggacaaggacaaggactgcagcctggactgcgccggcagcccccagaagcccctgtgcgccagcgacggcagaaccttcctgagcagatgcgagttccagagagccaagtgcaaggacccccagctggagatcgcctacagaggcaactgcaaggacgtgagcagatgcgtggccgagagaaagtacacccaggagcaggccagaaaggagttccagcaggtgttcatccccgagtgcaacgacgacggcacctacagccaggtgcagtgccacagctacaccggctactgctggtgcgtgacccccaacggcagacccatcagcggcaccgccgtggcccacaagacccccagatgccccggcagcgtgaacgagaagctgccccagagagagggcaccggcaagaccgacgacgccgccgcccccgccctggagacccagccccagggcgacgaggaggacatcgccagcagataccccaccctgtggaccgagcaggtgaagagcagacagaacaagaccaacaagaacagcgtgagcagctgcgaccaggagcaccagagcgccctggaggaggccaagcagcccaagaacgacaacgtggtgatccccgagtgcgcccacggcggcctgtacaagcccgtgcagtgccaccccagcaccggctactgctggtgcgtgctggtggacaccggcagacccatccccggcaccagcaccagatacgagcagcccaagtgcgacaacaccgccagagcccaccccgccaaggccagagacctgtacaagggcagacagctgcagggctgccccggcgccaagaagcacgagttcctgaccagcgtgctggacgccctgagcaccgacatggtgcacgccgccagcgaccccagcagcagcagcggcagactgagcgagcccgaccccagccacaccctggaggagagagtggtgcactggtacttcaagctgctggacaagaacagcagcggcgacatcggcaagaaggagatcaagcccttcaagagattcctgagaaagaagagcaagcccaagaagtgcgtgaagaagttcgtggagtactgcgacgtgaacaacgacaagagcatcagcgtgcaggagctgatgggctgcctgggcgtggccaaggaggacggcaaggccgacaccaagaagagacacacccccagaggccacgccgagagcaccagcaacagacagcccagaaagcagggctag

SEQ ID NO: 64876 - DNA, 1347 bp, Artificial Sequence
  derived and/or modified sequence
atgctgctgccccagctgtgctggctgcccctgctggccggcctgctgccccccgtgcccgcccagaagttcagcgccctgaccttcctgagagtggaccaggacaaggacaaggactgcagcctggactgcgccggcagcccccagaagcccctgtgcgccagcgacggcagaaccttcctgagcagatgcgagttccagagagccaagtgcaaggacccccagctggagatcgcctacagaggcaactgcaaggacgtgagcagatgcgtggccgagagaaagtacacccaggagcaggccagaaaggagttccagcaggtgttcatccccgagtgcaacgacgacggcacctacagccaggtgcagtgccacagctacaccggctactgctggtgcgtgacccccaacggcagacccatcagcggcaccgccgtggcccacaagacccccagatgccccggcagcgtgaacgagaagctgccccagagagagggcaccggcaagaccgacgacgccgccgcccccgccctggagacccagccccagggcgacgaggaggacatcgccagcagataccccaccctgtggaccgagcaggtgaagagcagacagaacaagaccaacaagaacagcgtgagcagctgcgaccaggagcaccagagcgccctggaggaggccaagcagcccaagaacgacaacgtggtgatccccgagtgcgcccacggcggcctgtacaagcccgtgcagtgccaccccagcaccggctactgctggtgcgtgctggtggacaccggcagacccatccccggcaccagcaccagatacgagcagcccaagtgcgacaacaccgccagagcccaccccgccaaggccagagacctgtacaagggcagacagctgcagggctgccccggcgccaagaagcacgagttcctgaccagcgtgctggacgccctgagcaccgacatggtgcacgccgccagcgaccccagcagcagcagcggcagactgagcgagcccgaccccagccacaccctggaggagagagtggtgcactggtacttcaagctgctggacaagaacagcagcggcgacatcggcaagaaggagatcaagcccttcaagagattcctgagaaagaagagcaagcccaagaagtgcgtgaagaagttcgtggagtactgcgacgtgaacaacgacaagagcatcagcgtgcaggagctgatgggctgcctgggcgtggccaaggaggacggcaaggccgacaccaagaagagacacacccccagaggccacgccgagagcaccagcaacagacaggagaaccccagaaaggagggctag

SEQ ID NO: 64877 - DNA, 1341 bp, Artificial Sequence
  derived and/or modified sequence
atgctgctgcctcagttatgttggctgccacttctcgcgggactccttccacccgtacctgcccaaaaattttcagcactgacattcctcagagttgatcaagataaagacaaggattgtagccttgactgcgccggaagcccgcagaaacctctatgtgcgagtgacggtaggacattcctgagcaggtgcgagttccagagagctaaatgtaaggaccctcagctggagattgcataccgcggtaactgcaaggacgtgtcccggtgcgtcgctgaaagaaagtatactcaggagcaggcaaggaaggagtttcaacaggttttcattccagaatgcaatgacgacggcacatatagtcaggtgcaatgtcactcttacacaggatattgctggtgcgtaaccccaaacggacggcctatttccggtacagctgtggcccacaagacccccagatgccccggaagtgtgaacgaaaaactaccccagcgcgaagggactggcaagaccgacgacgccgccgcgccagcactggagactcagccacagggcgacgaagaggacatagcttcccgctaccctacactctggactgaacaggtcaagtcccgccaaaacaagactaataaaaatagcgttagttcctgtgaccaggaacaccagtccgcgctcgaagaggccaaacaacccaagaacgacaatgtagtaattcctgaatgcgcgcatggcggattatataaacccgttcagtgccacccgagcacaggttactgctggtgcgtgttagtggacaccggccgacccattcctggcacctcgacccggtacgaacagcccaagtgtgataacacagcgcgggctcatccagctaaagctcgagatctgtacaaaggccggcagttgcagggatgccctggggccaagaaacatgaattcctgacatccgtgctcgatgcattatcaacagatatggtacatgccgcgtctgatccgagttctagctccgggcggttaagcgagcctgacccaagccacactttagaggaacgagttgttcattggtattttaagttgctggacaaaaatagttctggggatataggcaagaaagagatcaagccatttaagaggtttctgagaaagaagagtaagcccaagaaatgcgtgaagaagtttgtggagtattgtgacgtaaataacgataagtccatcagtgttcaggaattgatgggatgcttgggcgtggccaaggaagatggaaaagccgacacgaagaaacgccatactccgagaggccacgctgaatctacctccaatcggcagccacgtaaacaaggatag

SEQ ID NO: 64878 - DNA, 1347 bp, Artificial Sequence
  derived and/or modified sequence
atgctcctgccccagctttgctggttgcccctgctggcagggctgcttccccctgtgcccgcccaaaagttctctgcactcacctttctgagagtggatcaagacaaggataaggattgctccctcgactgtgctggtagcccacagaagccgctgtgcgctagtgatgggcgcaccttcttatcccgatgcgagttccagagagccaaatgcaaagatccacaactggaaatcgcatacagaggcaattgcaaggatgtatcacgctgtgtcgcagagcgcaaatatacccaagaacaagcgagaaaagagttccaacaggtgtttattccggaatgtaatgatgacgggacatattcgcaagtgcagtgtcactcgtacacgggctattgttggtgcgtgactccaaacggcagaccgatatccggtaccgcggtggcacacaaaactcctagatgcccggggagcgtgaatgagaagctgcctcaacgtgaagggaccggcaagactgatgatgccgcagcacctgcactggagactcagcctcaaggagatgaagaagatatcgcctcaagatatccaacactgtggacggagcaagtgaaatctcgccaaaataaaaccaacaagaatagtgtctcctcatgcgaccaggaacaccagtctgccttggaggaagctaagcagccgaaaaatgacaatgtcgtgatccccgagtgcgcacatggtgggctgtacaaaccggttcagtgccatccttccactgggtactgctggtgtgtgctggtggatacgggccgtcccatccctgggacaagcacacgctacgagcaaccaaaatgtgataacactgcccgagcccaccctgcgaaggcaagggatttatacaaaggccggcagctgcagggttgcccaggggctaaaaaacacgagttcctgacctcagtgctggacgcgttgtctacggacatggttcacgctgcctctgacccttccagcagttccggtcggctgtcagaacctgatccatcacatacattggaggagagggtagtgcactggtacttcaagctgctcgacaagaatagcagcggtgacataggtaaaaaggaaattaaacctttcaaacgcttcctacggaagaagtcaaagcctaagaagtgtgttaagaaatttgttgagtactgcgacgtgaacaatgacaagagtatatctgtgcaagaactgatgggatgcctcggcgttgctaaggaggacggaaaggccgacaccaaaaaaagacacactcccaggggccatgccgagagcaccagcaaccgacaggagaatcccaggaaagaaggctag

SEQ ID NO: 64879 - DNA, 1341 bp, Artificial Sequence
  derived and/or modified sequence
atgctgctgccccagctgtgctggctgcccctgctggccggcctgctgccccctgtgcctgcccagaagttcagcgccctgaccttcctgcgggtggaccaggacaaggacaaggactgcagcctggactgtgccggcagcccccagaagcccctgtgtgccagtgatggccgcaccttcctgagccgctgtgagttccagagggccaagtgcaaggacccccagctggagatcgcctaccggggcaactgcaaggatgtgagccgctgtgtggccgagaggaagtacacccaggagcaggccaggaaggagttccagcaggtgttcatccctgagtgcaatgatgatggcacctacagccaggtgcagtgccacagctacacaggctactgctggtgtgtgaccccaaatggccggcccatcagcggcacagctgtggcccacaagaccccccgctgccccggctctgtgaatgagaagctgccccagcgggagggcaccgggaagacagatgatgctgctgccccagccctggagacccagccccagggagatgaagaagatattgccagccgctaccccaccctgtggacagagcaggtgaagagccggcagaacaagaccaacaagaacagcgtgagcagctgtgaccaggagcaccagagcgccctggaggaggccaagcagcccaagaatgacaacgtggtgatcccagaatgtgcccacggcggcctgtacaagcctgtgcagtgccaccccagcacaggctactgctggtgtgtgctggtggacaccggccggcccatccctggcaccagcaccaggtatgagcagcccaagtgtgacaacacagcccgggcccacccagccaaggcccgggacctgtacaagggccggcagctgcagggctgccctggggccaagaagcatgagttcctgacctctgtgctggatgccctgagcacagacatggtgcatgctgccagtgaccccagcagcagcagcggccgcctgtctgagccagaccccagccacaccctggaggagcgggtggtgcactggtacttcaagctgctggacaagaacagcagcggggacatcggcaagaaggagatcaagcccttcaagcgcttcctgaggaagaagagcaagcccaagaagtgtgtgaagaagtttgtggagtactgtgatgtgaacaatgacaagagcatctctgtgcaggagctgatgggctgcctgggcgtggccaaggaggatggcaaggctgacaccaagaagaggcacaccccccggggccacgccgagagcaccagcaaccggcagcccaggaagcagggctag

SEQ ID NO: 64880 - DNA, 1347 bp, Artificial Sequence
  derived and/or modified sequence
atgctgctgccccagctgtgctggctgcccctgctggccggcctgctgccccctgtgcctgcccagaagttcagcgccctgaccttcctgcgggtggaccaggacaaggacaaggactgcagcctggactgtgccggcagcccccagaagcccctgtgtgccagtgatggccgcaccttcctgagccgctgtgagttccagagggccaagtgcaaggacccccagctggagatcgcctaccggggcaactgcaaggatgtgagccgctgtgtggccgagaggaagtacacccaggagcaggccaggaaggagttccagcaggtgttcatccctgagtgcaatgatgatggcacctacagccaggtgcagtgccacagctacacaggctactgctggtgtgtgaccccaaatggccggcccatcagcggcacagctgtggcccacaagaccccccgctgccccggctctgtgaatgagaagctgccccagcgggagggcaccgggaagacagatgatgctgctgccccagccctggagacccagccccagggagatgaagaagatattgccagccgctaccccaccctgtggacagagcaggtgaagagccggcagaacaagaccaacaagaacagcgtgagcagctgtgaccaggagcaccagagcgccctggaggaggccaagcagcccaagaatgacaacgtggtgatcccagaatgtgcccacggcggcctgtacaagcctgtgcagtgccaccccagcacaggctactgctggtgtgtgctggtggacaccggccggcccatccctggcaccagcaccaggtatgagcagcccaagtgtgacaacacagcccgggcccacccagccaaggcccgggacctgtacaagggccggcagctgcagggctgccctggggccaagaagcatgagttcctgacctctgtgctggatgccctgagcacagacatggtgcatgctgccagtgaccccagcagcagcagcggccgcctgtctgagccagaccccagccacaccctggaggagcgggtggtgcactggtacttcaagctgctggacaagaacagcagcggggacatcggcaagaaggagatcaagcccttcaagcgcttcctgaggaagaagagcaagcccaagaagtgtgtgaagaagtttgtggagtactgtgatgtgaacaatgacaagagcatctctgtgcaggagctgatgggctgcctgggcgtggccaaggaggatggcaaggctgacaccaagaagaggcacaccccccggggccacgccgagagcaccagcaaccggcaggagaaccccaggaaggagggctag

SEQ ID NO: 64881 - DNA, 1341 bp, Artificial Sequence
  derived and/or modified sequence
atgctgctgccccagctgtgctggctgcccctgctggccggcctgctccccccagttcctgctcagaaattctccgccctgacatttcttcgcgtggaccaggataaagacaaggattgcagcctagattgtgccggcagcccccagaaaccactgtgtgccagcgatgggagaacttttctgtccaggtgcgaattccagagggcaaagtgtaaagatccacagctggaaattgcatatcggggcaactgtaaagacgtgtccaggtgtgtggccgagcgtaagtacacccaggagcaggcgcggaaggagtttcagcaagtgttcattcccgagtgtaacgacgatggaacctactcacaggttcagtgtcattcatatactggctattgctggtgcgtcacgccaaacggtcggcctattagcgggaccgcagttgctcataagacaccgaggtgccctggctctgtgaacgaaaagctgcctcagcgtgaagggaccggcaagaccgatgacgccgccgcccccgcccttgaaacgcagccccagggcgatgaagaggatattgcctctcggtacccaaccctgtggacagaacaggtcaagagtcggcagaacaagacaaataaaaattcagtgtccagctgcgaccaggagcatcagtcagccctggaggaggctaagcaaccaaagaacgataatgtcgtgattcccgagtgcgcccacggcggactctacaaaccggtccagtgtcacccttctactggctattgttggtgcgtcttggtcgatacaggccgacccattcccggtaccagcacaagatatgaacaaccgaagtgtgataacactgcccgggcccaccccgcaaaagcccgggatttgtacaagggacggcagctgcagggctgcccaggtgccaaaaagcacgaatttctgacatctgttctagacgccctctcaacagatatggtacacgccgcctccgacccgagcagtagctccggacgcctgagtgaaccagatccgagccataccctggaagagcgtgtagtacactggtacttcaagctattggacaaaaactcaagcggcgacatcggcaagaaggaaataaagccctttaaacgctttctgcgaaaaaagtctaagccaaagaaatgcgtaaagaaattcgttgagtactgcgacgtcaataatgataaatccatctccgtacaagagctcatggggtgcctgggagtggccaaggaggatggaaaagcggacacgaagaagagacatactcctaggggacacgcagagagtacttctaatcggcagcccaggaagcaggggtag

SEQ ID NO: 64882 - DNA, 1347 bp, Artificial Sequence
  derived and/or modified sequence
atgctgctgccccagctgtgctggctgcccctgctggccggcctgctgcctccggtccccgctcagaagttctctgcgctcacttttcttcgagtggatcaggataaggataaagactgcagcttagactgcgccggaagtccccagaagcccttgtgcgcgtcagacgggagaaccttcctgtcccgctgcgaatttcagcgagccaaatgtaaggaccctcaattagagattgcctatagaggaaactgtaaggatgtgtcccggtgcgtcgcggagcgcaagtacacacaagagcaggcgcgcaaggaattccagcaggtgttcatccctgaatgcaatgatgatggtacatatagccaggttcagtgtcacagttacacaggttactgctggtgtgttactcctaacggccgacctatttcaggcactgcagtggctcacaagaccccacggtgtcccggaagcgttaatgaaaagctgccacaaagggagggcactggcaagaccgacgatgccgccgctcccgcactcgagactcagcctcagggcgacgaagaggacattgcttcccggtatccaacgctttggaccgaacaggtgaaaagccgacagaacaaaaccaacaagaactctgtctctagctgcgaccaggaacaccaatctgccctagaggaggctaaacagccgaagaatgataatgtggtgattcccgagtgcgcgcacggcggcctttacaagccggttcaatgtcatccatctacagggtattgttggtgcgtcttggtggatactgggcggccaatcccaggtacaagcacacgctacgaacagccaaaatgtgacaacacggcgcgcgctcaccccgccaaagcacgggatctctacaagggcagacagctacaggggtgcccaggggccaaaaaacacgaatttcttactagcgtcctcgacgctttgtcgactgacatggttcatgccgcttctgatcctagctcctcctctggtcgactctccgaaccggacccgtctcatacactcgaagagagggtggtgcactggtacttcaagttgctggataagaattcttccggtgacatcggaaagaaagagattaaacccttcaaaagattcctgaggaagaaatccaagccaaagaaatgtgtgaagaaattcgtggaatattgtgacgtcaataacgacaagtctataagtgtacaggagctgatgggctgtctgggggtggctaaagaggacggaaaggcggataccaaaaaaagacacactcccagagggcatgcagagtcaacctctaaccgccaggagaacccccggaaggagggctag

SEQ ID NO: 64883 - DNA, 1341 bp, Artificial Sequence
  derived and/or modified sequence
atgctccttccccaactgtgttggttacccctccttgcgggtttactaccaccagtaccagcccagaagttttccgctttaacatttctccgcgtagaccaggacaaagacaaggattgcagtttagactgtgctggaagcccccagaaacctctgtgcgcatctgacggaaggaccttcctgagccgttgcgaatttcagcgggctaagtgtaaggatccgcagctggagatcgcctacagaggtaattgtaaggatgtctctcgttgcgtggctgaacggaagtatacacaggagcaagctagaaaggagttccagcaggtgtttataccagaatgtaacgacgacggcacatactctcaggtgcagtgccacagttacactggctattgttggtgcgtcactcctaacggccgaccaatcagcggaacagctgtcgcacacaagacgccgcgttgcccagggtcagtcaacgaaaagctgccacaaagggaagggaccgggaagactgatgacgcagcagccccagccctggaaacccagcctcagggggacgaagaggatatagcatccaggtacccaactttatggacagagcaggtaaagagtcgacagaacaagacaaataagaattctgtatcatcttgcgaccaggagcaccagtctgctttggaggaagctaaacagcccaaaaacgataatgtggtcattcctgaatgtgcgcacgggggactctacaagccggtgcagtgtcacccaagtactggctactgctggtgcgtcttggtagataccggacggcctattcctggcactagcacccgctacgagcagcctaaatgtgacaatactgcaagagcgcatccagctaaagccagggacctgtataagggaagacagttgcaaggctgtccaggggctaaaaagcacgaatttctcacgagcgtgttagacgccctgtctactgatatggttcatgcagccagtgacccgtcctcctcaagtgggagactgtccgaacccgatccttctcatacactcgaagagcgtgtcgtccattggtactttaagctgctcgacaagaactcctctggcgacattggcaaaaaggaaatcaagccattcaagagattcctgcggaaaaagtctaagccaaaaaaatgtgtgaaaaaatttgtcgagtactgcgacgtgaacaatgacaaatccatttctgtgcaagagcttatgggctgcctcggagtcgccaaggaggacggcaaggcggacactaagaagcgacacacacctagaggccacgccgaatctacatcaaatcgtcagcctcggaagcagggctag

SEQ ID NO: 64884 - DNA, 1347 bp, Artificial Sequence
  derived and/or modified sequence
atgctcctcccgcaattgtgttggctgccgctgctggcgggtcttctccctccagtacctgcacagaaattttcggccctgacctttctgagagttgaccaggacaaagacaaggactgctctctcgactgtgctggcagccctcagaagcctctttgcgcatccgacgggaggaccttcctctctcggtgtgaattccagcgcgctaaatgtaaggacccccagctggaaattgcctataggggtaattgtaaagatgtgagtagatgtgtcgccgagaggaaatatacacaggagcaggccagaaaagagttccaacaggtgttcattcctgagtgtaatgacgacggaacctattcacaggtgcagtgtcattcctatactggttactgttggtgtgttacacccaatgggagaccaataagcggcactgccgtggcccacaaaacccctcgttgtcccggttcagtgaatgaaaagttgccccaaagagagggaacgggcaaaactgacgacgctgctgcccctgctttagaaacccagcctcaaggtgatgaggaagatatcgcatcccggtaccctacactctggacagagcaggtgaaatctcggcaaaacaagacgaacaaaaactctgttagttcgtgcgaccaggaacatcagagtgcccttgaggaggccaaacagcccaaaaatgacaacgttgtaataccggagtgcgctcacggcggactgtataagcctgtacagtgtcacccttccactggctattgctggtgcgtccttgtggatacaggcaggccaatccctggaacctccactaggtacgaacagcctaagtgtgataataccgcccgagcacatccagccaaggcgcgagacctctacaaggggagacagctccagggctgccctggggctaagaaacacgagttcctcacatcagtgctggacgcgttgagtactgatatggtgcatgcggcttccgaccccagtagctcttccggacgacttagcgagcctgatcccagccataccctggaggaaagagtggtacattggtacttcaagttgctggacaaaaactccagcggcgatatcggcaagaaagaaattaaaccgtttaagcgcttcctcagaaagaaaagcaagccaaagaagtgcgttaaaaagttcgtagaatactgtgacgtcaacaatgacaaaagcatcagtgtacaggagctgatgggctgcctgggggtggccaaggaagatggcaaggcagacactaaaaagcgtcatacccccagggggcacgccgaatcaacaagcaatcgacaggagaatccacgaaaggagggctag

SEQ ID NO: 64885 - DNA, 3117 bp, Artificial Sequence
  derived and/or modified sequence
gggtatttgacaggagcgagggcggacgcaaagaacgcggaggacctctgggtgcctgcaggggagctgctccagccgggccgccgggagcggtggggagagcatcgcggagccgcccctccacgcgcccgcccagccgcgctcgcccactgggctctcccggctgcagtgccagggcgcaggacgcggccgatctcccgctcccgccacctccgccaccatgctgctcccccagctctgctggctgccgctgctcgctgggctgctcccgccggtgcccgctcagaagttctcggcgctcacgtttttgagagtggatcaagataaagacaaggattgtagcttggactgtgcgggttcgccccagaaacctctctgcgcatctgacggaaggaccttcctttcccgttgtgaatttcaacgtgccaagtgcaaagatccccagctagagattgcatatcgaggaaactgcaaagacgtgtccaggtgtgtggccgaaaggaagtatacccaggagcaagcccggaaggagtttcagcaagtgttcattcctgagtgcaatgacgacggcacctacagtcaggtccagtgtcacagctacacgggatactgctggtgcgtcacgcccaacgggaggcccatcagcggcactgccgtggcccacaagacgccccggtgcccgggttccgtaaatgaaaagttaccccaacgcgaaggcacaggaaaaacagatgatgccgcagctccagcgttggagactcagcctcaaggagatgaagaagatattgcatcacgttaccctaccctttggactgaacaggttaaaagtcggcagaacaaaaccaataagaattcagtgtcatcctgtgaccaagagcaccagtctgccctggaggaagccaagcagcccaagaacgacaatgtggtgatccctgagtgtgcgcacggcggcctctacaagccagtgcagtgccacccctccacggggtactgctggtgcgtcctggtggacacggggcgccccattcccggcacatccacaaggtacgagcagccgaaatgtgacaacacggccagggcccacccagccaaagcccgggacctgtacaagggccgccagctacaaggttgtccgggtgccaaaaagcatgagtttctgaccagcgttctggacgcgctgtccacggacatggtccacgccgcctccgacccctcctcctcgtcaggcaggctctcagaacccgaccccagccataccctagaggagcgggtggtgcactggtacttcaaactactggataaaaactccagtggagacatcggcaaaaaggaaatcaaacccttcaagaggttccttcgcaaaaaatcaaagcccaaaaaatgtgtgaagaagtttgttgaatactgtgacgtgaataatgacaaatccatctccgtacaagaactgatgggctgcctgggcgtggcgaaagaggacggcaaagcggacaccaagaaacgccacacccccagaggtcatgctgaaagtacgtctaatagacagccaaggaaacaaggataaatggctcataccccgaaggcagttcctagacacatgggaaatttccctcaccaaagagcaattaagaaaacaaaaacagaaacacatagtatttgcactttgtactttaaatgtaaattcactttgtagaaatgagctatttaaacagactgttttaatctgtgaaaatggagagctggcttcagaaaattaatcacatacaatgtatgtgtcctcttttgaccttggaaatctgtatgtggtggagaagtatttgaatgcatttaggcttaatttcttcgccttccacatgttaacagtagagctctatgcactccggctgcaatcgtatggctttctctaacccctgcagtcacttccagatgcctgtgcttacagcattgtggaatcatgttggaagctccacatgtccatggaagtttgtgatgtacggccgaccctacaggcagttaacatgcatgggctggtttgtttcttgggattttctgttagtttgtcttgttttgctttccagagatcttgctcatacaatgaatcacgcaaccactaaagctatccagttaagtgcaggtagttcccctggaggaaataatattttcaaactgtcgttggtgtgatactttggctcaaaggatctttgcttttccattttaagcttctgttttgagttttgccctggggcttgaatgagtcccagagagtcgttcggatggtgggaggctgcctaggaggcagtaaatccagtcacagtgcctgggaggggcccatccttccaaaatgtaaatccagtcgcggtgtgaccgagctggctaacaggcttgtctgcctggttttcctcctacacgtggacattattctcctgatcctcctacctggtccaccccagggctaccggaaggtaaaatcttcacctgaaccaattatgagcagtctccttactgaaggtacagccggatacgtggtgcccccggggctggtgttggcagccggggggaggtgcctgagggtccccacggttcctttctgcttttctgaatgcatcaagggtacgagaacttgccaatgggaaattcatccgagtggcactggcagagaaggataggagtggaatgcccacacagtgaccaacagaactggtctgcgtgcataaccagctgccaccctcaggcctgggccccagagctcagggcacccagtgtcttaaggaaccatttggaggacagtctgagagcaggaacttcaagctgtgattctatctcggctcagacttttggttggaaaaagatcttcatggccccaaatcccctgagacatgccttgtagaatgattttgtgatgttgtgatgcttgtggagcatcgcgtaaggcttcttgcttatttaaactgtgcaaggtaaaaatcaagcctttggagccacagaaccagctcaagtacatgccaatgttgtttaagaaacagttatgatcctaaactttttggataatcttttatatttctgacctttgaatttaatcattgttcttagattaaaataaaatatgctattgaaactata

SEQ ID NO: 64886 - DNA, 1564 bp, Artificial Sequence
  derived and/or modified sequence
gggtatttgacaggagcgagggcggacgcaaagaacgcggaggacctctgggtgcctgcaggggagctgctccagccgggccgccgggagcggtggggagagcatcgcggagccgcccctccacgcgcccgcccagccgcgctcgcccactgggctctcccggctgcagtgccagggcgcaggacgcggccgatctcccgctcccgccacctccgccaccatgctgctcccccagctctgctggctgccgctgctcgctgggctgctcccgccggtgcccgctcagaagttctcggcgctcacgtttttgagagtggatcaagataaagacaaggattgtagcttggactgtgcgggttcgccccagaaacctctctgcgcatctgacggaaggaccttcctttcccgttgtgaatttcaacgtgccaagtgcaaagatccccagctagagattgcatatcgaggaaactgcaaagacgtgtccaggtgtgtggccgaaaggaagtatacccaggagcaagcccggaaggagtttcagcaagtgttcattcctgagtgcaatgacgacggcacctacagtcaggtccagtgtcacagctacacgggatactgctggtgcgtcacgcccaacgggaggcccatcagcggcactgccgtggcccacaagacgccccggtgcccgggttccgtaaatgaaaagttaccccaacgcgaaggcacaggaaaaacagatgatgccgcagctccagcgttggagactcagcctcaaggagatgaagaagatattgcatcacgttaccctaccctttggactgaacaggttaaaagtcggcagaacaaaaccaataagaattcagtgtcatcctgtgaccaagagcaccagtctgccctggaggaagccaagcagcccaagaacgacaatgtggtgatccctgagtgtgcgcacggcggcctctacaagccagtgcagtgccacccctccacggggtactgctggtgcgtcctggtggacacggggcgccccattcccggcacatccacaaggtacgagcagccgaaatgtgacaacacggccagggcccacccagccaaagcccgggacctgtacaagggccgccagctacaaggttgtccgggtgccaaaaagcatgagtttctgaccagcgttctggacgcgctgtccacggacatggtccacgccgcctccgacccctcctcctcgtcaggcaggctctcagaacccgaccccagccataccctagaggagcgggtggtgcactggtacttcaaactactggataaaaactccagtggagacatcggcaaaaaggaaatcaaacccttcaagaggttccttcgcaaaaaatcaaagcccaaaaaatgtgtgaagaagtttgttgaatactgtgacgtgaataatgacaaatccatctccgtacaagaactgatgggctgcctgggcgtggcgaaagaggacggcaaagcggacaccaagaaacgccacacccccagaggtcatgctgaaagtacgtctaatagacaggaaaatccaagaaaagaaggg

SEQ ID NO: 64887 - DNA, 1884 bp, Artificial Sequence
  derived and/or modified sequence
atggctttcgggggtggattggaactggcgcttggttgccactaccgaatcgcacatgccgaagcccaggtcggcctgccggaggtgaccctcggtctcctgcccggcgctagagggactcagctgctcccccggctcacaggcgtccccgcggccctcgatctgatcacctctgggcgaagaattctggctgacgaggccctcaagttagggattcttgacaaggttgtcaatagcgacccagttgaggaggcaatccggtttgctcagcgggtttccgaccagccattggaaagccgccggttatgtaacaaacccatccaatctctgcctaacatggattctatcttctctgaagcactgttgaagatgcgcagacagcatcctggctgccttgcacaggaggcctgcgtgagagcagtacaagccgccgtccagtatccatacgaggtcggaatcaagaaagaggaggaactgtttttgtacctcctgcagtccggccaggcacgagcccttcagtacgcgttctttgcagaaaggaaagctaataagtggtcaacaccgtccggggcgtcatggaagaccgctagtgctcgacccgtgagttctgttggggtagttggcctgggcaccatgggaagagggatcgtgatatcatttgctagagccagaattcccgtcatcgctgtggactccgataaaaaccagctcgccacggccaacaagatgataacttcagttctggagaaagaagcatctaagatgcagcagtctggtcacccctggagcgggcccaagccccgattaacttctagtgtgaaggagttggggggagtcgatctagtaattgaggctgttttcgaggaaatgtctctgaagaagcaagtctttgccgagctgtctgccgtctgcaaaccagaggcatttctctgtacaaatactagtgctttagatgttgacgaaatcgcctctagcacagatcgaccccacttggtaatcgggacacactttttctcaccggcacacgtgatgaagctcttagaagttatccctagtcagtactcctcaccaaccaccatcgcaactgtgatgaatctctctaagaagattaagaagatcggtgttgtggttggtaactgtttcggctttgttggaaaccgaatgctgaacccatattacaatcaagcttactttctgctggaagagggctccaagcccgaggaggtggatcaggtgctcgaagaattcggttttaaaatgggtccattccgggtgagcgacctggcgggcctagatgtggggtggaagtcacggaagggtcaaggactgaccgggccaactctgctcccggggacccctgcccgcaaacggggtaatcggcgctattgcccaatccctgacgttctgtgcgaactaggcagattcggccagaaaactgggaagggctggtaccaatacgacaaacccctgggacgcattcacaagcctgacccctggctgtctaaattcttgtctcgctatcggaaaacccatcatatagagcctcggacaatatctcaagacgaaatcttggagagatgcctctacagcctgatcaatgaagcttttcgcatcctcggcgagggaattgcagctagtcccgaacatatcgatgttgtctatcttcatggctatgggtggccccggcacaagggtggcccaatgttctatgcaagcacggtggggctccctaccgtgctggagaagcttcaaaagtattaccgccaaaaccccgacatcccacaacttgagcctagcgattatctaaagaagcttgcttcacagggcaaccctccattgaaggagtggcagtctcttgctggctcaccttcatcaaaactgtag

SEQ ID NO: 64888 - DNA, 1884 bp, Artificial Sequence
  derived and/or modified sequence
atggcctttggaggcggcctggagctggccctgggctgccactacagaattgcccacgccgaggcccaggtgggcctgcctgaggtgaccctgggcctgctgcccggggcccggggcacccagctgctgccccggctgactggagtgcctgctgccctggacctgatcaccagcggccgccgcatcctggctgatgaggccctgaagctgggcatcctggacaaggtggtgaacagcgaccctgtggaggaggccatccgctttgcccagagggtgtctgaccagcccctggagagccggcggctgtgcaacaagcccatccagagcctgcccaacatggacagcatcttcagcgaggccctgctgaagatgaggcggcagcaccctggctgcctggcccaggaggcctgtgtgcgggctgtgcaggccgctgtgcagtacccctatgaggtgggcatcaagaaggaggaggagctgttcctgtacctgctgcagagcggccaggcccgggccctgcagtatgccttctttgctgagaggaaggccaacaagtggagcaccccatctggggcctcctggaagacagccagcgcccggcctgtgtcctctgtgggcgtggtgggcctgggcaccatgggccggggcatcgtcatcagctttgcccgggcccgcatccctgtgattgctgtggacagcgacaagaaccagctggccacagccaacaagatgatcacctctgtgctggagaaggaggccagcaagatgcagcagagcggccacccctggagcggccccaagccccggctgaccagctctgtgaaggagctgggcggcgtggacctggtgattgaagctgtgtttgaggagatgagcctgaagaagcaggtgtttgctgagctgtctgctgtgtgcaagccagaggccttcctgtgcaccaacaccagcgccctggatgtggatgagatcgccagcagcacagaccggccccacctggtgattggcacccacttcttcagccctgcccacgtgatgaagctgctggaggtgatccccagccagtacagcagccccaccaccatcgccaccgtgatgaacctgagcaagaagatcaagaagattggagtggtggtgggcaactgctttggatttgtgggcaacaggatgctgaacccctactacaaccaggcctacttcctgctggaggagggcagcaagccagaggaggtggaccaggtgctggaggagtttggcttcaagatgggccccttccgggtgtctgacctggccggcctggatgtgggctggaagagcaggaagggccagggcctgaccggccccaccctgctgcccggcaccccagccaggaagaggggcaacagacgctactgccccatcccagatgtgctgtgtgagctgggccgcttcggccagaagacaggcaagggctggtaccagtatgacaagcccctgggccgcatccacaagccagacccctggctgagcaagttcctgagccgctacaggaagacccaccacatcgagcccaggaccatcagccaggatgagatcctggagcgctgcctgtacagcctcatcaatgaggccttccgcatcctgggggagggcattgctgccagccctgagcacattgatgtggtgtacctgcacggctacggctggcccaggcacaagggcggccccatgttctacgccagcacagtgggcctgcccaccgtgctggagaagctgcagaagtactaccggcagaacccagacatcccccagctggagcccagcgactacctgaagaagctggccagccagggcaacccccccctgaaggagtggcagagcctggccggcagccccagcagcaagctgtag

SEQ ID NO: 64889 - DNA, 1884 bp, Artificial Sequence
  derived and/or modified sequence
atggccttcggcggcggcctggagctggccctgggctgccactacagaattgcacacgcagaggcccaagtgggcttaccagaggttactctgggccttctccctggagcacgaggcacccaactgctgccccgcctcacaggggtgccagccgccttagatctgattacttctgggcgtcgcattctggctgatgaggcgctgaagctgggaattctggataaggtcgtcaattcagatccggtagaagaggccatcagatttgcacagagagtctccgaccaacctcttgaatcaaggcgtctgtgtaacaaacctattcagtctctgcctaatatggactcaatcttttccgaagccttgctcaagatgagacggcagcatcctggatgtctggctcaggaggcatgtgtgcgagccgttcaagccgccgtccagtacccatatgaggtgggtattaaaaaagaagaagaactttttctctacctgttgcagtctggccaggcaagggccctccagtacgcgtttttcgcagagaggaaagctaataagtggtccacaccatccggggccagttggaaaacagcttcagcgaggcctgtgtcaagcgtgggcgtggttggcctgggcactatgggacgcggtattgtcatctctttcgctcgcgctcggatccccgtcatcgctgtagactctgataagaatcaactcgcgaccgcaaacaagatgatcacctctgttttagaaaaggaagcttctaagatgcaacagagcggccatccctggagcgggcccaaacctcgcctgaccagttcagtaaaggagctcggcggtgtcgacttagtgatcgaggctgttttcgaggagatgagcctgaagaagcaagtttttgccgagttgtccgccgtttgcaaacccgaggccttcctatgtaccaatacaagtgccctggatgtagatgagattgccagctctaccgaccggcctcatcttgtgatcggcacacattttttctcccccgcccatgtcatgaaattactagaggtgattccatcccagtattcgtcccctactaccatcgcgaccgtgatgaacttgagtaagaagattaagaagattggtgtggtggtaggaaattgcttcggatttgtcggcaacaggatgttgaacccctattacaatcaggcttattttctgctcgaagagggtagtaaacctgaggaggtcgatcaagtgctcgaggaatttggatttaagatggggcctttccgagtcagtgatctggcgggattggacgtgggctggaaatccaggaaggggcagggactgaccggtcccacacttctgccggggaccccagccaggaaacgcgggaacaggaggtactgtcccattcctgacgtcctgtgtgagcttggacggttcggacagaagacaggcaaaggctggtaccagtacgataaacctcttggccggattcataagcccgatccttggctgagcaagtttttgtcgcgttatcggaagactcatcacattgaaccaagaactatctcacaggatgaaatccttgaaaggtgcttatacagtctcatcaatgaagcctttaggattttaggggagggtatcgcagcctctcctgaacacatagatgttgtctatctacatgggtacggctggcctagacacaagggcgggcccatgttctacgcctctacagtcggcttgcctacagttctggagaaattgcaaaaatattatcgccagaatcctgacattccacaacttgagccatcagactatctgaaaaagcttgctagtcaaggcaaccctccactcaaggagtggcagagcctggccggaagcccatcctcgaagctttag

SEQ ID NO: 64890 - DNA, 1884 bp, Artificial Sequence
  derived and/or modified sequence
atggcgtttggtggcggtctggagctggctcttggatgccactacaggatagctcacgctgaagctcaggtgggattgcctgaagtgacattagggctgcttcccggtgcccgaggtactcagctactgccacgcctcaccggcgtgcctgcggctctggatctcataacatcaggtagacgcatcttggccgacgaggcattaaagctggggatcttggacaaggtagtgaattcggacccagttgaggaggctatccggttcgcccagagggtgagcgatcagcctttggagtcccggagactgtgtaataaaccaatccaatcgctgcctaacatggattccatcttttctgaggctctcttgaaaatgcgtcgtcagcacccgggatgcttggctcaggaggcgtgtgttcgggcagtacaggccgctgtgcagtatccttacgaggtggggattaaaaaagaggaagagctctttctgtacctactgcagagcgggcaggcaagagcactgcagtatgcctttttcgccgagagaaaagctaataaatggtccaccccgtcgggagcctcatggaagacggcctctgcgagaccagtatcctcagtgggtgtggtcgggctgggaacaatgggcaggggtattgtaatttcgttcgctcgggctcgcattcctgtgatcgctgtcgatagcgataaaaatcagctggcgactgcaaataagatgattacaagtgtgcttgaaaaggaagcctcgaagatgcagcagagcggccacccctggtccgggcctaagcctcggttgacatccagtgtcaaagaacttgggggagtagatttggtgatcgaggcagtgttcgaggagatgtcactgaagaaacaggtgttcgcagagctcagtgcagtatgcaaacccgaagcattcttgtgtactaatacaagtgctctcgatgtggacgagatcgccagctctaccgatcgtcctcatcttgtgataggaacacacttcttcagccccgctcatgtcatgaagcttttagaagtcatccccagccaatattccagccccactacaatagccaccgtaatgaacttgtctaaaaaaattaaaaaaattggggtagtcgtgggaaattgctttggttttgtcggaaaccgaatgctcaatccctattacaatcaagcctacttccttctcgaggaaggctcaaaacccgaggaggtagaccaggtgctagaagaatttgggtttaaaatgggcccattccgagtgagcgacctggctggcctggatgtgggatggaaatcgcgtaagggccaaggtctgaccggaccgacactgctgcctgggaccccagctcgcaagcgcggaaatcggaggtattgtcctattcctgacgtgttatgcgagcttggcaggttcggccaaaaaaccgggaagggctggtaccaatacgacaagcccctggggagaattcacaaacccgacccatggctgagcaagttcttgagtcgatatagaaagacccatcacatcgagcccaggaccatcagtcaggacgaaatcctggaacgctgcctttacagcctaatcaatgaggctttcagaatcctgggggaggggattgcggctagtccagagcatatagatgtggtgtacctgcacggctacggttggcctaggcacaaggggggtcctatgttttacgcaagcacggtcggcctccccactgtcttggagaaactacagaagtattaccgccagaacccagatattccgcagctggagccttctgattacctcaagaaacttgccagccagggcaatcctccactgaaagagtggcagtccctagctggcagtccttcctctaaactatag

SEQ ID NO: 64891 - DNA, 1884 bp, Artificial Sequence
  derived and/or modified sequence
atggccttcggcggcggcctggagctggccctgggctgccactacagaatcgcccacgccgaggcccaggtgggcctgcccgaggtgaccctgggcctgctgcccggcgccagaggcacccagctgctgcccagactgaccggcgtgcccgccgccctggacctgatcaccagcggcagaagaatcctggccgacgaggccctgaagctgggcatcctggacaaggtggtgaacagcgaccccgtggaggaggccatcagattcgcccagagagtgagcgaccagcccctggagagcagaagactgtgcaacaagcccatccagagcctgcccaacatggacagcatcttcagcgaggccctgctgaagatgagaagacagcaccccggctgcctggcccaggaggcctgcgtgagagccgtgcaggccgccgtgcagtacccctacgaggtgggcatcaagaaggaggaggagctgttcctgtacctgctgcagagcggccaggccagagccctgcagtacgccttcttcgccgagagaaaggccaacaagtggagcacccccagcggcgccagctggaagaccgccagcgccagacccgtgagcagcgtgggcgtggtgggcctgggcaccatgggcagaggcatcgtgatcagcttcgccagagccagaatccccgtgatcgccgtggacagcgacaagaaccagctggccaccgccaacaagatgatcaccagcgtgctggagaaggaggccagcaagatgcagcagagcggccacccctggagcggccccaagcccagactgaccagcagcgtgaaggagctgggcggcgtggacctggtgatcgaggccgtgttcgaggagatgagcctgaagaagcaggtgttcgccgagctgagcgccgtgtgcaagcccgaggccttcctgtgcaccaacaccagcgccctggacgtggacgagatcgccagcagcaccgacagaccccacctggtgatcggcacccacttcttcagccccgcccacgtgatgaagctgctggaggtgatccccagccagtacagcagccccaccaccatcgccaccgtgatgaacctgagcaagaagatcaagaagatcggcgtggtggtgggcaactgcttcggcttcgtgggcaacagaatgctgaacccctactacaaccaggcctacttcctgctggaggagggcagcaagcccgaggaggtggaccaggtgctggaggagttcggcttcaagatgggccccttcagagtgagcgacctggccggcctggacgtgggctggaagagcagaaagggccagggcctgaccggccccaccctgctgcccggcacccccgccagaaagagaggcaacagaagatactgccccatccccgacgtgctgtgcgagctgggcagattcggccagaagaccggcaagggctggtaccagtacgacaagcccctgggcagaatccacaagcccgacccctggctgagcaagttcctgagcagatacagaaagacccaccacatcgagcccagaaccatcagccaggacgagatcctggagagatgcctgtacagcctgatcaacgaggccttcagaatcctgggcgagggcatcgccgccagccccgagcacatcgacgtggtgtacctgcacggctacggctggcccagacacaagggcggccccatgttctacgccagcaccgtgggcctgcccaccgtgctggagaagctgcagaagtactacagacagaaccccgacatcccccagctggagcccagcgactacctgaagaagctggccagccagggcaacccccccctgaaggagtggcagagcctggccggcagccccagcagcaagctgtag

SEQ ID NO: 64892 - protein, 286 aa, Artificial Sequence
  derived and/or modified sequence
MEEPEEPADSGQSLVPVYIYSPEYVSMCDSLAKIPKRASMVHSLIEAYALHKQMRDEASGFCYLNDAVLGILRLRRKFERILYVDLDLHHGDGVEDAFSFTSKVMTVSLHKFSPGFFPGTGDVSDVGLGKGRYYSVNVPIQDGIQDEKYYQICESVLKEVYQAFNPKAVVLQLGADTIAGDPMCSFNMTPVGIGKCLKYILQWQLATLILGGGGYNLANTARCWTYLTGVILGKTLSSEIPDHEFFTAYGPDYVLEITPSCRPDRNEPHRIQQILNYIKGNLKHVV

SEQ ID NO: 64893 - protein, 182 aa, Artificial Sequence
  derived and/or modified sequence
MTVSLHKFSPGFFPGTGDVSDVGLGKGRYYSVNVPIQDGIQDEKYYQICESVLKEVYQAFNPKAVVLQLGADTIAGDPMCSFNMTPVGIGKCLKYILQWQLATLILGGGGYNLANTARCWTYLTGVILGKTLSSEIPDHEFFTAYGPDYVLEITPSCRPDRNEPHRIQQILNYIKGNLKHVV

SEQ ID NO: 64894 - DNA, 861 bp, Artificial Sequence
  derived and/or modified sequence
atggaggagcccgaggagcccgccgacagcggccagagcctggtgcccgtgtacatctacagccccgagtacgtgagcatgtgcgacagcctggccaagatccccaagagagccagcatggtgcacagcctgatcgaggcctacgccctgcacaagcagatgagagacgaggccagcggcttctgctacctgaacgacgccgtgctgggcatcctgagactgagaagaaagttcgagagaatcctgtacgtggacctggacctgcaccacggcgacggcgtggaggacgccttcagcttcaccagcaaggtgatgaccgtgagcctgcacaagttcagccccggcttcttccccggcaccggcgacgtgagcgacgtgggcctgggcaagggcagatactacagcgtgaacgtgcccatccaggacggcatccaggacgagaagtactaccagatctgcgagagcgtgctgaaggaggtgtaccaggccttcaaccccaaggccgtggtgctgcagctgggcgccgacaccatcgccggcgaccccatgtgcagcttcaacatgacccccgtgggcatcggcaagtgcctgaagtacatcctgcagtggcagctggccaccctgatcctgggcggcggcggctacaacctggccaacaccgccagatgctggacctacctgaccggcgtgatcctgggcaagaccctgagcagcgagatccccgaccacgagttcttcaccgcctacggccccgactacgtgctggagatcacccccagctgcagacccgacagaaacgagccccacagaatccagcagatcctgaactacatcaagggcaacctgaagcacgtggtgtag

SEQ ID NO: 64895 - DNA, 549 bp, Artificial Sequence
  derived and/or modified sequence
atgaccgtgagcctgcacaagttcagccccggcttcttccccggcaccggcgacgtgagcgacgtgggcctgggcaagggcagatactacagcgtgaacgtgcccatccaggacggcatccaggacgagaagtactaccagatctgcgagagcgtgctgaaggaggtgtaccaggccttcaaccccaaggccgtggtgctgcagctgggcgccgacaccatcgccggcgaccccatgtgcagcttcaacatgacccccgtgggcatcggcaagtgcctgaagtacatcctgcagtggcagctggccaccctgatcctgggcggcggcggctacaacctggccaacaccgccagatgctggacctacctgaccggcgtgatcctgggcaagaccctgagcagcgagatccccgaccacgagttcttcaccgcctacggccccgactacgtgctggagatcacccccagctgcagacccgacagaaacgagccccacagaatccagcagatcctgaactacatcaagggcaacctgaagcacgtggtgtag

SEQ ID NO: 64896 - DNA, 861 bp, Artificial Sequence
  derived and/or modified sequence
atggaggagcctgaagagcccgccgactcaggtcagtctctggtacctgtgtacatttattccccagagtatgtcagcatgtgcgactctctggcgaaaattccaaagcgtgcctccatggtgcactcccttatcgaagcgtatgctctgcataagcagatgcgggacgaagcttcagggttctgctacctaaacgacgcagtactcggtatactccgactcaggcggaaatttgagcgcatactctatgttgatctggacctgcaccacggagacggagttgaagacgcattttcatttaccagcaaagtcatgaccgtgtccctgcacaaattttcccctggtttttttcctggcacgggggacgtatctgatgtgggccttgggaaaggcagatactactcagtcaatgtgccaattcaggatgggatacaagatgagaaatattatcagatctgtgaaagcgtcctgaaagaagtgtaccaggccttcaatcctaaagccgtggtcctgcagctcggtgccgatacaatcgctggcgacccgatgtgctccttcaacatgacacccgtagggatcgggaaatgcctgaagtatattctgcagtggcagttagctactctaatcctggggggtggcggctacaacctggctaataccgcccgttgttggacctatctgaccggcgtgattttgggtaagactctgtcgtccgaaatccccgatcacgaattttttacagcctacggtccagactatgtactggaaatcactccgtcctgccggcctgatcgcaatgaaccccacaggatccaacagattctgaactatatcaaaggtaatctgaaacatgtagtgtag

SEQ ID NO: 64897 - DNA, 549 bp, Artificial Sequence
  derived and/or modified sequence
atgacagtcagcttgcataagttctccccagggttcttccctgggacaggagacgtgagtgatgttggcctgggcaaaggacggtactattccgtcaatgtgccaattcaggatgggatccaggacgagaagtattatcagatctgtgagagtgtcctgaaagaagtttaccaggcattcaatcccaaagccgtggtgctgcagctgggcgctgatacgatcgcaggagaccccatgtgcagctttaatatgaccccagtgggcatcggcaaatgtctcaaatatattttacagtggcaactggccaccttgatccttggtggaggaggatacaacctggcaaacaccgcacgatgttggacctacctgaccggagtcatactgggaaagacactttcctccgagatcccggatcatgaattcttcaccgcctatggtccggattacgtcctggagatcacaccatcatgcagaccagatcgaaacgaaccccacaggatccagcaaatccttaactatattaagggtaacctaaaacatgtcgtttag

SEQ ID NO: 64898 - DNA, 1740 bp, Artificial Sequence
  derived and/or modified sequence
aaatggccccgtagggcaacaaggatggttagttttgaccctacttatttgtgccataaaaacaatcgatcctaattgacagctatttggacttttacatctgccaaacccttttccttgaactgtggtcactaaatgaggggagtctggtctgggaagtcccatccattccttcaataggatggggagcggtgatagtgtctccggcgatctcaagaataggagggaatgttgaccagggagcaccgctgcggccgatcagaggagcaggaactggaaccctggccgagtccgaaaaaagccagatctggaaggtggctgcggaacggttttaagcggaagatggaggagccggaggaaccggcggacagtgggcagtcgctggtcccggtttatatctatagtcccgagtatgtcagtatgtgtgactccctggccaagatccccaaacgggccagtatggtgcattctttgattgaagcatatgcactgcataagcagatgagagatgaagcatctggtttttgttatctcaatgatgctgtcctgggaatattacgattgcgacggaaatttgagcgtattctctacgtggatttggatctgcaccatggagatggtgtagaagacgcattcagtttcacctccaaagtcatgaccgtgtccctgcacaaattctccccaggatttttcccaggaacaggtgacgtgtctgatgttggcctagggaagggacggtactacagtgtaaatgtgcccattcaggatggcatacaagatgaaaaatattaccagatctgtgaaagtgtactaaaggaagtataccaagcctttaatcccaaagcagtggtcttacagctgggagctgacacaatagctggggatcccatgtgctcctttaacatgactccagtgggaattggcaagtgtcttaagtacatccttcaatggcagttggcaacactcattttgggaggaggaggctataaccttgccaacacggctcgatgctggacatacttgaccggggtcatcctagggaaaacactatcctctgagatcccagatcatgagtttttcacagcatatggtcctgattatgtgctggaaatcacgccaagctgccggccagaccgcaatgagccccaccgaatccaacaaatcctcaactacatcaaagggaatctgaagcatgtggtctagttgacagaaagagatcaggtttccagagctgaggagtggtgcctataatgaagacagcgtgtttatgcaagcagtttgtggaatttgtgactgcagggaaaatttgaaagaaattacttcctgaaaatttccaaggggcatcaagtggcagctggcttcctggggtgaagaggcaggcaccccagagtcctcaactggacctaggggaagaaggagatatcccacatttaaagttcttatttaaaaaaacacacacacacaaatgaaatttttaatctttgaaaattatttttaagcgaattggggaggggagtattttaatcatcttaaatgaaacagatcagaagctggatgagagcagtcaccagtttgtagggcaggaggcagctgacaggcagggtttgggcctcaggaccatccaggtggagccctgggagagagggtactgatcagcagactgggaggtggggagaagtccgctggtgttgttttagtgttatatatctttggtttttttaataaaatctttgaaaacct

SEQ ID NO: 64899 - DNA, 861 bp, Artificial Sequence
  derived and/or modified sequence
atggaggagcctgaggagcctgctgacagcggccagagcctggtgcctgtgtacatctacagcccagaatatgtgtccatgtgtgacagcctggccaagatccccaagagggcctccatggtgcacagcctgattgaggcctatgccctgcacaagcagatgagagatgaggccagcggcttctgctacctgaatgatgctgtgctgggcatcctgcggctgcggaggaagtttgagcgcatcctgtatgtggacctggacctgcaccacggagatggagtggaggatgccttctccttcaccagcaaggtgatgacagtgtccctgcacaagttcagccctggcttcttccctggcactggagatgtgtctgatgtgggcctgggcaagggccgctactacagcgtgaatgtgcccatccaggacggcatccaggatgagaagtactaccagatctgtgagagcgtgctgaaggaggtgtaccaggccttcaaccccaaggctgtggtgctgcagctgggcgctgacaccatcgccggggaccccatgtgcagcttcaacatgacccctgtgggcatcggcaagtgcctgaagtacatcctgcagtggcagctggccaccctcatcctgggcggcggcggctacaacctggccaacacagcccgctgctggacctacctgactggagtcatcctgggcaagaccctgagcagcgagatcccagaccacgagttcttcaccgcctacggccctgactatgtgctggagatcacccccagctgcaggccagacagaaatgagccccaccgcatccagcagatcctgaactacatcaagggcaacctgaagcacgtggtgtag

SEQ ID NO: 64900 - DNA, 549 bp, Artificial Sequence
  derived and/or modified sequence
atgacagtgtccctgcacaagttcagccctggcttcttccctggcactggagatgtgtctgatgtgggcctgggcaagggccgctactacagcgtgaatgtgcccatccaggacggcatccaggatgagaagtactaccagatctgtgagagcgtgctgaaggaggtgtaccaggccttcaaccccaaggctgtggtgctgcagctgggcgctgacaccatcgccggggaccccatgtgcagcttcaacatgacccctgtgggcatcggcaagtgcctgaagtacatcctgcagtggcagctggccaccctcatcctgggcggcggcggctacaacctggccaacacagcccgctgctggacctacctgactggagtcatcctgggcaagaccctgagcagcgagatcccagaccacgagttcttcaccgcctacggccctgactatgtgctggagatcacccccagctgcaggccagacagaaatgagccccaccgcatccagcagatcctgaactacatcaagggcaacctgaagcacgtggtgtag

SEQ ID NO: 64901 - DNA, 861 bp, Artificial Sequence
  derived and/or modified sequence
atggaggagcccgaggagcccgccgacagcggccagagcctggtgcccgtatatatttactctcctgagtacgtgtctatgtgcgacagcctggccaagatccctaagcgcgcatccatggtccacagcctaatcgaagcctatgcactccataagcaaatgcgagatgaagcctctggcttctgttacctgaacgacgccgtgctaggaatcttgcgcctccgtaggaagtttgaacgcatcctgtatgtagacctggacctgcaccacggcgacggcgtagaagatgcctttagcttcaccagcaaggtgatgacagtgtctttacataaatttagcccgggcttttttccaggaaccggagacgtgtccgacgtggggctcggaaagggcagatactactctgtgaacgtccccattcaggacgggatccaagatgagaagtactaccaaatatgcgaaagcgtgctgaaggaagtgtatcaggctttcaatcctaaggccgtggtccttcagttgggggctgataccattgccggagacccaatgtgcagctttaacatgactcccgtggggatcggtaaatgtctgaaatacattctgcagtggcagctggctaccctgatcctcggcggcggagggtacaatctggctaatacagctcgttgctggacatatctgaccggcgtgattttagggaaaacccttagctctgagattcccgaccatgagtttttcaccgcttacgggcccgactatgtgctcgagattacaccgagctgccgtccggatcgtaatgaaccccaccggatccaacaaatactgaactatatcaaaggcaaccttaaacacgtggtgtag

SEQ ID NO: 64902 - DNA, 549 bp, Artificial Sequence
  derived and/or modified sequence
atgaccgtgagcctgcacaagttcagccccggcttcttccccggcaccggcgatgtgtcagacgtgggccttggcaagggacggtattattcagtgaacgttcccattcaagacgggatccaagatgagaaatattatcagatttgtgaatcggtcctgaaagaggtgtatcaggcgttcaatccaaaagccgttgtactgcagctaggcgccgacaccatagcgggcgatcctatgtgtagctttaacatgactccggttggcatagggaagtgcctaaaatatatacttcagtggcaactggctacactcattctgggcggcggcggatacaacctggctaataccgcaagatgctggacctatcttactggggtgattctcggaaagacattaagctcagaaatcccagaccatgagttctttactgcttacggacctgattacgtgttggaaattacccccagctgccgccccgatagaaacgagccgcaccgcatccaacaaattctgaactacatcaagggtaaccttaaacacgtcgtgtag

SEQ ID NO: 64903 - DNA, 861 bp, Artificial Sequence
  derived and/or modified sequence
atggaggaaccggaggagcccgcagattctgggcagtctcttgtccctgtgtatatatattctccagaatatgtgtctatgtgtgactctcttgccaagataccaaaaagggcttcgatggtacacagtctgatcgaggcttatgctctgcataaacagatgagggatgaggccagcggattctgctaccttaacgatgccgtcctcggtatactgaggctgcgacgtaaatttgaacggattctatatgtcgatttggatcttcaccatggcgacggagtggaagatgctttttcatttacatccaaggtcatgacagtctccctgcataaattcagtccgggattttttccaggcactggcgacgtctcagatgtgggattgggaaaaggcaggtactactccgtgaacgtgccaattcaagacggaatccaagatgagaaatactatcagatctgcgagagcgtactgaaagaggtgtatcaagcctttaaccctaaagcagttgtgctgcagctgggagccgacacaattgctggcgaccccatgtgttcctttaatatgacccctgtgggaatcgggaagtgtctaaagtatatcctccagtggcagctcgcaacgctcattctcggtgggggaggctataacttagctaacactgcaagatgctggacatatctgaccggggttatccttggcaaaacgctctcctctgagattcccgaccacgaattttttacggcgtacgggccagattatgtgctggagattaccccttcctgtcgcccagatagaaacgagccccacagaattcagcagatcctaaactacattaagggcaatcttaagcacgttgtgtag

SEQ ID NO: 64904 - DNA, 549 bp, Artificial Sequence
  derived and/or modified sequence
atgaccgtatcactgcacaaatttagccctggctttttccccggaactggcgacgtgtcggacgtgggactaggaaaaggcaggtattactccgttaacgtcccaatacaggatggtattcaggatgagaagtactatcagatatgtgagagcgttttgaaagaagtgtatcaagcattcaacccaaaggcagtggtcctccagctgggcgcagataccatcgccggtgatcctatgtgttcattcaacatgacccccgttggaatcgggaagtgccttaaatacattttacaatggcaattagccaccttgatcctgggcggaggaggatacaatctggcaaacaccgcacgatgttggacctacttgacgggcgtcatcctgggaaaaactctcagcagtgagattcccgatcacgagttcttcaccgcttacggcccagattacgtccttgagattaccccttcctgtcggcctgacaggaatgaacctcaccgcatccaacagatcttgaactacatcaagggcaacctgaagcatgtggtgtag

SEQ ID NO: 64905 - protein, 256 aa, Artificial Sequence
  derived and/or modified sequence
MEEPEEPADSGQSLVPVYIYSPEYVSMCDSLAKIPKRASMVHSLIEAYALHKQMRIVKPKVASMEEMATFHTDAYLQHLQKVSQEGDDDHPDSIEYGLGYDCPATEGIFDYAAAIGGATITAAQCLIDGMCKVAINWSGGWHHAKKDEASGFCYLNDAVLGILRLRRKFERILYVDLDLHHGDGVEDAFSFTSKVMTVSLHKFSPGFFPGTGDVSDVGLGKGRYYSVNVPIQDGIQDEKYYQICERYEPPAPNPGL

SEQ ID NO: 64906 - DNA, 819 bp, Artificial Sequence
  derived and/or modified sequence
atggaggagcccgaggagcccgccgacagcggccagagcctggtgcccgtgtacatctacagccccgagtacgtgagcatgtgcgacagcctggccaagatccccaagagagccagcatggtgcacagcctgatcgaggcctacgccctgcacaagcagatgagaatcgtgaagcccaaggtggccagcatggaggagatggccaccttccacaccgacgcctacctgcagcacctgcagaaggtgagccaggagggcgacgacgaccaccccgacagcatcgagtacggcctgggctacgactgccccgccaccgagggcatcttcgactacgccgccgccatcggcggcgccaccatcaccgccgcccagtgcctgatcgacggcatgtgcaaggtggccatcaactggagcggcggctggcaccacgccaagaaggacgaggccagcggcttctgctacctgaacgacgccgtgctgggcatcctgagactgagaagaaagttcgagagaatcctgtacgtggacctggacctgcaccacggcgacggcgtggaggacgccttcagcttcaccagcaaggtgatgaccgtgagcctgcacaagttcagccccggcttcttccccggcaagagcgacgtgagcgacgtgggcctgggcaagggcagatactacagcgtgaacgtgcccatccaggacggcatccaggacgagaagtactaccagatctgcgagagcgtgagaaccagctgccccaagagcagacccgtggaggccgccgccgccgcctgcctgccccacctgcacagcctggtgtag

SEQ ID NO: 64907 - DNA, 771 bp, Artificial Sequence
  derived and/or modified sequence
atggaggagcccgaggagcccgccgacagcggccagagcctggtgcccgtgtacatctacagccccgagtacgtgagcatgtgcgacagcctggccaagatccccaagagagccagcatggtgcacagcctgatcgaggcctacgccctgcacaagcagatgagaatcgtgaagcccaaggtggccagcatggaggagatggccaccttccacaccgacgcctacctgcagcacctgcagaaggtgagccaggagggcgacgacgaccaccccgacagcatcgagtacggcctgggctacgactgccccgccaccgagggcatcttcgactacgccgccgccatcggcggcgccaccatcaccgccgcccagtgcctgatcgacggcatgtgcaaggtggccatcaactggagcggcggctggcaccacgccaagaaggacgaggccagcggcttctgctacctgaacgacgccgtgctgggcatcctgagactgagaagaaagttcgagagaatcctgtacgtggacctggacctgcaccacggcgacggcgtggaggacgccttcagcttcaccagcaaggtgatgaccgtgagcctgcacaagttcagccccggcttcttccccggcaccggcgacgtgagcgacgtgggcctgggcaagggcagatactacagcgtgaacgtgcccatccaggacggcatccaggacgagaagtactaccagatctgcgagagatacgagccccccgcccccaaccccggcctgtag

SEQ ID NO: 64908 - DNA, 819 bp, Artificial Sequence
  derived and/or modified sequence
atggaagaacctgaggagcctgcagattcaggacaaagtctggtgcccgtttacatttactctccggagtacgtctcaatgtgcgatagccttgccaaaatccccaagcgtgcatccatggtccactccctcatcgaagcatatgctctccataagcagatgcggattgtgaaacccaaggtcgcatctatggaggaaatggctacctttcatacagatgcctatctccagcacctgcagaaggtatcccaggagggggacgatgatcaccccgatagtatcgaatatgggcttggttatgactgcccagcaaccgaggggatttttgactatgccgccgcaattggaggcgctaccatcacagccgcccagtgcctgatagacggtatgtgcaaagttgcaatcaattggtctggcggttggcatcatgctaaaaaagatgaagctagcggattctgctatctcaacgacgctgtgctgggcatcctccgcctcaggagaaagtttgaaagaatactttacgtggatctcgacctgcatcatggcgacggtgtggaagatgcctttagcttcacatccaaggtgatgacggtctcgctccacaagttctctccgggcttctttccaggaaaatccgatgtgagcgatgtggggctggggaaaggacggtactactctgtgaacgttccaattcaggatggaatccaagatgaaaagtattatcagatctgcgagtcagtacgtacatcttgtccaaaatctagacccgtggaggccgctgccgccgcttgcctcccacaccttcacagcttagtctag

SEQ ID NO: 64909 - DNA, 771 bp, Artificial Sequence
  derived and/or modified sequence
atggaggagccagaggagccagctgatagcggccagtctcttgtacccgtttacatatacagccctgaatacgtttccatgtgtgactcactcgcaaagattcccaaacgagcctcgatggtacacagcctcatcgaggcctacgcacttcacaagcagatgagaattgtgaagcccaaagtagccagcatggaagaaatggctacatttcatactgatgcgtatttgcagcacctgcagaaggtatctcaagaaggggacgacgatcaccctgatagtatcgagtacggcctgggatacgactgtcccgccactgaaggcatattcgactatgcagctgccatagggggtgcgactattaccgcagcccagtgtctcatagatggcatgtgtaaagtggccatcaattggagtggcgggtggcaccacgcaaaaaaagacgaggcctcgggcttctgctatctgaacgatgctgtattagggatcctaaggctgagacgtaaatttgagagaattctctatgtggaccttgaccttcatcacggcgatggtgttgaggacgctttttccttcacatcaaaagtaatgaccgtctcactgcataaattctccccgggcttctttcctggtactggcgatgtgtcagacgtgggccttggtaaaggtcgttactactctgtaaatgtcccaatccaagatggtatccaggacgagaagtattaccagatttgtgagaggtatgagccgcctgctccaaacccaggactgtag

SEQ ID NO: 64910 - DNA, 1161 bp, Artificial Sequence
  derived and/or modified sequence
aaatggccccgtagggcaacaaggatggttagttttgaccctacttatttgtgccataaaaacaatcgatcctaattgacagctatttggacttttacatctgccaaacccttttccttgaactgtggtcactaaatgaggggagtctggtctgggaagtcccatccattccttcaataggatggggagcggtgatagtgtctccggcgatctcaagaataggagggaatgttgaccagggagcaccgctgcggccgatcagaggagcaggaactggaaccctggccgagtccgaaaaaagccagatctggaaggtggctgcggaacggttttaagcggaagatggaggagccggaggaaccggcggacagtgggcagtcgctggtcccggtttatatctatagtcccgagtatgtcagtatgtgtgactccctggccaagatccccaaacgggccagtatggtgcattctttgattgaagcatatgcactgcataagcagatgaggatagttaagcctaaagtggcctccatggaggagatggccaccttccacactgatgcttatctgcagcatctccagaaggtcagccaagagggcgatgatgatcatccggactccatagaatatgggctaggttatgactgcccagccactgaagggatatttgactatgcagcagctataggaggggctacgatcacagctgcccaatgcctgattgacggaatgtgcaaagtagcaattaactggtctggagggtggcatcatgcaaagaaagatgaagcatctggtttttgttatctcaatgatgctgtcctgggaatattacgattgcgacggaaatttgagcgtattctctacgtggatttggatctgcaccatggagatggtgtagaagacgcattcagtttcacctccaaagtcatgaccgtgtccctgcacaaattctccccaggatttttcccaggcaagagtgacgtgtctgatgttggcctagggaagggacggtactacagtgtaaatgtgcccattcaggatggcatacaagatgaaaaatattaccagatctgtgaaagtgtacgaacctcctgccccaaatccaggcctgtagaagcagctgccgcagcttgtcttccccatttgcatagccttgtctga

SEQ ID NO: 64911 - DNA, 2338 bp, Artificial Sequence
  derived and/or modified sequence
ataaaaacaatcgatcctaattgacagctatttggacttttacatctgccaaacccttttccttgaactgtggtcactaaatgaggggagtctggtctgggaagtcccatccattccttcaataggatggggagcggtgatagtgtctccggcgatctcaagaataggagggaatgttgaccagggagcaccgctgcggccgatcagaggagcaggaactggaaccctggccgagtccgaaaaaagccagatctggaaggtggctgcggaacggttttaagcggaagatggaggagccggaggaaccggcggacagtgggcagtcgctggtcccggtttatatctatagtcccgagtatgtcagtatgtgtgactccctggccaagatccccaaacgggccagtatggtgcattctttgattgaagcatatgcactgcataagcagatgaggatagttaagcctaaagtggcctccatggaggagatggccaccttccacactgatgcttatctgcagcatctccagaaggtcagccaagagggcgatgatgatcatccggactccatagaatatgggctaggttatgactgcccagccactgaagggatatttgactatgcagcagctataggaggggctacgatcacagctgcccaatgcctgattgacggaatgtgcaaagtagcaattaactggtctggagggtggcatcatgcaaagaaagatgaagcatctggtttttgttatctcaatgatgctgtcctgggaatattacgattgcgacggaaatttgagcgtattctctacgtggatttggatctgcaccatggagatggtgtagaagacgcattcagtttcacctccaaagtcatgaccgtgtccctgcacaaattctccccaggatttttcccaggaacaggtgacgtgtctgatgttggcctagggaagggacggtactacagtgtaaatgtgcccattcaggatggcatacaagatgaaaaatattaccagatctgtgaaaggtacgaacctcctgccccaaatccaggcctgtagaagcagctgccgcagcttgtcttccccatttgcatagccttgtctgaaaactagactgctgaatactgaaggatcaggtttctcatcaagaaaactgcattttaaatgaatatcttgtatgtttatagggaagttactaatgtagtataaagagatgcctgtcctccccctcctttctggataagagattttatactttcacaaaacgaaaaattaatgatttgcagtgtagcaaacagtactgttacagtggttagggaaactttcccaaaagcaatctggagtgacatttcattcatgtattcatttaatgactatttattgaatgcctactatgtataaagtattgattctaccctcgaggaagttagtggaaatttttaaatgttagataaataaatagagattgattttcatattcacacacatttaaataaataaaacatagaaaattgtaagaaccataagagatagaatgctgtgggtattcaaagagagaaaatacttcagaaaaaggcgtaattgaggaggtaacatttgatctggtttctaaagggtagctaattactctatctttacaaagtgtgtgaatgtatatgagtgtttataaaatctgggtcaagtttgaatatacagagattgtagggaaggatgttctacacacagggtacagcaagatcaaagttgggagagactgagctatgtacaaagaatagcagtggttttagtttggctggactgtaaagtgcatggaggagaagttgcaaagaagattggaaacctgggtgggaaccacatcacggaagagctggaattcttagctatgaaaatttgtaccatattctgtaaacattttgggagccactgaaggttttagaatgagggaatcataagatcaaagcttgcttgggaagattaacactcttcccagtaaagttttggcaacagcatctgctgttatattgacataatgtgggtaaagtggctgacatagtatctgatgcataggagctcagtaagtcatggaagcagatatactgtagtggtttagagcaaaaactctggtgcctggatgcctgggttcaaaaaccagctctgccacttaatagctgtgtgattttgtacagatttcttaacctctctgtatggcagtttccccatctgtaaaataggattaaaaataatacctgttatgaattattatgagggtcaaatgagttaagacatgtaaaatacatagaacagtgctctattctgaataaagttctcaataaatgtta

SEQ ID NO: 64912 - DNA, 819 bp, Artificial Sequence
  derived and/or modified sequence
atggaggagcctgaggagcctgctgacagcggccagagcctggtgcctgtgtacatctacagcccagaatatgtgtccatgtgtgacagcctggccaagatccccaagagggcctccatggtgcacagcctgattgaggcctatgccctgcacaagcagatgagaattgtgaagcccaaggtggcctccatggaggagatggccaccttccacacagatgcctacctgcagcacctgcagaaggtgtcccaggagggagatgatgaccacccagacagcattgaatatggcctgggctatgactgcccagccacagagggcatctttgattatgctgctgccatcggcggggccaccatcacagctgcccagtgcctgattgatggcatgtgcaaggtggccatcaactggagcggcggctggcaccacgccaagaaggatgaggccagcggcttctgctacctgaatgatgctgtgctgggcatcctgcggctgcggaggaagtttgagcgcatcctgtatgtggacctggacctgcaccacggagatggagtggaggatgccttctccttcaccagcaaggtgatgacagtgtccctgcacaagttcagccctggcttcttccctgggaagagtgatgtgtctgatgtgggcctgggcaagggccgctactacagcgtgaatgtgcccatccaggacggcatccaggatgagaagtactaccagatctgtgagagcgtgaggaccagctgccccaagagcaggcctgtggaggccgctgctgctgcctgcctgccccacctgcacagcctggtgtag

SEQ ID NO: 64913 - DNA, 771 bp, Artificial Sequence
  derived and/or modified sequence
atggaggagcctgaggagcctgctgacagcggccagagcctggtgcctgtgtacatctacagcccagaatatgtgtccatgtgtgacagcctggccaagatccccaagagggcctccatggtgcacagcctgattgaggcctatgccctgcacaagcagatgagaattgtgaagcccaaggtggcctccatggaggagatggccaccttccacacagatgcctacctgcagcacctgcagaaggtgtcccaggagggagatgatgaccacccagacagcattgaatatggcctgggctatgactgcccagccacagagggcatctttgattatgctgctgccatcggcggggccaccatcacagctgcccagtgcctgattgatggcatgtgcaaggtggccatcaactggagcggcggctggcaccacgccaagaaggatgaggccagcggcttctgctacctgaatgatgctgtgctgggcatcctgcggctgcggaggaagtttgagcgcatcctgtatgtggacctggacctgcaccacggagatggagtggaggatgccttctccttcaccagcaaggtgatgacagtgtccctgcacaagttcagccctggcttcttccctggcactggagatgtgtctgatgtgggcctgggcaagggccgctactacagcgtgaatgtgcccatccaggacggcatccaggatgagaagtactaccagatctgtgaaagatatgagcccccagcccccaaccctggcctgtag

SEQ ID NO: 64914 - DNA, 819 bp, Artificial Sequence
  derived and/or modified sequence
atggaggagcccgaggagcccgccgacagcggccagagcctggtgcctgtgtacatatactcccctgagtatgtctccatgtgtgactccctggccaagatcccaaaacgggcttctatggtgcactcactgattgaagcctacgccctccataagcagatgaggattgtgaagccaaaggtggctagtatggaagaaatggcgacgttccacactgatgcctacctgcaacacctccagaaggtgagtcaggagggagacgatgatcatcctgactccattgaatatggcctggggtacgactgcccagccactgagggcatctttgattacgctgcagccatcgggggagctacaatcactgctgcccagtgtttgatagacggaatgtgcaaggtagcaatcaactggagcggtggatggcatcatgcaaagaaagatgaggccagtggcttttgctatctcaacgatgcggtgctaggcatcctgcgcctgcgtcgcaaattcgagagaattctctatgttgacctcgatctccaccatggtgatggggtggaggatgcatttagtttcacatcaaaggtaatgactgtctccctgcataagttcagtcctggcttcttccctgggaaatcggacgtgtctgatgtcggattagggaagggaaggtattactcagtaaacgttccaatccaggacggtattcaggacgaaaagtactatcaaatctgtgaaagcgtcagaacttcatgcccaaagtcaagacctgtcgaggctgccgcagccgcctgtctgcctcacttacattctttggtctag

SEQ ID NO: 64915 - DNA, 771 bp, Artificial Sequence
  derived and/or modified sequence
atggaggagcccgaggagcccgccgacagcggccagagcctggtgcccgtttatatctatagccctgagtacgtgtctatgtgcgactctctcgcaaaaattccaaaacgcgctagtatggtgcacagtctgattgaagcctacgccctgcacaaacagatgcgaatagttaaacccaaagtggcatctatggaggagatggcaaccttccacacagatgcctacctgcaacacctccagaaggtgtcacaggaaggagacgatgatcaccctgactccattgagtacggcctcggatacgactgccccgccacggaggggatattcgattatgccgccgccatcgggggcgccactatcaccgccgctcagtgcctgatcgacgggatgtgcaaggttgccatcaattggtctggtgggtggcatcatgccaagaaagacgaggccagtggattctgttacctgaatgatgcagtgctggggatcctcaggctgagaaggaagttcgagcggatcctctatgtcgacttggacttacaccacggcgacggagtcgaagacgctttcagctttacttcaaaggtcatgactgttagcctgcataaattctcccctgggttcttccctggcaccggcgacgtaagtgatgtcggattgggcaagggacggtattattccgttaacgtgcctatacaggacgggattcaggacgaaaaatattaccagatctgcgaacgttacgagccgccagcccccaacccaggattgtag

SEQ ID NO: 64916 - DNA, 819 bp, Artificial Sequence
  derived and/or modified sequence
atggaggagccggaggaacccgctgatagcgggcagtcacttgtaccggtttacatttacagtcccgagtatgtatctatgtgcgattccttagcaaagatccccaagcgcgcaagcatggtccactccctgattgaagcttatgccctgcataagcagatgagaatagtcaagcctaaagtggctagtatggaggagatggctacattccacacagatgcatatcttcagcatctacagaaagtttcacaggaaggggacgacgaccaccctgattctattgaatatgggctggggtatgactgccctgcaacagagggcatctttgactatgccgcagctatcgggggagccactatcacagccgcacaatgccttatagacggcatgtgtaaagtggctatcaactggagcggtggttggcatcacgcgaagaaagacgaggctagtggattctgttatctaaatgacgcggtgttgggcattctgagactcagaagaaaatttgaacgtatcttatacgtggatctagatttgcatcacggcgatggggtcgaggacgcattttcatttactagcaaggtgatgacagtgagtctccataagttcagccccggattctttccaggaaagagcgacgtgtcagatgtgggcctggggaaggggaggtactactccgtgaatgttcccattcaggatggcattcaggacgaaaaatactaccagatttgtgagagtgtgcgcacttcgtgccccaagagtagacccgtggaagctgctgcagcggcatgcctacctcacctccattccttggtgtag

SEQ ID NO: 64917 - DNA, 771 bp, Artificial Sequence
  derived and/or modified sequence
atggaagaacccgaggagcccgcagattcaggtcagagtctggtccctgtctacatttattctcctgagtatgtatcaatgtgtgacagtctggctaagattcccaagagggcctctatggttcatagccttatcgaagcttacgctcttcacaagcagatgcgcattgttaagccaaaggtggcaagcatggaggagatggccaccttccacacagacgcatatctccagcacctccaaaaagtgtcacaggaaggcgatgatgatcatcctgattccatcgagtatgggttgggttatgactgtccagcaacagagggcatttttgactacgctgccgcaattgggggagccacgatcacagcagctcagtgccttatcgatgggatgtgtaaggtggctatcaactggtctggaggttggcaccatgccaaaaaggacgaggcctccggtttctgctacctgaacgacgccgtcttgggaatcctccggctgagacgcaaattcgagagaattttgtatgtcgatttggaccttcatcacggtgatggggttgaggatgccttctcttttacatctaaagtcatgacagtgagcctgcataaattcagccccggtttcttcccaggaaccggcgatgtgagcgacgtgggactgggtaaaggcaggtactattctgtgaacgtgccaatccaagatgggattcaggatgaaaagtactatcagatctgcgagcggtacgaaccgccagcacccaaccctggtctgtag

SEQ ID NO: 64918 - DNA, 441 bp, Artificial Sequence
  derived and/or modified sequence
atggaggagcccgaggagcccgccgacagcggccagagcctggtgcccgtgtacatctacagccccgagtacgtgagcatgtgcgacagcctggccaagatccccaagagagccagcatggtgcacagcctgatcgaggcctacgccctgcacaagcagatgagaatcgtgaagcccaaggtggccagcatggaggagatggccaccttccacaccgacgcctacctgcagcacctgcagaaggtgagccaggagggcgacgacgaccaccccgacagcatcgagtacggcctgggctacgactgccccgccaccgagggcatcttcgactacgccgccgccatcggcggcgccaccatcaccgccgcccagtgcctgatcgacggcatgtgcaaggtggccatcaactggagcggcggctggcaccacgccaagaagtag

SEQ ID NO: 64919 - DNA, 441 bp, Artificial Sequence
  derived and/or modified sequence
atggaagagcccgaggagccggccgacagcggacaaagcctggtgcccgtgtatatttacagcccggaatacgtgtctatgtgcgacagcctggcaaaaatacccaagagggcatcaatggtgcatagcctgatcgaagcttacgcccttcacaagcagatgcgcatagtcaaaccaaaagtggcctcaatggaagagatggctaccttccacactgacgcctacctgcaacacttgcaaaaagtttctcaggaaggcgatgatgatcatcccgattcaatcgagtacggtctcggctacgattgccccgctactgaaggcatttttgattatgcggctgccattgggggcgccacaattacagctgcacagtgcctgatagatggaatgtgtaaggtggcaattaactggtcaggaggctggcatcacgccaagaagtag

SEQ ID NO: 64920 - DNA, 833 bp, Artificial Sequence
  derived and/or modified sequence
gcggccgatcagaggagcaggaactggaaccctggccgagtccgaaaaaagccagatctggaaggtggctgcggaacggttttaagcggaagatggaggagccggaggaaccggcggacagtgggcagtcgctggtcccggtttatatctatagtcccgagtatgtcagtatgtgtgactccctggccaagatccccaaacgggccagtatggtgcattctttgattgaagcatatgcactgcataagcagatgaggatagttaagcctaaagtggcctccatggaggagatggccaccttccacactgatgcttatctgcagcatctccagaaggtcagccaagagggcgatgatgatcatccggactccatagaatatgggctaggttatgactgcccagccactgaagggatatttgactatgcagcagctataggaggggctacgatcacagctgcccaatgcctgattgacggaatgtgcaaagtagcaattaactggtctggagggtggcatcatgcaaagaagtaagaaaatgacctttctgttttctgactctttccttgagtcagtttctcagttatgtaaactcttatgcttattgtattgacatttacagagagacgtgtgtgtatgtggcactttacaaggcattctgaagaaatccaagtgaaatagaaaaaagattacctaatatagtggaaagcacactgctcaaagtcaggacacctgggctctacacctagtttttctaacttggctaactgacttggactgattaccctccctaggcctcagtttcttcatcaataaaatgaacaaaggatacaa

SEQ ID NO: 64921 - DNA, 441 bp, Artificial Sequence
  derived and/or modified sequence
atggaggagcctgaggagcctgctgacagcggccagagcctggtgcctgtgtacatctacagcccagaatatgtgtccatgtgtgacagcctggccaagatccccaagagggcctccatggtgcacagcctgattgaggcctatgccctgcacaagcagatgagaattgtgaagcccaaggtggcctccatggaggagatggccaccttccacacagatgcctacctgcagcacctgcagaaggtgtcccaggagggagatgatgaccacccagacagcattgaatatggcctgggctatgactgcccagccacagagggcatctttgattatgctgctgccatcggcggggccaccatcacagctgcccagtgcctgattgatggcatgtgcaaggtggccatcaactggagcggcggctggcaccacgccaagaagtag

SEQ ID NO: 64922 - DNA, 441 bp, Artificial Sequence
  derived and/or modified sequence
atggaggagcccgaggagcccgccgacagcggccagagcctggtgcccgtctacatttacagcccagagtacgtgagtatgtgcgactccttagctaagatcccaaaaagggcttccatggtccatagcctcatcgaggcttatgctctgcataaacagatgcgtattgtgaagcccaaggtggcttctatggaagagatggcgacgttccacacagatgcatacctgcagcatcttcagaaagtgagccaagagggcgacgacgaccacccagactcaatagaatacgggcttggatacgactgtccagcaacagagggtatctttgattatgcggctgctatcggaggggctaccatcaccgccgcacagtgcctgattgacggtatgtgcaaggtggcaattaactggtcggggggatggcatcacgcaaaaaaatag

SEQ ID NO: 64923 - DNA, 441 bp, Artificial Sequence
  derived and/or modified sequence
atggaggagcccgaagaaccagcagactctgggcagagcctggtgcctgtgtatatctactccccagaatacgtaagcatgtgtgactccctcgccaagattcccaaacgcgcaagcatggtgcacagcctgatcgaagcctacgcactgcacaaacagatgaggatcgtgaagcccaaggtcgcatccatggaagaaatggctacttttcacaccgacgcatacctgcagcatttacagaaggtctctcaggaaggagatgacgaccacccggacagtatcgagtacgggttgggctacgactgtccagccaccgaaggtatattcgactacgccgcagcgataggaggagccaccatcacagccgctcagtgcctcatcgacggcatgtgtaaggtggccattaactggtccggtggatggcatcacgccaaaaagtag

SEQ ID NO: 64924 - protein, 158 aa, Artificial Sequence
  derived and/or modified sequence
MEEPEEPADSGQSLVPVYIYSPEYVSMCDSLAKIPKRASMVHSLIEAYALHKQMRIVKPKVASMEEMATFHTDAYLQHLQKVSQEGDDDHPDSIEYGLGYDCPATEGIFDYAAAIGGATITAAQCLIDGMCKVAINWSGGWHHAKKETCVYVALYKAF

SEQ ID NO: 64925 - DNA, 477 bp, Artificial Sequence
  derived and/or modified sequence
atggaggagcccgaggagcccgccgacagcggccagagcctggtgcccgtgtacatctacagccccgagtacgtgagcatgtgcgacagcctggccaagatccccaagagagccagcatggtgcacagcctgatcgaggcctacgccctgcacaagcagatgagaatcgtgaagcccaaggtggccagcatggaggagatggccaccttccacaccgacgcctacctgcagcacctgcagaaggtgagccaggagggcgacgacgaccaccccgacagcatcgagtacggcctgggctacgactgccccgccaccgagggcatcttcgactacgccgccgccatcggcggcgccaccatcaccgccgcccagtgcctgatcgacggcatgtgcaaggtggccatcaactggagcggcggctggcaccacgccaagaaggagacctgcgtgtacgtggccctgtacaaggccttctag

SEQ ID NO: 64926 - DNA, 477 bp, Artificial Sequence
  derived and/or modified sequence
atggaagaaccggaggagccagccgatagtggacaaagcttagtgcccgtttatatttactcccctgagtatgtcagcatgtgcgacagtcttgcgaaaatcccaaaaagggcttcaatggtccactctctcatagaagcctacgcactgcacaagcagatgaggatcgtcaaacccaaagtggccagcatggaggaaatggccacattccatactgatgcttacctgcagcatttgcagaaagtcagtcaagaaggcgatgatgatcacccggatagtatagagtacgggcttggctacgactgccccgcgaccgaggggatcttcgattacgctgcagccatagggggggcgactatcacagctgctcagtgcttgattgacggtatgtgtaaagtcgcaataaactggagcggcggctggcaccacgccaagaaggagacctgtgtctacgtggccctctacaaggctttctag

SEQ ID NO: 64927 - DNA, 704 bp, Artificial Sequence
  derived and/or modified sequence
tccgaaaaaagccagatctggaaggtggctgcggaacggttttaagcggaagatggaggagccggaggaaccggcggacagtgggcagtcgctggtcccggtttatatctatagtcccgagtatgtcagtatgtgtgactccctggccaagatccccaaacgggccagtatggtgcattctttgattgaagcatatgcactgcataagcagatgaggatagttaagcctaaagtggcctccatggaggagatggccaccttccacactgatgcttatctgcagcatctccagaaggtcagccaagagggcgatgatgatcatccggactccatagaatatgggctaggttatgactgcccagccactgaagggatatttgactatgcagcagctataggaggggctacgatcacagctgcccaatgcctgattgacggaatgtgcaaagtagcaattaactggtctggagggtggcatcatgcaaagaaagagacgtgtgtgtatgtggcactttacaaggcattctgaagaaatccaagtgaaatagaaaaaagattacctaatatagtggaaagcacactgctcaaagtcaggacacctgggctctacacctagtttttctaacttggctaactgacttggactgattaccctccctaggcctcagtttcttcatcaataaaatgaacaaaggatacaacta

SEQ ID NO: 64928 - DNA, 477 bp, Artificial Sequence
  derived and/or modified sequence
atggaggagcctgaggagcctgctgacagcggccagagcctggtgcctgtgtacatctacagcccagaatatgtgtccatgtgtgacagcctggccaagatccccaagagggcctccatggtgcacagcctgattgaggcctatgccctgcacaagcagatgagaattgtgaagcccaaggtggcctccatggaggagatggccaccttccacacagatgcctacctgcagcacctgcagaaggtgtcccaggagggagatgatgaccacccagacagcattgaatatggcctgggctatgactgcccagccacagagggcatctttgattatgctgctgccatcggcggggccaccatcacagctgcccagtgcctgattgatggcatgtgcaaggtggccatcaactggagcggcggctggcaccacgccaagaaggagacctgtgtgtatgtggccctgtacaaggccttctag

SEQ ID NO: 64929 - DNA, 477 bp, Artificial Sequence
  derived and/or modified sequence
atggaggagcccgaggagcccgccgacagcggccagagcctggtgcctgtctatatctactcccctgagtacgtgagcatgtgcgactcactggccaaaatcccaaagagggcctctatggtgcattctctgatcgaggcctatgctctccacaaacagatgcgaatcgtgaagccaaaggtagcatcgatggaagagatggctacctttcatacagatgcctacctccaacacctgcagaaggtgagccaggaaggtgacgatgaccatcctgattcaatcgaatacggcttgggttacgattgtccagctacagaagggattttcgattatgctgcagcaatcgggggtgccacaatcactgcagcccagtgtctgatcgacggcatgtgcaaggttgctataaattggtccggaggctggcatcatgccaagaaagaaacatgcgtgtacgtggctctctacaaagctttttag

SEQ ID NO: 64930 - DNA, 477 bp, Artificial Sequence
  derived and/or modified sequence
atggaggaacccgaggaaccggcagattcaggccagtctctcgtacccgtttacatctactctcccgagtacgtttccatgtgcgactccctggcaaaaatccccaaacgggctagcatggtccactcgctgatcgaggcctatgccctccacaaacagatgcgaatagtgaaacctaaagttgcctctatggaagaaatggctacattccacacagacgcgtacctccagcacctccagaaggtcagtcaggaaggtgacgacgaccatccggacagcattgagtacgggctcggatacgattgtccagccacggaaggcatcttcgattacgctgctgctatcggcggtgctaccattaccgcagctcagtgcttgatagacggaatgtgtaaggtcgctataaactggtcgggcggatggcaccacgccaaaaaggaaacatgtgtgtatgtagcactatacaaggccttttag

SEQ ID NO: 64931 - protein, 136 aa, Artificial Sequence
  derived and/or modified sequence
MKWMVVVLVCLQLLEAAVVKVPLKKFKSIRETMKEKGLLGEFLRTHKYDPAWKYRFGDLSVTYEPMAYMDVQSIQVPNQEFGLSENEPGTNFVYAQFDGIMGLAYPALSVDEATTAMQGMVQEGALTSPVFSVYLS

SEQ ID NO: 64932 - protein, 315 aa, Artificial Sequence
  derived and/or modified sequence
MKWMVVVLVCLQLLEAAVVKVPLKKFKSIRETMKEKGLLGEFLRTHKYDPAWKYRFGDLSVTYEPMAYMDAAYFGEISIGTPPQNFLVLFDTGSSNLWVPSVYCQSQACTSHSRFNPSESSTYSTNGQTFSLQYGSGSLTGFFGYDTLTVQSIQVPNQEFGLSENEPGTNFVYAQFDGIMGLAYPALSVDEATTAMQGMVQEGALTSPVFSVYLSNLVLESSGLGPLLTPSRAAPPSSTLQLPEKPLEQTWNILTPFTKTLPVSNLSRKVTSWAGVGIPVTCLPEAGSGGERRAECGLGVPTTRGPPRSQHHSGA

SEQ ID NO: 64933 - DNA, 315 bp, Artificial Sequence
  derived and/or modified sequence
atgaagtggatggtagtggtgctggtctgtctgcagcttcttgaggcggcagtcgtcaaggtgcccctcaagaagttcaagtctataagagagacaatgaaagaaaagggtctgctcggggaatttttacgaacccataaatacgacccggcttggaagtaccgctttggggatctctcagtgacctacgaacccatggcgtatatggatgcggcgtactttggagaaatatccattggcaccccaccgcaaaactttctagtactgtttgatacgggctcctctcctctccccctggaccccgccccctcctag

SEQ ID NO: 64934 - DNA, 411 bp, Artificial Sequence
  derived and/or modified sequence
atgaagtggatggtggtggtgctagtttgtctccaactgttggaggccgccgtggtgaaagttcccttgaagaagtttaagtcgatccgagaaacaatgaaggaaaagggattgttgggtgaattcctccggacacataagtacgaccctgcttggaagtatcgctttggcgacctcagtgtcacctacgagccaatggcatatatggatgtgcagtcaatccaggtgccgaaccaggagtttggtctgtcggagaatgagccgggcacaaacttcgtctacgctcagttcgacgggattatgggtctggcttatcccgcgctgtcagtggatgaagccacaacagcaatgcagggtatggtccaggagggagcactcacatcccccgtcttctccgtgtatctgtcttag

SEQ ID NO: 64935 - DNA, 948 bp, Artificial Sequence
  derived and/or modified sequence
atgaaatggatggtcgtggttctggtgtgtctccaactgctggaggcagccgtcgtcaaagtgccgctgaagaagttcaaaagcattcgcgagactatgaaagagaaaggcctcctcggggagttccttcgcacgcacaagtatgacccagcgtggaagtacagattcggtgatctttccgtcacttacgaacccatggcatatatggacgcagcctacttcggcgaaatttcaataggcacaccaccccagaatttccttgtactattcgacaccgggtccagtaatttgtgggtgcccagtgtctattgtcaatctcaggcctgtacctctcacagcagattcaatccttccgagagttccacatattcaacgaatggtcaaacgttctctctacaatacggcagcggtagcttgacaggtttcttcgggtatgatacactgactgtgcagtccatccaggtcccaaatcaggagttcgggctatccgaaaacgagcctggcaccaacttcgtgtacgcacagtttgatggcataatggggcttgcctacccagccctctctgtagatgaagccacgacggccatgcagggaatggttcaggagggagctctgacctctcccgtgtttagcgtatatctttcaaacttggtcctggaaagttcggggctgggcccactcctcactcctagcagagcagcaccaccttccagtactctgcagctccccgagaaacctctggaacagacctggaatatactaaccccctttaccaaaacactcccagtgtcgaacctcagcagaaaggtgacttcttgggctggtgtgggcatccccgtcacatgcctgccagaggccgggtccggcggagaacggagagccgaatgtggcctaggagttccgacaacgagaggcccgcctcgctctcagcatcactcaggtgcttag

SEQ ID NO: 64936 - DNA, 315 bp, Artificial Sequence
  derived and/or modified sequence
atgaagtggatggtggtggtgctggtgtgcctgcagctgctggaggccgctgtggtgaaggtgcccctgaagaagttcaagagcatccgggagaccatgaaggagaagggcctgctgggggagttcctgcggacccacaagtatgaccctgcctggaagtacagatttggagacctgtctgtgacctatgagcccatggcctacatggatgctgcctactttggagagatcagcatcggcaccccaccccagaacttcctggtgctgtttgacaccggcagcagccccctgcccctggaccctgcccccagctag

SEQ ID NO: 64937 - DNA, 411 bp, Artificial Sequence
  derived and/or modified sequence
atgaagtggatggtggtggtgctggtgtgcctgcagctgctggaggccgctgtggtgaaggtgcccctgaagaagttcaagagcatccgggagaccatgaaggagaagggcctgctgggggagttcctgcggacccacaagtatgaccctgcctggaagtacagatttggagacctgtctgtgacctatgagcccatggcctacatggatgtgcagagcatccaggtgcccaaccaggagtttggcctgtctgaaaatgagcccggcaccaactttgtgtatgcccagtttgatggcatcatgggcctggcctacccagccctgtctgtggatgaggccaccacagccatgcagggcatggtgcaggagggcgccctgaccagccctgtgttttctgtgtacctgtcctag

SEQ ID NO: 64938 - DNA, 948 bp, Artificial Sequence
  derived and/or modified sequence
atgaagtggatggtggtggtgctggtgtgcctgcagctgctggaggccgctgtggtgaaggtgcccctgaagaagttcaagagcatccgggagaccatgaaggagaagggcctgctgggggagttcctgcggacccacaagtatgaccctgcctggaagtacagatttggagacctgtctgtgacctatgagcccatggcctacatggatgctgcctactttggagagatcagcatcggcaccccaccccagaacttcctggtgctgtttgacaccggcagcagcaacctgtgggtgcccagcgtgtactgccagagccaggcctgcaccagccacagccgcttcaaccccagcgagagcagcacctacagcaccaacggccagaccttcagcctgcagtatggcagcggcagcctgaccggcttcttcggctatgacaccctgactgtgcagagcatccaggtgcccaaccaggagtttggcctgtctgaaaatgaacctggcaccaactttgtgtatgcccagtttgatggcatcatgggcctggcctacccagccctgtctgtggatgaggccaccacagccatgcagggcatggtgcaggagggcgccctgaccagccctgtgttttctgtgtacctgagcaacctggtgctggagagcagcggcctgggccccctgctgacccccagcagagctgccccacccagcagcaccctgcagctgcctgagaagcccctggagcagacctggaacatcctgacccccttcaccaagaccctgcctgtgagcaacctgagcaggaaggtgacctcctgggccggcgtgggcatccctgtgacctgcctgcctgaggccggcagcggcggggagcggcgggcagaatgtggcctgggcgtgcccaccacccggggcccccccaggagccagcaccacagcggggcctag

SEQ ID NO: 64939 - DNA, 315 bp, Artificial Sequence
  derived and/or modified sequence
atgaagtggatggtggtggtgctggtgtgcctgcagctgctggaggcagccgtcgtgaaggtcccactgaaaaaatttaagagtattcgcgaaaccatgaaggagaaaggcctgctgggggagtttcttcggacccacaagtacgacccagcctggaagtataggtttggagatttgagcgtcacatatgagccaatggcctatatggatgcagcttactttggtgagattagcattggaacacctcctcaaaacttcctcgtactgttcgatacaggctctagccctctgcccctggaccccgcgccctcctag

SEQ ID NO: 64940 - DNA, 411 bp, Artificial Sequence
  derived and/or modified sequence
atgaagtggatggtggtggtgctggtgtgcctgcagctgctggaggcggcagtggtgaaggtgccactgaaaaagttcaaaagtatccgcgaaacaatgaaagaaaagggcctgctgggagaattcctcagaacgcataagtacgacccggcatggaagtaccgctttggggacctctcagttacctacgagcccatggcctacatggatgtccaaagcattcaagttcctaatcaggaatttggtctgtccgagaatgagccaggaacaaatttcgtgtatgcccagtttgacggtatcatgggcctggcctatcccgccctctccgtcgacgaagctaccacagcaatgcagggcatggtccaggagggcgctctaaccagcccagtgttcagtgtatacctcagttag

SEQ ID NO: 64941 - DNA, 948 bp, Artificial Sequence
  derived and/or modified sequence
atgaagtggatggtggtggtgctggtgtgcctgcagctgctggaggccgccgtggtgaaagtgcccctgaaaaagttcaagtccatcagagagaccatgaaagaaaaagggcttctcggagagtttctcagaacccacaagtatgatcctgcctggaaatatcggttcggtgacctttcggtgacctacgagcccatggcttatatggacgccgcatatttcggtgagatctcaatcgggacgcccccccagaattttttagttctgtttgatacaggaagctcaaacctttgggttcccagcgtgtactgtcagtcccaggcctgtactagccacagtcgattcaaccctagcgaatctagcacatactccactaatggtcagactttctctctccagtacggctctggctctctaaccgggttctttggatatgacaccctgaccgtgcaaagcatccaggtgcctaatcaggagttcggtctgagcgagaacgaacccggaaccaactttgtttatgctcaatttgatggaatcatgggcctggcctaccctgcactgtccgtcgacgaggccaccacagcaatgcagggcatggtgcaggaaggggcactcacctctccggtgttcagcgtgtatctgagtaatctggttcttgaaagttccggtctgggtcctctgctcactccctcccgggctgcacccccctcttcaacgctgcagttacctgagaagccgctcgagcagacttggaacatcctgaccccttttacaaagacgctgccagtttccaatcttagtcgtaaagtcacatcttgggcgggcgtgggtattccagtgacgtgcctgcctgaagccggttctggtggtgaacgacgcgccgagtgcgggctgggggtaccaacaacacgaggacctccccgttctcagcatcactccggcgcttag

SEQ ID NO: 64942 - DNA, 315 bp, Artificial Sequence
  derived and/or modified sequence
atgaaatggatggttgttgtcctcgtttgcctacagctgctcgaagccgctgttgtcaaggtgcctcttaagaaatttaaatccattcgcgaaacgatgaaggagaaaggcttgctgggtgaatttttacgcacgcacaagtacgacccagcatggaagtaccgattcggagatctaagcgttacatatgagcccatggcctacatggatgccgcatatttcggagaaattagtattgggactccccctcagaatttcctagtcctgttcgatacagggagtagccccctgcccctggatcctgcccctagttag

SEQ ID NO: 64943 - DNA, 411 bp, Artificial Sequence
  derived and/or modified sequence
atgaagtggatggtcgttgtactcgtgtgcttgcagctcctggaggctgcagtggtcaaggtgcctctaaagaagttcaaatccatccgcgagaccatgaaggaaaaggggttgttaggcgaatttcttcgaacccacaaatacgaccctgcctggaaatatcggtttggcgatttatccgtcacctatgagcccatggcctatatggacgtgcaaagcatacaggttcccaaccaggagttcgggctctccgaaaacgagccaggcacgaactttgtgtatgcgcagttcgacggcataatggggcttgcttatcctgcgttgtccgtggacgaagccaccacagcgatgcagggaatggtccaagaaggggctcttacctctcccgttttttctgtgtacctgtcatag

SEQ ID NO: 64944 - DNA, 948 bp, Artificial Sequence
  derived and/or modified sequence
atgaaatggatggtcgtagtcctggtgtgcctacagcttcttgaggcagctgtggtcaaggtgccattaaaaaagttcaagtcaattcgcgagacaatgaaggagaagggattgcttggagagtttctgagaacccacaagtatgatcccgcatggaagtatcggtttggcgacctgagcgtgacctacgagccgatggcttacatggatgccgcttatttcggtgaaattagcattgggaccccacctcagaatttcctggtactattcgatacaggcagctctaacctgtgggtgcccagcgtctattgtcagtctcaggcctgtacatctcattctcgatttaaccccagcgagagctcaacctatagcacaaacggacaaacgttctcactccagtatggaagcgggtcactgacaggctttttcgggtacgacaccctgaccgtccagagcatccaggttcccaaccaggaatttgggctttccgagaacgaaccaggcaccaattttgtctatgcacaattcgacggcatcatgggactggcttacccagcactgtcagtcgatgaagccaccactgctatgcaaggaatggttcaggagggagctctcacatctcctgtctttagcgtgtatctgagtaacctggtgctggagagctccggactcggtcccctgctcaccccaagtcgcgctgctccaccttcgagtacattgcagctgccagaaaaaccattggagcagacttggaacattttgacaccttttactaagaccttaccggtgagcaacctgagtagaaaagtaaccagctgggcaggagtcggaattccagttacctgtctgcccgaggcaggttctggaggcgagagacgagccgaatgtggtttgggggtccccactacgaggggaccccctaggtctcagcaccactctggggcatag

SEQ ID NO: 64945 - DNA, 382 bp, Artificial Sequence
  derived and/or modified sequence
cttcactccactgcgactgcagaactcagagctgctcttcctctgtggccagttggggaccagcatcatgaagtggatggtggtggtcttggtctgcctccagctcttggaggcagcagtggtcaaagtgcccctgaagaaatttaagtctatccgtgagaccatgaaggagaagggcttgctgggggagttcctgaggacccacaagtatgatcctgcttggaagtaccgctttggtgacctcagcgtgacctacgagcccatggcctacatggatgctgcctactttggtgagatcagcatcgggactccaccccagaacttcctggtcctttttgacaccggctcctcccctcttcctcttgaccctgcaccctcctag

SEQ ID NO: 64946 - DNA, 1152 bp, Artificial Sequence
  derived and/or modified sequence
cttcactccactgcgactgcagaactcagagctgctcttcctctgtggccagttggggaccagcatcatgaagtggatggtggtggtcttggtctgcctccagctcttggaggcagcagtggtcaaagtgcccctgaagaaatttaagtctatccgtgagaccatgaaggagaagggcttgctgggggagttcctgaggacccacaagtatgatcctgcttggaagtaccgctttggtgacctcagcgtgacctacgagcccatggcctacatggatgctgcctactttggtgagatcagcatcgggactccaccccagaacttcctggtcctttttgacaccggctcctccaacttgtgggtgccctctgtctactgccagagccaggcctgcaccagtcactcccgcttcaaccccagcgagtcgtccacctactccaccaatgggcagaccttctccctgcagtatggcagtggcagcctcaccggcttctttggctatgacaccctgactgtccagagcatccaggtccccaaccaggagttcggcttgagtgagaatgagcctggtaccaacttcgtctatgcgcagtttgatggcatcatgggcctggcctaccctgctctgtccgtggatgaggccaccacagctatgcagggcatggtgcaggagggcgccctcaccagccccgtcttcagcgtctacctcagcaacctggtcctggagtcttctggtctaggtccactgctgacccctagcagagcagctccacccagctccacactccagctaccagagaagcctctggaacaaacatggaatatccttacccccttcaccaagaccctacctgtctccaatctcagcagaaaagtaacaagctgggccggggtggggatcccggtgacatgtctaccagaggcaggaagcggaggggagaggagagcagagtgtgggctgggggtcccaaccactaggggaccccccagaagtcagcatcattcgggagcctgaggcgctgggaattccaaggcctggccagaaagccccagtctaagggacgcatcccagtccccagggagccccaatctaagggatacagccccatcctcagggagccccagtctgagggagacacagactcgtcctca

SEQ ID NO: 64947 - DNA, 315 bp, Artificial Sequence
  derived and/or modified sequence
atgaagtggatggtggtggtgctggtgtgcctgcagctgctggaggccgccgtggtgaaggtgcccctgaagaagttcaagagcatcagagagaccatgaaggagaagggcctgctgggcgagttcctgagaacccacaagtacgaccccgcctggaagtacagattcggcgacctgagcgtgacctacgagcccatggcctacatggacgccgcctacttcggcgagatcagcatcggcacccccccccagaacttcctggtgctgttcgacaccggcagcagccccctgcccctggaccccgcccccagctag

SEQ ID NO: 64948 - DNA, 411 bp, Artificial Sequence
  derived and/or modified sequence
atgaagtggatggtggtggtgctggtgtgcctgcagctgctggaggccgccgtggtgaaggtgcccctgaagaagttcaagagcatcagagagaccatgaaggagaagggcctgctgggcgagttcctgagaacccacaagtacgaccccgcctggaagtacagattcggcgacctgagcgtgacctacgagcccatggcctacatggacgtgcagagcatccaggtgcccaaccaggagttcggcctgagcgagaacgagcccggcaccaacttcgtgtacgcccagttcgacggcatcatgggcctggcctaccccgccctgagcgtggacgaggccaccaccgccatgcagggcatggtgcaggagggcgccctgaccagccccgtgttcagcgtgtacctgagctag

SEQ ID NO: 64949 - DNA, 948 bp, Artificial Sequence
  derived and/or modified sequence
atgaagtggatggtggtggtgctggtgtgcctgcagctgctggaggccgccgtggtgaaggtgcccctgaagaagttcaagagcatcagagagaccatgaaggagaagggcctgctgggcgagttcctgagaacccacaagtacgaccccgcctggaagtacagattcggcgacctgagcgtgacctacgagcccatggcctacatggacgccgcctacttcggcgagatcagcatcggcacccccccccagaacttcctggtgctgttcgacaccggcagcagcaacctgtgggtgcccagcgtgtactgccagagccaggcctgcaccagccacagcagattcaaccccagcgagagcagcacctacagcaccaacggccagaccttcagcctgcagtacggcagcggcagcctgaccggcttcttcggctacgacaccctgaccgtgcagagcatccaggtgcccaaccaggagttcggcctgagcgagaacgagcccggcaccaacttcgtgtacgcccagttcgacggcatcatgggcctggcctaccccgccctgagcgtggacgaggccaccaccgccatgcagggcatggtgcaggagggcgccctgaccagccccgtgttcagcgtgtacctgagcaacctggtgctggagagcagcggcctgggccccctgctgacccccagcagagccgccccccccagcagcaccctgcagctgcccgagaagcccctggagcagacctggaacatcctgacccccttcaccaagaccctgcccgtgagcaacctgagcagaaaggtgaccagctgggccggcgtgggcatccccgtgacctgcctgcccgaggccggcagcggcggcgagagaagagccgagtgcggcctgggcgtgcccaccaccagaggcccccccagaagccagcaccacagcggcgcctag

SEQ ID NO: 64950 - protein, 318 aa, Artificial Sequence
  derived and/or modified sequence
MRGAGESGKSTIVKQMKIIHEDGYSEEECRQYRAVVYSNTIQSIMAIVKAMGNLQIDFADPSRADDARQLFALSCTAEEQGVLPDDLSGVIRRLWADHGVQACFGRSREYQLNDSAAYYLNDLERIAQSDYIPTQQDVLRTRVKTTGIVETHFTFKDLHFKMFDVGGQRSERKKWIHCFEGVTAIIFCVALSAYDLVLAEDEEMNRMHESMKLFDSICNNKWFTDTSIILFLNKKDLFEEKITHSPLTICFPEYTGANKYDEAASYIQSKFEDLNKRKDTKEIYTHFTCATDTKNVQFVFDAVTDVIIKNNLKDCGLF

SEQ ID NO: 64951 - DNA, 957 bp, Artificial Sequence
  derived and/or modified sequence
atgcgtggagccggagagagcggaaagtctacaatcgttaagcaaatgaaaattattcacgaggacggatatagtgaggaagaatgcaggcagtatcgcgcagtggtgtatagtaatactatccagtccatcatggctattgtcaaagccatgggcaatctccaaatcgatttcgccgatccttctagggctgacgacgcacgccagctgtttgcactgagctgtaccgccgaggaacagggggtgctgcctgatgacctttcaggggtcatccggagactctgggccgatcacggggttcaggcctgtttcggacgctcgcgagagtaccagctgaacgacagcgcggcgtattacctgaatgatttagaaaggatcgcacaaagcgactacattcctacccaacaggacgtactgcgcacccgagtgaaaacaacaggaatagtcgagacacactttacttttaaggatctacattttaagatgtttgatgtgggcggtcagagatccgaacgtaaaaagtggattcactgtttcgagggggtaaccgcaatcattttttgcgtggcactgtcagcatacgatctggtcctcgccgaagatgaggaaatgaaccgcatgcatgaaagtatgaagctttttgatagcatttgtaacaataagtggttcacggacacaagcattatcttgttcttaaacaagaaagatctgtttgaggaaaaaatcacacatagcccactgaccatttgcttcccagagtatactggagctaacaaatacgatgaggcagcctcctacatccagagcaaatttgaggatctcaataaaaggaaagatacaaaggaaatttatacacacttcacatgcgcgactgacaccaagaacgtgcagttcgttttcgacgccgtcaccgacgtgatcatcaaaaataatctgaaagactgcggcctgttttag

SEQ ID NO: 64952 - DNA, 1663 bp, Artificial Sequence
  derived and/or modified sequence
tgtgagtgcggcagcggcagtgagtgggtgtcgacgcggcggaatgcccgtcgctgctgctgctgctgcccgacgggcctggggagggcacttccggtaccgctgcctcccagtgcccagccaggagtctctagacagcctctccccaggcgattgcagttactgtggtggccgaggaaatgcaagactggaccatagagctgggggaacgcagggcttctggctagttttgtgtcccgacaccagaagggtcccccatcccaccaggcctgctccttggagcccagctcaccttttgggctaaggtgctggggagtcagggaagagcaccatcgtcaagcagatgaagatcatccacgaggatggctactccgaggaggaatgccggcagtaccgggcggttgtctacagcaacaccatccagtccatcatggccattgtcaaagccatgggcaacctgcagatcgactttgccgacccctccagagcggacgacgccaggcagctatttgcactgtcctgcaccgccgaggagcaaggcgtgctccctgatgacctgtccggcgtcatccggaggctctgggctgaccatggtgtgcaggcctgctttggccgctcaagggaataccagctcaacgactcagctgcctactacctgaacgacctggagcgtattgcacagagtgactacatccccacacagcaagatgtgctacggacccgcgtaaagaccacggggatcgtggagacacacttcaccttcaaggacctacacttcaagatgtttgatgtgggtggtcagcggtctgagcggaagaagtggatccactgctttgagggcgtcacagccatcatcttctgcgtagccttgagcgcctatgacttggtgctagctgaggacgaggagatgaaccgcatgcatgagagcatgaagctattcgatagcatctgcaacaacaagtggttcacagacacgtccatcatcctcttcctcaacaagaaggacctgtttgaggagaagatcacacacagtcccctgaccatctgcttccctgagtacacaggggccaacaaatatgatgaggcagccagctacatccagagtaagtttgaggacctgaataagcgcaaagacaccaaggagatctacacgcacttcacgtgcgccaccgacaccaagaacgtgcagttcgtgtttgacgccgtcaccgatgtcatcatcaagaacaacctgaaggactgcggcctcttctgaggggcagcggggcctggcgggatgggccaccgccgactttgtaccccccaacccctgaggaagatgggggcaagaagatcacgctccccgcctgttcccccgccgcttttctcctctttcctctctttgttctcagctccccctgtcccctcagctccagacgtaggggaggggttgccacaggcctccctgtttgaagcctgcccttgtctgagatgctggtaatggccatggtacccccttctgggcatctgttctggtttttaaccattgtcttgttctgtgatgaggggaggggggcacatgctgagtctcccaaggctgcgtctggaggggcccctgcttctccagcctggacccccagctttgcccaacaccagcccctgccccagcccaagtccaaatgtt

SEQ ID NO: 64953 - DNA, 1486 bp, Artificial Sequence
  derived and/or modified sequence
agtagctctgactcctgtcccaggttatgctgagtcccagcagggaaccaccacagctctgaatcagcctgttagccgctgtccattgctcttcatctgctctttatctgaaaatcttcagaagctttccttcaaatgagatgaccacagcagtcttctctgcaggttgcaggaaatgagaggtgctggggagtcagggaagagcaccatcgtcaagcagatgaagatcatccacgaggatggctactccgaggaggaatgccggcagtaccgggcggttgtctacagcaacaccatccagtccatcatggccattgtcaaagccatgggcaacctgcagatcgactttgccgacccctccagagcggacgacgccaggcagctatttgcactgtcctgcaccgccgaggagcaaggcgtgctccctgatgacctgtccggcgtcatccggaggctctgggctgaccatggtgtgcaggcctgctttggccgctcaagggaataccagctcaacgactcagctgcctactacctgaacgacctggagcgtattgcacagagtgactacatccccacacagcaagatgtgctacggacccgcgtaaagaccacggggatcgtggagacacacttcaccttcaaggacctacacttcaagatgtttgatgtgggtggtcagcggtctgagcggaagaagtggatccactgctttgagggcgtcacagccatcatcttctgcgtagccttgagcgcctatgacttggtgctagctgaggacgaggagatgaaccgcatgcatgagagcatgaagctattcgatagcatctgcaacaacaagtggttcacagacacgtccatcatcctcttcctcaacaagaaggacctgtttgaggagaagatcacacacagtcccctgaccatctgcttccctgagtacacaggggccaacaaatatgatgaggcagccagctacatccagagtaagtttgaggacctgaataagcgcaaagacaccaaggagatctacacgcacttcacgtgcgccaccgacaccaagaacgtgcagttcgtgtttgacgccgtcaccgatgtcatcatcaagaacaacctgaaggactgcggcctcttctgaggggcagcggggcctggcgggatgggccaccgccgactttgtaccccccaacccctgaggaagatgggggcaagaagatcacgctccccgcctgttcccccgccgcttttctcctctttcctctctttgttctcagctccccctgtcccctcagctccagacgtaggggaggggttgccacaggcctccctgtttgaagcctgcccttgtctgagatgctggtaatggccatggtacccccttctgggcatctgttctggtttttaaccattgtcttgttctgtgatgaggggaggggggcacatgctgagtctcccaaggctgcgtctggaggggcccctgcttctccagcct

SEQ ID NO: 64954 - DNA, 957 bp, Artificial Sequence
  derived and/or modified sequence
atgagaggagctggggagagcggcaagagcaccatcgtgaagcagatgaagatcatccatgaagatggctacagcgaggaggagtgccggcagtacagagctgtggtgtacagcaacaccatccagagcatcatggccatcgtgaaggccatgggcaacctgcagattgactttgctgaccccagcagagcagatgatgcccggcagctgtttgccctgagctgcacagctgaggagcagggcgtgctgcctgatgacctgagcggggtcatccggcggctgtgggccgaccacggcgtgcaggcctgcttcggccgcagccgggagtaccagctgaatgattctgctgcctactacctgaatgacctggagcgcatcgcccagagcgactacatccccacccagcaggatgtgctgcggaccagggtgaagaccaccggcatcgtggagacccacttcaccttcaaggacctgcacttcaagatgtttgatgtgggcggccagaggtctgagaggaagaagtggatccactgctttgaaggagtgacagccatcatcttctgtgtggccctgagcgcctatgacctggtgctggccgaggatgaggagatgaacaggatgcatgagagcatgaagctgtttgacagcatctgcaacaacaagtggttcacagacaccagcatcatcctcttcctgaacaagaaggacctgtttgaggagaagatcacccacagccccctgaccatctgcttccctgagtacacaggagccaacaagtatgatgaagctgccagctacatccagagcaagtttgaggacctgaacaagaggaaggacaccaaggagatctacacccacttcacctgtgccacagacaccaagaatgtgcagtttgtgtttgatgctgtgacagatgtgatcatcaagaacaacctgaaggactgtggcctcttctag

SEQ ID NO: 64955 - DNA, 957 bp, Artificial Sequence
  derived and/or modified sequence
atgcggggcgccggcgagagcggcaagagcaccatcgtgaagcagatgaaaataattcacgaggatggatactccgaggaagaatgtcgtcagtacagagcggtggtgtacagcaacacgatccagagcatcatggctattgtgaaagcaatgggcaatctccagatcgatttcgccgatccaagtcgagccgacgacgctaggcaactgttcgctttgtcttgtactgctgaagagcagggggtcttgcctgacgatttaagtggggtgattagaagactgtgggccgaccatggggtgcaagcttgtttcggacggagtcgtgaatatcaattaaacgacagtgccgcttactacctgaacgatctggagcggattgctcagagcgattacatcccaacccagcaggacgtgctgaggacaagagtcaagactactggtatcgtggagacacacttcacttttaaagatctgcatttcaaaatgttcgacgttggcggccagaggagtgagcggaagaaatggatccattgttttgagggagtcacagcaatcatcttctgcgtcgcactgagcgcctatgatcttgtgctggccgaggatgaagaaatgaatcgcatgcatgaatctatgaagctctttgactctatctgtaataacaagtggttcactgatacaagtattatcttattccttaacaaaaaagatttgtttgaagagaaaattacacacagccccctgacaatttgctttccagaatacacaggggccaataagtacgacgaggctgcgagctacatacaaagtaagtttgaggacctaaacaagaggaaggataccaaagaaatctacacgcacttcacgtgtgcgactgacaccaagaatgtgcagttcgtgttcgatgctgttacggatgtgatcattaagaataatttgaaggactgcggcctgttctag

SEQ ID NO: 64956 - DNA, 957 bp, Artificial Sequence
  derived and/or modified sequence
atgcgcggtgcaggcgagtcaggcaagtctaccatcgttaaacagatgaagataatacacgaggacgggtacagcgaggaggagtgcagacagtatcgagcagttgtttattccaataccatacagtccataatggcgatcgtgaaagcaatgggaaacttgcaaatcgacttcgccgatccatcacgggcagatgacgccagacagcttttcgcactctcatgcacagccgaagagcaaggggtcttacccgacgacctgtcaggggtgataaggcgtctctgggccgaccacggagtgcaggcttgcttcgggcgttcgcgagagtatcagcttaatgactcggcggcttactacctcaatgatcttgagcggattgcccagtccgattacatcccaacacagcaggatgttttgcgcacacgggtcaagaccaccggcatcgtcgaaacccatttcactttcaaagacctgcatttcaaaatgtttgatgtgggtgggcaacggtcggaaagaaaaaaatggatccactgtttcgagggggtcactgcaatcatcttttgcgttgcactctctgcctacgacctggtccttgccgaggacgaagaaatgaatcgaatgcacgagtccatgaaactctttgactccatctgcaacaacaaatggttcaccgatacaagtatcatcctgtttctcaacaaaaaagatttgttcgaggaaaagataacacacagtccccttaccatctgtttcccggaatacacaggagccaataagtacgacgaagcagcttcttacattcagtccaaattcgaagacctcaacaagcgcaaagataccaaagagatttacacgcacttcacctgtgctaccgatacgaaaaacgtacaatttgtcttcgatgctgttacggatgtgataattaaaaacaatctgaaggactgcggattgttttag

SEQ ID NO: 64957 - DNA, 957 bp, Artificial Sequence
  derived and/or modified sequence
atgagaggcgccggcgagagcggcaagagcaccatcgtgaagcagatgaagatcatccacgaggacggctacagcgaggaggagtgcagacagtacagagccgtggtgtacagcaacaccatccagagcatcatggccatcgtgaaggccatgggcaacctgcagatcgacttcgccgaccccagcagagccgacgacgccagacagctgttcgccctgagctgcaccgccgaggagcagggcgtgctgcccgacgacctgagcggcgtgatcagaagactgtgggccgaccacggcgtgcaggcctgcttcggcagaagcagagagtaccagctgaacgacagcgccgcctactacctgaacgacctggagagaatcgcccagagcgactacatccccacccagcaggacgtgctgagaaccagagtgaagaccaccggcatcgtggagacccacttcaccttcaaggacctgcacttcaagatgttcgacgtgggcggccagagaagcgagagaaagaagtggatccactgcttcgagggcgtgaccgccatcatcttctgcgtggccctgagcgcctacgacctggtgctggccgaggacgaggagatgaacagaatgcacgagagcatgaagctgttcgacagcatctgcaacaacaagtggttcaccgacaccagcatcatcctgttcctgaacaagaaggacctgttcgaggagaagatcacccacagccccctgaccatctgcttccccgagtacaccggcgccaacaagtacgacgaggccgccagctacatccagagcaagttcgaggacctgaacaagagaaaggacaccaaggagatctacacccacttcacctgcgccaccgacaccaagaacgtgcagttcgtgttcgacgccgtgaccgacgtgatcatcaagaacaacctgaaggactgcggcctgttctag

SEQ ID NO: 64958 - protein, 139 aa, Artificial Sequence
  derived and/or modified sequence
MEEPEEPADSGQSLVPVYIYSPEYVSMCDSLAKIPKRASMVHSLIEAYALHKQMRDEASGFCYLNDAVLGILRLRRKFERILYVDLDLHHGDGTGDVSDVGLGKGRYYSVNVPIQDGIQDEKYYQICERYEPPAPNPGL

SEQ ID NO: 64959 - DNA, 420 bp, Artificial Sequence
  derived and/or modified sequence
atggaggagcccgaggagcccgccgacagcggccagagcctggtgcccgtgtacatctacagccccgagtacgtgagcatgtgcgacagcctggccaagatccccaagagagccagcatggtgcacagcctgatcgaggcctacgccctgcacaagcagatgagagacgaggccagcggcttctgctacctgaacgacgccgtgctgggcatcctgagactgagaagaaagttcgagagaatcctgtacgtggacctggacctgcaccacggcgacggcaccggcgacgtgagcgacgtgggcctgggcaagggcagatactacagcgtgaacgtgcccatccaggacggcatccaggacgagaagtactaccagatctgcgagagatacgagccccccgcccccaaccccggcctgtag

SEQ ID NO: 64960 - DNA, 420 bp, Artificial Sequence
  derived and/or modified sequence
atggaagagcccgaggagcccgctgacagtgggcagtcactcgtaccagtgtatatatactcaccagagtacgtctctatgtgcgatagcttggctaagattccgaagcgagctagcatggtccactccctcatcgaagcctacgcactccacaagcagatgcgtgatgaagctagcggtttctgctatctgaatgatgccgtgctgggcatactgcggttgcgccgaaaattcgagaggatcctttacgtagacctggacctgcatcacggagacggtacaggggatgtttcagatgtcggactggggaagggacggtactattcagtaaacgtgcccattcaagacggtatccaggacgaaaagtattaccaaatctgtgagcgctacgaacctccagctcctaatccgggactctag

SEQ ID NO: 64961 - DNA, 632 bp, Artificial Sequence
  derived and/or modified sequence
ccgaaaaaagccagatctggaaggtggctgcggaacggttttaagcggaagatggaggagccggaggaaccggcggacagtgggcagtcgctggtcccggtttatatctatagtcccgagtatgtcagtatgtgtgactccctggccaagatccccaaacgggccagtatggtgcattctttgattgaagcatatgcactgcataagcagatgagagatgaagcatctggtttttgttatctcaatgatgctgtcctgggaatattacgattgcgacggaaatttgagcgtattctctacgtggatttggatctgcaccatggagatggaacaggtgacgtgtctgatgttggcctagggaagggacggtactacagtgtaaatgtgcccattcaggatggcatacaagatgaaaaatattaccagatctgtgaaaggtacgaacctcctgccccaaatccaggcctgtagaagcagctgccgcagcttgtcttccccatttgcatagccttgtctgaaaactagactgctgaatactgaaggatcaggtttctcatcaagaaaactgcattttaaatgaatatcttgtatgtttatagggaagttactaatgtagtataaagagatgcctg

SEQ ID NO: 64962 - DNA, 420 bp, Artificial Sequence
  derived and/or modified sequence
atggaggagcctgaggagcctgctgacagcggccagagcctggtgcctgtgtacatctacagcccagaatatgtgtccatgtgtgacagcctggccaagatccccaagagggcctccatggtgcacagcctgattgaggcctatgccctgcacaagcagatgagagatgaggccagcggcttctgctacctgaatgatgctgtgctgggcatcctgcggctgcggaggaagtttgagcgcatcctgtatgtggacctggacctgcaccacggagatggcactggagatgtgtctgatgtgggcctgggcaagggccgctactacagcgtgaatgtgcccatccaggacggcatccaggatgagaagtactaccagatctgtgaaagatatgagcccccagcccccaaccctggcctgtag

SEQ ID NO: 64963 - DNA, 420 bp, Artificial Sequence
  derived and/or modified sequence
atggaggagcccgaggagcccgccgacagcggccagagcctggtgcctgtgtacatttatagccccgagtatgtctccatgtgtgacagcctcgccaagatacccaaaagagcctcaatggtgcactcactaatcgaagcctacgccttacacaagcagatgagggacgaagcgtccggtttctgctacctgaatgacgccgtgttgggcattctgcgtctgcgcaggaagtttgagcggattctgtacgtggacttggatttacaccatggcgacggcactggagatgtgtcagacgtgggactcgggaagggcagatactacagcgtgaacgtccctatccaggatgggattcaggatgagaagtattaccaaatttgcgaacgttacgagcctccagcccccaatcctgggctgtag

SEQ ID NO: 64964 - DNA, 420 bp, Artificial Sequence
  derived and/or modified sequence
atggaggaacccgaggaaccagctgacagcggccagtcactggtacccgtttacatctattctccagagtatgtttctatgtgtgactccctggcaaaaatcccaaaacgggcaagcatggttcactctctcattgaggcctatgcgcttcataaacaaatgagggacgaggccagcggtttctgctatctcaacgatgcagtgttaggaattctgcgcctgcgcaggaaattcgaacggattctgtatgtggacttagatctccaccacggtgatggcacgggggacgtttcagacgtggggttaggtaagggccgttactactcggtaaatgttcccatacaggacgggatccaggacgaaaaatattaccagatatgcgagcggtacgagcctccagcccctaatcccggattatag

SEQ ID NO: 64965 - protein, 914 aa, Artificial Sequence
  derived and/or modified sequence
MKPPRPVRTCSKVLVLLSLLAIHQTTTAEKNGIDIYSLTVDSRVSSRFAHTVVTSRVVNRANTVQEATFQMELPKKAFITNFSMIIDGMTYPGIIKEKAEAQAQYSAAVAKGKSAGLVKATGRNMEQFQVSVSVAPNAKITFELVYEELLKRRLGVYELLLKVRPQQLVKHLQMDIHIFEPQGISFLETESTFMTNQLVDALTTWQNKTKAHIRFKPTLSQQQKSPEQQETVLDGNLIIRYDVDRAISGGSIQIENGYFVHYFAPEGLTTMPKNVVFVIDKSGSMSGRKIQQTREALIKILDDLSPRDQFNLIVFSTEATQWRPSLVPASAENVNKARSFAAGIQALGGTNINDAMLMAVQLLDSSNQEERLPEGSVSLIILLTDGDPTVGETNPRSIQNNVREAVSGRYSLFCLGFGFDVSYAFLEKLALDNGGLARRIHEDSDSALQLQDFYQEVANPLLTAVTFEYPSNAVEEVTQNNFRLLFKGSEMVVAGKLQDRGPDVLTATVSGKLPTQNITFQTESSVAEQEAEFQSPKYIFHNFMERLWAYLTIQQLLEQTVSASDADQQALRNQALNLSLAYSFVTPLTSMVVTKPDDQEQSQVAEKPMEGESRNRNVHSAGAAGSRMNFRPGVLSSRQLGLPGPPDVPDHAAYHPFRRLAILPASAPPATSNPDPAVSRVMNMKIEETTMTTQTPACPSCSRSRAPAVPAPIQAPSAILPLPGQSVERLCVDPRHRQGPVNLLSDPEQGVEVTGQYEREKAGFSWIEVTFKNPLVWVHASPEHVVVTRNRRSSAYKWKETLFSVMPGLKMTMDKTGLLLLSDPDKVTIGLLFWDGRGEGLRLLLRDTDRFSSHVGGTLGQFYQEVLWGSPAASDDGRRTLRVQGNDHSATRERRLDYQEGPPGVEISCWSVEL

SEQ ID NO: 64966 - protein, 900 aa, Artificial Sequence
  derived and/or modified sequence
MKPPRPVRTCSKVLVLLSLLAIHQTTTAEKNGIDIYSLTVDSRVSSRFAHTVVTSRVVNRANTVQEATFQMELPKKAFITNFSMIIDGMTYPGIIKEKAEAQAQYSAAVAKGKSAGLVKATGRNMEQFQVSVSVAPNAKITFELVYEELLKRRLGVYELLLKVRPQQLVKHLQMDIHIFEPQGISFLETESTFMTNQLVDALTTWQNKTKAHIRFKPTLSQQQKSPEQQETVLDGNLIIRYDVDRAISGGSIQIENGYFVHYFAPEGLTTMPKNVVFVIDKSGSMSGRKIQQTREALIKILDDLSPRDQFNLIVFSTEATQWRPSLVPASAENVNKARSFAAGIQALGGTNINDAMLMAVQLLDSSNQEERLPEGSVSLIILLTDGDPTVGETNPRSIQNNVREAVSGRYSLFCLGFGFDVSYAFLEKLALDNGGLARRIHEDSDSALQLQDFYQEVANPLLTAVTFEYPSNAVEEVTQNNFRLLFKGSEMVVAGKLQDRGPDVLTATVSGKLPTQNITFQTESSVAEQEAEFQSPKYIFHNFMERLWAYLTIQQLLEQTVSASDADQQALRNQALNLSLAYSFVTPLTSMVVTKPDDQEQSQVAEKPMEGESRNRNVHSAGAAGSRMNFRPGVLSSRQLGLPGPPDVPDHAAYHPFRRLAILPASAPPATSNPDPAVSRVMNMKIEETTMTTQTPAPIQAPSAILPLPGQSVERLCVDPRHRQGPVNLLSDPEQGVEVTGQYEREKAGFSWIEVTFKNPLVWVHASPEHVVVTRNRRSSAYKWKETLFSVMPGLKMTMDKTGLLLLSDPDKVTIGLLFWDGRGEGLRLLLRDTDRFSSHVGGTLGQFYQEVLWGSPAASDDGRRTLRVQGNDHSATRERRLDYQEGPPGVEISCWSVEL

SEQ ID NO: 64967 - protein, 888 aa, Artificial Sequence
  derived and/or modified sequence
MKPPRPVRTCSKVLVLLSLLAIHQTTTAEKNGIDIYSLTVDSRVSSRFAHTVVTSRVVNRANTVQEATFQMELPKKAFITNFSMIIDGMTYPGIIKEKAEAQAQYSAAVAKGKSAGLVKATGRNMEQFQVSVSVAPNAKRRLGVYELLLKVRPQQLVKHLQMDIHIFEPQGISFLETESTFMTNQLVDALTTWQNKTKAHIRFKPTLSQQQKSPEQQETVLDGNLIIRYDVDRAISGGSIQIENGYFVHYFAPEGLTTMPKNVVFVIDKSGSMSGRKIQQTREALIKILDDLSPRDQFNLIVFSTEATQWRPSLVPASAENVNKARSFAAGIQALGGTNINDAMLMAVQLLDSSNQEERLPEGSVSLIILLTDGDPTVGETNPRSIQNNVREAVSGRYSLFCLGFGFDVSYAFLEKLALDNGGLARRIHEDSDSALQLQDFYQEVANPLLTAVTFEYPSNAVEEVTQNNFRLLFKGSEMVVAGKLQDRGPDVLTATVSGKLPTQNITFQTESSVAEQEAEFQSPKYIFHNFMERLWAYLTIQQLLEQTVSASDADQQALRNQALNLSLAYSFVTPLTSMVVTKPDDQEQSQVAEKPMEGESRNRNVHSAGAAGSRMNFRPGVLSSRQLGLPGPPDVPDHAAYHPFRRLAILPASAPPATSNPDPAVSRVMNMKIEETTMTTQTPAPIQAPSAILPLPGQSVERLCVDPRHRQGPVNLLSDPEQGVEVTGQYEREKAGFSWIEVTFKNPLVWVHASPEHVVVTRNRRSSAYKWKETLFSVMPGLKMTMDKTGLLLLSDPDKVTIGLLFWDGRGEGLRLLLRDTDRFSSHVGGTLGQFYQEVLWGSPAASDDGRRTLRVQGNDHSATRERRLDYQEGPPGVEISCWSVEL

SEQ ID NO: 64968 - DNA, 2745 bp, Artificial Sequence
  derived and/or modified sequence
atgaagccaccccggccagtgcgtacatgttcaaaggtgctggtcctgctgtcactgctcgcaatccatcagacaactaccgccgaaaagaatgggatcgatatttattccttgacagttgattccagggtgtccagccgatttgcccacaccgtggttactagccgtgtggtcaacagagctaacactgttcaagaggccacattccagatggaactgccaaagaaggccttcatcactaacttctcaatgatcatcgatggaatgacctatccaggtatcatcaaggaaaaagcagaggcacaagcccaatactccgcagctgtcgctaaaggcaagagcgccgggttggtgaaggctaccgggcggaacatggaacagttccaggtctctgtcagcgtggctccaaacgctaaaataactttcgagctcgtctacgaggaactgctcaagagacggctcggagtgtacgagctgctcttgaaggtccgacctcaacagttggttaagcatctgcagatggacatccatatcttcgaaccacaggggatctcttttctcgaaacagagagtacatttatgaccaaccagctggtggatgccttgacgacttggcagaataagaccaaggcccacataaggtttaaacctactctgagtcagcagcagaaatcaccggagcagcaggaaacagtactggacggcaacctgatcatcaggtacgacgtggatcgggccatctcgggtggatccatccagattgaaaacggctactttgtgcattatttcgccccagagggattaaccacaatgcccaagaatgtggtctttgtgatcgacaagagtggatccatgtctggtaggaagatccagcagacccgagaggccctgattaagatcctggacgatctaagcccaagggaccagttcaatctgattgtgttctctacggaagctacccaatggaggccatccctggtacctgcttcggctgaaaacgtgaacaaagccagatcgttcgcagccgggattcaggctctgggcgggactaacatcaacgatgccatgctgatggccgtccaactgctggactcctcgaaccaggaggaaaggttaccagaggggtcagtgtccttgattatcctgctgaccgatggtgatccaacagtcggagaaacaaatcccagatcaattcagaataatgttagggaggctgtaagcggacgttacagcctgttctgtctggggttcgggtttgacgtgagctacgctttcttagaaaagctcgctctggataacgggggcctggcaagaagaatacacgaagactccgattcagccctgcaactccaggatttttatcaggaggtggctaacccacttctgacagcagtgacattcgagtatcccagtaatgctgttgaggaggtcactcagaataatttccgcttactgtttaaaggatctgagatggtagtcgccgggaaactccaagacagagggcccgacgtgctcaccgccactgtcagtggaaagcttcctactcaaaacataacattccaaacagagtcatcagtggctgaacaagaggctgaattccagtctcctaagtatatatttcacaacttcatggagcggctctgggcctacttaactattcagcaactcctggagcaaaccgttagtgccagcgatgccgaccagcaagccctgaggaatcaggccctgaatctctctcttgcctacagtttcgtgacccctctgaccagcatggtcgttactaagcccgatgatcaggaacaatcgcaggtggctgagaaacccatggagggggagagccgcaatcgcaatgtgcatagtgctggagccgccggatctcgcatgaacttcagaccgggtgtattgtcaagtcggcaactcggccttccgggcccacccgacgtcccagaccatgcagcctaccatccttttaggagattggctattttgcctgcctcagctccccccgccacatctaatccagatcctgccgtaagtcgggtaatgaacatgaaaattgaggagaccacaatgaccacccagaccccagcttgcccttcctgcagcagatcgcgtgcaccggccgtgcccgctcctattcaagctcccagtgcaatcttaccactcccaggacaatcagtggagaggctttgcgtggatcctcgacatcgccagggaccagtcaacctgctgtctgacccggagcagggcgtcgaagtgactggccagtacgagagggagaaggccggtttttcttggatcgaagtgacatttaagaacccactggtatgggttcacgcatcccccgaacatgtggtcgttacaaggaatcggagaagctcagcatacaagtggaaggaaacactgttttccgtgatgccaggattgaagatgacgatggataaaacaggtctgctgttgcttagtgatcccgataaggtcacaattggactcctcttttgggatggacgcggcgagggactgcgactattgcttagggacactgaccggttctccagccacgtcggcggaactctgggtcaattttatcaggaggtcctgtggggctcccctgcagccagtgatgacggccgtagaaccctgcgcgtgcaaggtaatgatcattctgcaaccagagaaaggagactggactaccaggagggtccaccaggtgttgagatttcctgctggagcgttgagctgtag

SEQ ID NO: 64969 - DNA, 2703 bp, Artificial Sequence
  derived and/or modified sequence
atgaaaccaccacgccctgttcgaacttgcagtaaagtgctggttctgctgtccctgctcgccattcatcagacgactacggcagagaagaacggaatagatatctattctttaacggtagactcgagagtctccagcaggtttgctcatacagtagttacaagccgcgtagtgaatcgcgctaatacagtgcaggaagctaccttccagatggagcttccgaagaaggccttcattaccaacttttccatgataatagatggcatgacatacccgggaatcatcaaggagaaggcagaggcccaagcccagtatagcgctgcagtggctaagggaaaatctgccggcctggtgaaggctacgggcagaaatatggagcagttccaagtgtcggtgtcggtggctcctaacgctaagatcactttcgaactagtttacgaagagctgctaaaaaggcggttgggggtctatgaactcctgttaaaagttagacctcagcaattggtcaagcatctacagatggatatacatatcttcgagccccagggcatttcttttctcgaaacagaaagcactttcatgaccaatcagctagtcgatgcactgaccacatggcagaacaagacaaaggcgcacatcaggtttaagcctaccttgagccagcaacagaagagccctgaacagcaggagactgtcttggatggtaacctgatcatacggtacgacgtggaccgcgccatctccggaggtagcattcagatcgagaatggctactttgtccactattttgctcctgaagggttgacaacaatgcctaagaacgtcgtgtttgtaatagacaagtctggaagcatgtccggaaggaaaattcagcagacacgggaggccctgataaagatcctagatgatctttccccgcgcgatcaatttaacctgatcgtgtttagcaccgaggccacacagtggcgccctagccttgttcccgctagcgcggagaatgtcaataaggcacggtcgttcgccgccggcattcaggctctgggcggtaccaacatcaatgacgccatgctcatggccgtgcagctgttggattcctctaaccaagaggaacggctgcccgagggctctgtgtccctgatcattctgctgactgacggtgacccaacagtaggcgagactaatccccgctctatccagaataatgttcgggaggctgtctccggtcgctacagcctgttctgtctgggcttcgggtttgacgtctcttacgctttcctggaaaagctggccttggataacggcggcctggcgagacgcatccatgaggattccgactcagctctgcagctacaagatttttaccaggaggtggctaacccgctactgactgccgtcacttttgaatatcctagtaacgccgtcgaagaggttactcagaataactttcggctattgttcaaggggtcagagatggtggtggcaggcaaactgcaagataggggcccagatgtcctgaccgccaccgtgagtggaaaactccctactcagaatatcacattccagactgagagcagcgttgccgagcaggaagctgagttccagtcgccgaagtatatcttccacaactttatggaaagattgtgggcctacctaactattcagcagctactcgaacagactgtgagtgcatctgatgccgaccagcaggccctccgaaaccaggctttgaatttatccctcgcctacagttttgttacgccgttgacatcaatggtcgtcactaaaccagatgaccaggagcagagccaggtcgccgaaaagccgatggagggtgagtcacggaacaggaacgttcattccgcaggagcagctgggtctcgcatgaacttcaggcccggcgtgctctcatcaaggcagctgggactccctggcccgcccgatgtcccagatcacgcggcataccacccatttcgacgtctcgcaatccttccggcttcagcaccacctgctacctccaaccccgaccctgccgtgtcacgcgttatgaatatgaagatcgaggaaaccaccatgactacccagacccccgccccgattcaggccccttctgctatactcccactacccggacagagtgtcgaacggctgtgtgtggacccgaggcaccggcaggggccggtaaatctgttaagcgacccagagcaaggcgttgaagtgacaggccaatatgagagggagaaggccggctttagctggatcgaggtcactttcaagaatcctcttgtctgggtacacgctagtccggagcacgttgtggtgactcgcaatcgacgaagctctgcctataagtggaaggagacactcttctccgtcatgcctgggttgaaaatgacaatggataaaaccggactactcctgctatccgacccagataaggttactatcggcttactgttttgggacgggcggggtgagggactaaggctgctgcttcgggacacggatcggttttcaagccacgtgggaggcactctgggccaattttaccaggaagtgctctggggtagccccgctgcatccgacgacggacgccgtacccttcgcgtgcagggtaatgaccactcagcaactcgcgagcggagactggattaccaagaaggacccccgggcgtggagattagctgctggagcgtcgagctctag

SEQ ID NO: 64970 - DNA, 2667 bp, Artificial Sequence
  derived and/or modified sequence
atgaagcctcctcggccagttaggacttgctccaaagtccttgtgttgctaagcctccttgctatccatcagaccactacggccgaaaaaaacgggatcgatatttactccctcacggtggacagcagagtgagctccagatttgcacacaccgtcgtgactagtcgggtcgtgaaccgggctaatactgtgcaggaggccacttttcagatggagctgccaaaaaaagcattcataaccaacttctcaatgatcatcgacgggatgacgtaccctggaatcattaaggaaaaggcggaggcgcaggctcagtactctgccgccgtggctaaaggtaagtcggcgggattggtgaaggcaacgggccggaatatggagcagttccaagtgtctgtctccgtggccccgaacgctaagagaaggctgggcgtctacgagctcctcctcaaggttaggcctcagcagttggttaagcacctgcagatggacatacacatctttgaacctcagggaatttcgttcctggagactgaatccacattcatgaccaaccagttggtcgatgcgttgaccacttggcagaacaagacaaaagcacatatccgttttaagcccacactgtcccaacagcagaaatctcccgaacagcaggaaaccgttctcgacggcaacttgattattagatacgacgttgacagagctatctcaggcgggtccatccagatagagaatggatactttgtgcactatttcgcaccagagggattgactacaatgcctaaaaacgtcgtattcgtcatagacaagagcggctctatgagcggcaggaagatccagcagactagggaggccttgattaaaatacttgatgatttgtctccaagggatcagttcaacctgatagtgttctccacagaggctactcagtggcggccctcgctcgtgccggcgtctgccgagaatgtgaataaggcccggagctttgctgccggaatacaagcgctcggagggacaaacatcaacgacgcaatgctgatggctgtgcagctgttggactcatccaatcaagaagagcggctgccggagggatctgtcagtttgatcattttgctaaccgatggagatcctacagtgggcgaaacaaatcctcgcagcattcagaacaatgtccgtgaggccgtgtccggtagatattccctgttctgcctgggatttgggttcgatgttagctacgcattcttggaaaagctcgccctcgacaatggcggactcgcccgccggatccacgaggactctgattcagcactccagcttcaggatttttatcaggaagtggctaacccgctcctcaccgccgtgaccttcgagtacccaagcaacgccgtggaagaggtcacacagaacaatttccgcctcctgttcaaaggttcagaaatggtggtcgcgggtaagctgcaggaccgcggcccagatgtccttactgcaacagtgtcggggaagcttcctacccagaacatcacattccaaacagaatcttcagtggctgagcaagaggccgaatttcaatcgccaaagtacattttccacaacttcatggagcgtctctgggcctatctcactatccagcagctcctcgaacagacggtcagtgcctccgatgccgaccaacaggcactccgtaaccaggcccttaacctcagcttggcttactccttcgtgacaccattaacctccatggtcgtcactaagcccgacgaccaggaacaatcccaagtcgctgaaaagcccatggagggcgaaagcagaaataggaacgtgcacagcgctggggctgccggctccaggatgaacttccgcccaggggtcctgagttcacggcagctgggcctgccgggacctcctgacgtgccagaccatgctgcttaccacccctttcgaagactggccatcttaccggccagtgctccccccgcgactagcaacccagatcctgccgttagccgcgtgatgaacatgaagatcgaggaaacaaccatgacgactcagaccccggctcccatccaggccccatccgctattttacccctgcccggccagtccgtggaaagactgtgtgtagaccctagacacaggcaaggcccggttaacctcctgagcgatccagagcagggcgtggaggtaacagggcagtacgagcgggagaaggccggattttcctggatagaggttacgttcaagaaccccttggtttgggttcacgcctcgccggagcatgtagtcgttactagaaaccgccgatcttcagcatacaagtggaaagagactctgttttcagtaatgccgggtctaaaaatgacaatggataagactgggctgctgttgctgtctgatcctgacaaagtcactatcggacttttattctgggacggtaggggagaggggctgcggctcttgttgcgagatactgaccggttcagtagccacgtcgggggcacattgggccaattttatcaggaggtgctatggggctctcccgccgcctcagatgacggcagaaggactctccgagtgcaagggaatgaccattctgcgaccagggagcggcggctggactatcaggaaggtccccccggagtcgagatcagctgctggtccgtggaactctag

SEQ ID NO: 64971 - DNA, 3235 bp, Artificial Sequence
  derived and/or modified sequence
taatccattccccacttgctgtcgagttcagaagcctcctggcagacactggagccacgatgaagcccccaaggcctgtccgtacctgcagcaaagttctcgtcctgctttcactgctggccatccaccagactactactgccgaaaagaatggcatcgacatctacagcctcaccgtggactccagggtctcatcccgatttgcccacacggtcgtcaccagccgagtggtcaatagggccaatactgtgcaggaggccaccttccagatggagctgcccaagaaagccttcatcaccaacttctccatgatcatcgatggcatgacctacccagggatcatcaaggagaaggctgaagcccaggcacagtacagcgcagcagtggccaagggaaagagcgctggcctcgtcaaggccaccgggagaaacatggagcagttccaggtgtcggtcagtgtggctcccaatgccaagatcacctttgagctggtctatgaggagctgctcaagcggcgtttgggggtgtacgagctgctgctgaaagtgcggccccagcagctggtcaagcacctgcagatggacattcacatcttcgagccccagggcatcagctttctggagacagagagcaccttcatgaccaaccagctggtagacgccctcaccacctggcagaataagaccaaggctcacatccggttcaagccaacactttcccagcagcaaaagtccccagagcagcaagaaacagtcctggacggcaacctcattatccgctatgatgtggaccgggccatctccgggggctccattcagatcgagaacggctactttgtacactactttgcccccgagggcctaaccacaatgcccaagaatgtggtctttgtcattgacaagagcggctccatgagtggcaggaaaatccagcagacccgggaagccctaatcaagatcctggatgacctcagccccagagaccagttcaacctcatcgtcttcagtacagaagcaactcagtggaggccatcactggtgccagcctcagccgagaacgtgaacaaggccaggagctttgctgcgggcatccaggccctgggagggaccaacatcaatgatgcaatgctgatggctgtgcagttgctggacagcagcaaccaggaggagcggctgcccgaagggagtgtctcactcatcatcctgctcaccgatggcgaccccactgtgggggagactaaccccaggagcatccagaataacgtgcgggaagctgtaagtggccggtacagcctcttctgcctgggcttcggtttcgacgtcagctatgccttcctggagaagctggcactggacaatggcggcctggcccggcgcatccatgaggactcagactctgccctgcagctccaggacttctaccaggaagtggccaacccactgctgacagcagtgaccttcgagtacccaagcaatgccgtggaggaggtcactcagaacaacttccggctcctcttcaagggctcagagatggtggtggctgggaagctccaggaccgggggcctgatgtgctcacagccacagtcagtgggaagctgcctacacagaacatcactttccaaacggagtccagtgtggcagagcaggaggcggagttccagagccccaagtatatcttccacaacttcatggagaggctctgggcatacctgactatccagcagctgctggagcaaactgtctccgcatccgatgctgatcagcaggccctccggaaccaagcgctgaatttatcacttgcctacagctttgtcacgcctctcacatctatggtagtcaccaaacccgatgaccaagagcagtctcaagttgctgagaagcccatggaaggcgaaagtagaaacaggaatgtccactcagctggagctgctggctcccggatgaatttcagacctggggttctcagctccaggcaacttggactcccaggacctcctgatgttcctgaccatgctgcttaccaccccttccgccgtctggccatcttgcctgcttcagcaccaccagccacctcaaatcctgatccagctgtgtctcgtgtcatgaatatgaaaatcgaagaaacaaccatgacaacccaaaccccagcctgcccttcctgctccaggagccgtgccccggctgtcccagcccccatacaggctccctctgccatcctgccactgcctgggcagagtgtggagcggctctgtgtggaccccagacaccgccaggggccagtgaacctgctctcagaccctgagcaaggggttgaggtgactggccagtatgagagggagaaggctgggttctcatggatcgaagtgaccttcaagaaccccctggtatgggttcacgcatcccctgaacacgtggtggtgactcggaaccgaagaagctctgcgtacaagtggaaggagacgctattctcagtgatgcccggcctgaagatgaccatggacaagacgggtctcctgctgctcagtgacccagacaaagtgaccatcggcctgttgttctgggatggccgtggggaggggctccggctccttctgcgtgacactgaccgcttctccagccacgttggagggacccttggccagttttaccaggaggtgctctggggatctccagcagcatcagatgacggcagacgcacgctgagggttcagggcaatgaccactctgccaccagagagcgcaggctggattaccaggaggggcccccgggagtggagatttcctgctggtctgtggagctgtagttctgatggaaggagctgtgcccaccctgtacacttggcttccccctgcaactgcagggccgcttctggggcctggaccaccatggggaggaagagtcccactcattacaaataaagaaaggtggtgtgagcctgggaagtgggtgtctccagttccatgtggccaaatcctagggcctcaacctcgcatcctgaaccttagcatcgtggaacacagaagcttccactgtcagctctcaagagcccatggccaggaaggcccatgctgagctttcagtccagccccttcattttacaaacaaggaaactgagctcgaaccacccatttgagatgtcactgtggcccccagctagaggcccagggctgggagcattctccaggagcagaggttcagtctgcttcatggtctcttggaccagttttgactaca

SEQ ID NO: 64972 - DNA, 2872 bp, Artificial Sequence
  derived and/or modified sequence
agaagcctcctggcagacactggagccacgatgaagcccccaaggcctgtccgtacctgcagcaaagttctcgtcctgctttcactgctggccatccaccagactactactgccgaaaagaatggcatcgacatctacagcctcaccgtggactccagggtctcatcccgatttgcccacacggtcgtcaccagccgagtggtcaatagggccaatactgtgcaggaggccaccttccagatggagctgcccaagaaagccttcatcaccaacttctccatgatcatcgatggcatgacctacccagggatcatcaaggagaaggctgaagcccaggcacagtacagcgcagcagtggccaagggaaagagcgctggcctcgtcaaggccaccgggagaaacatggagcagttccaggtgtcggtcagtgtggctcccaatgccaagatcacctttgagctggtctatgaggagctgctcaagcggcgtttgggggtgtacgagctgctgctgaaagtgcggccccagcagctggtcaagcacctgcagatggacattcacatcttcgagccccagggcatcagctttctggagacagagagcaccttcatgaccaaccagctggtagacgccctcaccacctggcagaataagaccaaggctcacatccggttcaagccaacactttcccagcagcaaaagtccccagagcagcaagaaacagtcctggacggcaacctcattatccgctatgatgtggaccgggccatctccgggggctccattcagatcgagaacggctactttgtacactactttgcccccgagggcctaaccacaatgcccaagaatgtggtctttgtcattgacaagagcggctccatgagtggcaggaaaatccagcagacccgggaagccctaatcaagatcctggatgacctcagccccagagaccagttcaacctcatcgtcttcagtacagaagcaactcagtggaggccatcactggtgccagcctcagccgagaacgtgaacaaggccaggagctttgctgcgggcatccaggccctgggagggaccaacatcaatgatgcaatgctgatggctgtgcagttgctggacagcagcaaccaggaggagcggctgcccgaagggagtgtctcactcatcatcctgctcaccgatggcgaccccactgtgggggagactaaccccaggagcatccagaataacgtgcgggaagctgtaagtggccggtacagcctcttctgcctgggcttcggtttcgacgtcagctatgccttcctggagaagctggcactggacaatggcggcctggcccggcgcatccatgaggactcagactctgccctgcagctccaggacttctaccaggaagtggccaacccactgctgacagcagtgaccttcgagtacccaagcaatgccgtggaggaggtcactcagaacaacttccggctcctcttcaagggctcagagatggtggtggctgggaagctccaggaccgggggcctgatgtgctcacagccacagtcagtgggaagctgcctacacagaacatcactttccaaacggagtccagtgtggcagagcaggaggcggagttccagagccccaagtatatcttccacaacttcatggagaggctctgggcatacctgactatccagcagctgctggagcaaactgtctccgcatccgatgctgatcagcaggccctccggaaccaagcgctgaatttatcacttgcctacagctttgtcacgcctctcacatctatggtagtcaccaaacccgatgaccaagagcagtctcaagttgctgagaagcccatggaaggcgaaagtagaaacaggaatgtccactcagctggagctgctggctcccggatgaatttcagacctggggttctcagctccaggcaacttggactcccaggacctcctgatgttcctgaccatgctgcttaccaccccttccgccgtctggccatcttgcctgcttcagcaccaccagccacctcaaatcctgatccagctgtgtctcgtgtcatgaatatgaaaatcgaagaaacaaccatgacaacccaaaccccagcccccatacaggctccctctgccatcctgccactgcctgggcagagtgtggagcggctctgtgtggaccccagacaccgccaggggccagtgaacctgctctcagaccctgagcaaggggttgaggtgactggccagtatgagagggagaaggctgggttctcatggatcgaagtgaccttcaagaaccccctggtatgggttcacgcatcccctgaacacgtggtggtgactcggaaccgaagaagctctgcgtacaagtggaaggagacgctattctcagtgatgcccggcctgaagatgaccatggacaagacgggtctcctgctgctcagtgacccagacaaagtgaccatcggcctgttgttctgggatggccgtggggaggggctccggctccttctgcgtgacactgaccgcttctccagccacgttggagggacccttggccagttttaccaggaggtgctctggggatctccagcagcatcagatgacggcagacgcacgctgagggttcagggcaatgaccactctgccaccagagagcgcaggctggattaccaggaggggcccccgggagtggagatttcctgctggtctgtggagctgtagttctgatggaaggagctgtgcccaccctgtacacttggcttccccctgcaactgcagggccgcttctggggcctggaccaccatggggaggaagagtcccactcattacaaataaagaaaggtggtgtgagcctgggaa

SEQ ID NO: 64973 - DNA, 2834 bp, Artificial Sequence
  derived and/or modified sequence
agaagcctcctggcagacactggagccacgatgaagcccccaaggcctgtccgtacctgcagcaaagttctcgtcctgctttcactgctggccatccaccagactactactgccgaaaagaatggcatcgacatctacagcctcaccgtggactccagggtctcatcccgatttgcccacacggtcgtcaccagccgagtggtcaatagggccaatactgtgcaggaggccaccttccagatggagctgcccaagaaagccttcatcaccaacttctccatgatcatcgatggcatgacctacccagggatcatcaaggagaaggctgaagcccaggcacagtacagcgcagcagtggccaagggaaagagcgctggcctcgtcaaggccaccgggagaaacatggagcagttccaggtgtcggtcagtgtggctcccaatgccaagcggcgtttgggggtgtacgagctgctgctgaaagtgcggccccagcagctggtcaagcacctgcagatggacattcacatcttcgagccccagggcatcagctttctggagacagagagcaccttcatgaccaaccagctggtagacgccctcaccacctggcagaataagaccaaggctcacatccggttcaagccaacactttcccagcagcaaaagtccccagagcagcaagaaacagtcctggacggcaacctcattatccgctatgatgtggaccgggccatctccgggggctccattcagatcgagaacggctactttgtacactactttgcccccgagggcctaaccacaatgcccaagaatgtggtctttgtcattgacaagagcggctccatgagtggcaggaaaatccagcagacccgggaagccctaatcaagatcctggatgacctcagccccagagaccagttcaacctcatcgtcttcagtacagaagcaactcagtggaggccatcactggtgccagcctcagccgagaacgtgaacaaggccaggagctttgctgcgggcatccaggccctgggagggaccaacatcaatgatgcaatgctgatggctgtgcagttgctggacagcagcaaccaggaggagcggctgcccgaagggagtgtctcactcatcatcctgctcaccgatggcgaccccactgtgggggagactaaccccaggagcatccagaataacgtgcgggaagctgtaagtggccggtacagcctcttctgcctgggcttcggtttcgacgtcagctatgccttcctggagaagctggcactggacaatggcggcctggcccggcgcatccatgaggactcagactctgccctgcagctccaggacttctaccaggaagtggccaacccactgctgacagcagtgaccttcgagtacccaagcaatgccgtggaggaggtcactcagaacaacttccggctcctcttcaagggctcagagatggtggtggctgggaagctccaggaccgggggcctgatgtgctcacagccacagtcagtgggaagctgcctacacagaacatcactttccaaacggagtccagtgtggcagagcaggaggcggagttccagagccccaagtatatcttccacaacttcatggagaggctctgggcatacctgactatccagcagctgctggagcaaactgtctccgcatccgatgctgatcagcaggccctccggaaccaagcgctgaatttatcacttgcctacagctttgtcacgcctctcacatctatggtagtcaccaaacccgatgaccaagagcagtctcaagttgctgagaagcccatggaaggcgaaagtagaaacaggaatgtccactcagctggagctgctggctcccggatgaatttcagacctggggttctcagctccaggcaacttggactcccaggacctcctgatgttcctgaccatgctgcttaccaccccttccgccgtctggccatcttgcctgcttcagcaccaccagccacctcaaatcctgatccagctgtgtctcgtgtcatgaatatgaaaatcgaagaaacaaccatgacaacccaaaccccagcccccatacaggctccctctgccatcctgccactgcctgggcagagtgtggagcggctctgtgtggaccccagacaccgccaggggccagtgaacctgctctcagaccctgagcaaggggttgaggtgactggccagtatgagagggagaaggctgggttctcatggatcgaagtgaccttcaagaaccccctggtatgggttcacgcatcccctgaacacgtggtggtgactcggaaccgaagaagctctgcgtacaagtggaaggagacgctattctcagtgatgcccggcctgaagatgaccatggacaagacgggtctcctgctgctcagtgacccagacaaagtgaccatcggcctgttgttctgggatggccgtggggaggggctccggctccttctgcgtgacactgaccgcttctccagccacgttggagggacccttggccagttttaccaggaggtgctctggggatctccagcagcatcagatgacggcagacgcacgctgagggttcagggcaatgaccactctgccaccagagagcgcaggctggattaccaggaggggcccccgggagtggagatttcctgctggtctgtggagctgtagttctgatggaaggagctgtgcccaccctgtacacttggcttccccctgcaactgcagggccgcttctggggcctggaccaccatggggaggaagagtcccactcattacaaataaagaaaggtggtgtgagcctggg

SEQ ID NO: 64974 - DNA, 2745 bp, Artificial Sequence
  derived and/or modified sequence
atgaagccacccaggcctgtgaggacctgcagcaaggtgctggtgctgctgagcctgctggccatccaccagaccaccacagctgagaagaatggaattgacatctacagcctgactgtggacagccgggtgagcagcagatttgcccacacagtggtgaccagccgggtggtgaacagagccaacacagtgcaggaggccaccttccagatggagctgcccaagaaggccttcatcaccaacttctccatgatcattgatggcatgacctacccaggcatcatcaaggagaaggccgaggcccaggcccagtacagcgctgctgtggccaagggcaagtctgctggcctggtgaaggccactggaagaaacatggagcagttccaggtgtctgtgtctgtggccccaaatgccaagatcacctttgagctggtgtatgaggagctgctgaagaggcggctgggcgtgtatgagctgctgctgaaggtgcggccccagcagctggtgaagcacctgcagatggacatccacatctttgagccccagggcatctccttcctggagacagagagcaccttcatgaccaaccagctggtggatgccctgaccacctggcagaacaagaccaaggcccacatccgcttcaagcccaccctgagccagcagcagaagagccctgagcagcaggagaccgtgctggatggcaacctgatcatccgctatgatgtggaccgggccatcagcggcggcagcatccagattgaaaatggctactttgtgcactactttgcccctgagggcctgaccaccatgcccaagaatgtggtgtttgtgattgacaagagcggctccatgagcggcaggaagatccagcagacccgggaggccctgatcaagatcctggatgacctgagcccccgggaccagttcaacctgattgtgttcagcacagaggccacccagtggaggcccagcctggtgcctgccagcgcagaaaatgtgaacaaggcccggagctttgctgctggcatccaggccctgggcggcaccaacatcaatgatgccatgctgatggctgtgcagctgctggacagcagcaaccaggaggagcggctgcctgagggctctgtgtccctcatcatcctgctgacagatggagaccccaccgtgggggagaccaaccccaggagcatccagaacaacgtgcgggaggccgtgtctggccgctacagcctcttctgcctgggctttggatttgatgtgtcctatgccttcctggagaagctggccctggacaatggaggcctggcccggcgcatccacgaggacagcgacagcgccctgcagctgcaggacttctaccaggaggtggccaaccccctgctgacagctgtgacctttgagtaccccagcaatgctgtggaggaggtgacccagaacaacttccggctgctcttcaagggcagcgagatggtggtggccggcaagctgcaggaccggggcccagatgtgctgacagccaccgtgtctgggaagctgcccacccagaacatcaccttccagacagagagctctgtggccgagcaggaggccgagttccagagccccaagtacatcttccacaacttcatggagcggctgtgggcctacctgaccatccagcagctgctggagcagacagtgtctgccagtgatgctgaccagcaggccctgaggaaccaggccctgaacctgagcctggcctacagctttgtgacccccctgacctccatggtggtgaccaagccagatgaccaggagcagagccaggtggccgagaagcccatggagggggagagcaggaacagaaatgtgcacagcgctggagctgctggcagcaggatgaacttccggcctggggtgctgagcagccggcagctgggcctgcccggccccccagatgtgcctgaccacgccgcctaccaccccttccggcggctggccatcctgcctgccagcgcccccccagccaccagcaacccagaccctgctgtgtcccgggtgatgaacatgaagattgaggagaccaccatgaccacccagaccccagcctgccccagctgcagccgcagccgggccccagctgtgcctgcccccatccaggcccccagcgccatcctgcccctgcccggccagagcgtggagcggctgtgtgtggaccccaggcaccggcagggccctgtgaacctgctgagtgaccctgagcagggcgtggaggtgacaggccagtatgagcgggagaaggccggcttctcctggattgaggtgaccttcaagaaccccctggtgtgggtgcacgccagccctgagcacgtggtggtgaccaggaacagaagaagcagcgcctacaagtggaaggagaccctcttctctgtgatgcctggcctgaagatgaccatggacaagacaggcctgctgctgctgagtgaccctgacaaggtgaccatcggcctgctcttctgggatggccgcggggagggcctgcggctgctgctgcgggacacagaccgcttcagcagccacgtgggcggcaccctgggccagttctaccaggaggtgctgtggggcagccctgctgccagtgatgatggccgccgcaccctgcgggtgcagggcaatgaccacagcgccacccgggagcggcggctggactaccaggagggccccccaggagtggagatcagctgctggagcgtggagctgtag

SEQ ID NO: 64975 - DNA, 2703 bp, Artificial Sequence
  derived and/or modified sequence
atgaagccacccaggcctgtgaggacctgcagcaaggtgctggtgctgctgagcctgctggccatccaccagaccaccacagctgagaagaatggaattgacatctacagcctgactgtggacagccgggtgagcagcagatttgcccacacagtggtgaccagccgggtggtgaacagagccaacacagtgcaggaggccaccttccagatggagctgcccaagaaggccttcatcaccaacttctccatgatcattgatggcatgacctacccaggcatcatcaaggagaaggccgaggcccaggcccagtacagcgctgctgtggccaagggcaagtctgctggcctggtgaaggccactggaagaaacatggagcagttccaggtgtctgtgtctgtggccccaaatgccaagatcacctttgagctggtgtatgaggagctgctgaagaggcggctgggcgtgtatgagctgctgctgaaggtgcggccccagcagctggtgaagcacctgcagatggacatccacatctttgagccccagggcatctccttcctggagacagagagcaccttcatgaccaaccagctggtggatgccctgaccacctggcagaacaagaccaaggcccacatccgcttcaagcccaccctgagccagcagcagaagagccctgagcagcaggagaccgtgctggatggcaacctgatcatccgctatgatgtggaccgggccatcagcggcggcagcatccagattgaaaatggctactttgtgcactactttgcccctgagggcctgaccaccatgcccaagaatgtggtgtttgtgattgacaagagcggctccatgagcggcaggaagatccagcagacccgggaggccctgatcaagatcctggatgacctgagcccccgggaccagttcaacctgattgtgttcagcacagaggccacccagtggaggcccagcctggtgcctgccagcgcagaaaatgtgaacaaggcccggagctttgctgctggcatccaggccctgggcggcaccaacatcaatgatgccatgctgatggctgtgcagctgctggacagcagcaaccaggaggagcggctgcctgagggctctgtgtccctcatcatcctgctgacagatggagaccccaccgtgggggagaccaaccccaggagcatccagaacaacgtgcgggaggccgtgtctggccgctacagcctcttctgcctgggctttggatttgatgtgtcctatgccttcctggagaagctggccctggacaatggaggcctggcccggcgcatccacgaggacagcgacagcgccctgcagctgcaggacttctaccaggaggtggccaaccccctgctgacagctgtgacctttgagtaccccagcaatgctgtggaggaggtgacccagaacaacttccggctgctcttcaagggcagcgagatggtggtggccggcaagctgcaggaccggggcccagatgtgctgacagccaccgtgtctgggaagctgcccacccagaacatcaccttccagacagagagctctgtggccgagcaggaggccgagttccagagccccaagtacatcttccacaacttcatggagcggctgtgggcctacctgaccatccagcagctgctggagcagacagtgtctgccagtgatgctgaccagcaggccctgaggaaccaggccctgaacctgagcctggcctacagctttgtgacccccctgacctccatggtggtgaccaagccagatgaccaggagcagagccaggtggccgagaagcccatggagggggagagcaggaacagaaatgtgcacagcgctggagctgctggcagcaggatgaacttccggcctggggtgctgagcagccggcagctgggcctgcccggccccccagatgtgcctgaccacgccgcctaccaccccttccggcggctggccatcctgcctgccagcgcccccccagccaccagcaacccagaccctgctgtgtcccgggtgatgaacatgaagattgaggagaccaccatgaccacccagaccccagcccccatccaggcccccagcgccatcctgcccctgcccggccagagcgtggagcggctgtgtgtggaccccaggcaccggcagggccctgtgaacctgctgagtgaccctgagcagggcgtggaggtgacaggccagtatgagcgggagaaggccggcttctcctggattgaggtgaccttcaagaaccccctggtgtgggtgcacgccagccctgagcacgtggtggtgaccaggaacagaagaagcagcgcctacaagtggaaggagaccctcttctctgtgatgcctggcctgaagatgaccatggacaagacaggcctgctgctgctgagtgaccctgacaaggtgaccatcggcctgctcttctgggatggccgcggggagggcctgcggctgctgctgcgggacacagaccgcttcagcagccacgtgggcggcaccctgggccagttctaccaggaggtgctgtggggcagccctgctgccagtgatgatggccgccgcaccctgcgggtgcagggcaatgaccacagcgccacccgggagcggcggctggactaccaggagggccccccaggagtggagatcagctgctggagcgtggagctgtag

SEQ ID NO: 64976 - DNA, 2667 bp, Artificial Sequence
  derived and/or modified sequence
atgaagccacccaggcctgtgaggacctgcagcaaggtgctggtgctgctgagcctgctggccatccaccagaccaccacagctgagaagaatggaattgacatctacagcctgactgtggacagccgggtgagcagcagatttgcccacacagtggtgaccagccgggtggtgaacagagccaacacagtgcaggaggccaccttccagatggagctgcccaagaaggccttcatcaccaacttctccatgatcattgatggcatgacctacccaggcatcatcaaggagaaggccgaggcccaggcccagtacagcgctgctgtggccaagggcaagtctgctggcctggtgaaggccactggaagaaacatggagcagttccaggtgtctgtgtctgtggccccaaatgccaagaggcggctgggcgtgtatgagctgctgctgaaggtgcggccccagcagctggtgaagcacctgcagatggacatccacatctttgagccccagggcatctccttcctggagacagagagcaccttcatgaccaaccagctggtggatgccctgaccacctggcagaacaagaccaaggcccacatccgcttcaagcccaccctgagccagcagcagaagagccctgagcagcaggagaccgtgctggatggcaacctgatcatccgctatgatgtggaccgggccatcagcggcggcagcatccagattgaaaatggctactttgtgcactactttgcccctgagggcctgaccaccatgcccaagaatgtggtgtttgtgattgacaagagcggctccatgagcggcaggaagatccagcagacccgggaggccctgatcaagatcctggatgacctgagcccccgggaccagttcaacctgattgtgttcagcacagaggccacccagtggaggcccagcctggtgcctgccagcgcagaaaatgtgaacaaggcccggagctttgctgctggcatccaggccctgggcggcaccaacatcaatgatgccatgctgatggctgtgcagctgctggacagcagcaaccaggaggagcggctgcctgagggctctgtgtccctcatcatcctgctgacagatggagaccccaccgtgggggagaccaaccccaggagcatccagaacaacgtgcgggaggccgtgtctggccgctacagcctcttctgcctgggctttggatttgatgtgtcctatgccttcctggagaagctggccctggacaatggaggcctggcccggcgcatccacgaggacagcgacagcgccctgcagctgcaggacttctaccaggaggtggccaaccccctgctgacagctgtgacctttgagtaccccagcaatgctgtggaggaggtgacccagaacaacttccggctgctcttcaagggcagcgagatggtggtggccggcaagctgcaggaccggggcccagatgtgctgacagccaccgtgtctgggaagctgcccacccagaacatcaccttccagacagagagctctgtggccgagcaggaggccgagttccagagccccaagtacatcttccacaacttcatggagcggctgtgggcctacctgaccatccagcagctgctggagcagacagtgtctgccagtgatgctgaccagcaggccctgaggaaccaggccctgaacctgagcctggcctacagctttgtgacccccctgacctccatggtggtgaccaagccagatgaccaggagcagagccaggtggccgagaagcccatggagggggagagcaggaacagaaatgtgcacagcgctggagctgctggcagcaggatgaacttccggcctggggtgctgagcagccggcagctgggcctgcccggccccccagatgtgcctgaccacgccgcctaccaccccttccggcggctggccatcctgcctgccagcgcccccccagccaccagcaacccagaccctgctgtgtcccgggtgatgaacatgaagattgaggagaccaccatgaccacccagaccccagcccccatccaggcccccagcgccatcctgcccctgcccggccagagcgtggagcggctgtgtgtggaccccaggcaccggcagggccctgtgaacctgctgagtgaccctgagcagggcgtggaggtgacaggccagtatgagcgggagaaggccggcttctcctggattgaggtgaccttcaagaaccccctggtgtgggtgcacgccagccctgagcacgtggtggtgaccaggaacagaagaagcagcgcctacaagtggaaggagaccctcttctctgtgatgcctggcctgaagatgaccatggacaagacaggcctgctgctgctgagtgaccctgacaaggtgaccatcggcctgctcttctgggatggccgcggggagggcctgcggctgctgctgcgggacacagaccgcttcagcagccacgtgggcggcaccctgggccagttctaccaggaggtgctgtggggcagccctgctgccagtgatgatggccgccgcaccctgcgggtgcagggcaatgaccacagcgccacccgggagcggcggctggactaccaggagggccccccaggagtggagatcagctgctggagcgtggagctgtag

SEQ ID NO: 64977 - DNA, 2745 bp, Artificial Sequence
  derived and/or modified sequence
atgaagcccccccggcccgtgcggacctgcagcaaggtgctggtgttgctgagcctgctggccatccatcaaacaacaacagctgaaaagaacgggattgacatctattccttgaccgtagatagtagggtatcctcacgtttcgcacataccgttgtcacgagtagggttgtgaaccgggccaacacggtgcaagaggctacctttcagatggaattgcccaaaaaagctttcataaccaatttttctatgatcatcgatgggatgacctatccagggattattaaagagaaggctgaggcacaagcacaatacagtgcggctgtggccaaggggaaatcagccggtctggtgaaagccactggacgaaacatggagcagttccaggtcagtgtgtccgtcgctccaaatgctaagatcacattcgaattagtttatgaggagcttcttaaaaggagactgggcgtctacgaactgttgctaaaggtgcgaccacagcagctggtgaaacaccttcagatggacattcacatctttgagccccaggggatcagcttcctggagacagagtccacctttatgacaaatcagctggtcgatgccctgaccacctggcagaacaagaccaaagcccatattcgctttaaacctaccttgtcccaacagcagaagtcccctgagcagcaggagactgttctcgatggaaacctgattattcgatacgacgtggatcgagcgatctcaggcggctccatacagattgaaaatggatacttcgtgcattacttcgcgccagagggcttaaccacaatgcccaaaaatgtagtatttgttattgataagtcaggatctatgagcggccgaaaaatccagcagacgagagaagcactgataaaaatcctcgatgatctcagtccccgagaccagttcaacctgatcgttttctccacagaagccacacagtggaggccaagcctcgtcccagcttcagcagaaaatgttaacaaggctcggtccttcgccgccggtattcaagccctcggagggacaaacatcaacgacgcgatgctgatggccgtgcagctattagatagcagtaaccaagaggaaaggctcccagaggggagtgtgtcactaatcattctgctcacagatggcgatcccactgtgggtgagaccaaccccaggagcatacagaacaatgtgcgtgaggcagtgagcgggagatactccttgttttgcctggggttcggttttgacgtcagttacgccttcttggagaaactggcgcttgacaatggtgggctggcccgtaggattcacgaagatagcgacagcgcactgcaactccaggacttttatcaagaggttgccaaccccctcctgaccgccgtgaccttcgaatacccatccaatgctgtcgaggaggtgacccaaaacaacttcagactgctgtttaaggggagcgaaatggtggtcgctggcaaactgcaggatcgaggtcccgacgttctgacggcaactgtgtcagggaaattgcccacccagaacatcacctttcagacggaatccagtgtcgctgagcaagaggcggagtttcagtcccctaaatatatcttccacaactttatggagagattgtgggcctatttaactatccaacaactgttggaacaaaccgtgtctgcctcggatgccgaccagcaggccctccggaatcaggcactcaatttgtctctggcctactcctttgtgactccactcacatctatggtcgtgactaaaccagatgaccaggagcagtcccaggtggcggagaagcccatggaaggagagagcaggaataggaatgtgcattcggctggagctgccggttctcgcatgaatttccggccaggtgttctgagctctaggcagctgggccttcccgggccgcccgatgtccctgaccacgcagcttaccacccctttcggcgtctagctatcctgcccgcatccgctccgcccgcgactagcaaccctgatcccgccgtgtccagagtgatgaatatgaagatagaggaaacaaccatgacgacccagactcccgcgtgcccctcatgctcaaggtccagggccccagcagttccggccccaatccaggctccctctgccatactgccactcccaggacaaagtgtggagagactttgtgttgatcctagacatcgccaaggcccagtgaatcttctgtcagatcctgaacagggcgtagaagtaactggacaatatgaacgggagaaagcaggattttcgtggattgaagtgactttcaaaaacccactagtgtgggtgcatgcgagcccggaacatgtagtagttacccgaaatagacgctcttctgcttataaatggaaggaaacattattcagtgtgatgcccggcctaaagatgaccatggataagaccggcttactactgctgtctgatcccgataaggtgactataggactgctgttctgggatggaaggggtgaaggccttagactcctgttgagggatacagatcgtttcagctctcatgtcggcgggactctagggcagttttaccaggaggtactatggggttctccggcggctagtgacgatggccggcgtacccttagggtgcagggtaatgatcatagcgccacacgggagaggcggctggactaccaggagggtccgcctggagttgaaatttcctgctggtctgtggaactatag

SEQ ID NO: 64978 - DNA, 2703 bp, Artificial Sequence
  derived and/or modified sequence
atgaagcccccccggcccgtgcggacctgcagcaaggtgctggtgctcttaagcttactggccatccaccagacgacaacagcagagaaaaatggtatagacatatatagcctgactgtggacagccgtgtcagctcaaggttcgcacacaccgttgtcacttccagagttgtgaaccgtgccaacactgtgcaggaggctactttccagatggaactgcctaagaaggcattcatcaccaacttcagtatgataatcgacgggatgacctaccctgggatcatcaaggagaaagctgaggcccaggcgcagtacagcgcagcagtggcgaaaggaaagagcgcgggactggtgaaggcaacagggcggaatatggagcaatttcaggtttcggttagcgttgccccgaatgctaagataacatttgagctagtttatgaggagttgctgaaacgccgactgggggtatatgagttgctgctgaaagtgaggcctcaacagctggtgaagcacctacagatggacattcacattttcgaacctcagggtataagcttcctggagaccgagagtacctttatgacgaaccagctggtggacgcactgaccacttggcaaaacaaaacaaaagcccatattcgattcaaaccaactctttctcaacagcagaagtcacccgaacagcaggagactgtccttgacggaaaccttattatacgttatgacgtagatagggcgatatcagggggctcaatacagattgagaacggctactttgtgcattactttgccccagagggacttaccactatgccaaagaacgtggtcttcgtcattgacaaaagcgggagtatgagtggccgcaagatacaacagacaagggaagcccttatcaaaatattggacgacttgtcacccagagaccagtttaacctcattgttttctcaactgaggccacccagtggagacccagcctcgtaccagcctcagctgagaatgtaaataaggcccgctcatttgccgccggcatccaggcgctgggtggaactaatattaatgacgcgatgttaatggccgtgcaactgctggacagtagcaatcaggaggagagactcccagagggtagtgtgtccctcatcattctgctgacagacggcgatccaacagtcggtgagacgaatcctcgctcaatccaaaataatgtgagggaagcagtttcagggcgttattccctgttctgtctgggctttggtttcgatgtgagctatgcttttcttgaaaaactagcgctggataacggcggcctggctagaaggatccacgaggatagcgatagtgccttacaactccaggacttctatcaagaggtggctaaccctttactcacagcggtcaccttcgagtatccttcaaatgctgtggaggaggtgactcagaacaatttccggctgttgttcaagggatccgaaatggtcgtggcaggaaagctacaggacagagggccagacgtgttgaccgctacagtaagtggtaaactcccgactcagaatattacgttccagaccgagtcgtccgtggctgaacaggaggccgaattccaatcaccaaagtatatttttcataattttatggagcgtctttgggcctatttgactatccaacagctcttagaacaaaccgtctctgccagtgacgcggatcagcaggctttgcgcaatcaggccctgaacctgagtctggcgtatagcttcgtgacgcctctgaccagtatggtggtgactaaacccgatgatcaagagcaatcccaggtggcagaaaagcccatggaaggcgaatcgcgaaacagaaacgtacatagtgctggggccgctggcagccgcatgaattttagacccggtgtgctctcaagccgtcagcttggtctgccgggccctccagatgtcccggatcacgcagcctaccacccgtttaggcgcctggctatactcccagcctctgctccacccgcaacttctaaccccgaccccgccgtaagcagggtcatgaacatgaagatcgaggagactacaatgaccactcaaaccccagccccgatacaggcgccgtctgccatcttgccacttcctggtcagtcagtggagcgcctgtgtgtcgaccctcgacacaggcaaggcccggtaaacttactatcagaccccgaacagggagtggaggtaactggccaatatgaacgcgaaaaggccggattctcttggattgaagtaacctttaaaaatccactagtatgggtgcacgctagtccagagcacgtggtcgtgacacgaaaccgtcgtagttcagcttataaatggaaggagacactgtttagtgtgatgcccggcctcaagatgactatggacaaaacagggttactgctgctcagcgatccagataaagtgacaattggtctactgttttgggatgggcgcggggagggcctgcgcctactgttgcgcgataccgaccggttcagctcacacgtcggcggcaccctgggccagttctaccaggaggtgctttggggaagtccggccgcctccgatgatggaaggcggactctccgggtccaggggaacgaccattctgcaactagggagaggcgactcgactatcaagaaggtccgcctggtgtggagatttcctgctggtcagtggagctttag

SEQ ID NO: 64979 - DNA, 2667 bp, Artificial Sequence
  derived and/or modified sequence
atgaagcccccccggcccgtgcggacctgcagcaaggtgctggtgctgctgtcactcctcgcaatacaccagactaccaccgccgaaaagaacgggattgatatctattccctgaccgtggactcacgcgtgagtagccgctttgcccataccgtggtgacgtccagggtggtgaacagagcaaatacggtacaggaggccaccttccaaatggaattgcccaagaaagcattcatcacaaatttttccatgataatcgatggtatgacctacccagggatcatcaaggaaaaggcggaagcccaagctcaatacagcgccgcagtggctaagggcaaatctgcaggtcttgtaaaagccacggggcggaatatggagcagtttcaggtcagcgtgtcagtcgcgcccaatgcaaaacggagactgggagtgtatgaactgcttctgaaagttaggccacagcagttagtgaagcatctgcaaatggatattcatatctttgaaccacaaggtattagttttctagagacagagagcacttttatgacaaatcaactcgtcgatgctttgactacatggcagaacaagaccaaggcccacatccggttcaagcccacactgtctcagcagcaaaaatctcctgagcaacaggagaccgttctggacggcaacctcattattcggtacgacgttgaccgggcaatctcgggtggctccatccagatcgaaaatggctactttgtccattatttcgcacctgaaggacttacaacaatgccgaagaatgttgtcttcgtgatcgacaagtctggcagtatgtccgggaggaaaatacagcagactcgtgaagccttaatcaagatactggatgatctgtctcctagggaccagtttaacctgattgtgttctcaaccgaggcgacccagtggcggcccagtttggttcctgccagtgccgagaacgtgaacaaagcccgctcatttgccgctggaatccaggcgctgggtggcacaaatatcaacgacgctatgctcatggcagtccaattgctggatagctcaaatcaggaggagaggttacctgaggggagcgtgtcgctgattatactcctgaccgatggagatcctacagtcggcgaaaccaaccctcgctccatccagaacaacgtgagagaagccgtgtccggacgctactcactgttctgtctaggttttggcttcgacgtaagctatgcttttctcgaaaaactggctctcgataatggtggcctagccagaagaatacacgaggactctgatagcgcactgcagctgcaagacttctatcaggaagttgccaatcctttgctgaccgccgtgaccttcgagtacccttctaacgccgtagaggaggtcacccagaataatttccggcttctgttcaagggcagcgagatggtcgtggcggggaaactgcaggaccgtggcccagacgtcctgacagcgactgtctcaggcaagctgcccactcagaatataacctttcaaactgagtcatccgtggcggagcaggaggcggaattccaatccccaaaatacatctttcacaacttcatggagcgactctgggcctaccttactatccagcagctgctggaacagacggtttcagcaagcgacgcagaccagcaggcccttcgcaatcaggccctgaacctcagcctggcctacagctttgttacaccgttgaccagcatggtggtcaccaaaccagatgatcaggaacaaagccaggtggctgaaaagcccatggagggagagtctcggaaccggaacgtgcatagcgcaggggccgcaggcagccggatgaatttcagaccaggggtactctccagtagacagctgggacttcccgggccgccagatgtgcctgatcacgccgcatatcacccattcagacggttggccattttgccagcaagtgctcctccggcaacttctaaccctgatcctgcagttagtagagtgatgaacatgaaaatcgaagaaacgactatgaccactcaaactcctgcacctatccaggctccgagtgctattctaccccttcctggtcagagtgtcgagcgcttgtgcgtggacccacgacaccgccagggcccagtgaacttgttgtccgaccctgaacagggcgttgaagtcactggacaatatgagagagaaaaagccggattttcctggattgaggtaacgttcaaaaaccccttagtatgggttcatgccagccctgagcacgtggtggttacaagaaaccggcgctcctcagcgtataagtggaaggaaactctgttttccgtgatgcctggactcaaaatgaccatggacaaaactggcctgctcctgctgagcgaccctgacaaagtaacaattggcttactgttttgggatggacgaggcgaggggcttcgcctcctactccgcgacaccgaccggttctcatctcacgttggaggaacactcggccaattctatcaagaagtgctgtggggatcccctgctgcctccgatgacggccggcggacgcttagagtccagggtaatgaccattccgccacgcgggagcgacgtctggactaccaagaaggcccccccggcgttgagattagttgctggtccgtggagttgtag

SEQ ID NO: 64980 - DNA, 2745 bp, Artificial Sequence
  derived and/or modified sequence
atgaaaccgcctaggccagtccggacatgctctaaggtgctggtgcttctgtccttgctcgcaattcaccagaccaccaccgcagagaagaacggcatcgacatttattccctgaccgttgattctcgcgtgtccagtcgcttcgctcacaccgtggtaacctccagggtggtgaatcgtgccaacacagtgcaagaagctaccttccagatggagctccctaagaaggcatttattaccaatttttcaatgataatcgatggaatgacataccccggaatcatcaaggaaaaagccgaagctcaggctcaatattcagccgcagttgcaaagggcaagagtgccggtctagtaaaggcaacgggtaggaacatggagcagttccaagtctcagtgtccgtggctcctaacgccaaaattaccttcgagctggtttacgaggagcttttaaagcggaggttgggcgtgtacgagctcctgttgaaagtgcgaccacagcagctggtgaagcacctccaaatggacatccatatattcgagccacaaggcatatcctttctagaaaccgaatctacgttcatgactaatcagctcgttgatgcacttacaacatggcagaacaaaactaaggcgcacatacggttcaagcccaccctgagccaacagcaaaaatcccctgagcagcaagaaaccgtgttggatggaaacttgattattcggtatgatgttgaccgggctatttctggaggaagtattcagatcgagaacgggtactttgtacactacttcgcccctgaagggttgaccacgatgcccaaaaacgtggtttttgtgatcgacaaatccgggtctatgtcagggagaaaaatccaacaaacacgggaagcccttatcaagattctggacgacctctcacctcgggaccagttcaatttgatcgtgttctcaaccgaggccacccagtggagacctagcctggtacccgctagcgccgagaacgtaaataaagcaaggtcctttgctgcaggtatccaggctttagggggaacaaacattaacgacgcaatgctaatggctgtgcagctgctagacagtagtaaccaggaggaacggctgccagaggggtctgtttctctgataatcttgctgaccgacggcgacccaacagtgggggaaacaaatcccaggtctattcagaacaacgtgagagaggctgtgtccggaagatactcattgttctgcctgggttttggctttgatgtatcgtacgcctttttagagaaactcgcactggacaatgggggtctggccagacggatccatgaggactccgacagcgcactacagctgcaggacttttaccaggaggtagccaatcccctccttactgccgtgacttttgagtatcccagcaatgcggtcgaggaagtcacacagaataacttccggcttctgttcaaaggctccgaaatggtagttgccggaaaactgcaagatcggggaccagatgtcctcaccgccaccgtctcaggcaagcttcctacccagaatatcacctttcagaccgaatcttctgtcgctgaacaagaagcagaattccagtcaccaaagtatattttccataacttcatggagaggttgtgggcttatcttactattcagcagctactggagcagaccgtatccgctagtgatgccgatcaacaagctttgcgcaatcaagctctcaacttatcactggcctacagcttcgtcacgcccttgactagcatggtggtgactaaacctgatgatcaggagcagagtcaagttgccgagaaacccatggaaggcgagtctcggaaccgcaacgtgcattccgccggagccgctggatcccgcatgaatttccggccaggggtacttagctcaagacaactgggtctcccaggtccacctgacgttcccgaccatgctgcctatcaccccttcagacgcctcgcaatcctgcccgcttcagctcctccagccaccagcaatcctgatccagccgtgagtagggtcatgaacatgaaaatagaggaaacaacgatgacgacccaaacacctgcctgccccagctgcagcaggagtcgagcccctgctgtacctgcgcctatccaggccccatctgccatcctgcctctgccaggacagagcgtcgaaaggttgtgtgtagatccccgacacagacaaggacccgtcaacctcctgagtgatccggagcagggcgtggaggtgaccggccagtacgagagggaaaaggcgggatttagctggatcgaagtgacgtttaaaaacccccttgtctgggttcacgcttccccagagcacgtagtggtgacacgcaaccgcaggtcgtcagcctacaaatggaaggagacactgttctcagttatgcctggattgaagatgacaatggataaaaccggattattattgttgtcagaccctgataaggttactatcggtctgttgttctgggacggccgaggtgaaggcctgcgtctgcttctgagggacacagatagattttcctcacacgtaggcggaaccttaggacaattctaccaagaagtgctgtggggcagccctgctgccagcgatgatggacgtcgtaccttgagagtgcagggcaatgatcattcagccacaagggaaaggcggcttgactaccaggaaggccctccaggcgttgagatttcctgttggtctgtggaactgtag

SEQ ID NO: 64981 - DNA, 2703 bp, Artificial Sequence
  derived and/or modified sequence
atgaagccacctagaccagtacggacgtgctcaaaggtcctggttcttctgtccttgctagctattcaccagacaactacagctgagaaaaacgggatcgatatctacagcctgaccgtcgactcacgagtctcttcaaggttcgctcacacagtggtaactagtagggttgtcaaccgtgccaacaccgtccaagaggccacatttcagatggaactaccgaaaaaggccttcatcactaatttctctatgattattgacggtatgacttaccccggaatcatcaaagaaaaggctgaggcgcaggcccagtactccgccgcagtggctaaggggaaaagcgctggcctggtaaaggccacaggcagaaacatggagcagtttcaggtgagtgtttctgtggctcctaacgctaaaatcacctttgaactggtctacgaggagctcctgaaacgtcgcctgggtgtatacgagttgctgctgaaggtgcgtccccaacaactcgtcaagcacctgcagatggatatccatatctttgagccccagggtattagttttctggagacagagtctaccttcatgacaaaccagttggtcgatgctctcaccacctggcagaataagacaaaggctcatatccgctttaagccaacactgagccagcaacagaaatcgcccgagcagcaagaaaccgttctcgatggtaatctgattatccgatatgacgtggacagggctatatccggtggctccatccagatcgaaaacggttacttcgtccattacttcgcgcctgaagggttgaccactatgcctaagaacgtcgttttcgtgatcgacaagtctggctccatgtcgggcaggaaaattcagcagactagagaagccttgatcaaaattttggacgatctctcccccagggaccagtttaacttgatagtgttctcgaccgaggctacgcagtggcgccctagcttggtccccgcttctgcagaaaatgtgaacaaggcaagaagttttgccgctggaatacaggcactggggggtacgaatattaatgacgctatgctgatggcggttcagcttctggatagctcaaaccaggaagagagactgccagaaggcagtgtcagcttgattatactgctgactgacggggatcccacagtcggggaaactaacccaaggtcgattcagaacaacgttagggaagcagtgtcaggtcgttacagtctgttttgtctaggttttgggttcgatgtttcatatgcgtttttagaaaaactggcacttgataatggtggcctcgcccgacgcattcatgaagacagcgatagcgccttgcagttgcaggacttctaccaggaggtggcgaaccctctcctgacagccgtgacttttgagtatccaagcaacgccgttgaggaagttacgcagaacaacttccgattactgttcaagggaagcgagatggtcgtggccggaaagctgcaggatcgcggtccagacgtgctgaccgcaacagtgtccggaaagctgccgacccagaacattacattccagacggagagctcggttgccgagcaggaggcagaattccagagcccaaaatatatttttcacaatttcatggagcgtctgtgggcctatttgaccatccaacagttgctggaacagaccgtatccgcgagtgacgcggaccagcaggccctgagaaaccaggcactgaacctgagcttggcttattccttcgtgaccccactcacctctatggtggtcaccaaacctgatgatcaggaacaaagccaggttgccgaaaaacctatggagggcgagtccagaaaccggaacgtccacagcgctggggctgcaggaagcaggatgaatttccggccaggggtgctgagctcccgccagttgggcctgcccggacctcctgatgttcccgatcacgctgcttaccacccatttagacgcctagccatcctacccgcttctgcacctcctgcaacctctaatcctgacccagctgtgtctcgtgtcatgaacatgaaaatcgaggaaaccaccatgactacccagacaccggcacctattcaggcccctagcgccatcctgcccctgcccggacaaagtgtagagcggttgtgtgttgatcccagacatcgtcaaggccctgttaacctcctctccgatcctgagcaaggcgtggaggtcactggccaatacgaaagagaaaaggcgggatttagctggatcgaggtcacttttaagaaccccctggtgtgggtgcatgcgtcccccgagcacgtggtagtgacccgaaaccgccgtagctctgcctataaatggaaagagacactattcagcgtaatgcccggactgaaaatgacaatggataaaaccgggcttctgctgctaagcgatccagataaagttaccattgggctgcttttctgggatggacgtggtgaagggttgcgacttctgttgagggacacagacagatttagcagtcacgttgggggtacgctgggccaattttatcaggaggtgctatgggggagtcccgcagcaagtgacgacggcaggcgcactttgcgtgtacaggggaacgatcactcagccacaagggagaggaggctggactaccaggagggacccccaggcgtcgaaatcagctgctggtccgtcgagctgtag

SEQ ID NO: 64982 - DNA, 2667 bp, Artificial Sequence
  derived and/or modified sequence
atgaaaccccctcggccagtaaggacttgtagcaaagtactcgtcttactctcattattagccatacaccagacgacaaccgctgagaagaatggcatcgatatctattctttgacagtcgactcgcgagtgtcgtctcgctttgctcatactgtggtcacgtctagggttgtgaacagagccaacactgtgcaagaagcaacatttcagatggaactacccaagaaggcttttatcactaatttcagcatgatcattgatggcatgacttatccaggtattatcaaggagaaagccgaagcgcaggcccagtactctgccgcagtagccaaaggaaagtccgccggactggtcaaagccactgggcgtaatatggagcaatttcaggtcagcgtgagtgtggcacctaacgcaaaaagacgtttaggggtgtacgaactgctgctgaaagtccgaccacagcagctggtcaaacacctccagatggacatccacatcttcgagccccaggggatctcctttctggaaactgagagtacttttatgacaaaccagttagtggatgctctgaccacgtggcagaacaagacgaaggcccatatacgttttaaacctactctgtcacagcagcagaagtcacctgagcagcaagaaacagtgcttgatggtaaccttattattcgttatgacgtggatagagctatatcaggcggaagtatccagattgaaaatggctacttcgtgcattacttcgctccagaaggcctgaccacgatgccaaagaatgtggtgtttgtcatagataagtcaggcagtatgagcggacgtaagatccagcaaactagagaggcactgataaagatcctggatgatctctccccccgagaccagtttaatctaatcgtattcagcactgaggccactcagtggaggcctagcctcgtgcctgctagcgccgagaacgtgaacaaagctagatcatttgctgcaggaatccaggccctaggcggaaccaatattaacgacgccatgctaatggcagtacagttgcttgatagttccaaccaggaggaaaggttgccagagggttcagtttctctgatcatccttctgacagatggagacccaacggtcggcgagactaaccctcggagtatccagaacaatgtccgcgaagccgtgagtggtcgctatagtctcttttgtctgggttttggatttgacgtgtcgtacgccttcttggaaaagctcgccttggataatggaggtcttgctaggcgaatccatgaggatagtgacagcgctctgcagctgcaggacttctatcaggaggtcgctaatccgcttctgacggctgttacattcgagtatccgtcaaacgccgttgaggaggtgactcagaacaatttcaggctcttatttaagggcagcgagatggtggtcgctggtaaactgcaggacagagggcctgatgtgcttacggccacagtgtcgggcaagctccccacacagaacatcacttttcagactgaaagcagcgttgcggaacaggaagcagagttccagtcgcctaaatacatctttcataacttcatggaacgtctatgggcgtacctcaccatccagcaattactggaacagaccgtctcagcaagtgacgccgatcagcaggcactacgcaatcaggccctgaacctttcactggcctattctttcgtcaccccactgacttccatggtcgtgaccaagcccgacgaccaggagcagagccaggtggcggaaaagcctatggaaggcgagagccggaaccggaacgtccatagtgcgggagccgctggatcaagaatgaattttcgcccaggggttctgtccagccggcaattgggcttgcccggtccacctgacgtacccgatcacgcagcctatcatccttttcgacggctggcaattctccctgcatcagcccctccagcaacatctaaccccgatccagccgtgtcccgagtaatgaacatgaagatagaagagactactatgactactcagacacccgctcccattcaggctccgtccgccatccttccactgcctgggcaaagcgtggagaggctgtgcgttgatcctcgccaccggcaggggcctgtcaatctcctgtccgatccggagcagggagttgaagtaacggggcagtatgagcgggagaaagctgggttctcctggatagaggttacgttcaagaatcccctcgtgtgggtacatgcatcaccagagcacgtcgtggtgactaggaatcgcagatctagcgcttataagtggaaggagaccttgttttcagtgatgccgggactaaaaatgacaatggacaagacaggactgcttctgctgagcgacccagacaaggtgactattggtctcctgttctgggacggtcggggtgagggcctgcggctgctgctccgagacacagaccgtttcagctcccacgttggtggaacgctgggacagttctatcaagaggtgctgtggggttcccctgccgcttctgatgatggtcgccgaaccctcagggtacagggtaatgatcacagtgcaacccgagagaggcgcctcgactaccaggagggccctccgggagtggagatcagctgttggagtgtagagctctag

SEQ ID NO: 64983 - DNA, 2745 bp, Artificial Sequence
  derived and/or modified sequence
atgaagccccccagacccgtgagaacctgcagcaaggtgctggtgctgctgagcctgctggccatccaccagaccaccaccgccgagaagaacggcatcgacatctacagcctgaccgtggacagcagagtgagcagcagattcgcccacaccgtggtgaccagcagagtggtgaacagagccaacaccgtgcaggaggccaccttccagatggagctgcccaagaaggccttcatcaccaacttcagcatgatcatcgacggcatgacctaccccggcatcatcaaggagaaggccgaggcccaggcccagtacagcgccgccgtggccaagggcaagagcgccggcctggtgaaggccaccggcagaaacatggagcagttccaggtgagcgtgagcgtggcccccaacgccaagatcaccttcgagctggtgtacgaggagctgctgaagagaagactgggcgtgtacgagctgctgctgaaggtgagaccccagcagctggtgaagcacctgcagatggacatccacatcttcgagccccagggcatcagcttcctggagaccgagagcaccttcatgaccaaccagctggtggacgccctgaccacctggcagaacaagaccaaggcccacatcagattcaagcccaccctgagccagcagcagaagagccccgagcagcaggagaccgtgctggacggcaacctgatcatcagatacgacgtggacagagccatcagcggcggcagcatccagatcgagaacggctacttcgtgcactacttcgcccccgagggcctgaccaccatgcccaagaacgtggtgttcgtgatcgacaagagcggcagcatgagcggcagaaagatccagcagaccagagaggccctgatcaagatcctggacgacctgagccccagagaccagttcaacctgatcgtgttcagcaccgaggccacccagtggagacccagcctggtgcccgccagcgccgagaacgtgaacaaggccagaagcttcgccgccggcatccaggccctgggcggcaccaacatcaacgacgccatgctgatggccgtgcagctgctggacagcagcaaccaggaggagagactgcccgagggcagcgtgagcctgatcatcctgctgaccgacggcgaccccaccgtgggcgagaccaaccccagaagcatccagaacaacgtgagagaggccgtgagcggcagatacagcctgttctgcctgggcttcggcttcgacgtgagctacgccttcctggagaagctggccctggacaacggcggcctggccagaagaatccacgaggacagcgacagcgccctgcagctgcaggacttctaccaggaggtggccaaccccctgctgaccgccgtgaccttcgagtaccccagcaacgccgtggaggaggtgacccagaacaacttcagactgctgttcaagggcagcgagatggtggtggccggcaagctgcaggacagaggccccgacgtgctgaccgccaccgtgagcggcaagctgcccacccagaacatcaccttccagaccgagagcagcgtggccgagcaggaggccgagttccagagccccaagtacatcttccacaacttcatggagagactgtgggcctacctgaccatccagcagctgctggagcagaccgtgagcgccagcgacgccgaccagcaggccctgagaaaccaggccctgaacctgagcctggcctacagcttcgtgacccccctgaccagcatggtggtgaccaagcccgacgaccaggagcagagccaggtggccgagaagcccatggagggcgagagcagaaacagaaacgtgcacagcgccggcgccgccggcagcagaatgaacttcagacccggcgtgctgagcagcagacagctgggcctgcccggcccccccgacgtgcccgaccacgccgcctaccaccccttcagaagactggccatcctgcccgccagcgccccccccgccaccagcaaccccgaccccgccgtgagcagagtgatgaacatgaagatcgaggagaccaccatgaccacccagacccccgcctgccccagctgcagcagaagcagagcccccgccgtgcccgcccccatccaggcccccagcgccatcctgcccctgcccggccagagcgtggagagactgtgcgtggaccccagacacagacagggccccgtgaacctgctgagcgaccccgagcagggcgtggaggtgaccggccagtacgagagagagaaggccggcttcagctggatcgaggtgaccttcaagaaccccctggtgtgggtgcacgccagccccgagcacgtggtggtgaccagaaacagaagaagcagcgcctacaagtggaaggagaccctgttcagcgtgatgcccggcctgaagatgaccatggacaagaccggcctgctgctgctgagcgaccccgacaaggtgaccatcggcctgctgttctgggacggcagaggcgagggcctgagactgctgctgagagacaccgacagattcagcagccacgtgggcggcaccctgggccagttctaccaggaggtgctgtggggcagccccgccgccagcgacgacggcagaagaaccctgagagtgcagggcaacgaccacagcgccaccagagagagaagactggactaccaggagggcccccccggcgtggagatcagctgctggagcgtggagctgtag

SEQ ID NO: 64984 - DNA, 2703 bp, Artificial Sequence
  derived and/or modified sequence
atgaagccccccagacccgtgagaacctgcagcaaggtgctggtgctgctgagcctgctggccatccaccagaccaccaccgccgagaagaacggcatcgacatctacagcctgaccgtggacagcagagtgagcagcagattcgcccacaccgtggtgaccagcagagtggtgaacagagccaacaccgtgcaggaggccaccttccagatggagctgcccaagaaggccttcatcaccaacttcagcatgatcatcgacggcatgacctaccccggcatcatcaaggagaaggccgaggcccaggcccagtacagcgccgccgtggccaagggcaagagcgccggcctggtgaaggccaccggcagaaacatggagcagttccaggtgagcgtgagcgtggcccccaacgccaagatcaccttcgagctggtgtacgaggagctgctgaagagaagactgggcgtgtacgagctgctgctgaaggtgagaccccagcagctggtgaagcacctgcagatggacatccacatcttcgagccccagggcatcagcttcctggagaccgagagcaccttcatgaccaaccagctggtggacgccctgaccacctggcagaacaagaccaaggcccacatcagattcaagcccaccctgagccagcagcagaagagccccgagcagcaggagaccgtgctggacggcaacctgatcatcagatacgacgtggacagagccatcagcggcggcagcatccagatcgagaacggctacttcgtgcactacttcgcccccgagggcctgaccaccatgcccaagaacgtggtgttcgtgatcgacaagagcggcagcatgagcggcagaaagatccagcagaccagagaggccctgatcaagatcctggacgacctgagccccagagaccagttcaacctgatcgtgttcagcaccgaggccacccagtggagacccagcctggtgcccgccagcgccgagaacgtgaacaaggccagaagcttcgccgccggcatccaggccctgggcggcaccaacatcaacgacgccatgctgatggccgtgcagctgctggacagcagcaaccaggaggagagactgcccgagggcagcgtgagcctgatcatcctgctgaccgacggcgaccccaccgtgggcgagaccaaccccagaagcatccagaacaacgtgagagaggccgtgagcggcagatacagcctgttctgcctgggcttcggcttcgacgtgagctacgccttcctggagaagctggccctggacaacggcggcctggccagaagaatccacgaggacagcgacagcgccctgcagctgcaggacttctaccaggaggtggccaaccccctgctgaccgccgtgaccttcgagtaccccagcaacgccgtggaggaggtgacccagaacaacttcagactgctgttcaagggcagcgagatggtggtggccggcaagctgcaggacagaggccccgacgtgctgaccgccaccgtgagcggcaagctgcccacccagaacatcaccttccagaccgagagcagcgtggccgagcaggaggccgagttccagagccccaagtacatcttccacaacttcatggagagactgtgggcctacctgaccatccagcagctgctggagcagaccgtgagcgccagcgacgccgaccagcaggccctgagaaaccaggccctgaacctgagcctggcctacagcttcgtgacccccctgaccagcatggtggtgaccaagcccgacgaccaggagcagagccaggtggccgagaagcccatggagggcgagagcagaaacagaaacgtgcacagcgccggcgccgccggcagcagaatgaacttcagacccggcgtgctgagcagcagacagctgggcctgcccggcccccccgacgtgcccgaccacgccgcctaccaccccttcagaagactggccatcctgcccgccagcgccccccccgccaccagcaaccccgaccccgccgtgagcagagtgatgaacatgaagatcgaggagaccaccatgaccacccagacccccgcccccatccaggcccccagcgccatcctgcccctgcccggccagagcgtggagagactgtgcgtggaccccagacacagacagggccccgtgaacctgctgagcgaccccgagcagggcgtggaggtgaccggccagtacgagagagagaaggccggcttcagctggatcgaggtgaccttcaagaaccccctggtgtgggtgcacgccagccccgagcacgtggtggtgaccagaaacagaagaagcagcgcctacaagtggaaggagaccctgttcagcgtgatgcccggcctgaagatgaccatggacaagaccggcctgctgctgctgagcgaccccgacaaggtgaccatcggcctgctgttctgggacggcagaggcgagggcctgagactgctgctgagagacaccgacagattcagcagccacgtgggcggcaccctgggccagttctaccaggaggtgctgtggggcagccccgccgccagcgacgacggcagaagaaccctgagagtgcagggcaacgaccacagcgccaccagagagagaagactggactaccaggagggcccccccggcgtggagatcagctgctggagcgtggagctgtag

SEQ ID NO: 64985 - DNA, 2667 bp, Artificial Sequence
  derived and/or modified sequence
atgaagccccccagacccgtgagaacctgcagcaaggtgctggtgctgctgagcctgctggccatccaccagaccaccaccgccgagaagaacggcatcgacatctacagcctgaccgtggacagcagagtgagcagcagattcgcccacaccgtggtgaccagcagagtggtgaacagagccaacaccgtgcaggaggccaccttccagatggagctgcccaagaaggccttcatcaccaacttcagcatgatcatcgacggcatgacctaccccggcatcatcaaggagaaggccgaggcccaggcccagtacagcgccgccgtggccaagggcaagagcgccggcctggtgaaggccaccggcagaaacatggagcagttccaggtgagcgtgagcgtggcccccaacgccaagagaagactgggcgtgtacgagctgctgctgaaggtgagaccccagcagctggtgaagcacctgcagatggacatccacatcttcgagccccagggcatcagcttcctggagaccgagagcaccttcatgaccaaccagctggtggacgccctgaccacctggcagaacaagaccaaggcccacatcagattcaagcccaccctgagccagcagcagaagagccccgagcagcaggagaccgtgctggacggcaacctgatcatcagatacgacgtggacagagccatcagcggcggcagcatccagatcgagaacggctacttcgtgcactacttcgcccccgagggcctgaccaccatgcccaagaacgtggtgttcgtgatcgacaagagcggcagcatgagcggcagaaagatccagcagaccagagaggccctgatcaagatcctggacgacctgagccccagagaccagttcaacctgatcgtgttcagcaccgaggccacccagtggagacccagcctggtgcccgccagcgccgagaacgtgaacaaggccagaagcttcgccgccggcatccaggccctgggcggcaccaacatcaacgacgccatgctgatggccgtgcagctgctggacagcagcaaccaggaggagagactgcccgagggcagcgtgagcctgatcatcctgctgaccgacggcgaccccaccgtgggcgagaccaaccccagaagcatccagaacaacgtgagagaggccgtgagcggcagatacagcctgttctgcctgggcttcggcttcgacgtgagctacgccttcctggagaagctggccctggacaacggcggcctggccagaagaatccacgaggacagcgacagcgccctgcagctgcaggacttctaccaggaggtggccaaccccctgctgaccgccgtgaccttcgagtaccccagcaacgccgtggaggaggtgacccagaacaacttcagactgctgttcaagggcagcgagatggtggtggccggcaagctgcaggacagaggccccgacgtgctgaccgccaccgtgagcggcaagctgcccacccagaacatcaccttccagaccgagagcagcgtggccgagcaggaggccgagttccagagccccaagtacatcttccacaacttcatggagagactgtgggcctacctgaccatccagcagctgctggagcagaccgtgagcgccagcgacgccgaccagcaggccctgagaaaccaggccctgaacctgagcctggcctacagcttcgtgacccccctgaccagcatggtggtgaccaagcccgacgaccaggagcagagccaggtggccgagaagcccatggagggcgagagcagaaacagaaacgtgcacagcgccggcgccgccggcagcagaatgaacttcagacccggcgtgctgagcagcagacagctgggcctgcccggcccccccgacgtgcccgaccacgccgcctaccaccccttcagaagactggccatcctgcccgccagcgccccccccgccaccagcaaccccgaccccgccgtgagcagagtgatgaacatgaagatcgaggagaccaccatgaccacccagacccccgcccccatccaggcccccagcgccatcctgcccctgcccggccagagcgtggagagactgtgcgtggaccccagacacagacagggccccgtgaacctgctgagcgaccccgagcagggcgtggaggtgaccggccagtacgagagagagaaggccggcttcagctggatcgaggtgaccttcaagaaccccctggtgtgggtgcacgccagccccgagcacgtggtggtgaccagaaacagaagaagcagcgcctacaagtggaaggagaccctgttcagcgtgatgcccggcctgaagatgaccatggacaagaccggcctgctgctgctgagcgaccccgacaaggtgaccatcggcctgctgttctgggacggcagaggcgagggcctgagactgctgctgagagacaccgacagattcagcagccacgtgggcggcaccctgggccagttctaccaggaggtgctgtggggcagccccgccgccagcgacgacggcagaagaaccctgagagtgcagggcaacgaccacagcgccaccagagagagaagactggactaccaggagggcccccccggcgtggagatcagctgctggagcgtggagctgtag

SEQ ID NO: 64986 - protein, 391 aa, Artificial Sequence
  derived and/or modified sequence
MKLITILFLCSRLLLSLTQESQSEEIDCNDKDLFKAVDAALKKYNSQNQSNNQFVLYRITEATKTVGSDTFYSFKYEIKEGDCPVQSGKTWQDCEYKDAAKAATGECTATVGKRSSTKFSVATQTCQITPAEGPVVTAQYDCLGCVHPISTQSPDLEPILRHGIQYFNNNTQHSSLFMLNEVKRAQRQDTGECTDNAYIDIQLRIASFSQNCDIYPGKDFVQPPTKICVGCPRDIPTNSPELEETLTHTITKLNAENNATFYFKIDNVKKARVQVVAGKKYFIDFVARETTCSKESNEELTESCETKKLGQSLDCNAEVYVVPWEKKIYPTVNCQPLGMISLMKRPPGFSPFRSSRIGEIKEETTSHLRSCEYKGRPPKAGAEPASEREVS

SEQ ID NO: 64987 - DNA, 1176 bp, Artificial Sequence
  derived and/or modified sequence
atgaagctgattacaatattgtttctgtgctcacgcttactcctgtcactcactcaagaaagccagtctgaagaaattgactgtaacgataaggacctctttaaagccgtggatgcagctctgaagaagtataactcgcagaatcagtcaaataaccagttcgtgctatatcgcatcaccgaagccacaaaaaccgttggttccgatactttctatagttttaagtacgagatcaaggagggggactgcccagttcagtccggaaagacttggcaggactgtgagtacaaggatgcagccaaggccgctactggggagtgtaccgccacagttggtaaacgtagctctacaaagttctcagtcgcaacacagacttgtcagattactcccgcagagggacctgtggtcacggcacaatatgactgtctgggatgcgtgcacccaatctcgacgcagtctcctgacctcgagcctatccttaggcacgggatccaatacttcaataacaatacacaacattcctctctgttcatgctgaatgaggttaaaagggcccaacgccaggataccggagaatgtactgacaatgcttatatagacattcagctgcgcattgctagtttcagccagaactgcgatatttacccgggaaaagactttgtgcagcctcctactaaaatatgcgtagggtgtccccgcgatattcccactaacagtccagagctggaagagaccctgacccacacgattactaagttgaacgccgagaacaatgcaaccttttactttaaaatcgataatgttaaaaaggcacgtgtgcaggttgtagcgggcaaaaaatacttcatcgacttcgtggcacgagagactacgtgttctaaagagagcaatgaagagctaacggagagctgtgagaccaagaagttaggccagagtctggattgtaatgcagaggtttacgtggtgccctgggagaagaagatctatccaacggtgaactgccagccattggggatgatctctttaatgaagcgcccccccggcttcagtccgttcaggagtagcagaattggggagatcaaggaagaaacaacctcccacctgagatcatgcgagtataagggtaggccacctaaagcaggtgcggagcctgcctctgagcgagaggtatcctag

SEQ ID NO: 64988 - DNA, 1391 bp, Artificial Sequence
  derived and/or modified sequence
ccagcagagccatttaacctttgggaacaaggcaactagcgtctggcagcaggaatccaaccagtgccctgagttctgaggcagagaggaggacagaagaaacaagaggctggagattgtcaaattcagtatcccagttggctcttgattcttggtgaaaccatccctcagctcctagagggagattgttagatcatgaaactaattaccatccttttcctctgctccaggctgctactaagtttaacccaggaatcacagtccgaggaaattgactgcaatgacaaggatttatttaaagctgtggatgctgctctgaagaaatataacagtcaaaaccaaagtaacaaccagtttgtattgtaccgcataactgaagccactaagacggttggctctgacacgttttattccttcaagtacgaaatcaaggagggggattgtcctgttcaaagtggcaaaacctggcaggactgtgagtacaaggatgctgcaaaagcagccactggagaatgcacggcaaccgtggggaagaggagcagtacgaaattctccgtggctacccagacctgccagattactccagccgagggccctgtggtgacagcccagtacgactgcctcggctgtgtgcatcctatatcaacgcagagcccagacctggagcccattctgagacacggcattcagtactttaacaacaacactcaacattcctccctcttcatgcttaatgaagtaaaacgggcccaaagacaggataccggtgaatgtacagataatgcatacatcgatattcagctacgaattgcttccttctcacagaactgtgacatttatccagggaaggattttgtacaaccacctaccaagatttgcgtgggctgccccagagatatacccaccaacagcccagagctggaggagacactgactcacaccatcacaaagcttaatgcagagaataacgcaactttctatttcaagattgacaatgtgaaaaaagcaagagtacaggtggtggctggcaagaaatattttattgacttcgtggccagggaaaccacatgttccaaggaaagtaatgaagagttgaccgaaagctgtgagaccaaaaaacttggccaaagcctagattgcaacgctgaagtttatgtggtaccctgggagaaaaaaatttaccctactgtcaactgtcaaccactgggaatgatctcactgatgaaaaggcctccaggtttttcacctttccgatcatcacgaataggggaaataaaagaagaaacaactagtcacctaaggtcctgcgagtacaagggtcgacccccaaaggcaggggcagagccagcatctgagagggaggtctcttgaccaatgggcagaatcttcac

SEQ ID NO: 64989 - DNA, 1176 bp, Artificial Sequence
  derived and/or modified sequence
atgaagctgatcaccatcctcttcctgtgcagccggctgctgctgagcctgacccaggagagccagagcgaggagattgactgcaatgacaaggacctcttcaaggctgtggatgctgccctgaagaagtacaacagccagaaccagagcaacaaccagtttgtgctgtaccgcatcacagaggccaccaagacagtgggcagtgacaccttctacagcttcaagtatgagatcaaggagggggactgccctgtgcagagcggcaagacctggcaggactgtgagtacaaggatgctgccaaggccgccaccggggagtgcacagccaccgtgggcaagaggagcagcaccaagttctctgtggccacccagacctgccagatcaccccagctgagggccctgtggtgacagcccagtatgactgcctgggctgtgtgcaccccatcagcacccagagcccagacctggagcccatcctgcggcacggcatccagtacttcaacaacaacacccagcacagcagcctcttcatgctgaatgaggtgaagagggcccagaggcaggacaccggggagtgcacagacaatgcctacatcgacatccagctgagaattgccagcttcagccagaactgtgacatctacccaggcaaggactttgtgcagccccccaccaagatctgtgtgggctgcccccgggacatccccaccaacagccctgagctggaggagaccctgacccacaccatcaccaagctgaatgctgagaacaatgccaccttctacttcaagattgacaacgtgaagaaggcccgggtgcaggtggtggccggcaagaagtacttcatcgactttgtggcccgggagaccacctgcagcaaggagagcaatgaggagctgacagagagctgtgagaccaagaagctgggccagagcctggactgcaatgctgaggtgtatgtggtgccctgggagaagaagatctaccccaccgtgaactgccagcccctgggcatgatcagcctgatgaagaggcctcctggcttcagccccttccgcagcagcagaattggagagatcaaggaggagaccaccagccacctgcggagctgtgagtacaagggccggccccccaaggccggggctgagcccgccagcgagcgggaggtgtcctag

SEQ ID NO: 64990 - DNA, 1176 bp, Artificial Sequence
  derived and/or modified sequence
atgaagctgatcaccatcctgttcctgtgcagccggctgctgctgagccttacacaagagtctcagagtgaggagattgattgtaatgacaaagacctgtttaaagccgtagatgcagctctgaagaaatacaactcccagaaccagtccaacaatcagttcgttctgtaccggatcacggaagcgacgaagacagtgggtagtgacactttctactcgttcaagtacgagattaaggagggcgactgcccagttcagtccggcaagacttggcaagactgtgagtacaaagatgctgcaaaggctgccactggtgaatgcaccgcaacagttggtaaacgaagctccaccaaattttcagtggccactcagacgtgtcagataactccagcagaaggccctgtcgttacggcccagtacgactgtcttgggtgcgtgcacccaatcagtactcaaagccctgatctcgagcctatcttgcggcatgggatccagtactttaacaataatacacagcattccagccttttcatgctgaatgaggttaagcgagcccaaaggcaggacacaggtgagtgcaccgacaacgcctatattgacattcagttaagaatcgcctcttttagccagaattgcgacatctatcctggcaaggatttcgtgcagccccccactaaaatttgtgtcgggtgtccacgcgacattccaacgaatagccctgagctggaggaaactttgactcacacaataacaaaactgaacgcagagaacaatgcaacgttttacttcaagatcgataacgtcaaaaaggcgagggtgcaggtggtggcgggtaagaaatacttcattgatttcgtcgcccgcgagaccacatgctccaaggagtctaatgaggaattgaccgaaagctgcgagacaaagaagctcggccaatctctcgattgcaatgccgaggtttatgtggtaccttgggagaagaagatctacccgacagtaaattgtcaacccctgggaatgatttccctaatgaagcgccctccgggattttcaccctttagatcctcaagaatcggtgagattaaagaagagacaacctcccatcttcggtcttgcgaatataaaggccggcccccaaaggccggcgctgaacctgcgagcgaaagagaagtctcctag

SEQ ID NO: 64991 - DNA, 1176 bp, Artificial Sequence
  derived and/or modified sequence
atgaaactaattacaattttattcttatgtagtcgactcctcttgtcattgacccaggagagtcagtcagaagaaatcgattgtaacgacaaagatctgttcaaagcggtggacgcagccttaaagaagtacaattcccagaaccaatcaaacaaccagttcgtgctgtaccgaatcacagaggctactaaaacagtgggctcagacacattctactcatttaagtacgaaattaaggaaggcgattgccccgtccagagcgggaaaacatggcaggattgcgagtacaaagacgcagcaaaagctgccacgggggaatgtacagcgactgttggtaaacgctcaagtacaaaattttcagtagccacccagacttgtcagataacacctgcggagggacccgtggtgaccgcccagtacgactgcttgggctgcgtacatccgatctctactcagtcacccgacctcgaacctatactgcggcacggcatacagtacttcaataataatacccagcatagctccctgtttatgctcaatgaagtgaagagggcacagaggcaggacaccggcgagtgcactgataatgcttatattgatatccagctccgaatcgcttcattttcacagaactgtgacatttaccccggaaaagactttgtgcaaccaccaacaaaaatctgcgtgggatgtcctcgagatattcccacaaattcccccgaacttgaggagacattaacacatactatcactaagctcaacgctgagaataacgccaccttttatttcaagatcgataatgttaagaaagcacgtgtgcaggtggttgctggcaagaaatattttattgacttcgtggcacgggagacaacatgtagtaaagaatcaaatgaggagctgaccgagtcctgtgaaacaaagaagttgggtcagagtctcgactgcaacgccgaagtatacgtggtgccgtgggagaaaaagatttaccctaccgtcaattgccaacccctgggtatgatcagcctgatgaaacggccaccaggatttagccctttccgatcatctcggataggcgagatcaaggaagaaaccaccagccacctgcgcagctgtgagtataaagggaggccccctaaggccggagcggagccagcctcagaaagagaggtgtcctag

SEQ ID NO: 64992 - DNA, 1176 bp, Artificial Sequence
  derived and/or modified sequence
atgaagctgatcaccatcctgttcctgtgcagcagactgctgctgagcctgacccaggagagccagagcgaggagatcgactgcaacgacaaggacctgttcaaggccgtggacgccgccctgaagaagtacaacagccagaaccagagcaacaaccagttcgtgctgtacagaatcaccgaggccaccaagaccgtgggcagcgacaccttctacagcttcaagtacgagatcaaggagggcgactgccccgtgcagagcggcaagacctggcaggactgcgagtacaaggacgccgccaaggccgccaccggcgagtgcaccgccaccgtgggcaagagaagcagcaccaagttcagcgtggccacccagacctgccagatcacccccgccgagggccccgtggtgaccgcccagtacgactgcctgggctgcgtgcaccccatcagcacccagagccccgacctggagcccatcctgagacacggcatccagtacttcaacaacaacacccagcacagcagcctgttcatgctgaacgaggtgaagagagcccagagacaggacaccggcgagtgcaccgacaacgcctacatcgacatccagctgagaatcgccagcttcagccagaactgcgacatctaccccggcaaggacttcgtgcagccccccaccaagatctgcgtgggctgccccagagacatccccaccaacagccccgagctggaggagaccctgacccacaccatcaccaagctgaacgccgagaacaacgccaccttctacttcaagatcgacaacgtgaagaaggccagagtgcaggtggtggccggcaagaagtacttcatcgacttcgtggccagagagaccacctgcagcaaggagagcaacgaggagctgaccgagagctgcgagaccaagaagctgggccagagcctggactgcaacgccgaggtgtacgtggtgccctgggagaagaagatctaccccaccgtgaactgccagcccctgggcatgatcagcctgatgaagagaccccccggcttcagccccttcagaagcagcagaatcggcgagatcaaggaggagaccaccagccacctgagaagctgcgagtacaagggcagaccccccaaggccggcgccgagcccgccagcgagagagaggtgagctag

SEQ ID NO: 64993 - protein, 446 aa, Artificial Sequence
  derived and/or modified sequence
MTLKASEGESGGSMHTALSDLYLEHLLQKRSRPEAVSHPLNTVTEDMYTNGSPAPGSPAQVKGQEVRKVRLIQFEKVTEEPMGITLKLNEKQSCTVARILHGGMIHRQGSLHVGDEILEINGTNVTNHSVDQLQKAMKETKGMISLKVIPNQQSRLPALQEAGLKFATGDIIQIINKDDSNWWQGRVEGSSKESAGLIPSPELQEWRVASMAQSAPSEAPSCSPFGKKKKYKDKYLAKHSSIFDQLDVVSYEEVVRLPAFKRKTLVLIGASGVGRSHIKNALLSQNPEKFVYPVPYTTRPPRKSEEDGKEYHFISTEEMTRNISANEFLEFGSYQGNMFGTKFETVHQIHKQNKIAILDIEPQTLKIVRTAELSPFIVFIAPTDQGTQTEALQQLQKDSEAIRSQYAHYFDLSLVNNGVDETLKKLQEAFDQACSSPQWVPVSWVY

SEQ ID NO: 64994 - DNA, 1341 bp, Artificial Sequence
  derived and/or modified sequence
atgactctgaaagcttctgaaggcgagtctgggggctcaatgcacacagctctctctgatctgtatctggagcaccttctccagaagaggtcacggcctgaagccgtcagccacccactcaacaccgtgacagaggatatgtatactaatggttctcccgcaccagggagtccagcccaagtaaagggacaagaggtacggaaggttcgtcttatacagtttgagaaggtaactgaagaacccatgggtattaccttaaagctcaacgagaaacaatcctgcaccgtggccaggattctccacggcggaatgatacatagacagggttccctacacgttggtgacgagattctggaaatcaatggcactaacgtgacgaaccattccgtagaccagctccagaaggccatgaaagagaccaaaggaatgatcagcctaaaggttataccgaatcaacagagccgcctccccgctttgcaggaggctgggttaaagttcgcaactggcgatatcatacagatcatcaacaaagacgactctaactggtggcagggcagagtggaaggaagttccaaagagtctgccggattaatcccctctcctgaacttcaggagtggcgcgtcgcctccatggcccagagtgcaccttctgaagctccaagctgttctccttttggaaagaaaaagaaatacaaagataaatacctcgctaagcacagctccatatttgaccaactcgatgtagtgtcatacgaggaggtcgtgcgcctgcctgctttcaaacggaagaccttggtcttaatcggtgcgtccggagtcggacgcagccatataaaaaacgcgcttctgagccagaatcccgagaaatttgtctatcctgtcccctacacgaccagaccccccagaaaaagcgaggaggacggaaaggaataccatttcatctcaaccgaggagatgacacgtaatatctccgcaaatgaatttcttgagtttggttcatatcagggaaacatgtttggcactaagttcgagacagtgcaccagatacacaagcagaataaaatcgcgattcttgatattgaaccacagaccctgaagattgtgcgcacagccgagctaagtccattcattgtgtttatcgctcccaccgatcagggaactcaaacagaagctttgcagcagttacagaaagatagcgaagccatacgttcccagtacgctcattatttcgatctctccctggtgaacaatggagtggacgagaccttaaaaaaactgcaagaggcttttgatcaggcatgtagcagcccccagtgggtccccgtgagctgggtctactag

SEQ ID NO: 64995 - DNA, 1341 bp, Artificial Sequence
  derived and/or modified sequence
atgaccctgaaggccagcgagggggagagcggcggctccatgcacacagccctgagtgacctgtacctggagcacctgctgcagaagaggagcaggcctgaggccgtgagccaccccctgaacacagtgacagaggacatgtacaccaacggcagccctgcccctggcagccctgcccaggtgaagggccaggaggtgaggaaggtgcggctcatccagtttgagaaggtgacagaggagcccatgggcatcaccctgaagctgaatgagaagcagagctgcaccgtggcccgcatcctgcatggaggcatgatccaccggcagggcagcctgcacgtgggagatgagatcctggagatcaatggcaccaacgtgaccaaccacagcgtggaccagctgcagaaggccatgaaggagaccaagggcatgatcagcctgaaggtgatccccaaccagcagagccggctgcctgccctgcaggaggccggcctgaagtttgccaccggggacatcatccagatcatcaacaaggatgacagcaactggtggcagggccgggtggagggcagcagcaaggagagcgctggcctcatccccagccctgagctgcaggagtggagggtggcctccatggcccagagcgcccccagcgaggcccccagctgcagcccctttgggaagaagaagaagtacaaggacaagtacctggccaagcacagcagcatctttgaccagctggatgtggtgtcctatgaggaggtggtgcggctgcctgccttcaagaggaagaccctggtgctgattggagccagcggcgtgggccgcagccacatcaagaatgccctgctgagccagaaccctgagaagtttgtgtaccctgtgccctacaccacccggccccccaggaagtctgaggaggatggcaaggagtaccacttcatcagcacagaggagatgaccaggaacatcagcgccaatgagttcctggagtttggcagctaccagggcaacatgtttggcaccaagtttgaaacagtgcaccagatccacaagcagaacaagatcgccatcctggacatcgagccccagaccctgaagatcgtgaggacagctgagctgagccccttcatcgtgttcatcgcccccacagaccagggcacccagacagaggccctgcagcagctgcagaaggacagcgaggccatccgcagccagtatgcccactactttgacctgagcctggtgaacaatggagtggatgagaccctgaagaagctgcaggaggcctttgaccaggcctgcagcagcccccagtgggtgcctgtgtcctgggtgtactag

SEQ ID NO: 64996 - DNA, 1389 bp, Artificial Sequence
  derived and/or modified sequence
ttccagtgttccagcttctgcgagatgaccctcaaggcgagcgagggcgagagtgggggcagcatgcacacggcgctctccgacctctacctggagcatttgctgcagaagcgtagtcggccagaggctgtatcgcatccattgaatactgtgaccgaggacatgtacaccaacgggtctcctgccccaggtagccctgcccaggtcaagggacaggaggtgcggaaagtgcgactcatacagtttgagaaggtcacagaagagcccatgggaatcacgctgaagctgaatgaaaaacagtcctgtacggtggccagaattcttcatggtggcatgatccatagacaaggctcccttcacgtgggggatgagatcctagaaatcaatggcacaaatgtgacaaatcattcagtggatcagctgcagaaggcgatgaaagaaaccaaaggaatgatctcattaaaagtaattcccaaccagcaaagccgtcttcctgcactacaggaggcgggactgaagtttgctactggggacattatccagattatcaacaaggatgacagcaattggtggcagggacgggtggaaggctcctccaaggagtcagcaggattgatcccttcccctgagctgcaggaatggcgagtggcaagtatggctcagtcagctcctagcgaagccccgagctgcagtccctttgggaagaagaagaagtacaaagacaaatatctggccaagcacagctcgatttttgatcagttggatgttgtttcctacgaggaagtcgttcggctccctgcattcaagaggaagaccctggtgctgatcggagccagtggggtgggtcgcagccacattaagaatgccctgctcagccagaatccggagaagtttgtgtaccctgtcccatatacaacacggccgccaaggaagagtgaggaagatgggaaggagtaccactttatctcaacggaggagatgacgaggaacatctctgccaatgagttcttggagtttggcagctaccaaggcaacatgtttggcaccaaatttgaaacagtgcaccagatccataagcagaacaagattgccatccttgacattgagccccagaccctgaaaattgttcggacagcagaactttcgcctttcattgtgttcattgcacctactgaccagggcactcagacagaagccctgcagcagctgcagaaggactctgaggccatccgcagccagtacgctcactactttgacctctcactggtcaataatggtgttgatgaaacccttaagaaattacaagaagccttcgaccaagcgtgcagttctccacagtgggtgcctgtctcctgggtttactaagcttgtagaatgggggaacccact

SEQ ID NO: 64997 - DNA, 1341 bp, Artificial Sequence
  derived and/or modified sequence
atgaccctgaaggccagcgagggcgagagcggcggcagcatgcacacagccttaagcgacctctatctcgaacacctccttcagaaacgcagcagacctgaagcagtgtctcatcccctgaacaccgtgaccgaagatatgtacaccaatgggtctcccgctccaggctcaccggctcaagttaaggggcaggaagttcgaaaagtccggctgatccaattcgagaaggtcaccgaggagcccatgggcattaccttaaagctgaacgagaaacagtcttgcaccgtcgcgcggattcttcacgggggaatgattcatagacagggtagtttacatgtgggggatgagatactagagattaatggaactaacgtgaccaaccattcagttgaccagctccaaaaagcaatgaaagagaccaagggcatgatctctctgaaggtgatccctaaccagcagtcacgcttgcctgcccttcaagaggctggtctcaagtttgctactggggacatcatccaaataattaacaaggacgacagtaattggtggcaggggcgcgtggagggatcaagtaaggagtctgcaggtctgataccgtctccagaattgcaggagtggcgggtcgcctccatggcacagtccgcgccatctgaggccccttcctgtagcccctttggaaagaaaaagaagtataaagataagtacctggctaagcattcctcaatcttcgatcagcttgatgtcgtgtcctacgaggaagttgtgcggctccccgctttcaagaggaagactttggttttgatcggggcctctggcgtcggacgatcccatataaagaatgccctgctgagccaaaatcccgaaaaattcgtgtaccccgtcccctatactactagacctcccagaaaaagcgaagaagacgggaaagaatatcacttcatctccacagaagaaatgactcgcaacatctctgctaatgagtttctggagttcgggtcttaccagggtaatatgtttggaacgaagtttgaaaccgtgcaccaaatccataagcagaacaagattgcaatactggacatcgagccgcagacactgaagatagttcgtaccgccgaactatctccttttatcgtgttcatcgctccgaccgaccaagggacgcaaaccgaagctctgcagcagctgcagaaagattctgaggcaatcagatctcagtacgcccactatttcgacctgagtctggtgaataacggcgttgacgagactctgaaaaagctgcaggaggccttcgatcaagcctgctcatcccctcagtgggtccccgtgtcatgggtttactag

SEQ ID NO: 64998 - DNA, 1341 bp, Artificial Sequence
  derived and/or modified sequence
atgacactcaaggcctctgagggggaatcaggcggatcaatgcacacagctctgtctgatctgtatctggagcatttactgcagaagaggagtcggccagaggccgtgtctcaccctcttaatactgtcactgaggatatgtacaccaacggatcaccagcccctggaagccccgcacaggtaaaggggcaagaggtccggaaggtgagactgatacagtttgagaaagtgactgaggagcccatgggtatcacactgaagctgaatgagaaacagtcctgcaccgtcgcaagaatccttcatgggggtatgatccaccggcagggctctctgcatgtcggggatgaaattttggaaatcaatggaacgaacgtgaccaaccacagtgtggatcagctacaaaaggctatgaaggagacaaagggcatgatcagtctgaaggtcatacccaaccagcagtctagactaccggctctccaggaggcaggtttgaagttcgccacgggcgatatcattcagataataaataaggatgacagtaattggtggcagggccgagtggagggatctagtaaagagagtgctggtctaatacccagcccggagttgcaggaatggagagtggcctcaatggcacagagcgcccctagcgaagcaccatcctgctcaccttttggaaaaaagaaaaagtacaaagacaagtatctggccaaacactccagtatctttgaccagcttgatgtagtgagctacgaggaagttgtccgattacccgctttcaaacgtaagacgttggtactcatcggagcgtccggagtgggcagatctcatattaagaacgctctgctgtcccaaaaccccgaaaagtttgtctaccccgtcccatacaccactagacccccaagaaagtctgaagaggacggcaaagagtatcactttatctccaccgaggagatgacaagaaacatctccgccaatgagttcctggagttcgggagttatcagggtaatatgtttggcaccaaattcgaaacagttcatcagattcacaaacagaacaagatcgccatactcgacatagaaccccagacactgaaaattgtgcgtacggctgaattatctcccttcattgtgttcattgccccaaccgatcagggcacacagacggaggctctgcaacagctacagaaggactccgaggcaatcagaagccagtatgctcattatttcgacctgtcactcgtaaataacggcgtggatgaaaccctcaagaagctccaagaagctttcgaccaggcatgtagcagtccacagtgggtgcctgtctcctgggtatactag

SEQ ID NO: 64999 - DNA, 1341 bp, Artificial Sequence
  derived and/or modified sequence
atgaccctgaaggccagcgagggcgagagcggcggcagcatgcacaccgccctgagcgacctgtacctggagcacctgctgcagaagagaagcagacccgaggccgtgagccaccccctgaacaccgtgaccgaggacatgtacaccaacggcagccccgcccccggcagccccgcccaggtgaagggccaggaggtgagaaaggtgagactgatccagttcgagaaggtgaccgaggagcccatgggcatcaccctgaagctgaacgagaagcagagctgcaccgtggccagaatcctgcacggcggcatgatccacagacagggcagcctgcacgtgggcgacgagatcctggagatcaacggcaccaacgtgaccaaccacagcgtggaccagctgcagaaggccatgaaggagaccaagggcatgatcagcctgaaggtgatccccaaccagcagagcagactgcccgccctgcaggaggccggcctgaagttcgccaccggcgacatcatccagatcatcaacaaggacgacagcaactggtggcagggcagagtggagggcagcagcaaggagagcgccggcctgatccccagccccgagctgcaggagtggagagtggccagcatggcccagagcgcccccagcgaggcccccagctgcagccccttcggcaagaagaagaagtacaaggacaagtacctggccaagcacagcagcatcttcgaccagctggacgtggtgagctacgaggaggtggtgagactgcccgccttcaagagaaagaccctggtgctgatcggcgccagcggcgtgggcagaagccacatcaagaacgccctgctgagccagaaccccgagaagttcgtgtaccccgtgccctacaccaccagaccccccagaaagagcgaggaggacggcaaggagtaccacttcatcagcaccgaggagatgaccagaaacatcagcgccaacgagttcctggagttcggcagctaccagggcaacatgttcggcaccaagttcgagaccgtgcaccagatccacaagcagaacaagatcgccatcctggacatcgagccccagaccctgaagatcgtgagaaccgccgagctgagccccttcatcgtgttcatcgcccccaccgaccagggcacccagaccgaggccctgcagcagctgcagaaggacagcgaggccatcagaagccagtacgcccactacttcgacctgagcctggtgaacaacggcgtggacgagaccctgaagaagctgcaggaggccttcgaccaggcctgcagcagcccccagtgggtgcccgtgagctgggtgtactag

SEQ ID NO: 65000 - protein, 436 aa, Artificial Sequence
  derived and/or modified sequence
MESWAVSHPLNTVTEDMYTNGSPAPGSPAQVKGQEVRKVRLIQFEKVTEEPMGITLKLNEKQSCTVARILHGGMIHRQGSLHVGDEILEINGTNVTNHSVDQLQKAMKETKGMISLKVIPNQQSRLPALQMFMRAQFDYDPKKDNLIPCKEAGLKFATGDIIQIINKDDSNWWQGRVEGSSKESAGLIPSPELQEWRVASMAQSAPSEAPSCSPFGKKKKYKDKYLAKHSSIFDQLDVVSYEEVVRLPAFKRKTLVLIGASGVGRSHIKNALLSQNPEKFVYPVPYTTRPPRKSEEDGKEYHFISTEEMTRNISANEFLEFGSYQGNMFGTKFETVHQIHKQNKIAILDIEPQTLKIVRTAELSPFIVFIAPTDQGTQTEALQQLQKDSEAIRSQYAHYFDLSLVNNGVDETLKKLQEAFDQACSSPQWVPVSWVY

SEQ ID NO: 65001 - DNA, 1311 bp, Artificial Sequence
  derived and/or modified sequence
atggaaagttgggccgtgagtcacccccttaacacagtcacagaagatatgtataccaatgggtcacctgctccaggatctccagcacaagtgaaagggcaggaagtcaggaaggtaaggcttattcaatttgaaaaagtgaccgaggagcccatggggatcactcttaaactcaatgagaaacagtcctgtacagtagcacggatccttcatgggggaatgattcaccgtcaaggctcactgcacgtgggcgatgaaatcctcgaaattaatggtaccaacgttaccaaccactcggttgaccaacttcaaaaagcaatgaaggaaactaagggaatgatatcactgaaggtgatccctaatcagcagtcccgtctgccggctctacagatgttcatgagagcccagttcgattatgatcctaaaaaggacaatctcatcccgtgcaaggaagccggcctgaagtttgcaaccggggatatcattcaaattatcaacaaggacgatagcaattggtggcagggcagggtggaaggaagtagcaaagagagcgctggcctgattccgtcgcctgagctgcaagagtggagagtagcatcaatggcccagtccgctccctcagaggcacccagctgctcgcctttcggcaaaaaaaaaaaatataaagataagtatctcgctaaacacagcagcatatttgaccagcttgatgtggtgtcctacgaggaggtggttcgcttgccggctttcaaaaggaaaacgctggtgttaatcggggctagtggggtgggacgctcacatatcaagaacgctttgctcagccaaaaccccgaaaaattcgtgtatccggtgccttatacaactaggccccccagaaagagcgaggaagatgggaaagagtatcacttcatttccacagaggagatgactcggaatatcagcgctaatgaattcttagagttcgggtcttatcagggcaatatgttcggaacaaagtttgagacagttcaccagattcacaaacagaataaaattgcgatcctcgatatcgagccacaaactcttaaaatagtgcgtacagccgagctgtcgccattcatcgtgttcatcgcccccactgaccagggtacacaaaccgaggccctccaacagctacagaaggactccgaagccattcgctctcagtacgcccactatttcgatctctccctcgtgaataacggtgttgatgagacgcttaagaagctgcaagaggcgttcgatcaagcctgctcgtctcctcaatgggtccccgtttcttgggtgtattag

SEQ ID NO: 65002 - DNA, 1311 bp, Artificial Sequence
  derived and/or modified sequence
atggagagctgggccgtgagccaccccctgaacacagtgacagaggacatgtacaccaacggcagccctgcccctggcagccctgcccaggtgaagggccaggaggtgaggaaggtgcggctcatccagtttgagaaggtgacagaggagcccatgggcatcaccctgaagctgaatgagaagcagagctgcaccgtggcccgcatcctgcatggaggcatgatccaccggcagggcagcctgcacgtgggagatgagatcctggagatcaatggcaccaacgtgaccaaccacagcgtggaccagctgcagaaggccatgaaggagaccaagggcatgatcagcctgaaggtgatccccaaccagcagagccggctgcctgccctgcagatgttcatgagggcccagtttgattatgaccccaagaaggacaacctgatcccctgcaaggaggccggcctgaagtttgccaccggggacatcatccagatcatcaacaaggatgacagcaactggtggcagggccgggtggagggcagcagcaaggagagcgctggcctcatccccagccctgagctgcaggagtggagggtggcctccatggcccagagcgcccccagcgaggcccccagctgcagcccctttgggaagaagaagaagtacaaggacaagtacctggccaagcacagcagcatctttgaccagctggatgtggtgtcctatgaggaggtggtgcggctgcctgccttcaagaggaagaccctggtgctgattggagccagcggcgtgggccgcagccacatcaagaatgccctgctgagccagaaccctgagaagtttgtgtaccctgtgccctacaccacccggccccccaggaagtctgaggaggatggcaaggagtaccacttcatcagcacagaggagatgaccaggaacatcagcgccaatgagttcctggagtttggcagctaccagggcaacatgtttggcaccaagtttgaaacagtgcaccagatccacaagcagaacaagatcgccatcctggacatcgagccccagaccctgaagatcgtgaggacagctgagctgagccccttcatcgtgttcatcgcccccacagaccagggcacccagacagaggccctgcagcagctgcagaaggacagcgaggccatccgcagccagtatgcccactactttgacctgagcctggtgaacaatggagtggatgagaccctgaagaagctgcaggaggcctttgaccaggcctgcagcagcccccagtgggtgcctgtgtcctgggtgtactag
